United States Patent Application Publication US 2002/0048763 A1 - sequence listing, part 3

SEQ ID NO: 6275 - DNA, 456 bp, Homo sapiens
  MAP TO AC004506.1; EXPRESSED IN LUNG, SIGNAL =  11; EXPRESSED IN HELA, SIGNAL = 8.6; EXPRESSED IN BRAIN, SIGNAL = 5.7; EXPRESSED IN BONE MARROW, SIGNAL = 7.2; EXPRESSED IN ADULT LIVER, SIGNAL =  19; EXPRESSED IN PLACENTA, SIGNAL =  13; EXPRESSED IN HEART, SIGNAL =   8; EXPRESSED IN FETAL LIVER, SIGNAL = 7.2
cctgttctctatcatggcggatcaaggtgaaaaggagaaccccatgcagaaacttcacatctgcaagctctgcctcaacatctgtgtggaggagagtggagacagactaacccgagcagccaaggcattggagcagctcacagggcagagtcctgtgttttccagagctagatacaatcagatcctctggcatgcagagaaatgaaaagattgctgtccactgcacagttcaaggatccaaggcagaagaaatcctggagaaggatctaaaggtgcagaagtatgagttaagaaaaaataacttctcagatactagaaactttggttttgggatccaggaacacatcgatttgggtatcatatatgacccaagcattggtatctacggcctggacttctctgtggtgctgggtaggccaggtttcagcatcacagacaagaagcacaggacaggct

SEQ ID NO: 6276 - DNA, 452 bp, Homo sapiens
  MAP TO AC005827.3; EXPRESSED IN LUNG, SIGNAL = 1.9; EXPRESSED IN HELA, SIGNAL = 2.2; EXPRESSED IN BONE MARROW, SIGNAL = 1.9; EXPRESSED IN ADULT LIVER, SIGNAL = 1.9; EXPRESSED IN PLACENTA, SIGNAL = 1.9; EXPRESSED IN HEART, SIGNAL = 2.3; EXPRESSED IN FETAL LIVER, SIGNAL =   2; EXPRESSED IN BRAIN, SIGNAL = 2.4
gactctagttgtggggccagaatgcaaaaattggctttctagacccatatattttatttacaatgagatacatggtatcatatatgtgttcctaattttgaatgtttactgcatcctgtttctgagtgaatgatggacactataagatcagtgaatcccatgagtgtgacactttctgtaactttctttttatttaggctacaaaataaaatcctttggtcggaataaaaatattttgtgtgataccaagacagtgaataatgcattcaataagtctacagatggtggtactggcagaagcattgccagcaaagaaggcagacccaagtccatattatgcatctattccaggaagaaaaaaaattgctgccccctcaatgatggaaggagtccaatgtaatcaacttgccaccaggtggctggctggtcctcctggggaatgttgccatatt

SEQ ID NO: 6277 - DNA, 494 bp, Homo sapiens
  MAP TO AC005771.1; EXPRESSED IN BRAIN, SIGNAL = 1.4; EXPRESSED IN BONE MARROW, SIGNAL = 1.4; EXPRESSED IN ADULT LIVER, SIGNAL = 1.3; EXPRESSED IN HEART, SIGNAL = 1.5; EXPRESSED IN PLACENTA, SIGNAL = 1.4; EXPRESSED IN LUNG, SIGNAL = 1.3; EXPRESSED IN FETAL LIVER, SIGNAL = 1.5
tgggagaggaggagaagaagaagtaaataaaagaaaaaaggaagagctgaagtcagtacacccaaattattgtcctcaaatttactagttcgatgaatcatcttattacttctggtaaaatagtgattaaaggttagaaaaagacagaagtgtttatatcgggggaaacttcaggggctggaaagaactattcccccataattttcccccaggtttctgaggtcttaaccctttgtgtctagacattgcactcatcatcagtcaataagccgctacccactcagggaaggagagcagcatttttttttacaacagccttgtgtccaggttcttgtacttttccaataccagccatacctccactgggttgtctcctagacctacaagtggctgttttacattttgttcccagaagactctggaatgagtcacaataaaatgttaaataaatggactctaaggtggtattttacccaaagctgaaaattcatacc

SEQ ID NO: 6278 - DNA, 434 bp, Homo sapiens
  MAP TO AC004169.3; EXPRESSED IN PLACENTA, SIGNAL = 1.1; EXPRESSED IN LUNG, SIGNAL = 1.5; EXPRESSED IN FETAL LIVER, SIGNAL = 1.1; EXPRESSED IN BRAIN, SIGNAL = 1.1; EXPRESSED IN BONE MARROW, SIGNAL = 1.1; EXPRESSED IN ADULT LIVER, SIGNAL = 1.3; EXPRESSED IN HEART, SIGNAL = 1.9
cctctcttgagcctctgagcctggtgcactgcccaccaccacctcgctcagctcccacagcacagccaagtgggcacggtcccttgagggggcaccaaggagagggcgatgacggggtccagcatcccggcccccagccccgggaggctcctcctcagccagcccaggggttccgggtcccacttgctccaagtgggcactcacctccaggtgggtcgagcagaccccagccccacagaccaggcgactggcacccatatatcttaccttgctctcctttgtgtaggcgaggaccttgtcctcctccttagggtggaaaatcagagtttccacgaagaagggaatgggctgcttctgaaaggtggcgccttcgtctgcgctgaggaataggctctggtcccggtcactgagtgaggagctgacaaggatgacct

SEQ ID NO: 6279 - DNA, 453 bp, Homo sapiens
  MAP TO AC005877.2; EXPRESSED IN PLACENTA, SIGNAL = 1.4; EXPRESSED IN LUNG, SIGNAL = 1.4; EXPRESSED IN FETAL LIVER, SIGNAL = 1.8; EXPRESSED IN BONE MARROW, SIGNAL = 1.9; EXPRESSED IN BRAIN, SIGNAL = 1.8; EXPRESSED IN ADULT LIVER, SIGNAL = 1.7; EXPRESSED IN HEART, SIGNAL = 2.2
ccctcaggaagaatgagcacaccctggtgtgctcaggaaagttccacgaaattatcaatggcacctctttctgttattgagagatctccaatttggatgctgaatcatgtggtctgtccacccaatgccaggtctgaagcgatcgaggaaaatggcctttcgggatgtcaactttgtgtgctgcagccccagacccattggctggaaggagtaaccctggctttccacctgcttgttcctacctcttgtttctaccaagggaaacggagactccttcaaagtctccagcacctgcagatttggagtctgaagagaaagggtcagagacagaaacaaagccaccctggcctggcctgctggctgactgcagggaaagcccacatacacttgaggcagaagggaatggcaatgggcatgaaaatactgcccatacccaaactgtgttccctgagg

SEQ ID NO: 6280 - DNA, 464 bp, Homo sapiens
  MAP TO AC004061.1; EXPRESSED IN BONE MARROW, SIGNAL = 1.8; EXPRESSED IN PLACENTA, SIGNAL = 1.7; EXPRESSED IN LUNG, SIGNAL = 1.4; EXPRESSED IN HELA, SIGNAL = 1.9; EXPRESSED IN HEART, SIGNAL = 1.8; EXPRESSED IN FETAL LIVER, SIGNAL = 2.1; EXPRESSED IN BRAIN, SIGNAL = 1.8; EXPRESSED IN ADULT LIVER, SIGNAL = 1.8
gaaaaattcctgttgctgcctagtgacactgtagccatcgtaacgccatagcacgacacgttactcacctgttcatggtgatgctggtgtaaacaaacctgtgctgccaatcatacaaaagtatagcacaatgacaattatgtacagtttatcataattcttgataataaatgactatgttacaggtttatgtattgattccactttttgtcattattttggaatgtactcctactaattataaaaaagaaaaggttaactgtaaaaaagcctcaggcaggtcctttaggaggcattccagaagaagacattgttaccataggagatgacagctctatgtgtgttattgcccctgaagaccttctagtgggacaggatatggaggggaaagacagtgacattggtgatcctgaccctgtgtaggcctaggctaatgtgtgtgtgtcctcgtttttaacaagaaa

SEQ ID NO: 6281 - DNA, 468 bp, Homo sapiens
  MAP TO AC004519.1; EXPRESSED IN LUNG, SIGNAL = 1.6; EXPRESSED IN FETAL LIVER, SIGNAL = 1.5; EXPRESSED IN BONE MARROW, SIGNAL = 1.7; EXPRESSED IN PLACENTA, SIGNAL = 1.5; EXPRESSED IN HEART, SIGNAL = 1.7; EXPRESSED IN BRAIN, SIGNAL = 1.5; EXPRESSED IN ADULT LIVER, SIGNAL = 1.4
agcttgatctcacagcaattctaacatagataagacaggttttactctgtccattttcagacaagaaaagatttaaaggggttaatttgttgaaggtcacataaaccagtggcagggctcacatttgcattagattcttaaataccttcaatactgcttgtactataacaagacacaactttgcagctggaccaaaatgtaaacatcactcccccataagtagcaaacattggaaaacatttaccaagaaggctaaccatactctcttaatattaccatgtttttctattttaatgtcaatctcagaaagaggtgctttattaatttccatatttgtgtcttctatcaggctatgatctcctggagaatgatgacaatattctctgaatcctgttttatcaccagcatcttgcataattcctgacatataaaagataattaagaaatgcttgctggagtacttcatgg

SEQ ID NO: 6282 - DNA, 460 bp, Homo sapiens
  MAP TO AC005939.1; EXPRESSED IN LUNG, SIGNAL = 4.9; EXPRESSED IN PLACENTA, SIGNAL = 4.7; EXPRESSED IN HEART, SIGNAL = 4.5; EXPRESSED IN FETAL LIVER, SIGNAL = 4.4; EXPRESSED IN BRAIN, SIGNAL = 5.2; EXPRESSED IN BONE MARROW, SIGNAL = 5.1; EXPRESSED IN HELA, SIGNAL = 4.5; EXPRESSED IN ADULT LIVER, SIGNAL = 4.8
aataggtggtccagcacagcagggaggctgccccaagtatagagggagccaacacctggctccccagagcctgagagctgcctgcccagagctcaccattgccagccaccaaggccccaccctccagtggcagacctactacacaactgtgtgtgtggttgaaggtccaaggactggcttatctgggcccaccactgccaccaccagtattcacatatgtcacccagtgacctaaagatcaacttacctggagttctccaccaccgttgcctgcaaacctgccacctccagtggcaggaacattgcatgcccacacacactacccagaggctcaaggaccagcttctcagggcctgttgccacaccgccagtgcacatgcacaccacccaggggcacaagaagttggatgcctgggcattccattgcaccaccagcatgtgcatgaaccaaacagtggct

SEQ ID NO: 6283 - DNA, 493 bp, Homo sapiens
  MAP TO AC004064.1; EXPRESSED IN PLACENTA, SIGNAL =   2; EXPRESSED IN HELA, SIGNAL = 2.2; EXPRESSED IN BRAIN, SIGNAL =   2; EXPRESSED IN BONE MARROW, SIGNAL = 2.1; EXPRESSED IN ADULT LIVER, SIGNAL =   2; EXPRESSED IN HEART, SIGNAL = 2.3; EXPRESSED IN LUNG, SIGNAL = 1.5; EXPRESSED IN FETAL LIVER, SIGNAL = 2.6
tcaccaaatattactttttcctgttcttgaacttcagaggaatgtgatttcaataacttttaacaggcttttacacttacaaaagccttagtcttttccctctagcaggtggagggctcctactcccagtcctgcctacactgtacttatgaactcgatcattaagcacagtggttttgtataagtagccctggagcctggcccagcccagctcctcagccagggacatggcctcctcctcagcatgagtctcaccccacgctcccctccctatagggcttcggagacccagctggggagcactggctgggcaatgaagtggtgcaccagctcaccagaagggcagcctactctctgcgtgtggagctgcaagactgggaaggccacgaggcctatgcccagtacgaacatttccacctgggcagtgagaaccagctatacaggtgggttcggggcccaggccgttgtgggggctggggtcttcagctagtgg

SEQ ID NO: 6284 - DNA, 451 bp, Homo sapiens
  MAP TO AC004458.1; EXPRESSED IN PLACENTA, SIGNAL = 4.7; EXPRESSED IN HELA, SIGNAL = 2.4; EXPRESSED IN BRAIN, SIGNAL = 2.1; EXPRESSED IN BONE MARROW, SIGNAL = 1.9; EXPRESSED IN ADULT LIVER, SIGNAL = 2.2; EXPRESSED IN HEART, SIGNAL = 1.8; EXPRESSED IN LUNG, SIGNAL = 2.4; EXPRESSED IN FETAL LIVER, SIGNAL = 1.9
tgctgacctagaactcaccagttcttataactgaatccatctttttggtcattcctgacttcatcctgcagcttcactttcctgataaagtttctagttagttcaattaagtacctgttatgggcagataggagagacaccatcagcctgaattggatgtggcaaaagaggtggatcagtgaaacccttctacggccatggagcatgtatgtcctatcttctctgttcaaattcagggcctctttattttgtagctgtaccattgctgtagctcccactgatccccttgcttttgatctcatccctacaccttcctctccattctgtccagactgccaaaggacttttctaagattggctcttgttgccatgataatagcactaccgtgttcatgggtacagtacttagcagctttaaaaagtgcattcaagggcataagtgacgacgact

SEQ ID NO: 6285 - DNA, 475 bp, Homo sapiens
  MAP TO AC005702.1; EXPRESSED IN BONE MARROW, SIGNAL = 2.5; EXPRESSED IN PLACENTA, SIGNAL = 2.3; EXPRESSED IN LUNG, SIGNAL =   2; EXPRESSED IN HELA, SIGNAL = 2.4; EXPRESSED IN HEART, SIGNAL = 2.3; EXPRESSED IN FETAL LIVER, SIGNAL = 2.4; EXPRESSED IN BRAIN, SIGNAL = 2.5; EXPRESSED IN ADULT LIVER, SIGNAL =   2
tcacagataactgtcccaggccagcttatatattcgatgttcataacagcaaaatccataggctcctcgggtgtccatggcacataccaaaattatgggagcttcccctgggatttttttgagtgtccaaattgtaaaatataagaacagtaaattgattgagtagatgaatttttatttctaagtagaaatgtgcatgaaggcttctagctttatctgaaaataagtgagaatttcaaaggtagcagcatgacctgctaaagtaactgcagtgttttgttttgtgttacaggatgtcatatttgttgcagacgcagcaaatgcaatattgatgtcacttgaagacaagtctctgaatgttcgagccaaagcagcctggtccctgggcaacctgacagacactctgattgtcaacatgtaggtgactgagcttgctttccccagctgacttctgagattgagggcccaagagaat

SEQ ID NO: 6286 - DNA, 473 bp, Homo sapiens
  MAP TO AC004466.1; EXPRESSED IN LUNG, SIGNAL = 4.3; EXPRESSED IN FETAL LIVER, SIGNAL = 4.7; EXPRESSED IN BRAIN, SIGNAL =   5; EXPRESSED IN BONE MARROW, SIGNAL = 4.4; EXPRESSED IN PLACENTA, SIGNAL = 4.1; EXPRESSED IN HELA, SIGNAL = 4.4; EXPRESSED IN HEART, SIGNAL = 3.6; EXPRESSED IN ADULT LIVER, SIGNAL = 4.3
gatggacagagcatggacagggagcaaggccaggcagggacagggccaggtgcgcccatggaaggacctaggtctggatcctaaatgcacggagaagtcactggagggctttggggccaggcagtggtatcaccggtcagcagtcatagaggggtggcctagggggtgctgccgttgagtgtctgtgtgggtggggggtggtgggattgagcagtgaggggcccagctgagagctcctgtgccttcttctctatccccgtgcccacagatcgtcctggggtgcaggacgccgcgctgattgaggccatccaggaccgcctgtccaacacactgcagacgtacatccgctgccgccacccgcccccgggcagccacctgctctatgccaagatgatccagaagctagccgacctgcgcagcctcaatgaggagcactccaagcagtaccgctgcctctccttccagcctgagtg

SEQ ID NO: 6287 - DNA, 464 bp, Homo sapiens
  MAP TO AC005839.1; EXPRESSED IN LUNG, SIGNAL = 2.9; EXPRESSED IN BRAIN, SIGNAL = 3.5; EXPRESSED IN BONE MARROW, SIGNAL = 3.3; EXPRESSED IN PLACENTA, SIGNAL = 2.8; EXPRESSED IN HELA, SIGNAL = 3.2; EXPRESSED IN HEART, SIGNAL = 2.9; EXPRESSED IN FETAL LIVER, SIGNAL = 3.3; EXPRESSED IN ADULT LIVER, SIGNAL = 2.8
tgttacacgaagtgtagaacctggtacaacacactttgctggccagtctttcctgaaggctctcactgtttgcaccagcgtggccgggagggctggatgtggggagggcatttttcagccttaagtgaatggccattgtaggctttttcttttaacatggtctaatgtccatggagcttcagcttttatgctgctgtggctgtagatttctggcaatgggcgcattttaatccttctggtcttggtcatgtgactatctctttctccacccaggaacattatacatggcagtgattctgtggagagtgcagagaaggagatcggcttgtggtttcaccctgaggaactggtagattacacgagctgtgctcagaactggatctatgaatgacaggagggcagaccacattgcttttcacatccatttcccctccttcccatgggcagaggaccaggctgtagga

SEQ ID NO: 6288 - DNA, 483 bp, Homo sapiens
  MAP TO AC004134.1; EXPRESSED IN HELA, SIGNAL = 1.8; EXPRESSED IN FETAL LIVER, SIGNAL = 2.2; EXPRESSED IN BRAIN, SIGNAL =   2; EXPRESSED IN BONE MARROW, SIGNAL = 2.1; EXPRESSED IN ADULT LIVER, SIGNAL = 2.1; EXPRESSED IN PLACENTA, SIGNAL =   2; EXPRESSED IN HEART, SIGNAL = 2.4; EXPRESSED IN LUNG, SIGNAL = 2.2
ctgtgcatgggagacgtaagacgataaaagagattttagcagaagtaactgtatgaaaaacatacatttcttagaaatagttttgcatagtttattctaccacctaaaatattcctaaatccagagagaaaataccctggagatagcaatatctaccccagaagccactgaccttcctcaacagatttattctaatagcagactccagaacttactgcatcaggcaagactaccagaaagtagccaggaaaacagactgacctctgagcctcccgatcatctttagggttgtaattagacaggcagtccaggatgaaaatctggccccattcagtgcattcattcagggctgtcagcagcttattaatgttctgtgggttcagatcaagtaagttgctgtttgggtgagactcactgatttcagataatgccgctacggcattagccaccacctggaaaagaagggggtatgaccttgattca

SEQ ID NO: 6289 - DNA, 366 bp, Homo sapiens
  MAP TO AC005877.2; EXPRESSED IN PLACENTA, SIGNAL = 1.9; EXPRESSED IN LUNG, SIGNAL = 1.4; EXPRESSED IN FETAL LIVER, SIGNAL = 1.3; EXPRESSED IN BRAIN, SIGNAL = 1.6; EXPRESSED IN BONE MARROW, SIGNAL = 2.6; EXPRESSED IN ADULT LIVER, SIGNAL = 1.4; EXPRESSED IN HEART, SIGNAL = 1.6
tttggaaagcttgatcctggttaataaattctactaaatttcaatacattatatgcattgtaaatatggtcaaaataacttgcttattctgcttcataatccactttttagtaagtaggacacctaatatttattgatagccaaatttactattgatttcaaacttttcatccaatttatcttttcagttaatatatattttaaaaaacgaatcatgagaatacaatattacaaaaaaaaatcagacttactgtcatcctcccagcagttcttagcattcccttctctttcactgctcctccctggtaacactgtctggtctgttggcaggtcatcctctggtacaccttcacagtcagctgcatc

SEQ ID NO: 6290 - DNA, 473 bp, Homo sapiens
  MAP TO AC004470.1; EXPRESSED IN PLACENTA, SIGNAL = 2.1; EXPRESSED IN LUNG, SIGNAL = 1.9; EXPRESSED IN FETAL LIVER, SIGNAL = 2.8; EXPRESSED IN BONE MARROW, SIGNAL = 1.9; EXPRESSED IN HELA, SIGNAL = 2.5; EXPRESSED IN BRAIN, SIGNAL = 2.4; EXPRESSED IN ADULT LIVER, SIGNAL = 2.1; EXPRESSED IN HEART, SIGNAL = 1.9
aaagttaccagtgacagacaggcacattatataatgttaaaagggtcaatccactaaggcacagcaatcctacgtgtgtatgaaccaaataaatgagctgcaaattatgtgaagaaaaatctgacaaaactgaaaggagaaataaagaaatcacaataacagttggcgcctttaacacccttctctcaataattgataaaacaagtagacagagaatcaacaagaatacagaaaacctcagatacaccatcaaccaacaagatgtaattgacatttatggaacacttcacccctacgacagcatcatacacatttttttcagtgcccacagaacacatactaggatatatcatgtcccaagccatgaaaacaacctcaacaaattcaaaagaattgaaatcatacagaacgtgttctccaacaatgaatgaaactggaaatcaataacagagaaatagcaagaaaatccccaa

SEQ ID NO: 6291 - DNA, 429 bp, Homo sapiens
  MAP TO AC005969.4; EXPRESSED IN PLACENTA, SIGNAL = 2.6; EXPRESSED IN LUNG, SIGNAL = 2.6; EXPRESSED IN HEART, SIGNAL = 2.5; EXPRESSED IN FETAL LIVER, SIGNAL = 2.4; EXPRESSED IN BONE MARROW, SIGNAL = 2.5; EXPRESSED IN ADULT LIVER, SIGNAL = 2.4; EXPRESSED IN HELA, SIGNAL = 2.4; EXPRESSED IN BRAIN, SIGNAL = 2.6
aagaagaagagtttcgaggcagaataatatatatatttagagaaataatggctgaaaatttttcaagtttgatagaaactataagcccacaggtccaagaagcttaataaaaacgcaagcaaaatacacacaacagcacactgtaatccaatccaaagtcgctaaaagaaaggggaacattacagagataggacaatagcatattttttcttcagaactatgcaaatcagaaaacaatgaaaagccgtctttaacaaaagaaaaaacctgtcaatttagaattcttgatcaagtgggacaatctcttaaaaatgaagatagtgaagtcttttcagaaaaagaaaagttgaaagaactcattgctagcaaacgtgcactactaatattaaagaaagttcttcaggtagaaggaaaatgataccagatgga

SEQ ID NO: 6292 - DNA, 467 bp, Homo sapiens
  MAP TO AC005881.2; EXPRESSED IN LUNG, SIGNAL = 1.2; EXPRESSED IN BRAIN, SIGNAL = 1.4; EXPRESSED IN BONE MARROW, SIGNAL = 1.3; EXPRESSED IN PLACENTA, SIGNAL = 1.2; EXPRESSED IN HEART, SIGNAL = 1.5; EXPRESSED IN FETAL LIVER, SIGNAL = 1.3; EXPRESSED IN ADULT LIVER, SIGNAL = 1.2
tgatttaaagtgatacatgccaagatgacaaatgctggactgtggaggttttgtaatgtgttgatctgattaggctgaactacatttcccataattcccttccctatgtttccagttaagggtgtgccacaagagatgtacttgtgtgagatttggaggacagagtggaggagcaactatatcaagagtattgttttttgtgctcagaggctggggaaaggtctccaggtgcttttgtggcccatgcatattgttattttatctgctggcttatctccttggtgtggggcaggaagcaggctgcagctgttccatctttcgctgggtcttccctcagcttcactgactcctcatctgactgtgtatcctcaaccagatgtgtgtttatctctgtgacaaagagcaccgggttctcctgcaggatacccacatcatgaaggttggagacagagagagcctgagatggg

SEQ ID NO: 6293 - DNA, 474 bp, Homo sapiens
  MAP TO AC004149.1; EXPRESSED IN PLACENTA, SIGNAL = 2.5; EXPRESSED IN LUNG, SIGNAL =   3; EXPRESSED IN FETAL LIVER, SIGNAL = 2.5; EXPRESSED IN HELA, SIGNAL = 2.4; EXPRESSED IN BRAIN, SIGNAL = 2.3; EXPRESSED IN BONE MARROW, SIGNAL = 2.9; EXPRESSED IN ADULT LIVER, SIGNAL = 2.5; EXPRESSED IN HEART, SIGNAL = 2.6
atccatttcacgtgtcctccaaatcctggctgatcctgtttcattctcttgctggacaccctttctggggcccaggagtgctgggacacagacatggtccccatcaccagagaatcctagaactctcagtggaagaaaccccaaaggtaactggtccagtctcctgcatttggatggactagacagaaattcatgctcagagcacctaggcacagagagggtgagtaacttccccagggtcacacagtaaaggaatgatcagctgctcctgagccacctacctgaactctcctttctccgcctggatgatttcttctctgtctcattggcagtgctcccaagcaccccgtagtcatcgcctgggcctcctgtggtgtccaccaggcccaggctgctggtccccatttccttggaaccccctgccgggcctgagttgggcctgcgccgggcgtctgagacagggaagtgccagtt

SEQ ID NO: 6294 - DNA, 456 bp, Homo sapiens
  MAP TO AC005899.1; EXPRESSED IN HELA, SIGNAL = 1.7; EXPRESSED IN FETAL LIVER, SIGNAL = 1.4; EXPRESSED IN BRAIN, SIGNAL = 1.8; EXPRESSED IN BONE MARROW, SIGNAL = 1.6; EXPRESSED IN ADULT LIVER, SIGNAL = 1.6; EXPRESSED IN PLACENTA, SIGNAL = 1.4; EXPRESSED IN HEART, SIGNAL = 1.8; EXPRESSED IN LUNG, SIGNAL = 1.6
aagctcataggactgttggctctaatattgtccttaggaagcagaaaacttcaaagaggtgtgtttttctcttggaagatagcacattagtggaaaatttaattattgcatggggtctagaggtaaccttttttgagttcaggaatttttttttttttttaatcctgagtgttatgagggtgggagagtgagctattattaggtattaagctgatggctataaaggagaatgtcttttcctttttcaggttctcagctgctgcgggagttgaaaaagatggacgacaaagctcttttggtggaagtacagcttttagaaagcaaaacataccatgccctgagcaacctgccgaaagcccgagctgccttaacttctgctcgaaccacagcaaatgccatctactgcccccctaaattgcaggccaccttggacatgcagtcgggtaacagacgtag

SEQ ID NO: 6295 - DNA, 461 bp, Homo sapiens
  MAP TO AC004503.1; EXPRESSED IN PLACENTA, SIGNAL = 1.7; EXPRESSED IN LUNG, SIGNAL = 1.3; EXPRESSED IN FETAL LIVER, SIGNAL = 2.3; EXPRESSED IN ADULT LIVER, SIGNAL = 2.5; EXPRESSED IN HELA, SIGNAL = 1.7; EXPRESSED IN HEART, SIGNAL = 1.9; EXPRESSED IN BRAIN, SIGNAL = 1.4; EXPRESSED IN BONE MARROW, SIGNAL = 1.3
ggaagctttctccttaaccccttagaaaaggctgtggaacttgagctaaaatatgtcttaccaggttgcgtctaatgccccccgttccctactgggcagaaagacttgggtgcttcctgaggagggatccttggcagaagagaggcctgggctcacgagggctgagaacatgtttcccagagttgcaaggacccatctcttaaacacagagtctgcagcccctaactgacaccctgtccttcctcctaggaagtgctggactccctggtcagcaatgtcaacattgagctgctcaatgccctccgctaccatatggtgggcaggcgagtcctgactgatgagctgaaacacggcatgaccctcacctctatgtaccagaattccaacatccagatccaccactatcctaatggggtaggggatccccagccatactgcatggcccttggtgcataatgaac

SEQ ID NO: 6296 - DNA, 494 bp, Homo sapiens
  MAP TO AC005906.1; EXPRESSED IN LUNG, SIGNAL = 2.6; EXPRESSED IN FETAL LIVER, SIGNAL = 2.3; EXPRESSED IN BONE MARROW, SIGNAL = 2.5; EXPRESSED IN PLACENTA, SIGNAL = 2.4; EXPRESSED IN HELA, SIGNAL = 2.6; EXPRESSED IN HEART, SIGNAL = 2.6; EXPRESSED IN BRAIN, SIGNAL = 2.7; EXPRESSED IN ADULT LIVER, SIGNAL = 2.2
gagtgacgagacaggatctgctgagcaggtcagcttgcagcctaggtgatagccagttcaagggacagagtgaccatcaacatgagaggcctggggagttgagaggagggttcatggggcaggagggttcatggggcaggagggtggggaagacctacagtaataaagacacagatttatatgtgacccttctttcacactgcttctgaaggtctcctctttcaggaatcctggctcaaataagtgcgccaggcttagatcaatccccaaaaccattaagtgcaattatatttctctgtggcatttatagctggttctttagattttgtccttgatttttatatgtgtggctccctatacaggcaggtgtagcatgcccacatcagtcagtgagtttcctgagggtagaatctgtctcatttctatccccaccacactacctaggattgacgggcttgttctgagacttgagatccctgtaggaggcagaagtg

SEQ ID NO: 6297 - DNA, 472 bp, Homo sapiens
  MAP TO AC004514.1; EXPRESSED IN PLACENTA, SIGNAL = 3.4; EXPRESSED IN HEART, SIGNAL = 3.8; EXPRESSED IN FETAL LIVER, SIGNAL = 3.5; EXPRESSED IN BRAIN, SIGNAL = 3.6; EXPRESSED IN BONE MARROW, SIGNAL = 3.4; EXPRESSED IN ADULT LIVER, SIGNAL = 3.2; EXPRESSED IN HELA, SIGNAL = 3.6; EXPRESSED IN LUNG, SIGNAL = 3.2
gaagttcatgtggagggctgaattgcaccatatggcttccagttctgtacctagacccaatagagtgcattaagaaagccatttggccagtgtcctcttgtgcccggttatagaggggcgtatggtatattatcccatgtcggagtaattatgagtttccttgtgttgatctttgtctctctcaaagttttcgtttttggcacaaaggaaatttcagcaggcatttcttgttacacttctgttcttttgcatctttctttactactcacatctgtagaagctaagttgaagctcgtgacacagttatttcttatgaaaactacaattttaaaagagaaaaaagaaagaatagatcttggggatttaggaattcacagttgtaaaggagctgtttcgggtaagtatttacttttcttgccattggggaaggaatgtggcaaatggaaagagacccagagggcattgaatagga

SEQ ID NO: 6298 - DNA, 464 bp, Homo sapiens
  MAP TO AC005912.1; EXPRESSED IN PLACENTA, SIGNAL =  10; EXPRESSED IN LUNG, SIGNAL =  11; EXPRESSED IN FETAL LIVER, SIGNAL =  10; EXPRESSED IN HELA, SIGNAL =  11; EXPRESSED IN BRAIN, SIGNAL =  12; EXPRESSED IN BONE MARROW, SIGNAL =  11; EXPRESSED IN ADULT LIVER, SIGNAL =  10; EXPRESSED IN HEART, SIGNAL =  10
cacagtgccacaaagtcaccaactgaaatccttcagacactaacctggggagagggtagtactagatcatgcctctgactgagataactcccaaaacacaggggtagggggaggaagaagaagataaagatgaggaagaaaggcagaagcgggaggaggcagaaaggagaagagagagtgcatggaacagagcccagtgccatccccatatgccaccctgtcaccccggtccaacctcagtccctctcagggcccgaggcccttcctcagggcaggctgctgtgcccatcatggccattcaccgggctgctccccgggcctggcagccaacagtcacccgaaagccaagctctgcatacctctggcgctccgtcacaggaccaggaaagggttctggtgtcatggacactgcaccctgagccagccaacctgagatgggtgatatctgtggctgctgagaagct

SEQ ID NO: 6299 - DNA, 410 bp, Homo sapiens
  MAP TO AC004222.1; EXPRESSED IN PLACENTA, SIGNAL = 3.2; EXPRESSED IN LUNG, SIGNAL = 6.3; EXPRESSED IN HEART, SIGNAL = 4.1; EXPRESSED IN FETAL LIVER, SIGNAL = 5.6; EXPRESSED IN BONE MARROW, SIGNAL = 3.1; EXPRESSED IN ADULT LIVER, SIGNAL = 3.5; EXPRESSED IN HELA, SIGNAL = 3.7; EXPRESSED IN BRAIN, SIGNAL = 3.5
catttcaggccctaattgccacattattttaaacccaagtctgtatatttatgcttatttaagaaaatggtgttttcttcatattctcagtccatttaggctgatgaacacagtaacaacaaaagcaagtcctatgaacttatcaacgaagagtcagaactttaatgttagcaattatctttgacataatacttatgctagaaaattcatttaattttcttaaagtttgtagtagagaaagaataagcatgttaccttaagatcaaccaccatggactgaacaagtaggaaaatgacagagttatcttcccaattgatgtaagtacttgctttacacagtttgacacaggcaattgcagcactttctgtcagctgcctacttcctccatggccagcaagagcttttcgta

SEQ ID NO: 6300 - DNA, 469 bp, Homo sapiens
  MAP TO AC005922.1; EXPRESSED IN PLACENTA, SIGNAL = 3.7; EXPRESSED IN LUNG, SIGNAL = 3.1; EXPRESSED IN FETAL LIVER, SIGNAL = 3.2; EXPRESSED IN BONE MARROW, SIGNAL =   3; EXPRESSED IN ADULT LIVER, SIGNAL = 2.9; EXPRESSED IN HELA, SIGNAL = 2.9; EXPRESSED IN HEART, SIGNAL = 3.1; EXPRESSED IN BRAIN, SIGNAL = 3.6
ttttgtgatggtcttcaccctctttctcctctatggcctgtctttggtgagttggttaatttcatctaagtcttttattctctttctctctctctactgccaataatttatcactaattctggtctcacctcttttgttctctttgtagtatttgcatgaaacagtgtctaggggtggaaaaatataaaatatacttttataatataaaattccttttttgtgctactgttctcacagaattatataccagctgaagtctttctcttttctcagataactttagctttcctgatgagtgtgttgataaagaaacctttccttacgggcttggttgtgtttctccttattgtcttttgggggatcctgggattcccagcattgtatacacgtcttcctgcatttttggaatggactttgtgtcttcttagcccctttgccttcactgttgggatggcccaggtaagagtt

SEQ ID NO: 6301 - DNA, 498 bp, Homo sapiens
  MAP TO AC005895.1; EXPRESSED IN PLACENTA, SIGNAL = 1.9; EXPRESSED IN LUNG, SIGNAL =   2; EXPRESSED IN HELA, SIGNAL = 2.1; EXPRESSED IN FETAL LIVER, SIGNAL = 2.1; EXPRESSED IN ADULT LIVER, SIGNAL = 1.8; EXPRESSED IN HEART, SIGNAL =   2; EXPRESSED IN BRAIN, SIGNAL = 2.6; EXPRESSED IN BONE MARROW, SIGNAL = 2.1
ctccctgggccagttctccagcctagggcccctggctgtctggaaaatcagccctctcttcaaaggtgaggcctcagtggtccccagggagggaagggctcagggtctgggggaggcagggaggttgcccccagaacccctgccagctccaggcagaggtggaagtgaagcccagatagctgccagctccccagaagccactccacccggctggcagagagcttggcctgggcagcccagcagcctctccccacaccaggcgccggcgcagccatgctgctcatcgtgggcttggtggccatctactacaacatgatcatcgcctacgtgctcttctacctcttcgcctccctcaccagcgacctaccctgggagcactgtggcaactggtggaacacagaactctgcctggagcacagagtctccaaggacggcaacggggccctgcccctcaacctcacctgcaccgtcagccccagcgaggagtactggaggtca

SEQ ID NO: 6302 - DNA, 484 bp, Homo sapiens
  MAP TO AC005295.1; EXPRESSED IN BRAIN, SIGNAL =  38; EXPRESSED IN ADULT LIVER, SIGNAL =  36; EXPRESSED IN HELA, SIGNAL =  34; EXPRESSED IN HEART, SIGNAL =  26; EXPRESSED IN BONE MARROW, SIGNAL =  36; EXPRESSED IN PLACENTA, SIGNAL =  36; EXPRESSED IN LUNG, SIGNAL =  45; EXPRESSED IN FETAL LIVER, SIGNAL =  29
gaacctcccaccttagcctcctgagtagctggcattgcaggcacacaccactatgcccggctaatgattttatttattgtagaacctgtcttcctatgttgcccaagctagtctaaagcacctgggctaaaagatcctcccatcttggcctcccgaagtgctaggatgacaggcatgagccatcgcgtccggccccatctcctctttaagatgcgatggttgcttacctttcaatataggaaacagcttcctttagcataagactcgctgttttctccagaaccatgggttgctccgtgacgtcatggtttctcatcaggatacagttccagcgtcgcacaaacccgaaggaggagtaccaagagatgaaaaacaggcagcccacgccggccatgccggtgactgctctcgcggagacagagaagaaaccgcaggtctggccggcagccagggtgagaatccccagcgccaggaactgggtgta

SEQ ID NO: 6303 - DNA, 457 bp, Homo sapiens
  MAP TO AC005516.1; EXPRESSED IN BRAIN, SIGNAL = 2.5; EXPRESSED IN HEART, SIGNAL = 2.2; EXPRESSED IN BONE MARROW, SIGNAL = 3.1; EXPRESSED IN ADULT LIVER, SIGNAL =   3; EXPRESSED IN PLACENTA, SIGNAL = 2.2; EXPRESSED IN LUNG, SIGNAL = 2.7; EXPRESSED IN HELA, SIGNAL = 2.4; EXPRESSED IN FETAL LIVER, SIGNAL = 2.6
gagagatggatacatggtgggtattactggttacagctttagagtgcatggaaatatttcctattaagctccaattttaattgtagcaatgataaaatgtccactaagtgaagaaatggttccacagaagattatgctcaccctcacagctgtacaagctaacttgcaagtaacagaagactcatccttcagtgttttccgcagcaaaggaatgcaatccgccaaagaaaatgtatttcctaaccagaagaacaagcaacaaacatcatcatctaaacttaaaccttagtaagcataactagaaaaaacacagctgaaaaactggccgttacctgtgagggttctaatggtgcccatccaatctcccacgtggaagcgggacctgctgaggatggagcagatgagggtcccacagagaatggcagtggctcctcgaacctgtgggtctccatgatcg

SEQ ID NO: 6304 - DNA, 462 bp, Homo sapiens
  MAP TO AC005323.1; EXPRESSED IN LUNG, SIGNAL = 5.3; EXPRESSED IN BRAIN, SIGNAL = 4.6; EXPRESSED IN HEART, SIGNAL =  19; EXPRESSED IN BONE MARROW, SIGNAL = 5.4; EXPRESSED IN ADULT LIVER, SIGNAL = 3.5; EXPRESSED IN PLACENTA, SIGNAL = 5.4; EXPRESSED IN HELA, SIGNAL = 4.1; EXPRESSED IN FETAL LIVER, SIGNAL = 4.1
cctgaaaagggcagacacagtctggaaagaagagccctttttcttagcacctttcttcgcgctgctatctgaggtaaaaagaaaacccgtgaataagaatagaataccagaggcttatatgaacatgtattataacattatgtgagaatggatttaatttagattaaggacacagaaagtacctgcttcagcactagcatacgtggaaaagagactggctagagtcttcattgcagacttctggtacagcccaaccacagtatcattcagggggtccttatttttgtccagccagccagtaatgttgtagtccacagtgccagcatagtgaatcagagagaagtgggcctcagccttgcctttgaccaccttgggcttctggaagttggcagacttgcccaggtgctggtcatacagcttgttcttgaaggaggtgtccgttgccttagggaacatgcactc

SEQ ID NO: 6305 - DNA, 486 bp, Homo sapiens
  MAP TO AC004103.1; EXPRESSED IN PLACENTA, SIGNAL =   2; EXPRESSED IN HELA, SIGNAL = 1.6; EXPRESSED IN HEART, SIGNAL =   2; EXPRESSED IN FETAL LIVER, SIGNAL = 1.9; EXPRESSED IN LUNG, SIGNAL = 1.7; EXPRESSED IN BRAIN, SIGNAL =   2; EXPRESSED IN BONE MARROW, SIGNAL = 2.2; EXPRESSED IN ADULT LIVER, SIGNAL = 1.9
gaagggcacagatgaggttctccagtataacaattttgctttacatcttgggaaagtatgaaatagggcatcagatgttttgtaataatattgtaatagtataaggaattggtgggccctgtcctacatgaaaatttccaagacatctcctctctgggtaactaaaatctccctaagcagaggccttccagagaaatagttattaaaacacaaagcaatgaaggactgctttaaactgagagcaccatctgcaaatagctcaccaaaccatttaattcggatgactagcattttatgaacatgaactgtgggtcttcccatgaccgtggctataccaatggtgaggtttggcaaaatgtttttgagttttccagcaggattgatagcattaattcccatcaggaagactttctcctgtggattttattgtttgtttttaaaatttaaatcttttttttttaatctggaatttacttctggatgtgg

SEQ ID NO: 6306 - DNA, 453 bp, Homo sapiens
  MAP TO AC005332.1; EXPRESSED IN LUNG, SIGNAL =  15; EXPRESSED IN BRAIN, SIGNAL =  15; EXPRESSED IN ADULT LIVER, SIGNAL =  13; EXPRESSED IN PLACENTA, SIGNAL =  13; EXPRESSED IN BONE MARROW, SIGNAL =  14; EXPRESSED IN FETAL LIVER, SIGNAL =  14; EXPRESSED IN HEART, SIGNAL =  14; EXPRESSED IN HELA, SIGNAL =  14
gttctacaaggcgagccaactggtcagtgagaaggtcggaggggctgaggggaccaagctggatgatgacttcgaagagatggagaaggtggatgtcatcagcaaggcggtgacgtaagtactgtccaggaccatcgagtacccgcagcccaacccagcctcgcaggctaaactgaccatgctcaacaccgcgtgcaagatccggggccaggtgaagaaccccggctacctgcagtcaggggggctcctgggcgagtgcctgatccgccatgggaaggagctgcgcgacgagtccaacttcagcgatgcactgctggatgccggcgagcccatgaagcacctggcagaggtgaaggactccctggacatagaggtcaagcataacttcattgaccccctccagaacctatgtgagaaagacctgaaggagatccagcaccacctgcagaagct

SEQ ID NO: 6307 - DNA, 474 bp, Homo sapiens
  MAP TO AC005988.1; EXPRESSED IN HEART, SIGNAL = 6.1; EXPRESSED IN BRAIN, SIGNAL = 7.7; EXPRESSED IN ADULT LIVER, SIGNAL = 7.9; EXPRESSED IN PLACENTA, SIGNAL = 8.1; EXPRESSED IN BONE MARROW, SIGNAL = 7.9; EXPRESSED IN FETAL LIVER, SIGNAL = 8.6; EXPRESSED IN LUNG, SIGNAL = 7.8; EXPRESSED IN HELA, SIGNAL =   7
tctcagtgtggatgggcaccatctaatcggctggggcctggatagaacaaaaaggcaggggacaggcaaatttgctttctttcccctggaggtgggacaccacctttcttctgcccttggacatcagaacttcaggctttctggtcttcggactctgagacttgcaccagcagcctcccaggttctcaggcctttgacctcagaatgagagtagcgctgtaggtcttccctggttctgaggctttcagagttgggctgaggcacagtgctgttatacctgagtccacagcttgcaggcggcctgttgtgggaattcttagtctccataatcatgtgagccaattccggcagcaaatcccctctcatatatgtatatatcacctcccatttctctctctctggagaaccctaatagaaaattgaagcagaattaaaatatacccacaaaaagaaacaggcccacatggttttact

SEQ ID NO: 6308 - DNA, 463 bp, Homo sapiens
  MAP TO AC006097.1; EXPRESSED IN LUNG, SIGNAL =   3; EXPRESSED IN FETAL LIVER, SIGNAL = 3.4; EXPRESSED IN BONE MARROW, SIGNAL = 2.7; EXPRESSED IN HELA, SIGNAL = 2.4; EXPRESSED IN HEART, SIGNAL = 5.1; EXPRESSED IN BRAIN, SIGNAL = 2.9; EXPRESSED IN PLACENTA, SIGNAL = 3.5; EXPRESSED IN ADULT LIVER, SIGNAL = 2.9
tcctatggggtgtagatcattctccaattttatcagatggggaaactgaggctcatggagaaactcagtaacaggcccatggccacacagataggtctatttgaatccaaagcctgtgcctctaacccactcttgagcctcctgctgagaatgccctgggatggccccatatgtgaggctggtcctgggggaggtaggcacccatgatctgcctctgctcctctgacttgcagttccggtacaaagaggctttcctgcgggaccgaggcctgcagatcgggtactgcagtgtcgacgatgacccaaggatgaagcatttcctcaacgttggcaggctccagagtgacaatgagtacaagaaggactttgccaagagtcggtcccagtttcacagcagcacagaccagcccggcctccttcaggccaagaggagccagcagctggccagtgatgtgcactacag

SEQ ID NO: 6309 - DNA, 469 bp, Homo sapiens
  MAP TO AC006137.1; EXPRESSED IN ADULT LIVER, SIGNAL = 4.2; EXPRESSED IN HELA, SIGNAL = 4.4; EXPRESSED IN HEART, SIGNAL = 3.6; EXPRESSED IN FETAL LIVER, SIGNAL = 4.2; EXPRESSED IN BRAIN, SIGNAL = 4.7; EXPRESSED IN BONE MARROW, SIGNAL = 4.4; EXPRESSED IN PLACENTA, SIGNAL = 4.5; EXPRESSED IN LUNG, SIGNAL = 4.8
gagaattggttgccagcagcctttgggggcggagaataaggcgcagattataaataggtcaaagagaggtgcctgcgagccgcgcagtgacaccccgttcctaagggcagagcttttcttgcctttcgcttcagacccactgcacttggttacgtgcttttcctccgctgtccgcttcgtttatctgctttaacccagcctgggctaggtaggcctgaagcctataatgttgcttggctgttgctcaggagaagaaaggcccaggtggccagtttggcaactggcacagtccctgtgagcacccacctgctgatggtccttctgtcactacgtagtcgctccgacgccaggaaagtgcggtggtggccattttggaactgggcaactttcacttcgccaatcatcttggggtctggccaccacagtacttttttttcattattattctggcagagaacacgttatggag

SEQ ID NO: 6310 - DNA, 467 bp, Homo sapiens
  MAP TO AC005297.1; EXPRESSED IN PLACENTA, SIGNAL = 2.7; EXPRESSED IN LUNG, SIGNAL = 2.8; EXPRESSED IN HEART, SIGNAL = 2.2; EXPRESSED IN BRAIN, SIGNAL = 2.6; EXPRESSED IN FETAL LIVER, SIGNAL = 2.5; EXPRESSED IN BONE MARROW, SIGNAL = 2.6; EXPRESSED IN ADULT LIVER, SIGNAL = 2.2; EXPRESSED IN HELA, SIGNAL = 2.2
gaaagaaaaacagaagagccaagattgacaaaaatttttggaatgaggaactgaaacaacagagtttctatttatcgggacaagaagagtgaaagaaaaacacgttggagggggaggagacaggtaattagttgggtatagtcaactaatttgatgaaaaatatttgggatagaaatgcactgctctttttttcttagtaaggaaaagtgaaatcaattagaatattcagaaaaaataaaatgatgttacaaagcagtcgtagtttaaatgtgtaagaaactaaaatgaaatatgactttaagtgtttctgggactccagaacaaggggcaggcaagatggccaaagagaaggcttcaaccatcatgcccaccataggaacaccaaatttgacaactacctacaaacaaaaaagcaccctcataagaaccaaaaatcaggtgaatcaggtgggcatttacagtaact

SEQ ID NO: 6311 - DNA, 475 bp, Homo sapiens
  MAP TO AC006019.2; EXPRESSED IN HEART, SIGNAL = 1.4; EXPRESSED IN BONE MARROW, SIGNAL = 1.8; EXPRESSED IN ADULT LIVER, SIGNAL = 1.7; EXPRESSED IN HELA, SIGNAL = 1.8; EXPRESSED IN FETAL LIVER, SIGNAL = 1.8; EXPRESSED IN BRAIN, SIGNAL = 1.9; EXPRESSED IN PLACENTA, SIGNAL = 1.7; EXPRESSED IN LUNG, SIGNAL = 1.7
gcacatttacaaacaatgacaccaatttatattgcaatctacttctcctcattgagagttctttggtttaatcatgaataaattagcaagggtgatgccataaaactcaggggtgtaaaatcttacatcttggtgcattgcaacttttaccaaataataaataacatctcgacaaatttttaaatgcttactttctgagcagtctgtgcctggctaaaaatgaaacaattcaaaccaaaccgaactaaccttactctggataatgtgaccatactataaatttattttataagtagcctcttttttttccttttatctcacagcttcattcaaattaaatgattcaactagaactttctcagtatctacttctggggccatctcagtgcaacgtgctctacaggataaagagatggagaagacatcaacatttcttgcttcaagagtttacaaatcacttgcctggttttcctca

SEQ ID NO: 6312 - DNA, 492 bp, Homo sapiens
  MAP TO AC004605.1; EXPRESSED IN HEART, SIGNAL = 1.4; EXPRESSED IN ADULT LIVER, SIGNAL = 1.1; EXPRESSED IN PLACENTA, SIGNAL = 1.3; EXPRESSED IN FETAL LIVER, SIGNAL = 1.1; EXPRESSED IN BRAIN, SIGNAL = 1.3; EXPRESSED IN BONE MARROW, SIGNAL = 1.1; EXPRESSED IN LUNG, SIGNAL = 1.3
ttgaactcctctaaccttatttttcctttcaataataataagcaaccttaggtgcgttgtgaagatgaagtgagatatacggtatgaaagtccgcggtgtttggcatggggaggttgcctggtaattggtaacttctagcttcattatgatgtaggtgacctctcatctctctcttctgatccagtttgtgctgtttttcaagtttaactttcaggagctcatcttatttatcttgattccagattgcagggagaggctcctccgtgctcctgagaggccgaacacagggtcgccagcacagcttactgctcggtgtctcctgagccacagaggaagacgtggcaggagcacctggtgctaatatatattcatgtctatggcaatgccgaccatctggctggtctgaaccaggataaaagtgaagacttcctctgtgaagacccagctctttctttggctccttttttgaagccatctttgctctgctctcc

SEQ ID NO: 6313 - DNA, 458 bp, Homo sapiens
  MAP TO AC001237.1; EXPRESSED IN LUNG, SIGNAL = 1.4; EXPRESSED IN FETAL LIVER, SIGNAL = 1.2; EXPRESSED IN BRAIN, SIGNAL = 1.5; EXPRESSED IN BONE MARROW, SIGNAL = 1.2; EXPRESSED IN ADULT LIVER, SIGNAL = 1.3; EXPRESSED IN PLACENTA, SIGNAL = 1.2; EXPRESSED IN HEART, SIGNAL = 1.6
tctagagagggtccggcagggagggtcggcgccctggcccggggtgggccggagccctgtgatgctgcatcgcccccaggaggagccagctgtgccccagagttggcgcggccgagagaggacaagagcgcgcagcaggcgaagctggagggcgggactcggtaagtggcgttcgtcggggtgtcctgctgcgcccccaggggctccggctgaccacgactgtgtgtttttcctgccttagactttgttgtcgctgcccggaggagtcgagactggtacccggaggagctgtctcaccaggagaccacgtcctggaagtgtccgggactcgcgggacctgtggctgcagaccccgccggcacgcaggcccagagctggcgcactcctgaggatgagactctgggggccctagccggggtccacgggagggctgtccttggggactctaggatggcttc

SEQ ID NO: 6314 - DNA, 478 bp, Homo sapiens
  MAP TO AC006070.1; EXPRESSED IN BONE MARROW, SIGNAL = 3.7; EXPRESSED IN ADULT LIVER, SIGNAL = 3.1; EXPRESSED IN HELA, SIGNAL = 3.5; EXPRESSED IN HEART, SIGNAL = 2.9; EXPRESSED IN FETAL LIVER, SIGNAL = 3.5; EXPRESSED IN BRAIN, SIGNAL = 2.9; EXPRESSED IN PLACENTA, SIGNAL = 3.1; EXPRESSED IN LUNG, SIGNAL =   4
ggtttgacagcatgttgggtggcagcaaggctggcagcagctggacccacagcaggtgggctggcaagaggtgttcctgcagcaggtgggctggcagcaggtaggctggcagcaggtggtcctgaagcagatagtttgatagcaagtcgggtgacagcaaggctgacagcaactggacccacaaataggctgacagcagctggacccacagctggtttggccacagcagctggacccacagcaggtgggctggcagcagggtgtgctgcagcaggaaggctggcagcagctggccacacaagtgggctggcagcaggtggtcctgcagcaggtgttttgacagcaagttgggtggcagcaaggctggcagcagctgggcacacagcaggagggctggcaacagggtgtgctgctgcaggtggtcacagtggtgggcttccagcaggttgtcctgcagcaggtggtcctgcagcatgta

SEQ ID NO: 6315 - DNA, 449 bp, Homo sapiens
  MAP TO AC005878.2; EXPRESSED IN BRAIN, SIGNAL = 8.7; EXPRESSED IN PLACENTA, SIGNAL = 8.2; EXPRESSED IN LUNG, SIGNAL = 8.7; EXPRESSED IN HEART, SIGNAL = 7.7; EXPRESSED IN BONE MARROW, SIGNAL = 7.2; EXPRESSED IN ADULT LIVER, SIGNAL = 8.4; EXPRESSED IN HELA, SIGNAL = 7.4; EXPRESSED IN FETAL LIVER, SIGNAL = 8.1
tcctcctcttcctcctcctcctgttctcctcctcctgttttccttctcctgttctcctcctcctcttctccctctcctcctcttcctcctcctcctgttctctttctcctccttcttcttttccttctattcttcctcctccttctcccccttctccccttcttcctccttctcctcctccttctccctttctttctccttatattctcctttttcttctttttgttcaaggtttccaaagcagaatcagctttggtaactctgagctggtgtgctgtgacttataggagaacatacacgtctcactccaaaggggtgtcagaagctgtggaagtggatgaatgggaagtttgctttgaagaagctaattgtcaagattcatttgctattcaggttctcctcttgctggcctgggcagtgtataatttgtcccagtaaggagctgttca

SEQ ID NO: 6316 - DNA, 476 bp, Homo sapiens
  MAP TO AC005529.7; EXPRESSED IN PLACENTA, SIGNAL = 8.2; EXPRESSED IN ADULT LIVER, SIGNAL = 7.3; EXPRESSED IN LUNG, SIGNAL =   9; EXPRESSED IN HEART, SIGNAL = 7.1; EXPRESSED IN FETAL LIVER, SIGNAL = 7.1; EXPRESSED IN BRAIN, SIGNAL = 8.3; EXPRESSED IN HELA, SIGNAL =   9; EXPRESSED IN BONE MARROW, SIGNAL = 5.6
tttaatcctaaccacggccctgtgatcattatcccaattttaatgatgaggaaacattcatagcatttaagtgaccagcccaagctcccatggcctgtgagtggccaagtagagacgtgaaccccaggcctcaaaccctagatcgcacaccaagcagcttgtgggccacagagcacctgagccgtgtctcactgtctgcccaagccctgatgcatgataccctcttgccggcagagtggaatacatggaaaagagcaagcatctgcaggagcagctcaatgaactcaagacagaaatcgaggccttgaaactgaaagagagggagacagctctggatattctgcacaatgagaactccgacaggggtggcagcagcaagcacaataccattaaaaaggtacccagggtctctttcttgtattttgctgatcaggaccatcattaatgaaatgtgcggttggcatctggtttcctca

SEQ ID NO: 6317 - DNA, 467 bp, Homo sapiens
  MAP TO AC006078.1; EXPRESSED IN BRAIN, SIGNAL = 1.9; EXPRESSED IN ADULT LIVER, SIGNAL = 1.5; EXPRESSED IN LUNG, SIGNAL = 1.9; EXPRESSED IN FETAL LIVER, SIGNAL = 1.7; EXPRESSED IN BONE MARROW, SIGNAL = 1.9; EXPRESSED IN HEART, SIGNAL = 1.7; EXPRESSED IN HELA, SIGNAL = 1.8; EXPRESSED IN PLACENTA, SIGNAL = 1.5
agcccctcctggctgtaggccgggtcccccactgccccccaggatatgaggggctccccaggcctttgcacacccaattccctctccagaaatgcctttcctccctcaaaggtcctcacagggggaacagtagtaacctctctgagagggttgttatgaggattgattaacaactggaaagttctcagaagtgtgcctgccccttcataagccgtcggtaaatgttagctattattttattaaccataccaaccagagtgagccgttccttttctgagccctggccctcctcatggtcaccagccagcagcttctgaaatgcacctctgttccatggacccaaagttgctttaaccattttggacacatggaccagcaggggcgcggctatttctgtgcaaggcttgggcactgggcagaaccccaaccctccatgctattaacacagaggagaaccccagcttcat

SEQ ID NO: 6318 - DNA, 458 bp, Homo sapiens
  MAP TO AC004253.1; EXPRESSED IN BONE MARROW, SIGNAL =   2; EXPRESSED IN PLACENTA, SIGNAL =   2; EXPRESSED IN LUNG, SIGNAL = 2.3; EXPRESSED IN HELA, SIGNAL = 2.2; EXPRESSED IN FETAL LIVER, SIGNAL = 2.3; EXPRESSED IN ADULT LIVER, SIGNAL = 2.4; EXPRESSED IN HEART, SIGNAL = 1.9; EXPRESSED IN BRAIN, SIGNAL = 2.1
tgacttgaggcctgtgtgacccaatcacatcactggaaaacaccctcatctcccctgtgctgctctggaagagtcatcaccggcctggacagagtctccactgtgacatttgggagtttattctagatatttctcatatttgaaaatacaaagcccgttgttatcaaattggcccaaggcttccaagacgaagaagcatttaatcctggggctgcttctataaatgtaacaattatcccaagtcatgtaagtgtcttggagaagtaatagtaatgatgatgatgatgatgatgatgatgatgatgatgatgatgatgatgatgataagagccaatattcattgagtgtgccggtctcacagtgttttacttgtttcaactcctttgatcctcctaactgcctggagaggcaagaattattatcgccctcattttaccaagattgaaagagaagcatca

SEQ ID NO: 6319 - DNA, 470 bp, Homo sapiens
  MAP TO AC005900.1; EXPRESSED IN PLACENTA, SIGNAL = 2.4; EXPRESSED IN LUNG, SIGNAL = 2.1; EXPRESSED IN HEART, SIGNAL =   2; EXPRESSED IN FETAL LIVER, SIGNAL =   2; EXPRESSED IN BRAIN, SIGNAL = 1.9; EXPRESSED IN BONE MARROW, SIGNAL = 2.1; EXPRESSED IN ADULT LIVER, SIGNAL = 1.9; EXPRESSED IN HELA, SIGNAL = 1.8
gaaaaagttcaccagagggcctatgtgtagatagaccctcttcttattgtaaacttcatttgctatattctgagactttgttatctggagctttaagcttatttcagcatggaaacctttacttctataatttatttgatgacgacttttaaaagggagttttcattgaataaattttgtttactctgcccatttacattactgaaagtcccagttcacattagattgagtttttatagtatttgcttaagaatccatgatggtgatgatgataataatgacgacgatgacaatgtgacttcatttagatctttccatgtaataggtcttctttcactgttgtatgttgtgttctgggacagcacagggttgctggtttcaacagcatctgagctaaagagagcagcaacaaatcactgcaagacctgcagcgaacaggtgccaagtaaccaggtgtaaatgggatcctt

SEQ ID NO: 6320 - DNA, 496 bp, Homo sapiens
  MAP TO AC004382.1; EXPRESSED IN BONE MARROW, SIGNAL = 8.6; EXPRESSED IN PLACENTA, SIGNAL = 8.5; EXPRESSED IN LUNG, SIGNAL =  11; EXPRESSED IN HELA, SIGNAL = 8.8; EXPRESSED IN HEART, SIGNAL =   8; EXPRESSED IN FETAL LIVER, SIGNAL = 8.9; EXPRESSED IN ADULT LIVER, SIGNAL =  11; EXPRESSED IN BRAIN, SIGNAL = 8.8
gatagtggtgaggtggagggcgtgaggctggaatgcattaaacgaatgggaggtggagcagggggtggtgagaggacagctttccacagggcagaaacagcacatgcaaaggctgggaggctgggaaggctgggaggctgggaggctgagaaagctttcacgctgcacacgtgaaagtcttgctgcttgttctcatccagggaagcggagctcagaccttacccagggcctccccatttcccctccactcagcccttctcctgctgcccttccaggatgaaaacaactcatctctgctgaataactacgtcctgggggcccagctgagtcatgggcacgtgaacaacctcagggatcctgtgaacatcagcttctggcacaaccaaagcctggtactgctgggggcgcccccgtttccactgcacccctgcccctctgtgactctcctgttgaacactggtttgactagacccaaacctgtggaaccatcttggaa

SEQ ID NO: 6321 - DNA, 455 bp, Homo sapiens
  MAP TO AC005906.1; EXPRESSED IN HELA, SIGNAL = 2.9; EXPRESSED IN HEART, SIGNAL = 4.3; EXPRESSED IN BONE MARROW, SIGNAL = 3.4; EXPRESSED IN PLACENTA, SIGNAL =   3; EXPRESSED IN LUNG, SIGNAL = 4.8; EXPRESSED IN FETAL LIVER, SIGNAL = 3.3; EXPRESSED IN BRAIN, SIGNAL = 3.2; EXPRESSED IN ADULT LIVER, SIGNAL = 3.3
aaatgaagagctcagtcccggcctcatttcttattttgcccctagatgctcccagctcttgatgcatcgtggggaccatgcaggggacaggctgcacccctgtggccactggcagccttctcctctccaatcaagctgataagagagctaattgtaagaatcgctcacaggtgccttggccggcactcctgccagcctcatggatgcaataatgggtctttgtgcagtgtgggccattactaacaaggataactaaatcattcatttcattaacaacggggtttggcagataattgtgcaagaggcaattctcagcgatgcatgttccaggaaggagtgtggtcggctgattttcaacagagctgccaggagaaatatgagacaaggttgaaaccaccactgggccctcaaccccaggatagccactcttaaaagcctgtggccttatggcttta

SEQ ID NO: 6322 - DNA, 438 bp, Homo sapiens
  MAP TO AC006101.2; EXPRESSED IN LUNG, SIGNAL = 2.6; EXPRESSED IN BRAIN, SIGNAL = 2.2; EXPRESSED IN HELA, SIGNAL = 2.5; EXPRESSED IN FETAL LIVER, SIGNAL = 2.3; EXPRESSED IN ADULT LIVER, SIGNAL = 2.2; EXPRESSED IN BONE MARROW, SIGNAL = 2.2; EXPRESSED IN HEART, SIGNAL = 2.2; EXPRESSED IN PLACENTA, SIGNAL = 2.1
aacgtgcactgaacttgctgcccggacgttcctccattgccccaggtgggggagtgtccagggctgaggctgggcgcttcccgtctcccggcgccgaagactggggtgggggcgatccaggaacgcacgcgaggctgcgcagtctccctccactgggttatctgaaccggcaaaccccgccggggagggctggggacaccgccgctccctttcaattctgcaccctgccacttccctaaactccccgcacaggccggcccgaagaagcggaaggagggatgccggcgggggtcactcaccgcgatcacgaccgtgtcttctccctgaaacttggcgatgtacttgtcgccgcggttcacttcagactcgttgagaggtctgaagcgacacatcactttgatgttgcactcggccaggtccgccatctttctcgcagcc

SEQ ID NO: 6323 - DNA, 479 bp, Homo sapiens
  MAP TO AC006010.2; EXPRESSED IN LUNG, SIGNAL = 5.3; EXPRESSED IN FETAL LIVER, SIGNAL = 4.5; EXPRESSED IN BRAIN, SIGNAL = 4.7; EXPRESSED IN ADULT LIVER, SIGNAL =   5; EXPRESSED IN PLACENTA, SIGNAL = 4.6; EXPRESSED IN BONE MARROW, SIGNAL = 4.1; EXPRESSED IN HEART, SIGNAL = 3.7; EXPRESSED IN HELA, SIGNAL = 4.9
cactttccactctcctccccatgtaactcaatctgttttgtttttaggctgttttcaaaatagagaaaaaagaaaatttactcttgttttttttaaacgtagagttacattttcaactttatttttaaatcataattaggttcttaaaatgtttagttatcctactttcttaaaatgcaagtgctatagcaaaagataaatatattcaactattttaggatatatacaaccttaagttatctgtgaaagccagatgagttctggagacattggtatgcaagatcatgcccctgagactatttgttttccaaagctccttcatagcatccagtcctcaaacaacaaacattcttttgctattgaaactggttcagaacagaacagaaagaacaaggcttgctggttgaagcattggaggtaagccgaccatttgcttcacaaagcaaagcttcaccctacctcttcaaggcgctttcatc

SEQ ID NO: 6324 - DNA, 460 bp, Homo sapiens
  MAP TO AC005912.1; EXPRESSED IN LUNG, SIGNAL = 2.7; EXPRESSED IN BRAIN, SIGNAL = 2.8; EXPRESSED IN PLACENTA, SIGNAL = 2.9; EXPRESSED IN HEART, SIGNAL = 2.6; EXPRESSED IN FETAL LIVER, SIGNAL = 3.5; EXPRESSED IN BONE MARROW, SIGNAL = 2.8; EXPRESSED IN ADULT LIVER, SIGNAL = 2.9; EXPRESSED IN HELA, SIGNAL = 2.7
cctctttcatttctgctgtgcatcaccttcttttctgctttgtagaccctatgtctgaaaacagagataaaccacctcccaggactgttttgataatagaaagcaaaaactcatacgaaagcaccttaggaaagagaaagctcatctaaatacagagcaggccaccgtttccttccttccctttcctctcatcagggactttgcacctaatgaacggtccagcctcagtaccactggtctatcccaaaggacctctatagcttggccttctaagtgggtcccctcctgctggccctcctgccccaccctccagatcaggaactggggtgaaggagtggcctcctccctgcaaagaggagagaacagagagagctgcctaatcaattggagagggaaatccagcctctacattaatgacagcaggtgagtctctaatatccacaggcagtaactcacacca

SEQ ID NO: 6325 - DNA, 446 bp, Homo sapiens
  MAP TO AC004414.1; EXPRESSED IN PLACENTA, SIGNAL =   5; EXPRESSED IN HELA, SIGNAL = 4.9; EXPRESSED IN HEART, SIGNAL = 4.8; EXPRESSED IN FETAL LIVER, SIGNAL = 4.9; EXPRESSED IN ADULT LIVER, SIGNAL = 5.6; EXPRESSED IN LUNG, SIGNAL = 5.7; EXPRESSED IN BRAIN, SIGNAL = 5.7; EXPRESSED IN BONE MARROW, SIGNAL = 4.9
gtggtgcctggtgtggtctgccagctctcagctgggtgggaaagtggtgctgaatggccccacctctgctctgggttttgccccacaggtcgctgcaggcctgcccctgggctgtgctgagtcatctccgcaggcaggacctccccaggcaggcacaaggcactgggaggtgccgccccttgggcccaggccagtggagttttaattgctgctcctctattgttggctctggttccgcttctggaaggtttccagcctttgctcctgggctttggtctcttcagggagcctccagctgcctctttgtcatcagtgaagccactgagacctcctcttggccctccccctcctcctcctcctcctcctcctcctcatctttgctggataatgaggacttcagatcttgtttctgaagagagaggctgagctgacttctgaagggtgga

SEQ ID NO: 6326 - DNA, 361 bp, Homo sapiens
  MAP TO AC006015.2; EXPRESSED IN LUNG, SIGNAL =  90; EXPRESSED IN BRAIN, SIGNAL =  13; EXPRESSED IN HELA, SIGNAL =  14; EXPRESSED IN ADULT LIVER, SIGNAL =  11; EXPRESSED IN BONE MARROW, SIGNAL =  13; EXPRESSED IN FETAL LIVER, SIGNAL =  12; EXPRESSED IN HEART, SIGNAL =  11; EXPRESSED IN PLACENTA, SIGNAL =  13
ggcctcaggttacttgggagactgaggctggaggctcacatgagcccagggaggttagggctgcaatgagctttaatcacgccactgcactccagcttgggtgactgagaccccatctcaaaaaaaacaaaaacaaaaacaaaactcacagaagcaggcctttctgatgaaagccacagctcatctctgccaggaagcccccgccccagcctctcatctgttttgttttgcagacagagctgctaccctggaggaagggaacccaacagacgaagtccccagtacccccttagccctggagccgagcagcaccccaggttccaagaagagccccccagagcctgtggacaagcgagccaag

SEQ ID NO: 6327 - DNA, 470 bp, Homo sapiens
  MAP TO AC006142.1; EXPRESSED IN LUNG, SIGNAL = 7.3; EXPRESSED IN BRAIN, SIGNAL =  11; EXPRESSED IN ADULT LIVER, SIGNAL =  12; EXPRESSED IN BONE MARROW, SIGNAL = 8.5; EXPRESSED IN FETAL LIVER, SIGNAL =  19; EXPRESSED IN HEART, SIGNAL = 6.4; EXPRESSED IN HELA, SIGNAL = 8.6; EXPRESSED IN PLACENTA, SIGNAL = 8.5
tgtccccagcacatacacacagaagccttttattcttcactgtattgacagccagtgcttacggacagactgaaagaaaagggtaccagatgtctgccccctagcccatttgcttatttgctctcggatctgttgactggctgtcctctcttagggttacatcacaggggcctgccacctacggctttcatacatctttgcctgctagcttctgcttagtctagccaatacataggaggcactggtagacgggggccgcggggaagaggaggatgtcgggatgtttctccctgacttttctcactagaggtagcatctgcagtgatggcagtacctctacaatggtctcagctcctccaagcaatgcctgctccacactgtcagctccagcctgctggcgcatcttcccctgcggtaatctctgcgtttcctcaccttcccttgtcttcagctcctgaaacagctcatca

SEQ ID NO: 6328 - DNA, 447 bp, Homo sapiens
  MAP TO AC006097.1; EXPRESSED IN BONE MARROW, SIGNAL =   2; EXPRESSED IN PLACENTA, SIGNAL = 1.7; EXPRESSED IN LUNG, SIGNAL = 2.2; EXPRESSED IN HELA, SIGNAL =   2; EXPRESSED IN FETAL LIVER, SIGNAL = 1.8; EXPRESSED IN ADULT LIVER, SIGNAL = 2.1; EXPRESSED IN HEART, SIGNAL = 6.7; EXPRESSED IN BRAIN, SIGNAL =   2
gagttttctggcagctgaggtgaaaagggaaataataggtaatactattttctttcactgatgaaagaaaatgtatcggatgctcaaaaaggcaaactttcatatgattctaattctaataggattctgtccaatggctttgtttcagctcccatgcatggagtctgaagcctaacaattcctttaggaggttctaatgtatccctgctctattcctcttatttaggtgaagtacaaggaggattatgagagatccagagggaagctcattggggcaaaagatgtacagggagattcgcaaatgagccactcactgcaaatgtccaagctgcagagtgagctggagtacaagaagggattcgaggacaccaaatcccaatgccacgtctccctggacatggtccacctcgtgcatgcccgcaaagctcagcatttagccacagacgt

SEQ ID NO: 6329 - DNA, 381 bp, Homo sapiens
  MAP TO AC004554.1; EXPRESSED IN PLACENTA, SIGNAL =   4; EXPRESSED IN LUNG, SIGNAL = 4.7; EXPRESSED IN HELA, SIGNAL = 4.5; EXPRESSED IN HEART, SIGNAL =   4; EXPRESSED IN FETAL LIVER, SIGNAL = 4.1; EXPRESSED IN BRAIN, SIGNAL = 4.3; EXPRESSED IN ADULT LIVER, SIGNAL = 3.8; EXPRESSED IN BONE MARROW, SIGNAL = 4.6
tcttgctctgccttaggctcctattccagttaagttagttctcatggtataactctcctactctcagaccttccctttattatagcacttaccaaagtggtaagcatatgggattcattagtgcaattatgcatgttcaatccctaacatccctaagaccctaagtttcatgaagcaagagtcatcactgattggtttcccttgtaatcctagtgctagaatgactcatctcacgtaagaataaaggctcgatcgataaccataattcacctcttaacctcagtctcctcatctggaacttggctcttcaggtctctgacagctgtcgccttctgtgtctcagagaccttggacttatcctcaggcatcagtgggaagttc

SEQ ID NO: 6330 - DNA, 468 bp, Homo sapiens
  MAP TO AC006004.1; EXPRESSED IN PLACENTA, SIGNAL = 1.8; EXPRESSED IN HELA, SIGNAL = 2.3; EXPRESSED IN HEART, SIGNAL =   2; EXPRESSED IN FETAL LIVER, SIGNAL = 1.9; EXPRESSED IN BRAIN, SIGNAL =   2; EXPRESSED IN ADULT LIVER, SIGNAL =   2; EXPRESSED IN LUNG, SIGNAL = 2.1; EXPRESSED IN BONE MARROW, SIGNAL =   2
gagtgagacatgtggaaaagaagatacgggtagttaaggctgagggagtggcacagaatgaatcaactagcaagttaatgaatgaccaaaaatgctggtctatgtagtactagacagaggatcacaaatatcttgtttcaagtcattcttgagagttctggccatctgtatcaaaaacttttgtttggtcataataacaatcattgattcagtaacaatgactaagaaccaaccatgtactaggggctggatatgcccagggtatcatgatgaaaataaaaaccagtctctgcctttgtggggagactgacattacagatctgcacagtggaggtcatattgcacctgtactcatcctggaggatggtagtgctctcaaggtaatagaagccaacggaaatgtgacttcagtagtgatctgagggagaacttctccagggaggtgatggctggttgagctttggaaag

SEQ ID NO: 6331 - DNA, 407 bp, Homo sapiens
  MAP TO AC005922.1; EXPRESSED IN FETAL LIVER, SIGNAL = 1.4; EXPRESSED IN BONE MARROW, SIGNAL = 1.4; EXPRESSED IN ADULT LIVER, SIGNAL = 1.4; EXPRESSED IN PLACENTA, SIGNAL = 1.7; EXPRESSED IN LUNG, SIGNAL = 1.5; EXPRESSED IN HEART, SIGNAL = 1.7; EXPRESSED IN BRAIN, SIGNAL = 1.7
ctgcttggcacttgagagagagcaaaagactaaaggtagatacatatgacccatctcattttagaaacaaggaagtggggcaaagtatgattcaaatgtttggttattgattataatttatttctgttattatattcattataccttcaaacttaaaaacccacaaaagttgctaaaattatttttttcttttacattttcctctgcatagattattgctttttggtattagctttatccctcaacttttggaacatctattctacgagtcatatcagaaaagttacccgtgggaactgtctccaaatacatacttcctctcaccaggacaacaaccacaggatcctctgacccatttactggtcatcaataagacaggtgaacatggggctgaaatgcagctgtta

SEQ ID NO: 6332 - DNA, 467 bp, Homo sapiens
  MAP TO AC004454.1; EXPRESSED IN LUNG, SIGNAL = 1.6; EXPRESSED IN HELA, SIGNAL = 1.6; EXPRESSED IN BRAIN, SIGNAL = 1.6; EXPRESSED IN BONE MARROW, SIGNAL = 1.6; EXPRESSED IN ADULT LIVER, SIGNAL = 1.7; EXPRESSED IN PLACENTA, SIGNAL = 1.7; EXPRESSED IN HEART, SIGNAL = 1.7; EXPRESSED IN FETAL LIVER, SIGNAL = 1.6
tcgtactcttgtttttcaaagtgtgatagaaaggacaataaatgaaaaaagttaaaatatgtatttttcactccagttaaaatatggttttaaatactaaaatttaaattatttggggtgtgaataagagagttattcggttatatttgggggaatttatatttgatgaatttgggttctttgtagagttttttgtttgcttgttttctggatttttgttgttgctgtagttgttgttgttgttgttttgaggccaagttatttagctatcctagaaggagaaattaactcacatttcacccacagtgggactggggaaaggagatatctgagagtcaatcacaacactctggttggcaaaataataaatatctgtgcttttaaaagtgttcaggtccataaaatttgcaccttctattcattgtttgaactaaacagtttagttttgcacaggctgcataactgtt

SEQ ID NO: 6333 - DNA, 474 bp, Homo sapiens
  MAP TO AC006115.1; EXPRESSED IN LUNG, SIGNAL = 5.3; EXPRESSED IN HELA, SIGNAL = 4.9; EXPRESSED IN BONE MARROW, SIGNAL = 4.8; EXPRESSED IN ADULT LIVER, SIGNAL = 4.4; EXPRESSED IN PLACENTA, SIGNAL = 4.2; EXPRESSED IN HEART, SIGNAL = 4.2; EXPRESSED IN FETAL LIVER, SIGNAL = 4.9; EXPRESSED IN BRAIN, SIGNAL = 5.6
tgtctcctttccctctcctgactcaggatggtggttctgcactagggaggttttggcgaccaggggatacctgggcatgtgtggagacacttttggtggccacacccagaaaatcatgatgcagctcaatatcccacagtacacaggacatccccaccgctgcccaggacagagagttatccagtccagaccatgtcagaagtgtggaggctgagagccccaggggacacctgaggcctgcactgaccaccaacaccccgtggagactctcaccttctggttggtacatctccttgtaattctccagcagagtgacgagcttctcacagttctccggcttttttgctcgcacccaaggcttgagcttttcagggatgatggtcaggtactgctcaaggaccaagagctcgatgatctcctccttggtgcgggtctccggctgcaaccaatcgaggcagaggtttcggagtttga

SEQ ID NO: 6334 - DNA, 360 bp, Homo sapiens
  MAP TO AC005879.2; EXPRESSED IN PLACENTA, SIGNAL = 1.9; EXPRESSED IN HEART, SIGNAL = 1.8; EXPRESSED IN ADULT LIVER, SIGNAL = 1.9; EXPRESSED IN LUNG, SIGNAL = 1.8; EXPRESSED IN FETAL LIVER, SIGNAL = 1.8; EXPRESSED IN BRAIN, SIGNAL = 1.5; EXPRESSED IN BONE MARROW, SIGNAL = 1.7; EXPRESSED IN HELA, SIGNAL = 1.7
tgtgattatgatgtgtctgggtgtggttttcttcatgtttcatgtgcttgtgtttatgtctagctttttggctctctggatttacagtttccatgaaaacttttcagacattatttcttcaaatttttttttcttttccccatccctcctgctctttgaaaattctagttctagttatattaagcctcgaaagtcccacagctcactaatgctgttttcattaaaattttttttccttctgtgcttcatcttgaaagtttctgtgggtatatcttcaagttcactgatctttccttctgcaagttctaatcttctgttaatcccatacaatgtatttgccatctcatacattgtggattt

SEQ ID NO: 6335 - DNA, 467 bp, Homo sapiens
  MAP TO AC004129.1; EXPRESSED IN PLACENTA, SIGNAL = 4.3; EXPRESSED IN LUNG, SIGNAL = 2.3; EXPRESSED IN FETAL LIVER, SIGNAL =   6; EXPRESSED IN BRAIN, SIGNAL = 2.8; EXPRESSED IN ADULT LIVER, SIGNAL = 5.7; EXPRESSED IN HELA, SIGNAL = 3.3; EXPRESSED IN HEART, SIGNAL = 2.6; EXPRESSED IN BONE MARROW, SIGNAL = 4.7
ttcctccaaatactggcattgacagtggcataaaatagaagtgaggtggtaattgtgttcttctccttaatgtgcttttccaggtacttccttcccagtatccattccacttttctcttctcttccaacacttccctttcccaaggaaattccatctggactggtcctaacccaagcttcagctggcctgtgaagagagcagagtgtggggcttcagggggacgcgggatggaacacaccccacacagcaagggttttcatggaaggcggctttcacgtgctcccaggtctgcatttcatacatcatactatgacaacgaccttgagaaatacacaaaggaaaaaaaatgtattgactctgggacaaatttctcagtgagaaaaatgaaaggtcagtgttcacctaactgtgaccgacaaaatgaaatggacaaggaaggtgagtgtgttgccctccgtgtgtttat

SEQ ID NO: 6336 - DNA, 458 bp, Homo sapiens
  MAP TO AC006144.1; EXPRESSED IN PLACENTA, SIGNAL = 3.6; EXPRESSED IN LUNG, SIGNAL = 2.1; EXPRESSED IN HELA, SIGNAL =   2; EXPRESSED IN FETAL LIVER, SIGNAL = 1.8; EXPRESSED IN BONE MARROW, SIGNAL = 2.5; EXPRESSED IN ADULT LIVER, SIGNAL =   2; EXPRESSED IN HEART, SIGNAL = 1.6; EXPRESSED IN BRAIN, SIGNAL = 1.9
ttggttacttcaagtctgccctatgtaaatggagaggatgaagtaaagtaacaaagtcatttacttggccaacgctctgtggagaggatattttctgttatagctgaagtgttaattggccttatgttccctgcctccacaccctattttcctgcctcatctcccccacaagagatgtgatccccataaatctttatgggagacagaagaaccaaaggtctttcttctgtaactgcttcattctggcttggggtgtagttcctacctattggggattatgaaactcaccctgctctatctagtggaggcagggtagcttcttgatggccaggggtggtgtcttcacctagaactgggtggaaccttttttgcatgatcatctgaagcttgatggtccctaggcgacaggaaatgaatttggttaaaagatttaatgggaacttcaggggatagatagc

SEQ ID NO: 6337 - DNA, 447 bp, Homo sapiens
  MAP TO AC004522.1; EXPRESSED IN BONE MARROW, SIGNAL = 7.2; EXPRESSED IN PLACENTA, SIGNAL = 6.5; EXPRESSED IN LUNG, SIGNAL =  11; EXPRESSED IN HELA, SIGNAL = 7.2; EXPRESSED IN FETAL LIVER, SIGNAL = 8.9; EXPRESSED IN ADULT LIVER, SIGNAL =  14; EXPRESSED IN HEART, SIGNAL = 7.6; EXPRESSED IN BRAIN, SIGNAL =   8
aggggagccaggacattccatgatccaacagagaaggatcagggaaagcctcagccttccctgatcttctggaaagtgtcccagggcagggggcagtggggcgggcagatacagagcttagagctctgctgattgctgacatccaggggtaggggtgagaagagacctgggccgggagaagtcgacctcaaacctgcagtgtcacactctatccctccacagatcctccctctgtggtggtcaccagccaccaggccccaggagaaaagaagaaactgaagtgcctggcctacgacttctacccagggaaaattgatgtgcactggactcgggccggcgaggtgcaggagcctgagttacggggagatgttcttcacggtggaaacggcacttacctgacctggttgttggtgcatgtgcccccgcaggacacagccccctactcct

SEQ ID NO: 6338 - DNA, 470 bp, Homo sapiens
  MAP TO AC004775.1; EXPRESSED IN PLACENTA, SIGNAL = 3.6; EXPRESSED IN HELA, SIGNAL = 3.4; EXPRESSED IN BRAIN, SIGNAL = 6.9; EXPRESSED IN ADULT LIVER, SIGNAL = 3.7; EXPRESSED IN HEART, SIGNAL = 3.2; EXPRESSED IN LUNG, SIGNAL =   4; EXPRESSED IN FETAL LIVER, SIGNAL = 3.4; EXPRESSED IN BONE MARROW, SIGNAL = 3.5
agacatacgaggccaagaggaaggagttcctaagtgagctgcagaggaaggaggaagagatgaggcagatgtttgtcaacaaagtgaaggagacagagctggagctgaaggagaaggaaagggaggtatgtgccaggctgggggctgggatggggaagctgagggagggaaggcctggctgagggtagaggtgggggtgccttcctggcccaggctcaagccctcctcttgctccccgcatcttctgccccctttctgatgccagctccatgagaagtttgagcacctgaagcgggtccaccaggaggagaagcgcaaggtggaggaaaagcgccgggaactggaggaggagaccaacgccttcaatcgccggaaggctgcggtggaggccctgcagtcgcaggccttgcacgccacctcgcagcagcccctgaggaaggacaaggacaagaagaagtaggtggcaggct

SEQ ID NO: 6339 - DNA, 481 bp, Homo sapiens
  MAP TO AC005940.3; EXPRESSED IN PLACENTA, SIGNAL = 5.8; EXPRESSED IN LUNG, SIGNAL = 7.8; EXPRESSED IN HELA, SIGNAL = 9.6; EXPRESSED IN HEART, SIGNAL =  11; EXPRESSED IN FETAL LIVER, SIGNAL = 8.2; EXPRESSED IN ADULT LIVER, SIGNAL = 9.5; EXPRESSED IN BRAIN, SIGNAL = 8.5; EXPRESSED IN BONE MARROW, SIGNAL = 6.8
tgccaacaactcctgtttccggaggcccaacaaggcccacgcagagccaggaggggcagtggggctgggcctgggtggccccaccagccccgccccatctatctttgggaatttatttgtccatgggcgaggctggcctgcagtctgttgccttccaggggccaagagctgctctgatcacccagggattctctctccaacccaagtgcctccagctgacctctggctcctgtcctctggctccacctgcaccgccctgctcttcctaaggggccaggaagcccccagaagctctaccatcgacgtgggtggtggcacccggctcaccctgagagcagaggccgtgcagggggctcagttctgagccccagccggcccaccatggcacggcggttccaggaggagctggccgccttcctcttcgagtatgacaccccccgcatggtgctggtgcgtaataagaaggtgggcgttatcttcc

SEQ ID NO: 6340 - DNA, 487 bp, Homo sapiens
  MAP TO AC005895.1; EXPRESSED IN FETAL LIVER, SIGNAL = 1.6; EXPRESSED IN BONE MARROW, SIGNAL = 1.6; EXPRESSED IN PLACENTA, SIGNAL = 1.5; EXPRESSED IN LUNG, SIGNAL = 1.7; EXPRESSED IN HEART, SIGNAL = 1.8; EXPRESSED IN BRAIN, SIGNAL = 1.9; EXPRESSED IN ADULT LIVER, SIGNAL = 1.7
ttcccgaattacagaccaggaagcagagcacccagagccgagcggcattgccaagagccatccagcttgcaagtggtagaacaggattctcacccaggcaggtggatccctcccctggggaagtcatagtgccccccacttccccgccagggggctgtggccaggactcccccagtgatgtggtcaggtgtttgctgggtgtctggccacagtgaaccctccaccagcgctgcctgtttcctgttttcactgctctcgttgctttgctgcagcggctccaacaggccagccggccggccatggactggggaccatcgctggaggagaaccggacgggcatgtatgtggccacgctggctgggagccagtcaccaaagccactgatggtgcacatgcgcaagtacgggggcatcaccagcttcgagaacacggccatcgaggtggaccgtgagattgcagaggaggaggagtcgatgatgtgaggcag

SEQ ID NO: 6341 - DNA, 458 bp, Homo sapiens
  MAP TO AC004686.1; EXPRESSED IN LUNG, SIGNAL = 9.3; EXPRESSED IN HELA, SIGNAL =   8; EXPRESSED IN BONE MARROW, SIGNAL = 6.7; EXPRESSED IN ADULT LIVER, SIGNAL =  13; EXPRESSED IN PLACENTA, SIGNAL =   8; EXPRESSED IN HEART, SIGNAL =   9; EXPRESSED IN FETAL LIVER, SIGNAL = 7.1; EXPRESSED IN BRAIN, SIGNAL =  12
tttcagcagggttttccatcttctcactgtcatgctgcaaactaacttaccaatgtaatgtccatatctggcagatatctcaatgatagagaatactacaagacagtagttcccaaactttgctgcacattagaatttcctgaggttctttggaaaagtcctgatgcctagggctcactttgagagattctgatttttgttttgttttgttttgtttttttaaccacagcactgagttttattagggatttcattaaggttaaatttctaggaatgagggaatcctagttagagggcacaaaagcccacgaagcctcctcagatctagtagtgaaccaccgactcaggttctttggagggatcaccgcctcgttccaggtacagattattgtaaggatactgctttggtcccacgggctggtagacagggtacatatcccccacccagaacatgaata

SEQ ID NO: 6342 - DNA, 474 bp, Homo sapiens; identical to SEQ ID NO: 5627
  MAP TO AC004787.1; EXPRESSED IN LUNG, SIGNAL = 1.2; EXPRESSED IN FETAL LIVER, SIGNAL = 0.9; EXPRESSED IN BRAIN, SIGNAL = 0.92; EXPRESSED IN BONE MARROW, SIGNAL = 0.98; EXPRESSED IN ADULT LIVER, SIGNAL = 0.98; EXPRESSED IN PLACENTA, SIGNAL = 0.94; EXPRESSED IN HEART, SIGNAL = 1.5

SEQ ID NO: 6343 - DNA, 479 bp, Homo sapiens
  MAP TO AC004824.1; EXPRESSED IN PLACENTA, SIGNAL = 1.3; EXPRESSED IN LUNG, SIGNAL = 1.3; EXPRESSED IN FETAL LIVER, SIGNAL = 1.4; EXPRESSED IN BONE MARROW, SIGNAL = 1.5; EXPRESSED IN ADULT LIVER, SIGNAL = 1.4; EXPRESSED IN HEART, SIGNAL = 1.5; EXPRESSED IN BRAIN, SIGNAL = 1.5
acccaccagccctttattggctatttagtaaacgtcacttggctgaacacttttgcatcttttccccataggggttcaagctggcggcatttgccatcctactgggtccgagggtcggtcggggcagacagggaagaaagggttctgttgcctggactctccagcctcctctactgggcaaagaatcatgctgttgcatggtgacagtgggccatccacgctggggcagagctggcagctccagggcctgggtctaaggtaccatcttccaccatttgaaggcaaagggcacccggcggatgttggcacaggcacagatgtctccgacctctgtcaggtaacagtcaaagtcattgatgaaggtgcacttgaagcccaggggctccagcaagcagcaaatcttttcttccaggcagcaggtccccttgatttggggcccaaaaggcttggggatccccaggttcttgcccatcacaatc

SEQ ID NO: 6344 - DNA, 456 bp, Homo sapiens
  MAP TO AC002039.1; EXPRESSED IN PLACENTA, SIGNAL = 1.5; EXPRESSED IN HELA, SIGNAL = 1.8; EXPRESSED IN HEART, SIGNAL = 1.9; EXPRESSED IN ADULT LIVER, SIGNAL = 1.6; EXPRESSED IN BONE MARROW, SIGNAL = 1.5; EXPRESSED IN BRAIN, SIGNAL = 1.8; EXPRESSED IN FETAL LIVER, SIGNAL = 1.7; EXPRESSED IN LUNG, SIGNAL = 1.6
acagggttgggagaccttggctctgtgggggactgtggacaggggatggggggccttggccctgcgtgggatgggttgggggtccgtgcccttcctggccctgggtggacaggtccaggtggcactcggcatagggctgagatgggtgcagagggctgaggcccccaggcctctcccggcttggtttccccagatgagtgttcatttgggtcttccatcagaaaggcccctcctgacctctgggagtggggagctcaagggtgggaggccatagcttggggatgctggcaatgtgtgggatgggcccagggatggcctctggcctactaagggctctggccctgacccacggccactcactcctcagagacgtctcccacaacctgctccgggcgctggacgttgggctcctggcgaacctctcggcgctggcagagctgtgagtgtcccccagtc

SEQ ID NO: 6345 - DNA, 489 bp, Homo sapiens
  MAP TO AC005905.1; EXPRESSED IN PLACENTA, SIGNAL = 7.8; EXPRESSED IN BONE MARROW, SIGNAL = 7.9; EXPRESSED IN ADULT LIVER, SIGNAL =  10; EXPRESSED IN LUNG, SIGNAL = 9.7; EXPRESSED IN HELA, SIGNAL = 8.5; EXPRESSED IN HEART, SIGNAL = 8.9; EXPRESSED IN FETAL LIVER, SIGNAL = 8.8; EXPRESSED IN BRAIN, SIGNAL = 9.5
ctcacactcagtgctgggcacagcactgcaacagtgaagaaagtgaccacagacctcatttgtcatcttatgggtttattccctcagcaaagagtcatttaagttaacgcctcctagcttcatctgcctcacctgcaaaatggggacgctagtaactaccgtatggcttgtcgtccagataggcaacacagaaaaaatgctgggcctggtgcctgcaatcaaaaggtgcaggccccaagacacaggccctactagttcattgcacagaggggaacatacttccatgaagccatcaatgtggccacaaacaccaacccgagtcctcacactgtacttggtctttctgctttcagtcacagggctccctgccgctgaaaatgctgacctcagcgtctcagcaggaggcctttctgctgcagcaccactcacccagtgcccccaccaggcttccacacagcgctatgctgtgggtgagccctgagctatgag

SEQ ID NO: 6346 - DNA, 462 bp, Homo sapiens
  MAP TO AC004659.1; EXPRESSED IN PLACENTA, SIGNAL = 1.9; EXPRESSED IN HELA, SIGNAL = 1.8; EXPRESSED IN BRAIN, SIGNAL = 1.9; EXPRESSED IN ADULT LIVER, SIGNAL = 1.9; EXPRESSED IN HEART, SIGNAL = 2.1; EXPRESSED IN LUNG, SIGNAL = 1.8; EXPRESSED IN FETAL LIVER, SIGNAL =   2; EXPRESSED IN BONE MARROW, SIGNAL = 2.2
aaccttgaggacagtgggctaagtgaaagaagccaaatgcaaaaggacaagtattgtatgattcaacttatatgagatacatagaatagccaaagcaaagacaaaaagtagaacattggttaccagggactgcagagttgcaaggagaatggggagttattgtttgatgggcactgagtttcatctggggaagacggatgaaggtaatggttgcacaacaatgggattgtacttaatgccactgaactgtacacttagaaatatatacattagaatcctgccaattggtcagtttgttctcctcctcctccttctccttccccttctttctttcctcctcctcctcctccctctcctcctcctctttcttcttcttcttcttcttcttcttcttcttgttcttcttcctcttcttcttcttcctctcattgtaccttaagccgttacttctatctgacatga

SEQ ID NO: 6347 - DNA, 479 bp, Homo sapiens
  MAP TO AC006077.1; EXPRESSED IN PLACENTA, SIGNAL = 0.89; EXPRESSED IN LUNG, SIGNAL = 1.1; EXPRESSED IN FETAL LIVER, SIGNAL = 0.98; EXPRESSED IN BRAIN, SIGNAL = 0.86; EXPRESSED IN ADULT LIVER, SIGNAL = 0.88; EXPRESSED IN HEART, SIGNAL = 1.4; EXPRESSED IN BONE MARROW, SIGNAL = 0.81
gacctttttgtctccagaggggaaaatttcgtgttagaggggaactgtaattctttggggttcatttgttttgaagtcaaatatgactctgaatgtgctggcatgttttagttgcagaggaaagtggtcgcttatggtcagaggagcagcctgctcaccctctccaggtgggggctgtgtacctgggtgaggaggagctcctgcatgacccgatgggccaggacagggcagcagaagaggccaatgcggtgctggggctggacacccaaggcgatcacatggtgatgctgtctgtgattcctggggaagctgaggacaaagtgagttcagagcctagcggcgtcacctgtggtgctggaggagcggaggactcaaggtgcaacgtccgagagagccttttctctctggatggcgctggagcacacttccctgacagagaagaggagtattacacagagccagaagtggcggaatctgac

SEQ ID NO: 6348 - DNA, 467 bp, Homo sapiens
  MAP TO AC004690.1; EXPRESSED IN PLACENTA, SIGNAL =  17; EXPRESSED IN LUNG, SIGNAL =  18; EXPRESSED IN HELA, SIGNAL =  19; EXPRESSED IN HEART, SIGNAL =  16; EXPRESSED IN FETAL LIVER, SIGNAL =  16; EXPRESSED IN ADULT LIVER, SIGNAL =  16; EXPRESSED IN BRAIN, SIGNAL =  17; EXPRESSED IN BONE MARROW, SIGNAL =  16
aattcatgagcctcagccacagaacttcaggaagtagaggaaggttacttttctttccctacagttctggcaatgagattgggatatcattggctgggacaccctgcgcactccagaggttaccattgagatcttgggagcacccagcaaagttagccaaaggtaaacatttttaccacatcaacctcctaatctctgcctgtagcatctggtcaaatgaaaatggcaagagactatccttgtctttcccttttcaaattcagattagcaggagaaaccatttgtgtgaacgagttctttgggtatagatactcattattttttgcatatgaccaatcagagtttaatttctttaagctacattttgccacaagcaaagagatggcaaatcagtttactgttcatcattttatacaagtaaagaaggtgagattagggtcttgtacactttttctggtccatgtgca

SEQ ID NO: 6349 - DNA, 460 bp, Homo sapiens
  MAP TO AC004801.1; EXPRESSED IN LUNG, SIGNAL = 2.6; EXPRESSED IN FETAL LIVER, SIGNAL = 3.3; EXPRESSED IN BONE MARROW, SIGNAL = 2.9; EXPRESSED IN PLACENTA, SIGNAL = 2.3; EXPRESSED IN HELA, SIGNAL = 2.5; EXPRESSED IN HEART, SIGNAL = 2.5; EXPRESSED IN BRAIN, SIGNAL = 2.5; EXPRESSED IN ADULT LIVER, SIGNAL = 2.3
tcctccagttttctgttgggcttgagaggagggaaagaggaggaaaagtattttttccccacgtggaggtgggaaaagaggtcctctgagcttgctccactcctggaagcaaaaatgtccaactagctccctgctgccccagtacccttgaggtccttgaaccatgaactcttggcagcccctacagcccctggtcccattgaatgccagctcccaggcctcacactgccgctctctgccccaacagttcagctatggagatgacaatctggctcccaacactgccaacgtccagatgaccttcctacgcctgctgtccacggaaggctcccagaacatcacctaccactgcaagaacagcattgcctatctggacgaagcagctggcaacctcaagaaggccctgctcatccagggctccaatgacgtggagatccgggcagagggcaatagcaggttc

SEQ ID NO: 6350 - DNA, 454 bp, Homo sapiens
  MAP TO AC005909.1; EXPRESSED IN ADULT LIVER, SIGNAL = 6.6; EXPRESSED IN PLACENTA, SIGNAL = 6.5; EXPRESSED IN LUNG, SIGNAL = 8.5; EXPRESSED IN HELA, SIGNAL = 6.3; EXPRESSED IN HEART, SIGNAL = 6.2; EXPRESSED IN BRAIN, SIGNAL =   7; EXPRESSED IN BONE MARROW, SIGNAL = 5.5; EXPRESSED IN FETAL LIVER, SIGNAL = 5.3
ttttccaatagtattttcccactgggcatctgctgagagatgatggaccttgatcttgatgttttaattgaatgggacttacaggtcattcctcttgggactgggaagttcattttgcctctgaaagaaagcatacatggctatttggtgacaaaagggtagactctgtcagtcattaatacacttagtcaactatttccagcactgcatcttccaggctcattgtaattgcagttctggcctcccttgtgtttggctgtggccatataactaatattacacaaggaattatgaacagaaaagatgtgagtctcctggtagaacatttaactgcttttcccttcttcactctgctcaagcaacattccagagagtacctggatcttggaggacagcgtgcagcagatctcctcagtgaactagcaacaaacgtgctgcacgaacaagaaataaa

SEQ ID NO: 6351 - DNA, 451 bp, Homo sapiens
  MAP TO AC004666.7; EXPRESSED IN LUNG, SIGNAL = 9.2; EXPRESSED IN HELA, SIGNAL = 8.1; EXPRESSED IN FETAL LIVER, SIGNAL = 7.4; EXPRESSED IN BRAIN, SIGNAL = 8.2; EXPRESSED IN BONE MARROW, SIGNAL = 8.8; EXPRESSED IN ADULT LIVER, SIGNAL = 8.4; EXPRESSED IN PLACENTA, SIGNAL =   8; EXPRESSED IN HEART, SIGNAL = 6.6
aatcctctgccttggcttcccaaagtgctaggattacaggcatgaactaccaggcccaccctcggtatcttttcaatagatgatgtgtatgatttattttagggttttgatctttcaaattctgggtcccacttagcagaaatcccagcagggacctcatacccctttcccaaaataaagcttggaggctgtcagggctgcagggcccctctgccctgggggcaccctctgatgaccctgtactctccattttcaggatgccttcgagcagggccaggtttttcttgggaacaaggagcagggatatgaagcctacgaagacctgcccaagggcatccgaggaaatcgctggaaagccggactcaccattgtcaccccagagcggagatttgtcctcacttgccccagtgagaaggaacagcaggaatggctggaaagtttgcggggtgtc

SEQ ID NO: 6352 - DNA, 415 bp, Homo sapiens
  MAP TO AC005971.5; EXPRESSED IN PLACENTA, SIGNAL = 1.9; EXPRESSED IN LUNG, SIGNAL = 2.2; EXPRESSED IN HELA, SIGNAL = 1.8; EXPRESSED IN FETAL LIVER, SIGNAL = 1.9; EXPRESSED IN BRAIN, SIGNAL = 1.9; EXPRESSED IN ADULT LIVER, SIGNAL =   2; EXPRESSED IN HEART, SIGNAL = 1.8; EXPRESSED IN BONE MARROW, SIGNAL = 2.1
tgatgtgagtaatacagattgggagttattgtaatttgttattagaggaatgagtcaatatagattaaacttgaaatttcattttggatttttttaatgatatatagttaaaatgttgattattttaaggggaagaattagatcaatgaaggattgaaatagtcattgctctttctttccatacttagtggcccataactacctttatacttgctttgatttcatgatgttgttcagtttttggttaataattgatttatgattattttaatactaggagttcgcagtccctgattatcgttcctctcatcttgaagtgagtcaggcatcacagcttttgcagcaacagcagcagcaacagcttcgaaggcgaccttccttgctttcagaatttcacccaggttctgacaggtaa

SEQ ID NO: 6353 - DNA, 456 bp, Homo sapiens
  MAP TO AC004673.1; EXPRESSED IN PLACENTA, SIGNAL = 2.3; EXPRESSED IN LUNG, SIGNAL = 2.4; EXPRESSED IN HEART, SIGNAL = 1.9; EXPRESSED IN FETAL LIVER, SIGNAL = 2.1; EXPRESSED IN BONE MARROW, SIGNAL = 2.1; EXPRESSED IN HELA, SIGNAL = 2.3; EXPRESSED IN BRAIN, SIGNAL = 2.1; EXPRESSED IN ADULT LIVER, SIGNAL = 2.5
ttctgagacgtcattggctccatcttctaaaactcctatttgaaattatacattggcaatcatgtttaatgcctaagagctctttcttactctttcattttcttttccatacttatttgcttttgtgttatagtcagtatctcctcatcactctgaggatactaactatagacttttcatgtgttaatctgtttccagaaccacctgttttttccaggatcaactggtctctgatctctgttatctcttaatctgttgctgtttttgtcacatgtctgctggtctttggttatgctttcataattaaagtcagttggtggcctacatgtagatcttaccctgctagactttttactggataaagattctttgcacatagatggggattgttaactgggagattgcattttagaaggcctccaattttgagaatagggataccagcctacaccacag

SEQ ID NO: 6354 - DNA, 495 bp, Homo sapiens
  MAP TO AC006094.1; EXPRESSED IN BONE MARROW, SIGNAL =   3; EXPRESSED IN PLACENTA, SIGNAL = 2.3; EXPRESSED IN LUNG, SIGNAL = 3.1; EXPRESSED IN HELA, SIGNAL = 2.4; EXPRESSED IN HEART, SIGNAL = 2.4; EXPRESSED IN FETAL LIVER, SIGNAL = 2.8; EXPRESSED IN BRAIN, SIGNAL = 2.6; EXPRESSED IN ADULT LIVER, SIGNAL = 2.6
tttgcttcttgggaatctggctgtttctccgctgggcggaagatccaggtggagggaaagttagtggggggtggctgatggggcaggtccctgaggggctgactctgggacaggggctcacctggaaaggaggagggtctcctttaccctgagacctcacctggggggaagatccaggtgaagggaaaattggtggggggtggctaatggggcaggtccctgaggggctgaaactggggcaggggctcacctgaaaaggaggaagttctcctataccctgatatagttaaggtggggagcagtgctcagggctgttccaagccttcaccccagagggtttcacattcttggtgaagtaggaggtggagtcctctgcagacaggggatgtgacaggattcgggtctggaaactcagagagtgtaagatctgcattgagataagggacagagagcatctttctccagttgcagagagggctctgtgggtgtaggaga

SEQ ID NO: 6355 - DNA, 466 bp, Homo sapiens
  MAP TO AC000003.1; EXPRESSED IN ADULT LIVER, SIGNAL = 4.3; EXPRESSED IN PLACENTA, SIGNAL = 4.3; EXPRESSED IN LUNG, SIGNAL = 3.6; EXPRESSED IN HEART, SIGNAL = 4.7; EXPRESSED IN BRAIN, SIGNAL = 4.3; EXPRESSED IN HELA, SIGNAL = 3.8; EXPRESSED IN FETAL LIVER, SIGNAL = 6.1; EXPRESSED IN BONE MARROW, SIGNAL = 4.1
aggaagtagctgcagccttgaattcagttgagaaaaaagtcagggtgagatgcctcgactgaaactgtctcgaaattcctcaagcgcccgtgtagctgtcacgcacttgatcagtacctagtagtacctagaaattcccttgtgcactggtaaaatagctcataagctttaaattagtgctgctcaaacgttaatgtgcgcacgattcacctgaagcacttgttatacagtctgatgtaggaggtcttgaggggagcggggcgcagatgctgcatttctaacaagctcagtgttgctggtctatggaccacgtcttatataacagcaaggctttcagtagcaaggtgtagattgtcacctgctctccccaggtgcttgaggacagcaaaatgatcctgtgcttggagaataagtcctgtgttctgacttccaggattgttaccagtgagtgtgaaggatccaagcc

SEQ ID NO: 6356 - DNA, 473 bp, Homo sapiens
  MAP TO AC004812.1; EXPRESSED IN LUNG, SIGNAL = 1.5; EXPRESSED IN PLACENTA, SIGNAL = 1.3; EXPRESSED IN HEART, SIGNAL = 1.5; EXPRESSED IN FETAL LIVER, SIGNAL = 1.4; EXPRESSED IN BRAIN, SIGNAL = 1.4; EXPRESSED IN BONE MARROW, SIGNAL = 1.2; EXPRESSED IN HELA, SIGNAL = 1.8; EXPRESSED IN ADULT LIVER, SIGNAL = 1.5
ctctccaggggcattcttcactataaaccaggtgagtagaaaaaaatgaaactatctgggaggtctactagaacaaagtaacaaagaaactccctctccaggagtgttcctgactataaaccaggctctcccctgcgagagggggtgaatccttaacaagaactgggctttcagggccctgattgtccaactccacccctagtatcccaccgcctaaccacagccgggtcccaattctctaaccgacatgtgggtcccaggccagatggcaggtacctgctgggagggggtggagagggcagcgatgagcttggcaacaatgggcttcactttggggtcactcttgtccaggtgcttggccagagagcccatcaggaccaccacactctgtcgcacagcatcatagctggcatcattgggcgcgttcttcaggaactcctcgaatactggcaacagcgagttgacgttctcct

SEQ ID NO: 6357 - DNA, 484 bp, Homo sapiens
  MAP TO AC005996.2; EXPRESSED IN LUNG, SIGNAL = 2.2; EXPRESSED IN HELA, SIGNAL = 2.1; EXPRESSED IN BRAIN, SIGNAL = 1.8; EXPRESSED IN BONE MARROW, SIGNAL = 2.1; EXPRESSED IN ADULT LIVER, SIGNAL = 2.1; EXPRESSED IN PLACENTA, SIGNAL = 2.2; EXPRESSED IN HEART, SIGNAL = 1.7; EXPRESSED IN FETAL LIVER, SIGNAL = 2.3
tgctcatcccttgttttgagatcacagagccaatgatttttgtgttccatccatcctcttctcccagaaattatgaaggtcatcagactttcccctaaagttctagaacagctagtcatttttaaatattggcttgaaccacattatcacctccaggccattcttaaagcttcactttgtaggctgtttctggcataatattgtaatccactctgcgtctactttgatttcttcaggtaatacatgaaaaactttgggtaaagtttgtttgtgatgctatatgaagactactcaaagataattttttttccccacaggatgaatattctatctttcctcagacatactccatagatattaatggctatattcttgtgtattctgttacatcaatcaaaaggtaagactcctgctgcctgcttgagttgatttgctactcatagataacattgatccttttaagggactgtgctggaattattaa

SEQ ID NO: 6358 - DNA, 496 bp, Homo sapiens
  MAP TO AC002094.1; EXPRESSED IN LUNG, SIGNAL = 1.9; EXPRESSED IN HELA, SIGNAL = 1.7; EXPRESSED IN BONE MARROW, SIGNAL = 1.9; EXPRESSED IN ADULT LIVER, SIGNAL =   2; EXPRESSED IN PLACENTA, SIGNAL = 1.9; EXPRESSED IN HEART, SIGNAL = 1.8; EXPRESSED IN FETAL LIVER, SIGNAL =   2; EXPRESSED IN BRAIN, SIGNAL = 1.8
tcctgacccttgctcctatgacacacctcctcctgactgccactgtcactccttcagagcagaactcctctagggaacctggatgggaaacaggtgaggctcagagaggtggtggcagagggaacggggatcctttggaacacctgggtttttggcattggtgtccaagggcaggagtggggctggcttggcagcaggcatttccttgggtggctgggaagtgatgaggaattgggcctgtttctttacagccatggccaaggacatcctgggtgaagcagggctacactttgatgaactgaacaagctgagggtgttggacccagaggttacccagcagaccatagagctgaaggaagagtgcaaagactttgtggacagtgagtattggggagatacagtgccactcagctttgagctgccatttcaactgtaccccaggctcatcttggccctgccacagtggagctgctggctccctggaggttgaatctgg

SEQ ID NO: 6359 - DNA, 457 bp, Homo sapiens
  MAP TO AC004837.1; EXPRESSED IN LUNG, SIGNAL = 1.3; EXPRESSED IN BRAIN, SIGNAL = 1.5; EXPRESSED IN BONE MARROW, SIGNAL = 1.3; EXPRESSED IN ADULT LIVER, SIGNAL = 1.2; EXPRESSED IN PLACENTA, SIGNAL = 1.3; EXPRESSED IN HEART, SIGNAL = 1.5; EXPRESSED IN FETAL LIVER, SIGNAL = 1.4
cctctcagcacacaaataatccattactgtatagtgtgttatacagtcgactcttggataacacagggattggggtactgaaccaactcccccaaccccactgtgtgcagtcgaaaatccaacttttgactcccccaaaacttaactacaaatgcttatttgactggaagccttaccaataacataatagttgattaacacatatgttatatgtattatatactgtattctgacaataaagtaagctagagaaaagataatgttaagaaaattttaaggaaggaaaaatacacttactagtcattaagtgaaagtggatcatcataaaggtcttcattctcatcattttcatgttgagtaggctgaagaggaggaggaagaggaaggattggtcctgctgtctcaggggtagcagaggaaaaagaggtggaggaggtggaaaggaggcagaaaaagc

SEQ ID NO: 6360 - DNA, 476 bp, Homo sapiens
  MAP TO AC004877.1; EXPRESSED IN PLACENTA, SIGNAL = 2.1; EXPRESSED IN LUNG, SIGNAL = 2.4; EXPRESSED IN HELA, SIGNAL = 2.2; EXPRESSED IN HEART, SIGNAL = 2.2; EXPRESSED IN FETAL LIVER, SIGNAL = 1.9; EXPRESSED IN BRAIN, SIGNAL = 2.4; EXPRESSED IN BONE MARROW, SIGNAL = 2.3; EXPRESSED IN ADULT LIVER, SIGNAL = 2.1
aatgacattgcataagcccgttacgtaaatcaaagtcctgctattgaccaagaatgtcccctgccccaaggctgacctaatcccacgcctgaaggctcagtcctttgtggcagttggataaatctgtttcctaaagcctctgtgaaaccctcccgaccttaaagtctctgtctttagggttcctggggcctccttctccgttgctgcttctccactgtgggaggcctcagtgtgacactcactcatccttccccaggtgagggttcccagggaaggacaggattccagtccttccaccagcgtggaattgtggccgtgcgccctcttctgggggtcttgcatactccctctgactgtgaaatacaagacttgtctctggttaaaagacatttcaaggatcagtaagtgagtgaagaagttttcttccctgtggggcatgggtggcctccccaggaccctggagttaacaactacga

SEQ ID NO: 6361 - DNA, 463 bp, Homo sapiens
  MAP TO AC006101.2; EXPRESSED IN PLACENTA, SIGNAL = 5.7; EXPRESSED IN HELA, SIGNAL = 4.9; EXPRESSED IN BRAIN, SIGNAL = 5.2; EXPRESSED IN BONE MARROW, SIGNAL = 5.3; EXPRESSED IN ADULT LIVER, SIGNAL = 5.6; EXPRESSED IN HEART, SIGNAL = 5.6; EXPRESSED IN LUNG, SIGNAL = 6.1; EXPRESSED IN FETAL LIVER, SIGNAL = 5.8
aaaaggttggggactgctgccttataaagttcttttagcttaaaaagagggggaagaaaagatacatgctcatacagtttccacacagaaattgaaattatgattttttattttgttaatacaataatttttacaagattaacagaaatcaaggaagatgcataaagatcctaagtgcccacagcactgaaatgagaaaagttagaaaataaaaacacccatgtcaatagtatcctaatataaagcagacctaaatcaagcaatacctaccttgtcatcaagctgtttgtataatttagcaatttcttcttcacactttcttctttcagcatcagtaaaatttcctataactccaattgcggttgctggtttatcattggtaagagtaatatctttatccactgtgaaagcttccaagttggctttctctttgtcaaactgttcatcaataggcaccgtctcc

SEQ ID NO: 6362 - DNA, 457 bp, Homo sapiens
  MAP TO AC004737.1; EXPRESSED IN PLACENTA, SIGNAL = 3.7; EXPRESSED IN LUNG, SIGNAL = 4.3; EXPRESSED IN HELA, SIGNAL = 3.9; EXPRESSED IN FETAL LIVER, SIGNAL = 4.1; EXPRESSED IN BRAIN, SIGNAL = 4.5; EXPRESSED IN ADULT LIVER, SIGNAL = 4.1; EXPRESSED IN HEART, SIGNAL = 3.7; EXPRESSED IN BONE MARROW, SIGNAL =   4
aacagtaaccagaagaaagcaggcatagctttattagcttcagaaagaatgtaatgtaaatacaggaaaattatcagggataaagaccttatgtgataataaagggatcgattttccaagaaaatataatgatccttaatatatatgcatgtaacaacagagcaacagggcatcagtctacgtgaggcagaaactgttaaaaccacaataagaaatagatgaatccgctattatcgttggagactttcaacactcctctatcagaaatagacagatccaccaagcagaaaaaatcagtaaggacatagttgaactcaacagtatcatcagtcaattggatataattgacatctacagactttatccaacaacgggcagaatacacattgaactcaagcccacaggaccactcatcgagatgcaccacattctcctccataaaacacacctgaaacca

SEQ ID NO: 6363 - DNA, 485 bp, Homo sapiens
  MAP TO AC004817.1; EXPRESSED IN PLACENTA, SIGNAL = 7.9; EXPRESSED IN LUNG, SIGNAL = 8.7; EXPRESSED IN FETAL LIVER, SIGNAL = 7.4; EXPRESSED IN BONE MARROW, SIGNAL = 8.2; EXPRESSED IN ADULT LIVER, SIGNAL = 8.1; EXPRESSED IN HELA, SIGNAL = 8.5; EXPRESSED IN HEART, SIGNAL = 7.9; EXPRESSED IN BRAIN, SIGNAL = 8.9
cagctcagcgagacctctgaggtcccgggttcgttcaccccctcactgtgccttagtttcatcctcaggctagtcccccgcatggtcacacgtgcatcgcggacttcccctgccgcctccatttaggtcacgtgcttacccctagaccaataacggctaccagggaagaccacgctctgatgcacttaccctgaccacctcccacctcctgagctggggctgggtctgcaggggggcagatacctgaacaaaactggagttttgataacaacaaagaaaatacaattttacttaaagtgatccaaggggacactgagtcagccattcatgaagctgaacatcatttcaagggacgctggctccggtatcatggtgaacgccaaggtgaagagcagccgcatgagatcccaaaggaaagcccgggagtcacacaagtggagtacagcagcaaaccccctccaccgcctgcccttggctttggtctt

SEQ ID NO: 6364 - DNA, 485 bp, Homo sapiens
  MAP TO AC002115.1; EXPRESSED IN BONE MARROW, SIGNAL =  11; EXPRESSED IN PLACENTA, SIGNAL =   9; EXPRESSED IN LUNG, SIGNAL =  11; EXPRESSED IN HELA, SIGNAL =  13; EXPRESSED IN HEART, SIGNAL =  14; EXPRESSED IN FETAL LIVER, SIGNAL =  17; EXPRESSED IN ADULT LIVER, SIGNAL =  14; EXPRESSED IN BRAIN, SIGNAL = 3.7
ttccacaactcctgggagaccctcctgacatcgcccatccgcgcaggctgcagagagagatcagtgggaggaggaggagccgagagccaccacttaggcttccaaccaatccctaccagggtgggcggagcccacttcctgattggctgcactctctgtgtcttggggtgggcgagaacggcggggccacgccccctaactaggcagccaatcaggacgtggggtgctggtttctccattgcgaagcttcagcctttgatggtttgggtcctgggagtctggttagtacaaggggaagcctagtgggtctggcgctccgttttcaagacactcggagtccgtctttgaggggaaaggtcatggccctgaaaccaccttctgccacccagcctgctcccaacgcgccagctaccccagacgccccccctaccacaggtgatccaggtgcttcagctgccccaggttctcccactaccacaggtggt

SEQ ID NO: 6365 - DNA, 484 bp, Homo sapiens
  MAP TO AC004844.1; EXPRESSED IN BONE MARROW, SIGNAL = 1.9; EXPRESSED IN PLACENTA, SIGNAL = 1.6; EXPRESSED IN LUNG, SIGNAL = 1.9; EXPRESSED IN HEART, SIGNAL = 1.6; EXPRESSED IN FETAL LIVER, SIGNAL = 1.8; EXPRESSED IN BRAIN, SIGNAL =   2; EXPRESSED IN ADULT LIVER, SIGNAL = 1.6
tttcaaccaattgcctatcagaaaatattcaaatccacctatgacttgtaagccctcatgccccctacttcaagatatcctgcctctttaggttgaaccaatgtatatcttccaagtattggttcatgattttatctagaatccctgtctccctaaaatgtctaagactaaactgtaacccaaccacctcaggcacattttctcaggacttctttagactattccccaggccatggtcactcatactggctcagaataaacctctttcaatattttacagtttgtttttctgttaacaggaggttgtgaaacagagtgtcatgaaagagaccatagagaaggctactttgggcctgatggggaaggcaactctgaggaaacagtatctgacccaagacctggaggctgagaacttagagtaagtgcggtgtagtaataatgtttggtctttgtcctaaaatctgagtgacagtagggtcctttg

SEQ ID NO: 6366 - DNA, 461 bp, Homo sapiens
  MAP TO AC005905.1; EXPRESSED IN LUNG, SIGNAL = 2.1; EXPRESSED IN BONE MARROW, SIGNAL = 1.1; EXPRESSED IN PLACENTA, SIGNAL = 1.1; EXPRESSED IN HEART, SIGNAL = 1.3; EXPRESSED IN FETAL LIVER, SIGNAL = 1.4; EXPRESSED IN BRAIN, SIGNAL = 1.3; EXPRESSED IN ADULT LIVER, SIGNAL = 1.5
agtgcatgaagctttctccctgagatttgcaggttttcatctgggtgggagccagccccagtcccctctgtctcaggaagccttctctttgcctccagccggtccctacccccaaccttgcccatctgtgaaagccctaagaattactgttagccctgcatttgtccatattgtactatataatttctataattatatgtgctgcaaaatttgcccctttatagatatttttaattatttcacaagacagtcttaattggggaaggagagaaagactgaggggacactttgggacaagatgaccctctctgagttagaccacagcatgaatttgtcagatctgcatccttcccccacccacaatccccagtccatgaaatatcctgattatgatttgtatgtcctcagtcccaaggtctttaatgaattagcaatggccttcactgatgggctgacagaga

SEQ ID NO: 6367 - DNA, 491 bp, Homo sapiens
  MAP TO AC002069.1; EXPRESSED IN PLACENTA, SIGNAL = 6.4; EXPRESSED IN LUNG, SIGNAL = 6.3; EXPRESSED IN HEART, SIGNAL = 5.8; EXPRESSED IN BRAIN, SIGNAL = 6.5; EXPRESSED IN ADULT LIVER, SIGNAL = 8.3; EXPRESSED IN FETAL LIVER, SIGNAL = 7.8; EXPRESSED IN BONE MARROW, SIGNAL = 6.2; EXPRESSED IN HELA, SIGNAL = 5.7
tcctcctgcttttgaaactctactcattgttctaggcccagcttatattagagttctgtgaaacattatctggtccccaagtcagaatattattccttctctttccctagatgtttcttttattgcacttatttccaccacttactctactctgacttataatatagatcatttttgtttgtatacctcctccactagttagtaaatcttttgatgccttacctataacagacagtcgatagatgtttgttgaactaaattaaatgctactgaccagccttgagaggtgggagaaagaggccttggaagctggcacagagatgtcgaggagtttgaaggcactgctgggcctctcggtggtgatgctgatggcagccacagtggccagcatgcatctggagcaatggcaggaccagcagaggcttcatgatggagttatcagagacactgagagacaaaattagaaaaaaggagacatttgtgttttggga

SEQ ID NO: 6368 - DNA, 478 bp, Homo sapiens
  MAP TO AC004685.1; EXPRESSED IN LUNG, SIGNAL = 2.1; EXPRESSED IN PLACENTA, SIGNAL = 2.3; EXPRESSED IN HEART, SIGNAL =   2; EXPRESSED IN FETAL LIVER, SIGNAL = 1.9; EXPRESSED IN BRAIN, SIGNAL = 2.1; EXPRESSED IN BONE MARROW, SIGNAL = 2.3; EXPRESSED IN ADULT LIVER, SIGNAL = 2.3; EXPRESSED IN HELA, SIGNAL = 2.3
atgagcaactgggaaacagggttggaagggaaagttgttttttttttttaaatatatatgtggacaaaggagagaagacctagaactgaggtggaaagatgtatttaagtcaagactctgctccttaacagtggagagcacataatttaaccctttagggcccaggcttcctcatctaaaaatggagacgatatccctctctccttggagagttagagtaagtattggtacacacgagagaaccacacaaaacaacttacgcaatgctgccagcctggagttttttgaatacttttatggccactggagctctgtggtattctcctttataaagtgtgctgacttcattttcccttagcagaatccacggggatcctgaaagctgctccttcttgatctccttgatttgctcttgcgggatctcctgcatgcattttggtggtaaatctgacctcacccccgagaggaaagaagacaa

SEQ ID NO: 6369 - DNA, 476 bp, Homo sapiens
  MAP TO AC000057.1; EXPRESSED IN PLACENTA, SIGNAL = 1.9; EXPRESSED IN ADULT LIVER, SIGNAL = 2.6; EXPRESSED IN LUNG, SIGNAL = 1.6; EXPRESSED IN HEART, SIGNAL = 1.9; EXPRESSED IN FETAL LIVER, SIGNAL = 1.6; EXPRESSED IN BRAIN, SIGNAL = 4.9; EXPRESSED IN BONE MARROW, SIGNAL = 1.6
gcctccggtaacaattttgagttacagaaatgctatttctgtgtctagaagataatcattatgaggcataaatccagttgcaagaaaggacaatcccagtattaaatactatagtcatttccatttagaacaacgtggctgtacttgtaaacatgtttacaaaacaaagaattcccagactttggagacttagggaattggtttctttaagtgaaatgactggtttgggtgacttattatctaggttagtattctgcagagtatatttagaagttttttaaatttttataattaaatttcatattagcatagagtcttgtaaaagttcaccatctggcaaaggcagcagtggcagtggcagcagtagcagcagcacctgtaatacccttacgtatttcttttttaaggagatttggaaggagatccacctggaaagaagtgttacagaaccagtaaatggattgtcttagcaacca

SEQ ID NO: 6370 - DNA, 478 bp, Homo sapiens
  MAP TO AC005909.1; EXPRESSED IN PLACENTA, SIGNAL = 1.9; EXPRESSED IN LUNG, SIGNAL = 2.2; EXPRESSED IN HELA, SIGNAL = 2.2; EXPRESSED IN FETAL LIVER, SIGNAL = 1.8; EXPRESSED IN ADULT LIVER, SIGNAL =   2; EXPRESSED IN HEART, SIGNAL = 2.5; EXPRESSED IN BRAIN, SIGNAL = 2.8; EXPRESSED IN BONE MARROW, SIGNAL = 1.8
caaagaatgctttaatgctgatgacattacctttatcatctttggggagaaactactgcccaggctggaatccctgtgtccagcgaataaaacagatgtccaggtagttcagtttcaggtacctgtggatcttctgacaggcctccttaacaaggggtctctcaaagaaggtgagcctcaacttgctaatgataaagcggtactcctgtttgacagtcttctcttggatcttctcctggatggcttccccacctcatcttcattctcacatagacaggcacagtcaatgtggcaatatctcacatcaagggccaccttcatagtttcttcaactttgcctggaggagacttccaggtctccaggcctatgatggccatcttgtctttggtactgagctctacaaaggtggccatggttagtgcaaaaatggttcttagtgagcagatagaagtctgtattagtccattctcacattgc

SEQ ID NO: 6371 - DNA, 455 bp, Homo sapiens
  MAP TO AC006142.1; EXPRESSED IN LUNG, SIGNAL = 1.9; EXPRESSED IN FETAL LIVER, SIGNAL = 1.8; EXPRESSED IN BONE MARROW, SIGNAL = 1.7; EXPRESSED IN PLACENTA, SIGNAL = 1.8; EXPRESSED IN HELA, SIGNAL = 1.8; EXPRESSED IN BRAIN, SIGNAL = 1.5; EXPRESSED IN ADULT LIVER, SIGNAL = 1.8; EXPRESSED IN HEART, SIGNAL = 1.6
cctactccagattgggcctccttcggaaacttacagtggaaaacaaagaaagcagacatcttgtttctctgtcagcttctctctaccttatacccaaatccgcaggattgcaaggggagagaaacaaaagaaaagaaagcaggaaaagacctgcttgatttgctcagtgttgatgctcttggtggtgtgaccaaagctgacttttttcttgagcatatgattgtgaattcttcagaggtccctgatgtatcttctttagctgaccaattgctactcctcatcagctcctgcctctgcaaccaaccccacattctcatacttccagggaccccttgcctttgcagaattcatttcagaggctccagctttcacatcaggcccatgggaaagtacccccttcatgccaaatggtgaaagtgcagccttagctctttccccaccttcatacatggctt

SEQ ID NO: 6372 - DNA, 455 bp, Homo sapiens
  MAP TO AC004765.2; EXPRESSED IN BONE MARROW, SIGNAL =  13; EXPRESSED IN PLACENTA, SIGNAL =  12; EXPRESSED IN LUNG, SIGNAL =  14; EXPRESSED IN HELA, SIGNAL =  13; EXPRESSED IN HEART, SIGNAL =  12; EXPRESSED IN FETAL LIVER, SIGNAL =  12; EXPRESSED IN BRAIN, SIGNAL =  15; EXPRESSED IN ADULT LIVER, SIGNAL =  12
ggtttgtctagagaattcatgtgcaaatacagcctggtaattttaaaatctcagacttagaggaacactgagcttttaataattatctgcaaatttggtttcctccctcaggatgtctatcctggttccacgctgtttacctgtcaaagagaatgaatagagcatccttagcgcttgctatttgcccagaaaaatatgttttcaggtaggcaagtttctttctaatcagtaaatacgagagggggaaaatcctaagactcactaagattcagtgtcttgggtttagatggaggttatatttggacatacaattacctgctagtaaagttagtcactgtgtaggtgactctacggccgaactcatcccctttctgtgtctcagtttccccatatattttattccagtttgcacccttcctcaaagggactgtgggagaaagaggataagtgtatga

SEQ ID NO: 6373 - DNA, 453 bp, Homo sapiens
  MAP TO AC005915.1; EXPRESSED IN LUNG, SIGNAL = 1.5; EXPRESSED IN BONE MARROW, SIGNAL = 1.5; EXPRESSED IN ADULT LIVER, SIGNAL = 1.4; EXPRESSED IN PLACENTA, SIGNAL = 1.3; EXPRESSED IN HEART, SIGNAL = 1.7; EXPRESSED IN FETAL LIVER, SIGNAL = 1.5; EXPRESSED IN BRAIN, SIGNAL = 2.1
tcacatgaccatattcctctctgaaataagaattgatgagtaagtttattgaagagctataggttaaaaccaacattaggtatatgtaaccaatactctaaatatgggataccttcagaaagcatctttctgtctccctctattcctatatatttggtggatgaatttttcactgtttaggataaaaacaacaggtcatatcaggactcttgaacattctcaggcaatagaatgccccacagtcacttgaaattgtttttggtgcatctaatcccatgtcataatcaaaacttaagacttggtttaaagttaagttgtatcttttccccgactgagaagccatgtgggggtgggaaggtgaggaaggggagcgtcttctccttgttcctggcagcttctgatccttgtagggttgctatgggagaaagaaaaagtggagaggggtgagaatgt

SEQ ID NO: 6374 - DNA, 453 bp, Homo sapiens
  MAP TO AC003109.1; EXPRESSED IN PLACENTA, SIGNAL = 1.6; EXPRESSED IN LUNG, SIGNAL = 1.8; EXPRESSED IN HELA, SIGNAL = 1.7; EXPRESSED IN FETAL LIVER, SIGNAL = 1.5; EXPRESSED IN HEART, SIGNAL = 1.9; EXPRESSED IN BRAIN, SIGNAL =   3; EXPRESSED IN BONE MARROW, SIGNAL = 1.7; EXPRESSED IN ADULT LIVER, SIGNAL = 1.7
gttgactttgatttttaatgctaggaaaataatttctaatgcagctggacatggtttccagagataattcaaatagcaaagaataactgaaggcagtttgggaacgtgtaaggttgttttcagttgaaggatgctgttggcatttagggtctgagagccatgggctcttgcctcaataatgtgtgaaaccacaaaatccagaattgttccccccataacatcaataacactgagaaacctaattagggagtgccttcacctgcgtgtcatagaagtccaacttagtggcttgcccaggtggaggcttgttttcctcacatcctgagtggcacagaggcaggctgtgcgtggctggtgggggctccgtgtgcccagagtcctgggtaccttctgtcttccacgccaccatcctaagggtgggtttcatcctcactgcttccagatggctgctcc

SEQ ID NO: 6375 - DNA, 441 bp, Homo sapiens
  MAP TO AC004993.1; EXPRESSED IN BONE MARROW, SIGNAL = 4.8; EXPRESSED IN ADULT LIVER, SIGNAL = 5.1; EXPRESSED IN PLACENTA, SIGNAL = 5.1; EXPRESSED IN LUNG, SIGNAL = 5.3; EXPRESSED IN HELA, SIGNAL = 4.9; EXPRESSED IN HEART, SIGNAL = 5.1; EXPRESSED IN FETAL LIVER, SIGNAL = 4.5; EXPRESSED IN BRAIN, SIGNAL = 5.2
cagcagaccaccaaacaatgaccatgactttttttttttggtgcaagtttggctttgagaagggctttggagcttcttctaggtccaaccactgagctggttgtcactgattgttgtataaaatccactttttgttgcacatcacagtccaatcccagaaatggtttgttgttgtcgtgtagaataagagaagaagacacttcaaaatgacaacttttttctttgctcagctcatgaggcacccacttatcaagcttttttacctttccaatttgcttcaaatgccaaatgaccacaaaatggttgacactgagttctccagcaacttctcctgcagtcgtgaaaggatcagcttcgatgattgctctcagttggtcattgtcagcttccagtagttggccacaatgctccttattatcaaggctcttgtctcctttgcaa

SEQ ID NO: 6376 - DNA, 490 bp, Homo sapiens
  MAP TO AC002299.1; EXPRESSED IN BONE MARROW, SIGNAL = 1.2; EXPRESSED IN PLACENTA, SIGNAL = 1.1; EXPRESSED IN LUNG, SIGNAL = 1.1; EXPRESSED IN FETAL LIVER, SIGNAL = 1.2; EXPRESSED IN BRAIN, SIGNAL = 1.2; EXPRESSED IN ADULT LIVER, SIGNAL = 1.3; EXPRESSED IN HEART, SIGNAL = 1.6
gatttcgagtccgcagtgagctatgatcatgttactaccctctaggctgcagtgagtcatgatcatgctattgcaatctaggctgggtggcagagcaagaccctgtgtctgaaaatataaaagtgtgaagtcaatagaaaacattacctgttgtttcagagtcaacagaaggcacctatacaaagctaagtgtggctacaaatgaacaccagctgctcataactggcccccagactccttccaactgccctgacatgcttgctctctttcccaggtcatgctttcagaacgaaaaggcacagatgagctctatgctgtgaagatcctgaagaaggacgttgtgatccaagatgatgacgtggagtgcactatggtggagaagcgggtgttggccctgcctgggaagccgcccttcctgacccagctccactcctgcttccagaccatggtaacttgtcccatggccctgggtattccacctccagggctt

SEQ ID NO: 6377 - DNA, 396 bp, Homo sapiens
  MAP TO AC004903.2; EXPRESSED IN BRAIN, SIGNAL = 1.2; EXPRESSED IN BONE MARROW, SIGNAL = 1.4; EXPRESSED IN ADULT LIVER, SIGNAL = 1.4; EXPRESSED IN LUNG, SIGNAL = 1.7; EXPRESSED IN PLACENTA, SIGNAL = 1.6; EXPRESSED IN HEART, SIGNAL = 1.4; EXPRESSED IN FETAL LIVER, SIGNAL = 1.4
ccattttcatggcattagccacataaatacacttacaccagaagcaaagtctaattgctacagtaagtcaagtttatgaaaagatttgggatcatatccctgcgtattagctatttatatatcctcagtccaattacttacaagtgaatcttaattcttacatgttaatctcatcagaatattataagtgtgtaatgagaaacttaaacaaaacaaaacaaaaaaacaataaaatactaagcatctttcatggctgtggttcccaagcagagtgccaatgaaccctggaaagttacagtgaacttggagggacactatgtgtattctgaattttcaaaagaatcacagcaacagccactggacacggacactgtgcaaagtgctattttgttgttt

SEQ ID NO: 6378 - DNA, 492 bp, Homo sapiens
  MAP TO AC004687.1; EXPRESSED IN LUNG, SIGNAL = 2.9; EXPRESSED IN FETAL LIVER, SIGNAL =   3; EXPRESSED IN BRAIN, SIGNAL = 3.2; EXPRESSED IN BONE MARROW, SIGNAL =   3; EXPRESSED IN PLACENTA, SIGNAL = 2.5; EXPRESSED IN HELA, SIGNAL = 2.8; EXPRESSED IN HEART, SIGNAL = 2.8; EXPRESSED IN ADULT LIVER, SIGNAL = 2.6
aaatccagttgccctctctgcctgtcctctgctctggtcctgctctcacacctttggctgtgctatgtgtctgtttttcttctaggatttctctgtcccatgtggctcccatctcccttctcccaccctgcccctgagccatggtgtgcctcccccatttaggacatggctctttctccctctgccaaaggacccttgttactgtggctggggctgaccctgcctggaaccccctgtgccccctcactgtccttatctctcctgccttgcctcacttcttgcagaaggaggacacagcagagcttggggttcatctggtgaactccctcgtggaccacggccgcaactcagacctgtcagacatccaggaggaagaggaagaggaggaggaggaggaggaagaggagctgggttccaggacttgctccttccagaagcaggttgctggcaacagcatcagggagaatggggccaaggtaacggggtagggat

SEQ ID NO: 6379 - DNA, 447 bp, Homo sapiens
  MAP TO AC004825.2; EXPRESSED IN HELA, SIGNAL = 7.4; EXPRESSED IN FETAL LIVER, SIGNAL = 6.8; EXPRESSED IN BRAIN, SIGNAL = 8.2; EXPRESSED IN BONE MARROW, SIGNAL = 7.1; EXPRESSED IN ADULT LIVER, SIGNAL = 7.1; EXPRESSED IN PLACENTA, SIGNAL = 8.5; EXPRESSED IN HEART, SIGNAL = 7.4; EXPRESSED IN LUNG, SIGNAL = 8.1
cctgtctagtaatgaggccaagaatattgatttaatcccccaaacacaccagttagcttagctctgttctaatattaaaatatgtacccatcattgtatctacagtggtaagatctaacactgccttaaaaccatataaagaaaacaagtacaatataataatcacatcattatacagataacacaatctaaatcattacgatcaatcaatgacataggtttccttacctcggtccattgctgtcttttctcctggttgaacagttgccttgttcagctttggttcgctgatccgtgaactcatttgcagtcctatctacaacttctccagcatcaagtgctctgtgtagtcgatagttgaccatcttcagaacaatgaaaacagcagctatcacaggacaataaactgctactataatcatggtagaaggaagggcctttaagaga

SEQ ID NO: 6380 - DNA, 459 bp, Homo sapiens
  MAP TO AC002041.1; EXPRESSED IN LUNG, SIGNAL = 1.9; EXPRESSED IN HEART, SIGNAL = 1.4; EXPRESSED IN FETAL LIVER, SIGNAL =   3; EXPRESSED IN BRAIN, SIGNAL =   2; EXPRESSED IN BONE MARROW, SIGNAL = 1.3; EXPRESSED IN PLACENTA, SIGNAL = 3.3; EXPRESSED IN ADULT LIVER, SIGNAL = 6.5
gggagcttgctcactacctgctcctctgacgtgccattactcagaggtgggtggccgtctcccttccccatgccctggtgaagagcggcacagtgccatcactcagaggtgggtggctgtctcccttccctgtgccctggtgaattgcggcacagtgccatcactcagaggtcggtggccgtctcccttccctgtgtcctggtgaagagcagtgcagcagcttctccccttgtttcctcctcagagtccatgccgaggtggcgcagggtgcgcccgcaggccttgctgactgccacccatagcagcacactggtggaggtggtggtggcactgctgtgcacgctgcactccctgactcagtggaatgggctcatcaacaagtacatcaactcccagctccgctccatcacccacagctttgcgggaaggccttctgaaggggtgagtttgtgttctcag

SEQ ID NO: 6381 - DNA, 473 bp, Homo sapiens
  MAP TO AC003665.1; EXPRESSED IN BONE MARROW, SIGNAL = 1.3; EXPRESSED IN ADULT LIVER, SIGNAL = 1.1; EXPRESSED IN PLACENTA, SIGNAL = 1.1; EXPRESSED IN LUNG, SIGNAL = 1.3; EXPRESSED IN HEART, SIGNAL = 1.4; EXPRESSED IN FETAL LIVER, SIGNAL = 1.3; EXPRESSED IN BRAIN, SIGNAL = 1.5
gacttccctgggtggtcaggtttcctgcttatatgcaagcaggtacttctttttcatcgcattcaacacagttgcatgcttacatttatctctgtgattattttgtctgcctcccccaccaaaacgtaggctccatgagggtaggtagttctcttctccaccatgttctcagcacctcgcccagtgcctggcatagaatagatgctcaatggtaaatgaaccactccccgatctcctccacagagggggcccgcaacatctccaaccagctgagcattggcacggacatctcggcccaacacccggagctgcggactcatgcccaggccaagggctggtgggatgggcagggtgcctttgactttgctcagatcttctccctgacccagcagcctgtgcgcatggaggctgccaaggcccgcttccaggcagggcgggagctgctgcggcaacggcaaggttagtgaacggtg

SEQ ID NO: 6382 - DNA, 456 bp, Homo sapiens
  MAP TO AC004692.1; EXPRESSED IN LUNG, SIGNAL = 1.3; EXPRESSED IN FETAL LIVER, SIGNAL = 1.4; EXPRESSED IN BONE MARROW, SIGNAL = 1.5; EXPRESSED IN PLACENTA, SIGNAL = 1.2; EXPRESSED IN BRAIN, SIGNAL = 1.8; EXPRESSED IN ADULT LIVER, SIGNAL = 1.3; EXPRESSED IN HEART, SIGNAL = 1.6
aaaacgatcctgaggttccctacaccataccccgccccaccacatccttcatctagacacatcctgggtctagaacgtatcaggagacagaggtgtagaaccacagccagcttccctaaacttccactaatctccggcttgcttttggttataatgttgtgcagatataaattgacaaagtcatgagaagcctctcttctaactctgcagtttgtcatcctgacaccaacagaaaatcaggacatcattaattctctacacttattgatttggaacctccattgtaaggccggctgctttactctccctcctcctcctcctcctcctccttttcctcctcctcctcctcctcctcctcctccttttcctcctccttctcctgtccctcttcccccatctccccgttctcctcctgtttcccctccccctcctcatagttttcagggtcggagtcct

SEQ ID NO: 6383 - DNA, 446 bp, Homo sapiens
  MAP TO AC004829.2; EXPRESSED IN LUNG, SIGNAL = 3.7; EXPRESSED IN FETAL LIVER, SIGNAL =   4; EXPRESSED IN BONE MARROW, SIGNAL = 3.8; EXPRESSED IN PLACENTA, SIGNAL = 3.8; EXPRESSED IN HELA, SIGNAL = 4.1; EXPRESSED IN HEART, SIGNAL = 3.9; EXPRESSED IN BRAIN, SIGNAL = 4.6; EXPRESSED IN ADULT LIVER, SIGNAL = 3.5
ctaggaagtgggtttgcctgataagagaaggaggaggggactcggctgggaagagctcccctcccctccgcggaagaccactgggtcccctctttccccaacctcctccctctcttctactccacccctccgttttcccactccccactgactcggatgcctggatgttctgccaccgggcagtggtccagcgtgcagccgggagggggcaggggcagggggcactgtgacaggaagctgcgcgcacaagttggccatttcgagggcaaaataagttctcccttggatttggaaaggacaaagccagtaagctacctcttttgtgtcggatgaggaggaccaaccatgagccagagcccgggtgcaggctcaccgccgccgctgccaccgcggtcagctccagttcctgccaggagttgtcggtgcgaggtaagggtcccagagga

SEQ ID NO: 6384 - DNA, 480 bp, Homo sapiens
  MAP TO AC003668.1; EXPRESSED IN PLACENTA, SIGNAL = 2.5; EXPRESSED IN LUNG, SIGNAL = 2.7; EXPRESSED IN HELA, SIGNAL = 2.8; EXPRESSED IN FETAL LIVER, SIGNAL = 2.4; EXPRESSED IN HEART, SIGNAL = 2.6; EXPRESSED IN BRAIN, SIGNAL = 3.1; EXPRESSED IN BONE MARROW, SIGNAL = 2.6; EXPRESSED IN ADULT LIVER, SIGNAL = 2.8
tgcttcaatcaagtaatatccgtagttaaaaataccattcaatattagttttgtaatccaagtgttaacaatcttggaaatcacaaatagtttaagacttgaggatataattttttttttctttttatgaacacctggtcaaatcatatattaattcctagaaagattctgggtaccaacacttactgatttttcttactgtgggcaatatccgtaaaaacagactaatcacgtactcctgacttctctttccccatcttattttcagatctttattccttttcacagttgctttagaaatccaagtaattgaagagcatcacaagatttggaagggacgagagtctggtcgtgactatactattggtcccgagggaaagatcattgctcttagttgccttaattttgtttctattatagggccttttctcaaagctttgcagacaaaattccagctgaggtttttccttcaaggcagca

SEQ ID NO: 6385 - DNA, 447 bp, Homo sapiens
  MAP TO AC004703.1; EXPRESSED IN HELA, SIGNAL =   2; EXPRESSED IN FETAL LIVER, SIGNAL = 2.2; EXPRESSED IN BRAIN, SIGNAL = 2.4; EXPRESSED IN BONE MARROW, SIGNAL = 2.3; EXPRESSED IN ADULT LIVER, SIGNAL = 2.1; EXPRESSED IN PLACENTA, SIGNAL = 1.9; EXPRESSED IN HEART, SIGNAL =   2; EXPRESSED IN LUNG, SIGNAL = 2.1
tctcatggacacagaattccctgagtattggctctcagggaggtaagacttcagggagtggggtagatggatagggtacatatttatctaaggtaaagaaggactcatcccactccttctgattcagagactgttaggatgaatcagcagaaacctgtttgatcatccagtcagctcctcttgttttaaaggagaaactgaggtcaatagatgtgtgatctgcccctcagacatcaggttggtcagggatcagggtatttgtcttatgaatattaatttttccaattccgaagatagacctaaagcagttccttttgtctgtgaatgagaagacctccacaaagatacagaggctggatgaagatgtacgcaagctctttcctcctgagacccagtgagggaggcaagggaggctccctagctaaagagggagctcaaagttgcagc

SEQ ID NO: 6386 - DNA, 451 bp, Homo sapiens
  MAP TO AC004836.2; EXPRESSED IN PLACENTA, SIGNAL = 9.8; EXPRESSED IN LUNG, SIGNAL =  12; EXPRESSED IN FETAL LIVER, SIGNAL = 9.9; EXPRESSED IN HELA, SIGNAL =  10; EXPRESSED IN BRAIN, SIGNAL =  12; EXPRESSED IN BONE MARROW, SIGNAL =  11; EXPRESSED IN ADULT LIVER, SIGNAL = 9.1; EXPRESSED IN HEART, SIGNAL = 9.6
cagcatcacatgcaggagtccctttagtgaagtatcatagggcttatgttggaaggactaaggcaaaacaactggttcctctgacagtgaatgaatgctggtttccgggatgccagatgcttccttcctaggaatatccctttgcaaagtgcatgcatgcaaaacagatcttctttcacatggttactaagaattttgcattttgttttaggttgtcaccactgggatggaacaactagattttgaaacaggaccaaacatatttgatttgcagatttatgtgaaggatgaggttggtgtcacagacctgcaagtcctgactgtccaggtaacagatgtgaacgagccacctcagtttcaaggcaacttggcagaaggtaggatacaccaggatgtgcactgcagcccagacagtggcatcagggagggccctgggggacagagagaaaca

SEQ ID NO: 6387 - DNA, 462 bp, Homo sapiens
  MAP TO AC003089.1; EXPRESSED IN BRAIN, SIGNAL = 1.8; EXPRESSED IN BONE MARROW, SIGNAL = 1.5; EXPRESSED IN LUNG, SIGNAL = 1.4; EXPRESSED IN ADULT LIVER, SIGNAL = 1.4; EXPRESSED IN PLACENTA, SIGNAL = 1.7; EXPRESSED IN HEART, SIGNAL = 1.4; EXPRESSED IN FETAL LIVER, SIGNAL = 1.4
gcatttgacaatccagcctctattaataactagcatacactattggtcctctgttcctcggtattcaaatactaaaaaacgaagaatgcatgaacaggcatgctaatcaattagatgaaacatgctatgttctagtcataaatatagatctaaattttaaaagcataacttcagttctcctaattcttttccccatcaacattaagaagatctaagtgcttatgaatctgacaccaatcatttcagaatccaaggagcactgacctcggctttaattttgttgtctccaaaacagaggtgttgcaagtaggctgccgcgttagactggaccgagggaaactggtgctgcaacatctgaatcacttccggcagttccgggtctctccatccaaattctctgaacaaaaggaaagaagcggggagaatatgagagagaaatcctaccacactgttaacacatgg

SEQ ID NO: 6388 - DNA, 473 bp, Homo sapiens
  MAP TO AC005703.1; EXPRESSED IN ADULT LIVER, SIGNAL = 1.3; EXPRESSED IN PLACENTA, SIGNAL = 1.4; EXPRESSED IN HEART, SIGNAL = 1.5; EXPRESSED IN LUNG, SIGNAL = 1.4; EXPRESSED IN FETAL LIVER, SIGNAL = 1.6; EXPRESSED IN BRAIN, SIGNAL = 1.2; EXPRESSED IN BONE MARROW, SIGNAL = 1.3
gctgcaaatgagaggaagacagaagatatggaagacaaaaggaggttcagctgctttttctacctcaggtaagaacactagtctgcttcctttcagctttttaatatctcaaatagattccctcatcttcattatccaacttatatgaatgctaatttggctccatgttgcttctactcaaatcattatggcctctttgataattttcagggccctttccctaaataattcagcaataaatggccagaaaattaggtccctcaatgaggtgattcctagcttgtattttaggctttttgaggaccagagacatcccattaccttgagtaatgaggattataggaaggaatcacatagaattaagaaatgccatggaaatgggagcatgtttgcaaacgacaaagtccttcagaatgtaagaaggctccagtgagagttatctcattgcttcttggcagatcgagtcgtgaatc

SEQ ID NO: 6389 - DNA, 478 bp, Homo sapiens
  MAP TO AC005841.3; EXPRESSED IN PLACENTA, SIGNAL = 1.8; EXPRESSED IN LUNG, SIGNAL = 1.9; EXPRESSED IN HEART, SIGNAL = 1.7; EXPRESSED IN BRAIN, SIGNAL = 1.9; EXPRESSED IN FETAL LIVER, SIGNAL = 2.4; EXPRESSED IN BONE MARROW, SIGNAL = 2.4; EXPRESSED IN HELA, SIGNAL = 2.7; EXPRESSED IN ADULT LIVER, SIGNAL = 1.7
tttaggctcatgttcctggtcatataaagaggagcacctttctctaaaaggacctcttctcagcctaaacaatctctaacatcttgccactatttgcattttccagggtccacacttgtgattctcaatggagagtgaaaacgcagattcataatgaaaactagcccccgtcggccactgattctcaaaagacggaggctgccccttcctgttcaaaatgccccaagtgaaacatcagaggaggaacctaagagatcccctgcccaacaggagtctaatcaagcagaggcctccaaggaagtggcagagtccaactcttgcaagtttccagctgggatcaagattattaaccaccccaccatgcccaacacgcaagtagtggccatccccaacaatgctaatattcacagcatcatcacagcactgactgccaagggaaaagagagtggcagtagtgggcccaacaaattcatcctca

SEQ ID NO: 6390 - DNA, 464 bp, Homo sapiens
  MAP TO AC002099.1; EXPRESSED IN FETAL LIVER, SIGNAL = 4.9; EXPRESSED IN BRAIN, SIGNAL = 5.3; EXPRESSED IN BONE MARROW, SIGNAL =   5; EXPRESSED IN PLACENTA, SIGNAL = 4.2; EXPRESSED IN HELA, SIGNAL = 4.6; EXPRESSED IN HEART, SIGNAL = 4.8; EXPRESSED IN ADULT LIVER, SIGNAL = 4.6; EXPRESSED IN LUNG, SIGNAL = 5.2
tcctcagcctcctgagtagctgggactacaggcatgagccaccgtgcccagctactggcctggtcttgaagtcagcggacaggaggcaatgaagtgcaaggcataaatgggtgtaaagccgtctaaggatgccttttgtattttaaaacccatcgccccaaaaggagacaagacgcatcaaaaccagctgcagtgagtggtctcagacagaaaagggaacaaaagggagaaaacgaatccagttactactttcccttctaagttcctgagctgtggatgacataccctgcttgaggttctcaggccgaatcccactgaccgctgtcctatagtccgtcacgggctcagttggtttgacgtacttgtcataaacgcacttcccatactggttcacgatggacacacgggcggccatgctctcctcccccttagggcccacgcccaccatctcacagtccaaggct

SEQ ID NO: 6391 - DNA, 467 bp, Homo sapiens
  MAP TO AC004841.2; EXPRESSED IN PLACENTA, SIGNAL =  16; EXPRESSED IN HEART, SIGNAL =  10; EXPRESSED IN FETAL LIVER, SIGNAL =  11; EXPRESSED IN BRAIN, SIGNAL = 6.9; EXPRESSED IN BONE MARROW, SIGNAL =  11; EXPRESSED IN HELA, SIGNAL =   9; EXPRESSED IN ADULT LIVER, SIGNAL =  18; EXPRESSED IN LUNG, SIGNAL =  10
acgaagcaagtaaccatcggtagtcttgacatcaacgtgagcttcaatcattgtctgccattttttgaccatggaacacattttgtcacgggtaagatccatgccatggaagttaggcagtttttaccctgaacatcttcagtaatcagcctgaattttctaaatgcaacttcatcattctgcaaatcagcaagactcacttcaaacacacgacccttgagaccatcagatgcaattttggttccttgggtcctggtgacgagcgtctttccaatatttcttatactgaacatagcaggtgctttcacatcataccaatctttcttagaaaatggatcaaccactttcttcttggctccctttttgccgcctttcgtaaggcgcttgttcttgccaaccgccatggtgctggtcagagagccaaaagcaggaatcaacatttctacaatgttctttccgagaacttt

SEQ ID NO: 6392 - DNA, 490 bp, Homo sapiens
  MAP TO AC005722.1; EXPRESSED IN ADULT LIVER, SIGNAL = 0.51; EXPRESSED IN LUNG, SIGNAL =   4; EXPRESSED IN HEART, SIGNAL = 4.5; EXPRESSED IN BONE MARROW, SIGNAL = 0.65
tgctggccaccaattctacctttactttctagggaggccatatggtgtggcagtgaagcctgagtactgtagggttgtgttcaaaacacagttacttctgtgtaacatggacaagtgatctgacctgtcttggacagccaccctcagggaagaaagggagataagggcacccatccagtgctgtgagaactcagtgaagcaatgccatgcgaatggcttagcacagtgcctgctgcatgacacctgctcttagtctcatcatcctgactcttgcccatttctgtctcccctcctagtgtgtctatggcggagttctgagaggaactgggaagcaggcctttggtgccgctgtgaatgccatcacatattacatcatcggcctaccactgggcatccttctgacctttgtggtcagaatgagaatcatgggtatgtggtgtgaggaagtcgggagaggcctgggtggtcgtcggacattgttcccatcatc

SEQ ID NO: 6393 - DNA, 461 bp, Homo sapiens
  MAP TO AC004845.1; EXPRESSED IN PLACENTA, SIGNAL = 1.3; EXPRESSED IN LUNG, SIGNAL = 1.6; EXPRESSED IN FETAL LIVER, SIGNAL = 1.8; EXPRESSED IN BONE MARROW, SIGNAL = 1.8; EXPRESSED IN ADULT LIVER, SIGNAL = 1.5; EXPRESSED IN HELA, SIGNAL = 1.9; EXPRESSED IN HEART, SIGNAL = 2.5; EXPRESSED IN BRAIN, SIGNAL = 1.9
agggtgtgaaaaatatgcccgtaaaacccacggagacattggaacaggcaggatccctctggctctaggaggacggctcccagcattgagtgggctttggccactttcccatccttgggaactagggaccacagatcaagttttcaagaacaggcagtaatgttgtgtgcttttcaccgaaacgtactccttctttggcctaaagtctctggtgcgccagggctacgtgagcacgctgtatctttggtctttaattaaactttactcctccatctcatgcaacacgtgcacgttagacactagtatgccaattttaaccacctccaagatgtctttgtgggccacagaaatgctctctgcaatggtgataggaacctgtccaactgtcattgtgtggagtatgaaaagacacgtggcaacacgcatcgtctgaaaggactccagtctctgcaagcatatgg

SEQ ID NO: 6394 - DNA, 456 bp, Homo sapiens
  MAP TO AC005726.1; EXPRESSED IN PLACENTA, SIGNAL = 2.1; EXPRESSED IN LUNG, SIGNAL = 2.5; EXPRESSED IN HEART, SIGNAL = 3.2; EXPRESSED IN BRAIN, SIGNAL = 5.3; EXPRESSED IN FETAL LIVER, SIGNAL = 2.2; EXPRESSED IN BONE MARROW, SIGNAL = 2.4; EXPRESSED IN HELA, SIGNAL = 2.6; EXPRESSED IN ADULT LIVER, SIGNAL = 2.6
agcagagggtgaggtctggcttttttatcttgtctccactccagggagctgtcaccatgcctcactcgtacccagccctttctgctgagcagaagaaggagttgtctgacattgccctgcggattgtagccccgggcaaaggcattctggctgcggatgagtctgtaggtaagtggacatctgtagccaggtagggtacaggtggctaggggaccctggggatgttctcactgcctctctttgtttgcccctaggcagcatggccaagcggctgagccaaattggggtggaaaacacagaggagaaccgccggctgtaccgccaggtcctgttcagtgctgatgaccgtgtgaaaaagtgcattggaggcgtcattttcttccatgagaccctctaccagaaagatgataatggtgttcccttcgtccgaaccatccaggataagggcatcgtcgt

SEQ ID NO: 6395 - DNA, 468 bp, Homo sapiens
  MAP TO AC004849.1; EXPRESSED IN LUNG, SIGNAL = 2.6; EXPRESSED IN ADULT LIVER, SIGNAL =   3; EXPRESSED IN PLACENTA, SIGNAL = 2.5; EXPRESSED IN HELA, SIGNAL = 2.7; EXPRESSED IN HEART, SIGNAL = 2.9; EXPRESSED IN FETAL LIVER, SIGNAL = 2.7; EXPRESSED IN BRAIN, SIGNAL = 2.8; EXPRESSED IN BONE MARROW, SIGNAL =   3
tttttctttttgcatttagaccagtttatatatatttctaattatatgtattgaattgtgtatattacattatctataaattttagtttaggatagcaaaaggagatttacaaaacatttgtcattaaaagaatgagaagtgataggttaagaaccactgatatagataatccagtatatgaattaacccatcactaccgtattttttttaaactgaccttaccaataaaaatgacatttttattcttatgtttttccttagtgccgatgaaataattataaagatgcatggcagccagctgacacaaagatatctggagaaacatggatttgatgtccctattatggtcccaaaattagatgatctaggactcaggctcccttcacctacattttctgtgatggatgtggaacgttatgtaggtacgaactttatttctttaagtacctgggaaaacatggtaaaag

SEQ ID NO: 6396 - DNA, 471 bp, Homo sapiens
  MAP TO AC004763.1; EXPRESSED IN PLACENTA, SIGNAL = 5.2; EXPRESSED IN LUNG, SIGNAL = 5.4; EXPRESSED IN FETAL LIVER, SIGNAL = 6.1; EXPRESSED IN BONE MARROW, SIGNAL = 5.5; EXPRESSED IN ADULT LIVER, SIGNAL = 5.7; EXPRESSED IN HELA, SIGNAL = 5.4; EXPRESSED IN HEART, SIGNAL = 5.9; EXPRESSED IN BRAIN, SIGNAL = 6.4
caaattagctttccaagcagttcatattttcaaatcttttacaattacctgaattttaataacagcatacaaatgatggaaactgcattttaagtttttcaattacggttcaagttctacacttcaatcgatgcaaataactgcagaaaaacaggaaacctctttggataaaatgatttgcaaaattcactgactgcctcaaaataaggctctagatatacaaaagcattgttaacgaaatgtaagtcatggtttccatttaatgcttatttttcttaccttaaagctgacatactgaagatgagcaaaatgctttttaatgatctgctgaatgagatcaggatgagtggacttaaaagatgaagtagctgactggttcagttcaaattcaaactttctccaaaggtcagaaatatgaaaaacttcattccacctcctacatacagaagatgcacaggcccgatctagtaa

SEQ ID NO: 6397 - DNA, 403 bp, Homo sapiens; identical to SEQ ID NO: 5781
  MAP TO AC004853.1; EXPRESSED IN PLACENTA, SIGNAL = 2.8; EXPRESSED IN LUNG, SIGNAL = 3.2; EXPRESSED IN HEART, SIGNAL =   3; EXPRESSED IN FETAL LIVER, SIGNAL =   3; EXPRESSED IN BONE MARROW, SIGNAL = 3.2; EXPRESSED IN ADULT LIVER, SIGNAL = 3.3; EXPRESSED IN HELA, SIGNAL = 3.1; EXPRESSED IN BRAIN, SIGNAL = 3.4

SEQ ID NO: 6398 - DNA, 469 bp, Homo sapiens
  MAP TO AC005737.1; EXPRESSED IN BONE MARROW, SIGNAL = 3.5; EXPRESSED IN ADULT LIVER, SIGNAL = 2.5; EXPRESSED IN PLACENTA, SIGNAL = 2.5; EXPRESSED IN LUNG, SIGNAL = 1.6; EXPRESSED IN HELA, SIGNAL = 2.5; EXPRESSED IN HEART, SIGNAL =   2; EXPRESSED IN BRAIN, SIGNAL =   2; EXPRESSED IN FETAL LIVER, SIGNAL = 2.4
ctgccatcatcatcgtcatcattaccatcatcatcaccaacatcaccactgccgttgtcaccactgtcaccatcatcatcactaccacaccaccaccatcgttattaccactgctgttgtcaccaatgtcaccaccatcattatcatcattaccagcttattattatcatcaccatcaacattgccaccatcatcaccatcagtatcactgctaccattgtcaccaatgttaacaccattaccaccaacatcaacactgccattgtcaccaccattatcatcatcattgtcattatcactatcatcattgtcatcaccactattatcattgccactgtcatcaccatcaacatctccactgccattgtcactggtgtcaccatcatcactatcagtatcaccaccgtcatcatcgttaccgtcactaccatcatcaccattaccactgccattatcaccaatgtaaccg

SEQ ID NO: 6399 - DNA, 475 bp, Homo sapiens
  MAP TO AC004770.1; EXPRESSED IN LUNG, SIGNAL = 3.5; EXPRESSED IN HELA, SIGNAL = 2.1; EXPRESSED IN ADULT LIVER, SIGNAL = 4.1; EXPRESSED IN PLACENTA, SIGNAL = 2.1; EXPRESSED IN HEART, SIGNAL = 3.3; EXPRESSED IN FETAL LIVER, SIGNAL = 3.4; EXPRESSED IN BRAIN, SIGNAL = 3.5; EXPRESSED IN BONE MARROW, SIGNAL =   2
ataggcacacctgccttgtcaccctgtagcctcagagcactgagcagagaggaatcctggtccctctgtctcaactgctgtccaacaggacagatgcccagggctgctgacacttacctttaagtggccaatgacgaatttgtggacaaggtggttccacttgggttttctgtagacagacaggtggccataatcatgttgcagccatccagcttgggcctggggagagagggtcacacgtgctgtcacagcctcagcaaacaggcaccaggcctctgtcagctaggggaagtgagggtgtcacgcctcacctgagaggtagcaaggacaaaggccgtgatgagggtaggaatccagccattgccaaagtaaaagacagtgaaccatgcaatgctctccagggcgatgatgtgggccaggaggaggaggaagaacacgtggttggtcttgaacaggttcatgtcctcagccgtct

SEQ ID NO: 6400 - DNA, 493 bp, Homo sapiens
  MAP TO AC005740.1; EXPRESSED IN PLACENTA, SIGNAL = 1.5; EXPRESSED IN HEART, SIGNAL = 1.8; EXPRESSED IN LUNG, SIGNAL = 1.4; EXPRESSED IN FETAL LIVER, SIGNAL = 1.2; EXPRESSED IN BRAIN, SIGNAL = 1.3; EXPRESSED IN BONE MARROW, SIGNAL = 1.2; EXPRESSED IN ADULT LIVER, SIGNAL = 1.4
atcgcttccaatgaagatggccttgccttggggtcctgcttgtttcataatcatctaactatgggacaaggttgtgccggcagctctgggggaaggagcacggggctgatcaagccatccaggaaacactggaggacttgtccagccttgaaagaactctagtggtttctgaatctagcccacttggcggtaagcatgatgcaacttctgcaacttctgctggggcttttggggccaggtggctacttatttcttttaggggattgtcaggaggtgaccactctcacggtgaaataccaagtgtcagaggaagtgccatctggtacagtgatcgggaagctgtcccaggaactgggccgggaggagaggcggaggcaagctggggctgccttccaggtgttgcagctgcctcaggcgctccccattcaggtggactctgaggaaggcttgctcagcacaggcaggcggctggatcgagagcagctgtgccgac

SEQ ID NO: 6401 - DNA, 471 bp, Homo sapiens
  MAP TO AC005747.1; EXPRESSED IN BONE MARROW, SIGNAL = 3.9; EXPRESSED IN ADULT LIVER, SIGNAL = 4.4; EXPRESSED IN LUNG, SIGNAL =   4; EXPRESSED IN HELA, SIGNAL = 4.1; EXPRESSED IN HEART, SIGNAL = 3.6; EXPRESSED IN FETAL LIVER, SIGNAL = 3.6; EXPRESSED IN BRAIN, SIGNAL = 3.7; EXPRESSED IN PLACENTA, SIGNAL = 3.8
tctcacagtgtcatcaccaccagacatgtttatgtatctttgtttctccttgtctcccccagttaaaaggtaaatttcccaagggtggcacagagtagctactcaattaatatttgctaaatggacacatggctaaatgactccaagacagtaacctctcacttgtctcacccggcaggtgaaggctgagctgcggaaatactgggtccgcttcttgctagcccgccactcaggctgcagagcctgtgtcctggggaaggacttccggttcctaggaaaatgtcccaagaagctctcggaaggagatggcgctgagaagcttcggaagctgcagccctcacttaacagtgggcggctcctacatctagccatgcgaggtcttggggagctgggcgcccagccccaacaggaccatgcacgctggccccggggcagcagcctgtccgagtgcagtgagggggatgtcaccat

SEQ ID NO: 6402 - DNA, 400 bp, Homo sapiens
  MAP TO AC004865.1; EXPRESSED IN LUNG, SIGNAL = 2.9; EXPRESSED IN BRAIN, SIGNAL =   3; EXPRESSED IN ADULT LIVER, SIGNAL = 2.7; EXPRESSED IN PLACENTA, SIGNAL =   3; EXPRESSED IN HELA, SIGNAL = 2.9; EXPRESSED IN HEART, SIGNAL =   3; EXPRESSED IN FETAL LIVER, SIGNAL = 2.7; EXPRESSED IN BONE MARROW, SIGNAL = 2.6
aacaccacttttatttgggtggtgagattagtttctttaatatttttgatatttttgcatttttcaagagaacatttaatagactattgtttcatgagacataacctgaaaaattatgtaacttttacctactcaaattagtttttttatttctttaggtccacaaggcgattacaatttccagtcccctaaccacagacctgactgcagagctgtctggtgggccaaagaatgtatcagtgcaacctgaaatatcagagggtcttgctactacgcccagcactcaacaagtaaaaagttctgagaaaacccagattgctgtcccccagccagtggctccctcctacagttatgctacccctaccccccaggcctctttccagagcacctcagcaccata

SEQ ID NO: 6403 - DNA, 457 bp, Homo sapiens
  MAP TO AC004958.1; EXPRESSED IN PLACENTA, SIGNAL = 1.8; EXPRESSED IN LUNG, SIGNAL = 1.9; EXPRESSED IN FETAL LIVER, SIGNAL = 1.8; EXPRESSED IN BRAIN, SIGNAL = 1.7; EXPRESSED IN ADULT LIVER, SIGNAL =   2; EXPRESSED IN HELA, SIGNAL = 2.1; EXPRESSED IN HEART, SIGNAL =   2; EXPRESSED IN BONE MARROW, SIGNAL = 1.7
gagggtggtgagaagtggagcaaaaatatatgtgtggaggcgcgcagatgcactggaagccttcggtcaaagcctgtttttctccttctgaagaggaatggggagaatgggaaaggggtgccctgcttctgggccccgctcctggttgctctcggatgagctggtccaaggctctcgggctggtgtctctgcgtccttcccagttgggttccgagagggagggggcggtggggattttcgtaggggagacgtaggactgcaggatggaggagtgagggtcagggtcattattttcgccttttctctccactccctcctttcccggttcctgcctggaggagacgcctcattgatggagctagagaagaggaaggaaaaccgcttcgtggagcgccagagcatcgtgccactgcgcctcatctaccgctcgggcggcgaagacgaaagtcggcacgac

SEQ ID NO: 6404 - DNA, 463 bp, Homo sapiens
  MAP TO AC004873.1; EXPRESSED IN PLACENTA, SIGNAL = 5.1; EXPRESSED IN LUNG, SIGNAL = 6.1; EXPRESSED IN HEART, SIGNAL =   5; EXPRESSED IN FETAL LIVER, SIGNAL = 5.2; EXPRESSED IN BRAIN, SIGNAL =   5; EXPRESSED IN BONE MARROW, SIGNAL = 4.5; EXPRESSED IN ADULT LIVER, SIGNAL = 7.2; EXPRESSED IN HELA, SIGNAL = 5.2
tgtggggaccaccaaaagcctcccaggcagctggagcactgtgtccaaaccaaggaagtccaatgtggggtgtggctgagtgaagagctgttcctaaggagccaagtgctgtctatacaggcttgccccctccaggagcattgggtcacctctggggatggccaggctgaatcagcactgccagcctctgcccacctgatctctgcctgggctggaacaggtcacctgagcaaaagcatgtccccaagaaggccagcgatgtcaacatctccaatgatagggcgaaagaagaggtccccaagcaggctggtcggaatggacttgagggtggaggccgtgaggaggacacgggtcaggcggccttgggctgctgggcaccagggttccaggacttcacacagcacccagtgagcctcctgctgcaggtgcccaatgtgggaggcggcttggaggcctggcacat

SEQ ID NO: 6405 - DNA, 486 bp, Homo sapiens
  MAP TO AC004968.1; EXPRESSED IN LUNG, SIGNAL = 8.9; EXPRESSED IN BRAIN, SIGNAL = 8.4; EXPRESSED IN PLACENTA, SIGNAL = 8.8; EXPRESSED IN HEART, SIGNAL = 8.9; EXPRESSED IN FETAL LIVER, SIGNAL = 8.5; EXPRESSED IN BONE MARROW, SIGNAL = 7.6; EXPRESSED IN ADULT LIVER, SIGNAL = 8.7; EXPRESSED IN HELA, SIGNAL = 7.4
gaagagagggactggtaaagacagaacaaagacgttagctacagaaaagagtaggacttcataaaagttgagaaacatacaaagttaagaatagaacacagaagaaatgaaggggcagggcacagaggatcatgcctgtaatcccagcactttgggccaaggcaggaaggaggattgcttgatcctaggaattccacaccagcctgggcaacatagcaagactgtatctcgtaaaaaaaaaaaaaaagagagagagagaagaaggaggaggaggaggaggaggaggaggagggaggaggagaagggagaaggaaggaggaggaggaggagggaggaggaggaggggaagaaagaagtggaagaagaaggggaggaggagggggagggggaggaagaggaggaggaggaagaagaaggaggaggaagagaaggaggaagaggaggaggaggaagagaggaggaggaagaggaggaggaggaagagga

SEQ ID NO: 6406 - DNA, 466 bp, Homo sapiens
  MAP TO AC004976.1; EXPRESSED IN LUNG, SIGNAL = 1.6; EXPRESSED IN FETAL LIVER, SIGNAL = 1.9; EXPRESSED IN BRAIN, SIGNAL = 1.6; EXPRESSED IN BONE MARROW, SIGNAL = 1.7; EXPRESSED IN ADULT LIVER, SIGNAL = 1.6; EXPRESSED IN PLACENTA, SIGNAL = 1.6; EXPRESSED IN HEART, SIGNAL = 1.8; EXPRESSED IN HELA, SIGNAL = 1.7
ttctaacttgtagggtgttggatgttgagtgagaatccccttggcctcctgggcagctcccagcggctttcttgttcctgagtctgtgctcggccaagttcgtcttcctaggatgccccactcttccttcccagttcccctccagctcccccgggaggctttaggcctctcctcattctgctgttctctcttctctctgaacgcccatgaatccctctcccctcagtcctgcttgtctcacctgtgccgagccctgggccctgaacactgactggagtaggagggggaaggggaggggagggagaggtgacttggcccaacataggggcaggaactggccagcaggaggtcccgtagcaggccacttggcctaaagctatctccttaattatcaacacatctaatgtccagtttgcataaaagtcacatctcttctgatttgttttggagtctgtccgaatgtcct

SEQ ID NO: 6407 - DNA, 465 bp, Homo sapiens
  MAP TO AC004883.2; EXPRESSED IN PLACENTA, SIGNAL =  37; EXPRESSED IN LUNG, SIGNAL =  43; EXPRESSED IN HEART, SIGNAL =  32; EXPRESSED IN BRAIN, SIGNAL =  40; EXPRESSED IN FETAL LIVER, SIGNAL =  32; EXPRESSED IN BONE MARROW, SIGNAL =  37; EXPRESSED IN ADULT LIVER, SIGNAL =  31; EXPRESSED IN HELA, SIGNAL =  31
aattaaccctggctgtgtggtggttgatggcatgcccccgggggtgtccttcaaagcccccagctacctggaaatcagctccatgagaaggatcttagactctgccgagtttatcaaattcacggtcattaggtaagtgagagtttcctgcttagtcacaggagcgaatctggagctcatgaggctgactcttctaaaatgcagccacaggtagtcatcgaatccggcttcctatgctgtgcaatcaacaaatcaaaataacttgtgtcatcattagaatgtcagatgtgcttctacgaactaagctgactcttttaattctttggcaaagggttggcaaactaggactgtttgccaaattcaggctgcctcctatttttagagtcttcctgaaacacagctacacccgtattatccatggctgctttcctgtcacagtgagtaagtagctgggactgagaaggc

SEQ ID NO: 6408 - DNA, 480 bp, Homo sapiens
  MAP TO AC004983.2; EXPRESSED IN ADULT LIVER, SIGNAL = 2.4; EXPRESSED IN PLACENTA, SIGNAL = 2.7; EXPRESSED IN LUNG, SIGNAL =  11; EXPRESSED IN HEART, SIGNAL = 2.2; EXPRESSED IN BRAIN, SIGNAL = 2.5; EXPRESSED IN HELA, SIGNAL = 2.3; EXPRESSED IN FETAL LIVER, SIGNAL = 2.5; EXPRESSED IN BONE MARROW, SIGNAL = 2.4
ctttctgggcctgggttccctcctagagagaatcacagtacctgaaggtcatggggatgctgagctggtccctggggacagctcggcgcctggtaaacacccataaacgctattactgctgttcacttgctgccgtgtcccctcctcactggaaagtaaagcccatgagggcgtgggtttctgttcactgctaggtccccagagcatggaaaagagctcttcgcagagcaggcactcggtagcgggtgtctctacacggttagttgccaagacaaacctctgatttccttattttgttaacatcaggcgagagttctaacttgctggaagatgacctggcactgtcagagtgagcagcatccgattcgtggctcatgaccgcgctgggactcttgttctgggcgtcctaagcaagaacaaacacacgcgtcagagggcttctggtttccatagagatccatacaggcatacatacatgca

SEQ ID NO: 6409 - DNA, 477 bp, Homo sapiens
  MAP TO AC004891.1; EXPRESSED IN LUNG, SIGNAL =   3; EXPRESSED IN HEART, SIGNAL = 2.7; EXPRESSED IN FETAL LIVER, SIGNAL = 2.8; EXPRESSED IN BRAIN, SIGNAL = 3.2; EXPRESSED IN BONE MARROW, SIGNAL = 2.6; EXPRESSED IN PLACENTA, SIGNAL = 2.9; EXPRESSED IN HELA, SIGNAL = 2.8; EXPRESSED IN ADULT LIVER, SIGNAL = 2.9
gagatgtctcagcctgcactctgattttatagctgaggacagtgagctcccaagagtggaagtggaacgagatctaggtctcctgaaacttcttccttattccattctgtcttgaaggagactacaagaggccaacacctttacttttggaaggatctctatatcaaaccttgcataggctgatttttttttttttttgtattgtgcaggctcttaaaaatcaacagagggaagccatggttacctttccattacttacccacaaataactggctgtagagctccaggcgggtgtggccttctgttggggccttgcggatctgctgcggtagccggtccacctgtaggctggcctgcttgacattcctctctgcagtgacccggtgccactggtcatcgttgagaggggttggtgacctcactacaatctctactggcccatttcccacatcaaatgaaaaggacacttctgtggca

SEQ ID NO: 6410 - DNA, 465 bp, Homo sapiens
  MAP TO AC004991.1; EXPRESSED IN ADULT LIVER, SIGNAL = 5.2; EXPRESSED IN PLACENTA, SIGNAL = 6.2; EXPRESSED IN HEART, SIGNAL = 5.2; EXPRESSED IN LUNG, SIGNAL = 5.8; EXPRESSED IN FETAL LIVER, SIGNAL =   6; EXPRESSED IN BRAIN, SIGNAL = 6.8; EXPRESSED IN BONE MARROW, SIGNAL = 5.3; EXPRESSED IN HELA, SIGNAL = 5.3
ttcacagcagacacctggtcaccggctcaggctctgggagcaggcagcccggggcacaagggccgctcagccactgcacagccacatgatcccatccgtggcctgcagcgctctgtctgaagcagggttaatgatagacgctcctcagaggtctgtggggctccagaagacagggcgtgagtccagcccagagccactgtgatctgtgcgtacggtgaccccactctggaacgcccagactgcatcagcctgcctggacacccaccctgcagcttcagcgaggcggagaagtccccggtcttctgcttcacagccctcgtggcatccggctccacctcttcccactccgccaccactttgagcttcacggtgaaggtcccgatgatggaatagttataatagaccacggagtcttcagtcaccatctgggtcctgttaggagacagggaggagagaggaggaaga

SEQ ID NO: 6411 - DNA, 451 bp, Homo sapiens
  MAP TO AC005323.1; EXPRESSED IN PLACENTA, SIGNAL = 0.62; EXPRESSED IN ADULT LIVER, SIGNAL = 0.54; EXPRESSED IN LUNG, SIGNAL = 1.8; EXPRESSED IN HEART, SIGNAL =  55; EXPRESSED IN FETAL LIVER, SIGNAL = 0.68; EXPRESSED IN BONE MARROW, SIGNAL = 1.8
ggagtaagtttaagcttcagatgccatctaatgtttgtgtaatttggctaaaaatagtcatatataaacttggtcattttgaattgttgcaaataaagatgaaaagggcacaagttaatgaagaccttggctttggagacagtctccatgttactagcaaggtcattgatctccatcttcagctcactcttttccttctccagcttctgcttgacccgctgaaggctgtcaatctgctccccaagctcagccacactatctgcgtgcttcttccgaagagcagctgccgtggcttcgtgctgcagggtggactcttccaggtccctgcgcattttctggaactcagcctcccgcttcttgttcatctcaatctgggctgaagtggccccaccggcttcttccagcctctcactgatctcctccagctcccgggagaggtcagagcgctgct

SEQ ID NO: 6412 - DNA, 405 bp, Homo sapiens
  MAP TO AC005924.2; EXPRESSED IN BRAIN, SIGNAL = 1.5; EXPRESSED IN PLACENTA, SIGNAL = 1.1; EXPRESSED IN LUNG, SIGNAL = 1.1; EXPRESSED IN HEART, SIGNAL = 1.5; EXPRESSED IN BONE MARROW, SIGNAL = 1.2; EXPRESSED IN ADULT LIVER, SIGNAL = 1.2; EXPRESSED IN FETAL LIVER, SIGNAL = 1.4
ccgctaagcttccagaacacgacaccgggaagcgccacccggaggcggaaatcagcccgcgtccggcgcaggcgggagaagggagaggagtgacatccgtttgtcggaagtcgctcctcccccttccttcgctttttttccttgtcattggttcctggcactcgggccccacctcctccggctacgcccctcgcggccgcttttcccgcctccgccggggccgagccgctgttcggctgacagttgaggatggccggagccgagggcgccgctgggcggcagtcggagctggagcccgtggtatcgttggtcgacgtccttgaggaggacgaggagctggagaatgaggcgtgcgctgtcctgggcggcagcgactccgagaagtgctcctactctcaggtgggc

SEQ ID NO: 6413 - DNA, 493 bp, Homo sapiens
  MAP TO AC006152.2; EXPRESSED IN LUNG, SIGNAL =   2; EXPRESSED IN HELA, SIGNAL = 2.2; EXPRESSED IN HEART, SIGNAL = 2.4; EXPRESSED IN FETAL LIVER, SIGNAL = 4.4; EXPRESSED IN PLACENTA, SIGNAL = 2.4; EXPRESSED IN BRAIN, SIGNAL = 2.6; EXPRESSED IN BONE MARROW, SIGNAL = 2.5; EXPRESSED IN ADULT LIVER, SIGNAL = 3.2
cagataggtgggtggctttcaggctctgaagagcacatactttggcccttgacagcagcagtggccatggcagtgtgtgtggacactgtccttaggaaacttgctagtgtgcagtcacctagatgcttatggggttggggttgctcttagcagcctcaggcaggcaaatctcaggctctggagaccacatgctttggcttcctttgtcgtagggacagtctccccagggcactgtactgcctttttcccagggtgcaggactctgtgtgggctagagtgctggggacccttctgcactgtagggtccagccagaattgtgcctctgcagtcctccaggtgtatgtgggggaatgtctgtggggttctgaagatgtggagatgctggttctgctgggcctgaaggcaaactataatcaggtagggactagattctcaaaatgggacaggcatgtagctgcttaaatctcaagcggtgtgtgggaccaggtgtaa

SEQ ID NO: 6414 - DNA, 464 bp, Homo sapiens
  MAP TO AC004655.1; EXPRESSED IN BONE MARROW, SIGNAL = 4.7; EXPRESSED IN PLACENTA, SIGNAL =  10; EXPRESSED IN LUNG, SIGNAL = 2.8; EXPRESSED IN HEART, SIGNAL = 3.1; EXPRESSED IN FETAL LIVER, SIGNAL = 3.3; EXPRESSED IN ADULT LIVER, SIGNAL = 4.3; EXPRESSED IN BRAIN, SIGNAL = 1.3
tcaaaaatggaggccctatgatggaggaggtagaggagattttgaaggtgttgtgatggcaagtttaaatgtgaagatttgaattcataaaaatttcagtaaaagttaaaaacacccaatttggagattaaagagaaatgcaaacatagtatagaaaagggacaggctgctattttagtgttggataagcctttgtgcgcctttgtgtgcctttgtgtgcctttgtgtcatcgcaataacacatgacaagaatgtgtgatgatgcctacaggcgatgatgtacaggtcgagagtacagaagaagagcaggagtcaggggcaatggagtttgaagatggtgactttgatgagcccatggaagttgaagaggtggacctggagcctatggctgccaaggcttgggacaaagagagtgagccagcagaggaagtgaaacaagaggcggattctgggaaagggaccgt

SEQ ID NO: 6415 - DNA, 480 bp, Homo sapiens
  MAP TO AC004671.1; EXPRESSED IN PLACENTA, SIGNAL = 3.1; EXPRESSED IN HELA, SIGNAL = 3.1; EXPRESSED IN HEART, SIGNAL = 3.2; EXPRESSED IN FETAL LIVER, SIGNAL = 3.2; EXPRESSED IN BRAIN, SIGNAL = 2.9; EXPRESSED IN ADULT LIVER, SIGNAL = 3.5; EXPRESSED IN LUNG, SIGNAL = 3.5; EXPRESSED IN BONE MARROW, SIGNAL = 3.3
gcctcgatacagagctgtccgtctggtgtgaatatatgaagccagcgttctcttcctgtctcccagaagggcggctgcgtgtgacagcgtaaatgtgtgacagtatgtgaaaatgtttctgtaatcctgaagatttcagtagtgattagaagagctttagtctttggtcaattttctttgacttggaaagcataaagaatatttgaacctctcatttcagactgaccttgactttcctcattttattttattttattttatttttttgccttagatcatccagcccctcttagaacttgaccaaaatagaagtaaattaaagttgtacattggacacctgacaaccctctgccatgaccgagaccccctgatcctccgtggactcactccaccagcttcctataacttggacgatgaccaggcggcttgggagaatgagctgcagaagatgacccgggggcaggtgagcctctcactcaa

SEQ ID NO: 6416 - DNA, 491 bp, Homo sapiens
  MAP TO AC002064.1; EXPRESSED IN PLACENTA, SIGNAL = 7.7; EXPRESSED IN BRAIN, SIGNAL = 7.5; EXPRESSED IN BONE MARROW, SIGNAL = 7.4; EXPRESSED IN ADULT LIVER, SIGNAL =  18; EXPRESSED IN LUNG, SIGNAL = 5.8; EXPRESSED IN HELA, SIGNAL = 4.9; EXPRESSED IN HEART, SIGNAL = 5.6; EXPRESSED IN FETAL LIVER, SIGNAL =  12
cattacatatatgagcagcaaaaacaaaaaattaatacatattttatattattgtcagggagtacatacctcagaaaagaggattataacttatttaatttttggtgttttttttttggtacctatcatagattggggttattttataaaggaattattttgaaataatccccaataaaacatcaaaatgtaaatttttatttaattgccttaaagtatttttggctatgtttctaacaaagtatcctttgttctttctcacagctattaattgatggcaaagttattttggctttgtttacctatgttaagaagcctgagaagcaaaaaataattgactggtctgcagcacagcatgaagaattacaactgcatgcaattgccactttgtcatcagtggctcctttattaatagaagaatacatgtcatgccagggaaatgctcgagtccttgcatttctagaatggtgtgagagtgaaggtgagtggcc

SEQ ID NO: 6417 - DNA, 469 bp, Homo sapiens
  MAP TO AC004675.1; EXPRESSED IN BONE MARROW, SIGNAL = 8.7; EXPRESSED IN PLACENTA, SIGNAL = 9.7; EXPRESSED IN LUNG, SIGNAL = 9.2; EXPRESSED IN HELA, SIGNAL = 8.4; EXPRESSED IN FETAL LIVER, SIGNAL = 8.6; EXPRESSED IN ADULT LIVER, SIGNAL =   9; EXPRESSED IN HEART, SIGNAL = 8.4; EXPRESSED IN BRAIN, SIGNAL = 9.3
ggaccaggattaagcaccagaaaacctgggtcggcctctggtctctgcttctctagaaaaggcatatttccttttccttatctgctcaacaagaagaatgaatataagaatccgtgttttgtctaattcagagaactgtggaggtgaaatgagttaatggatgtgaaggcattttccgatacaaagaaagataattatttcaccacggtgacttctgtttcctgagtggctggtagctctgtggctaatgtgctttgacttctttcacgccctcgctgcccgctatctggtggtaactgtgcaggggtctgttgtgtttcagttccttaggctggtcgatgaatgtccagggtcatcactgctacctgcctcagagaagtggacgcttaaggtcctgtgggccccaaggaagctggaaatagtagctgtgtgagtgtgtatgtgtgggactggggctggtttcttgtat

SEQ ID NO: 6418 - DNA, 453 bp, Homo sapiens
  MAP TO AC004682.1; EXPRESSED IN LUNG, SIGNAL = 8.5; EXPRESSED IN HELA, SIGNAL = 7.3; EXPRESSED IN BRAIN, SIGNAL = 7.7; EXPRESSED IN BONE MARROW, SIGNAL = 7.7; EXPRESSED IN ADULT LIVER, SIGNAL = 7.3; EXPRESSED IN PLACENTA, SIGNAL = 7.1; EXPRESSED IN HEART, SIGNAL = 6.8; EXPRESSED IN FETAL LIVER, SIGNAL = 6.9
ctgccttgaaggagcttacctctaactagggccacctttttttgtttccaatcattagcatcttgatattacatactgtagcttttagatctgtgcagcctctcttctgttcatctggtcttctggttcagatacaagacttctctgcagggaatcttacaaccgcatcctttcctcattacgtgcttccatgggctcaatgtggatttattcctacacctacaggtgattctctatgaggaggaaatgggaaatcacaacgagaacacaggggagaagctccatttggcgcaggagcaactcgccttggccggggacaagatcgcctctctagagaggagcttaaacctctacagggataaataccagtcttccctgagcaacatcgagttactagaatgccaagtgaagatgttgcagggggaactcggcgggatcatgggtcaggtagga

SEQ ID NO: 6419 - DNA, 478 bp, Homo sapiens
  MAP TO AC003009.1; EXPRESSED IN LUNG, SIGNAL = 0.76; EXPRESSED IN PLACENTA, SIGNAL = 1.1; EXPRESSED IN HEART, SIGNAL = 1.4; EXPRESSED IN FETAL LIVER, SIGNAL = 1.7; EXPRESSED IN BONE MARROW, SIGNAL = 2.4; EXPRESSED IN ADULT LIVER, SIGNAL = 2.6
ggtgcaaacataattgtggctggtgcaattacatttgcaccaacttaatatgctcctctcaatgccctttccaggtccaatattcaaaggacatcactattgccagtttcttgttcatcttttcggagatgttctacctatgcacgcatataagcactcatttgtctttctctgtctctacctttctctctccataaatggcagaatactattcttcccccatatttttattaaggatatatgttcaagatcattccatatcagatctgcctcattcttttttaagtatctgcatattattatcttgtattttacacacactcctgccttgagcctttggctcttgctgcttcctcttcatggaatgcagctttctccattcccacgtcctccagatctttgctccagtcttccctgatgagaaaggccatccttaaccactctcgtaaaatagctgccatctcccaccaccttcttt

SEQ ID NO: 6420 - DNA, 465 bp, Homo sapiens
  MAP TO AC004820.2; EXPRESSED IN PLACENTA, SIGNAL = 0.64; EXPRESSED IN LUNG, SIGNAL = 0.68; EXPRESSED IN FETAL LIVER, SIGNAL = 0.75; EXPRESSED IN BRAIN, SIGNAL = 0.78; EXPRESSED IN BONE MARROW, SIGNAL = 0.71; EXPRESSED IN ADULT LIVER, SIGNAL = 0.59; EXPRESSED IN HEART, SIGNAL = 2.2
gccaatcttaaagacctcttggagtctgtgtgcatagtggagatggcaatattttcacatctttcctgaggtgtgaagcaccagcagtggtgaataagcactaccaggtccttttggaaatttttgttgagaaagccataaaagagagggtttatacatgtggaaaccatagcaaccaagtggcaaactacaaataccaggtcgtggtggcagctcatcagcacctcatgataccagtcaaagatgacattgaagatattcggggcagccagcaggctccaaaggtcaccacgatggaaatcaacattgtgttgatcctcttgttctcattgagccggccctcattttccttcttcttatctacctttgcatttctcctgcggaggcagataacaatcttcaagtagcagatgaggatgaagcctagaggaacaaaatactgcagcagaaaaagggaggtggtga

SEQ ID NO: 6421 - DNA, 482 bp, Homo sapiens
  MAP TO AC006254.10; EXPRESSED IN PLACENTA, SIGNAL = 1.2; EXPRESSED IN BONE MARROW, SIGNAL = 1.4; EXPRESSED IN ADULT LIVER, SIGNAL = 1.4; EXPRESSED IN LUNG, SIGNAL = 1.7; EXPRESSED IN HEART, SIGNAL = 1.3; EXPRESSED IN FETAL LIVER, SIGNAL = 1.8; EXPRESSED IN BRAIN, SIGNAL = 1.3
ccagggaacagttttgatgggtactgggtaagtcaacacatggaacttaattttctcatttcaaaaattgtaaattagaccttttatttagagattataaagcaataatgtttggtaggtatttgcttgttgaataaggaattgtatggttggttactctttacggtcaaagactctaactcatgccattgctgatggtatataataagccaggaataaatacataattaagtctatttatatgtaataaaatcttgtttctttcctcagtatttacatgaaaaacacatccttcatcgagatctgaaaactcaaaatgtcttcctaacaagaacaaacatcatcaaagtaggggacctaggaattgcccgagtgttagagaaccactgtgacatggctagcaccctcattggcacaccctactacatgagccctgaattgttctcaaacaaaccctacaactataaggtaggattgggctc

SEQ ID NO: 6422 - DNA, 482 bp, Homo sapiens
  MAP TO AC005010.2; EXPRESSED IN PLACENTA, SIGNAL = 2.2; EXPRESSED IN BONE MARROW, SIGNAL = 1.8; EXPRESSED IN ADULT LIVER, SIGNAL = 2.1; EXPRESSED IN LUNG, SIGNAL = 1.9; EXPRESSED IN HELA, SIGNAL = 2.2; EXPRESSED IN HEART, SIGNAL = 1.9; EXPRESSED IN FETAL LIVER, SIGNAL = 2.1; EXPRESSED IN BRAIN, SIGNAL = 2.2
ctaagggcactcagagctggaagaggtgtggacgaggccgctcggtgcagaccacaggtttttagcagaaccaatctgcacagttctttgatttttatcccaccaggctcagcagcttggatagaaaaaaagctgatgatgaaatgcttccagacctcagattgtgcagaatggatgcagcggagagacaagcactgcctgtccatgagaacgtcctccaaggacagctgttttccagacttcctcttaggtggccgtggagcagctggggacctacaggtacaaccccgggcggagacccagagcgagccttccctgcaaggatccaacgcagacccagatctgccccagacccagatctgccttttcatgaaaattggaagacaacagtgattgctgaaaaacagctagcaggcgtcccacagagaggggccgcggagcacccagctccggcacagacagctctccctcacacgtgaaca

SEQ ID NO: 6423 - DNA, 448 bp, Homo sapiens
  MAP TO AC000062.1; EXPRESSED IN PLACENTA, SIGNAL = 1.4; EXPRESSED IN HEART, SIGNAL = 1.4; EXPRESSED IN BONE MARROW, SIGNAL = 1.3; EXPRESSED IN FETAL LIVER, SIGNAL = 1.3; EXPRESSED IN LUNG, SIGNAL = 1.3; EXPRESSED IN BRAIN, SIGNAL = 1.4; EXPRESSED IN ADULT LIVER, SIGNAL = 1.1
tggaagtaacagtacccagctcacagggtggttgagaggattagagggagtgtgtggagcccctgatacactcctgagcatgtaggagatgctcatttgtcctcatcaccaccctcctcattatcctcattggagggctgagatgaatttctggtatatttcctcagaagtcagcctggtgcttcctctctttgtgttcacgcaaacataatggaggcttgagcaggggacttgactgtctcctgttgccatttatcaatactgtcaggtgcctgtcctgagctctgccatggcattgacagagacacaaccacagctcctttcagcagacctggtcttagccctccaggtgctcatgctttgggagatgacagaggcaaacaaagtacttaagagaagacaacacccccaacgatctcactgtatttccagcaaaatacttgaggcc

SEQ ID NO: 6424 - DNA, 417 bp, Homo sapiens
  MAP TO AC006379.2; EXPRESSED IN FETAL LIVER, SIGNAL = 8.6; EXPRESSED IN BONE MARROW, SIGNAL = 9.4; EXPRESSED IN ADULT LIVER, SIGNAL = 8.9; EXPRESSED IN HELA, SIGNAL = 8.2; EXPRESSED IN PLACENTA, SIGNAL = 7.6; EXPRESSED IN LUNG, SIGNAL = 7.7; EXPRESSED IN HEART, SIGNAL =   9; EXPRESSED IN BRAIN, SIGNAL = 9.1
tccatgtagttcttattcctgtgctcttcatgcctttgtttacatccagattgacatctggtataattttctttctggttgagggatttcctttaaaacatctgtactgcagtttcctggtggtgaattcttcgccttttgtatgtctgaaaaagtctttattttgcttttgtttttttgaaagatatttttgctgggtaaataattctagttaacagacttgatttctctttcagtacagatgatccccaacttgcaatggttcaacttacaaattttcagctttacaatggtgcaaaagcagtaggcattcaatacagtcctcagcttatgatggtgttatatctggacttagacacttttgacttatgatattttcaatttatgatgggtttatccaaccataaccccattgtt

SEQ ID NO: 6425 - DNA, 462 bp, Homo sapiens
  MAP TO AC004918.1; EXPRESSED IN FETAL LIVER, SIGNAL = 1.6; EXPRESSED IN PLACENTA, SIGNAL = 1.2; EXPRESSED IN LUNG, SIGNAL = 1.4; EXPRESSED IN HEART, SIGNAL = 1.4; EXPRESSED IN BRAIN, SIGNAL = 1.3; EXPRESSED IN BONE MARROW, SIGNAL = 1.3; EXPRESSED IN ADULT LIVER, SIGNAL = 1.4
tctaagaattaggtacatgtggaatgattatttttaaatcaatcaatttttaaatcaaattaagagcatttcagagaaagtcataacttcatgcccagttctctactttcagtctagaatgtatcacaaggctaagcaagaatcactgttggaaaaattatttacagaattctatggcttaatagaccatctgtccacttatgtaagctcataaaaagggggaaagaagttgctacattgttgcaacctagtgcagttgccatcactggtcttaagcttgctttttcctgtgctcacagaagtcgaaaggtgagaaaccccaagctgcacgtggagggcacggagtgtctccaagccagccagtgcactttgcttatcccggaggtgagtggggaaggggtcggtagtcacagcatttgattcgttcgtcatcggcctgcccctctgtggtgtcccatcctt

SEQ ID NO: 6426 - DNA, 490 bp, Homo sapiens
  MAP TO AC002075.1; EXPRESSED IN PLACENTA, SIGNAL = 3.6; EXPRESSED IN LUNG, SIGNAL = 2.9; EXPRESSED IN FETAL LIVER, SIGNAL = 3.1; EXPRESSED IN BRAIN, SIGNAL = 3.4; EXPRESSED IN ADULT LIVER, SIGNAL = 2.8; EXPRESSED IN HELA, SIGNAL = 2.8; EXPRESSED IN HEART, SIGNAL = 3.1; EXPRESSED IN BONE MARROW, SIGNAL = 2.8
ttgagtatcctgaaacctggccacaactttgtaataactgatttagtaaaatgttttcaaaaaccctttatgactttgctatctttttcttgctgattttctgtctgatacagtaatttatattaggtctagtgcctgaaaaagaccttcaaaaggtaattctgtaattgggttgctctcatgttggatgagtatgctaacctttttacaggggtgggaaaatgtagcactgttatcctatggcttccagtggcatcctaattactccaataaacaccaaggaggcacgggatgaaatcctgatgaagtgcaaagcgatgagagatcaagtggttattgcatttaaacactacagtgatgatggcgcttacagagattttggcaccaggtggtttgcttctgctggcctctgagatcttgtacaaagatctctggtatattgcaagaattcttctcgttttagtacccatataatttcaatgtgcctttg

SEQ ID NO: 6427 - DNA, 465 bp, Homo sapiens
  MAP TO AC006157.2; EXPRESSED IN PLACENTA, SIGNAL = 4.2; EXPRESSED IN ADULT LIVER, SIGNAL =   4; EXPRESSED IN LUNG, SIGNAL = 4.6; EXPRESSED IN HEART, SIGNAL = 4.3; EXPRESSED IN FETAL LIVER, SIGNAL = 3.8; EXPRESSED IN BRAIN, SIGNAL = 4.5; EXPRESSED IN HELA, SIGNAL = 3.8; EXPRESSED IN BONE MARROW, SIGNAL = 4.3
tttttgagacacacaatccaacttggccagactgcaaacagcttttcctgatgctgttcaacaccaaggaatgctgaagggtgacctaggtagcccaccagtggctagaaaacaatgcactggaaggcacccttaatgtcctggcatatgcacagggccagttcccagaagcagacccgcactgggacccaaacaaggaagcccaactacagcaactgcagaggtaccaagaggcactcctgcaagttttgagaaaaggagagaaaaaggcattcaatatgggaaacatttcagaggtgcttcagagagcagatgaaagctgtagccagttttatgagagactctatgaggccttccagctttgcagtccatttgaccctgaggctactgagaaccagtgcatggtaaacgcagtgtttgtagggcaaacccagggagacatcaggcgaaagctgcaaaagctag

SEQ ID NO: 6428 - DNA, 452 bp, Homo sapiens
  MAP TO AC004922.2; EXPRESSED IN PLACENTA, SIGNAL = 1.8; EXPRESSED IN BONE MARROW, SIGNAL = 1.4; EXPRESSED IN ADULT LIVER, SIGNAL = 1.9; EXPRESSED IN LUNG, SIGNAL = 1.8; EXPRESSED IN HEART, SIGNAL = 1.8; EXPRESSED IN FETAL LIVER, SIGNAL = 1.9; EXPRESSED IN BRAIN, SIGNAL = 2.1
caacaaggtctgcactgctcctgctggctgctgccttgtaatctgcaccttgaaggacagaatgaccaggtggtggcgactccctccctaccacgagctggaaatgagagcctggcggtcgggaagatacagacttcttgctgcacttgtccctgaaagaatgtctgggcctgaggggcatagagcttttgtaggaacccagtaaggaaacagcgaggggcaggaaggcaccttgtcacctgaccacctctctacagacggcacctacgtgatgctattctggtgcagcgtctccaaggccgtgttgcggtcctcagttgtggctctcttgtccatgttgcggaagcgttccatggcagacatgttgcgttggatgctctgttttggaatatctaacttggagacgaaggtcaggcagccgcggtcatcgtagttaaagagcattgggcagc

SEQ ID NO: 6429 - DNA, 462 bp, Homo sapiens
  MAP TO AC004957.1; EXPRESSED IN PLACENTA, SIGNAL = 1.5; EXPRESSED IN LUNG, SIGNAL = 1.6; EXPRESSED IN HELA, SIGNAL = 1.7; EXPRESSED IN FETAL LIVER, SIGNAL = 1.9; EXPRESSED IN BRAIN, SIGNAL = 1.4; EXPRESSED IN ADULT LIVER, SIGNAL = 2.4; EXPRESSED IN HEART, SIGNAL = 1.3; EXPRESSED IN BONE MARROW, SIGNAL = 1.3
acagatatggggcagtcgaggtgagggaaacagcatatgtggaggcaaagaaggaaaccttcatttattgtttaaatgtaaaggatggagtgagagggtgaataccataagttgaggttggaggttaaggcaggagaattgcctgaatccagtaattcaaggccagcctgggcaacatagcaagacattgtcttaaaaaaaaaaaaaggggggggggcaggaaggtagtaaggagccagctcagaagggtttaccatgacatgaagtgtttaaagtttataaatcacaaagaaatattggaggcttctgaaagaaaacaagcagagtcattagattttccctttaaaaaacttcgctggcatctctgtgaaggatggattgaagaggaaagagatgagtcaagaaaatcggaaagtaagtgataacaatgtagtaataattaggagaaaagtggaggtgcct

SEQ ID NO: 6430 - DNA, 474 bp, Homo sapiens
  MAP TO AC002080.1; EXPRESSED IN PLACENTA, SIGNAL =   2; EXPRESSED IN HEART, SIGNAL = 1.8; EXPRESSED IN FETAL LIVER, SIGNAL =   2; EXPRESSED IN BONE MARROW, SIGNAL = 2.1; EXPRESSED IN ADULT LIVER, SIGNAL = 1.6; EXPRESSED IN HELA, SIGNAL =   2; EXPRESSED IN LUNG, SIGNAL = 1.8; EXPRESSED IN BRAIN, SIGNAL = 2.3
tgaaccatggtgtgaattgcgatagtaaggttttagagtctataaataatgcctagtgaaattggagccattcagtccctagaaatatttatgcctatctgtggctatttgtctatttgcatgattatccttgccattatcctccaggctctgaaaatacacactgaaaggtttcttaccagcttgttcatgtctggattcacattaactctatgaccatattttattccagacacttctgagaaattcatcaggctgtgaagcgcgccgtgatgaatatcgaacagagtttaccacagctttgcagcgcgttgacttattcatgggtcaattcagcgaagtcctcttaacatctatatccaccttcattaaaggagacctcaccatagctaatcttgggacatcagagggtcgcttcatgcaggtaagtgctttctgagagtagctgtgtctgttctatctggtattgtgcaa

SEQ ID NO: 6431 - DNA, 471 bp, Homo sapiens
  MAP TO AC006191.1; EXPRESSED IN FETAL LIVER, SIGNAL = 1.2; EXPRESSED IN BONE MARROW, SIGNAL = 1.2; EXPRESSED IN PLACENTA, SIGNAL = 1.6; EXPRESSED IN LUNG, SIGNAL = 1.2; EXPRESSED IN HEART, SIGNAL = 1.3; EXPRESSED IN BRAIN, SIGNAL = 1.2; EXPRESSED IN ADULT LIVER, SIGNAL = 1.4
cagcccaaacagaacacatcgaggaccacatgtagcccccaaatctccctatttatgaagcctgcttgctttgaaaagctataatcctaacacaggacaaatagttatttcaaaatttgagagaaatgtaagtacttgccttgtagtcaactacactgatttctttctttcttttttttttttttaagatttagttatatttaaaattactagattagttcacaatttgtcatcttaaactatccaggccgatgtcagtctgttttatctgttctgaacaggtctctctggtgctggaaaaacaacgataagttttgccctggaggagtaccttgtctcccatgccatcccttgttactccctggatggggacaatgtccgtcatggccttaacagaaatctcggattctctcctggggacagagaggaaaatatccgccggattgctgaggtggctaagctgtttgctga

SEQ ID NO: 6432 - DNA, 419 bp, Homo sapiens
  MAP TO AC004926.2; EXPRESSED IN ADULT LIVER, SIGNAL =  21; EXPRESSED IN PLACENTA, SIGNAL =  24; EXPRESSED IN LUNG, SIGNAL =  26; EXPRESSED IN HELA, SIGNAL =  21; EXPRESSED IN HEART, SIGNAL =  20; EXPRESSED IN BRAIN, SIGNAL =  22; EXPRESSED IN BONE MARROW, SIGNAL =  22; EXPRESSED IN FETAL LIVER, SIGNAL =  20
tttatcatgaatggttggcgaattttctcaaatgtcttcctgcatcttttgcagttgtcatataatgttcctcctttttattaagggaataaattaactcatttatatagaatgatttttttcatgttaatacaagtttatcttgctctgattttaacttgtttttcttcatgtagcctgtgtgtgtgtgtgagagagagacagagagagagaagaagaagaagaggaagaagaagaagaagaagaagaagaagaagaagaagaagaagaagaagaagaagaacaagaagaagaagaggaagaggaagaggaagaggaagagaggaacagagaaagagagagagagagggagagagggagacttgctatgttacccagacttaagtgcagtcatgtgatcatagctcactgcagcctga

SEQ ID NO: 6433 - DNA, 348 bp, Homo sapiens
  MAP TO AC004960.1; EXPRESSED IN LUNG, SIGNAL = 4.1; EXPRESSED IN HELA, SIGNAL = 3.2; EXPRESSED IN BRAIN, SIGNAL = 3.5; EXPRESSED IN BONE MARROW, SIGNAL = 3.3; EXPRESSED IN ADULT LIVER, SIGNAL =   4; EXPRESSED IN PLACENTA, SIGNAL = 3.5; EXPRESSED IN HEART, SIGNAL =   3; EXPRESSED IN FETAL LIVER, SIGNAL = 3.2
tccctaactgatctaaaccctcagctcttcccacttgaatttttctttaatttttggaggcagctgtggtttgaatgtttatgtctgctgaaaatttgtatgttgaaatcctaacccccaaggtgatggaattatgaggtggggcctttgggaggtgattaggtcatgagggcagagctcttataaatgggattagtgcccttccaaaagaggttccagagagatccctctacccatccaccatgtcagcacacagctagaaggcaccctctgaaccagatgtctggccctcactagacaccgaatgggccagcactttgttcttggacttctcagcctccagagctg

SEQ ID NO: 6434 - DNA, 377 bp, Homo sapiens
  MAP TO AC004526.1; EXPRESSED IN PLACENTA, SIGNAL = 1.8; EXPRESSED IN LUNG, SIGNAL = 1.7; EXPRESSED IN FETAL LIVER, SIGNAL = 2.6; EXPRESSED IN BRAIN, SIGNAL = 1.5; EXPRESSED IN BONE MARROW, SIGNAL = 1.6; EXPRESSED IN ADULT LIVER, SIGNAL = 1.7; EXPRESSED IN HEART, SIGNAL = 1.6
catccatgaggtttttctttcctctgagataccttaattgtactttaatatgatataagactagaattgagaggaaactttattttctcatgttttgggagaagaaaaaaatagaaatatgtcattcatgaggactgattgattcagagtttttatgcaaagtttgacctttgaactctttgttttcatgtctttatattaattcaaaccttatactcaattctcaactccttgtttttaggtggttagccagcgtttccctcagaacagcatcggtgcagtaggaagtgccatgttcctcagatttatcaatcctgccattgtctcaccgtatgaagcagggattttagataaaaagccaccacctagaatcgaaa

SEQ ID NO: 6435 - DNA, 393 bp, Homo sapiens
  MAP TO AC006203.1; EXPRESSED IN PLACENTA, SIGNAL = 8.3; EXPRESSED IN ADULT LIVER, SIGNAL = 8.7; EXPRESSED IN LUNG, SIGNAL = 6.7; EXPRESSED IN HEART, SIGNAL = 7.5; EXPRESSED IN FETAL LIVER, SIGNAL = 9.7; EXPRESSED IN BRAIN, SIGNAL = 8.8; EXPRESSED IN BONE MARROW, SIGNAL = 8.1; EXPRESSED IN HELA, SIGNAL = 7.2
caaggtcaggaatcagggagataatggctaggaataggtgcgtatgcaggcagagttggttatgtgtggaggggaggtatcagaggagacaatgaggtaaactgaaggattcttctgctgtttcattaagaaggataagtagctgtattagctaggctcaataaaggcttagctgatacgaccagaaaagtagagaataatttattcttctttcatgacagaaagtgaggcagctctgctccatgaggtcattcagggacatgagtcccacccagcttggagcccttagaatttacacggtcaaaactgattcatccccattgccttttcctcaccagaaaagtgagaaaagtaagtctgaaccaggtaatttccttctgggcaatttgttgt

SEQ ID NO: 6436 - DNA, 449 bp, Homo sapiens
  MAP TO AC004931.1; EXPRESSED IN LUNG, SIGNAL = 1.9; EXPRESSED IN HELA, SIGNAL = 1.8; EXPRESSED IN FETAL LIVER, SIGNAL = 1.8; EXPRESSED IN BRAIN, SIGNAL = 2.1; EXPRESSED IN PLACENTA, SIGNAL = 1.8; EXPRESSED IN HEART, SIGNAL = 1.8; EXPRESSED IN BONE MARROW, SIGNAL =   2; EXPRESSED IN ADULT LIVER, SIGNAL =   2
cagaaaacctgaggaggctgggaggagtgggcagtgccagaaaaagtgagagcagcagctctgagcaagcaagtcctaccagcatcataaatgagacgaagagctaggtttgccatggtcaggattttgccacagcagggagaggatgttaagatcagttactggctggctcaaactgacatgcccataattacttactgagcgtccatgtcatgaatggagtgctctatctgtacatacagccagaggtcatacagtgaagatagtgtccctgctccacttctctgttcacaggggagcatcttctctctttgatcataaggaagaggagcagagcacctacctagctgtgccttttcaggccaaccacgtgctggcagcgtctgttccttgtaagaccttcccaggaatctgctctgctaatgaggcccctctacctgacagctggt

SEQ ID NO: 6437 - DNA, 481 bp, Homo sapiens
  MAP TO AC004874.1; EXPRESSED IN PLACENTA, SIGNAL = 4.1; EXPRESSED IN HELA, SIGNAL = 3.3; EXPRESSED IN BRAIN, SIGNAL = 4.3; EXPRESSED IN ADULT LIVER, SIGNAL = 4.8; EXPRESSED IN HEART, SIGNAL = 4.9; EXPRESSED IN LUNG, SIGNAL = 4.4; EXPRESSED IN FETAL LIVER, SIGNAL = 4.2; EXPRESSED IN BONE MARROW, SIGNAL = 4.2
aatcttgaaggacgtctgccggctcatagcagccgggatataaaagccaggcctggttcccatcccgctgtacggattgcaaactgtcagaagatagctgtcctgggtgaatgcatcagagatgtcttctgactcctagactgatgagattttcttttctgccagaattactaacatgcgattttttttgagatctttgaactccctgaagatctgtgggcattgcagtgggttagatgcaaatttgaaatgacatgtttatagaccttcttgcatttttgtcatttgcagaggagctgaaggtccccctagaggagtatgtccacaaacgctaccccgggctggtgaaggtggtaagaaatcagaagagggaaggcctgatccgcgctcgcattgagggctggaaggtggctaccgggcaggtcactggcttctttgatgcccacgtggaattcaccgctggctggtaggtcatgagctg

SEQ ID NO: 6438 - DNA, 467 bp, Homo sapiens
  MAP TO AC004240.1; EXPRESSED IN PLACENTA, SIGNAL = 4.3; EXPRESSED IN HEART, SIGNAL = 4.8; EXPRESSED IN FETAL LIVER, SIGNAL = 4.8; EXPRESSED IN BONE MARROW, SIGNAL = 4.3; EXPRESSED IN ADULT LIVER, SIGNAL = 4.3; EXPRESSED IN HELA, SIGNAL = 4.5; EXPRESSED IN LUNG, SIGNAL = 4.6; EXPRESSED IN BRAIN, SIGNAL = 4.4
aaacgtttgagtggaatagcctagaaaacccctttcctccatccagatctctgacttctctaccctgtggcctcatccatcgcctcttgactgaaggatcattccctgctgcatgctttctgcacagtgaaagaactgacaccacacctgtcgatggatccttccctgtggctcataggagttcccctgcactgctctgaagtctctggtgtccttgttgattctaattctcctctatgtcttcatcagcctccagcccacagcatgggtcctactgagaagacggcagtggaggtagagtgggttttaggagatgagggtgaactgcagcaggacaaggatgagaggccagtccacaatgttcctgatgtagattctgagagctttagctttcattctggagccttgggagtataacagcagggaactgtctgaatggttttttatcctccagtgagcccccagat

SEQ ID NO: 6439 - DNA, 468 bp, Homo sapiens
  MAP TO AC004969.1; EXPRESSED IN LUNG, SIGNAL = 1.4; EXPRESSED IN FETAL LIVER, SIGNAL = 1.4; EXPRESSED IN BONE MARROW, SIGNAL = 1.3; EXPRESSED IN PLACENTA, SIGNAL = 1.5; EXPRESSED IN HEART, SIGNAL = 1.3; EXPRESSED IN BRAIN, SIGNAL = 1.3; EXPRESSED IN ADULT LIVER, SIGNAL = 1.4
tggtttgtaagatgacttgccaagtatatttgggataaccataagaaataccattataaaatctcagaagggaggtaggacttctggaatagccaaggaaatgcactcctccatgacgacaatgaaaatacttggaaaattatcaaaatcattttcttcaaaactttggaaattaaccaaaggtttacaacaatctaaagggcattaattcaagaaaagctgctgaacctctataagaatagcaaagtttgtggtgttttaacttgttctattccccactcttctctctccaggggaattgaaaacaagcaattccccaaccaaacaggggcacaggctgcgtttgcagctcctgtaaaagctccatacccagagcagtgtctcccagctcccaggtgaagtcttatgtatacatggggcgttggcacaggtgactccagactagtctcctaggccatctagtagctt

SEQ ID NO: 6440 - DNA, 472 bp, Homo sapiens
  MAP TO AC004529.1; EXPRESSED IN LUNG, SIGNAL = 4.4; EXPRESSED IN BRAIN, SIGNAL = 4.8; EXPRESSED IN ADULT LIVER, SIGNAL = 3.8; EXPRESSED IN PLACENTA, SIGNAL =   4; EXPRESSED IN HELA, SIGNAL = 4.2; EXPRESSED IN HEART, SIGNAL = 4.3; EXPRESSED IN FETAL LIVER, SIGNAL = 4.2; EXPRESSED IN BONE MARROW, SIGNAL = 3.9
agaaggggacaatgcaaggcccagagctgctgccaggaacccttggggggaacaaaaggcccttgctgcctccagtctgggagctacaaatgacaccaaagcctcgccatggtctgagaaggagccgggctcagcctcagccctgctgctccctccctgggaggcccagggcaggcctcccctctctgggctgttttcccagctgtgtttgtacaatgaggtggagagcttgttccatgtcccttgctgctctgaccctctgtgccttggtctccccctgccgggcctgctctggcgtgtggcagagacccacctggttctccgtggctggctggcagtcctccagcctgaccccaaatgcccttgggacagccttcttatttttcttgatgatgttgatgccccagggggttttgggggctgcagcactgtcatctgaagtgggggagacagagccagagtgagctggagt

SEQ ID NO: 6441 - DNA, 485 bp, Homo sapiens
  MAP TO AC006206.3; EXPRESSED IN ADULT LIVER, SIGNAL = 5.7; EXPRESSED IN PLACENTA, SIGNAL = 4.8; EXPRESSED IN LUNG, SIGNAL = 4.2; EXPRESSED IN HELA, SIGNAL = 5.2; EXPRESSED IN HEART, SIGNAL =   5; EXPRESSED IN BRAIN, SIGNAL = 5.5; EXPRESSED IN FETAL LIVER, SIGNAL = 5.8; EXPRESSED IN BONE MARROW, SIGNAL = 5.3
aggaggcctttgtgttgttgctttgtgttgagttcaatcagttactaaaatacatcttagtaattaccttgtgacagtaatcataaaaccctacacaatgacactggataatatagacatagcaccttctccagtgtgaattttaaacacaaaatacctgtggccaagccaattcctagtgaggcatcaccatgaagctttcctgcacacggggttatcttttggttcttactgtcaggtttcaaaggcttcaatgatgcatcttcaccttcccaaccctatccttgcagggacagcggttgtctgcttactgggtagtgttgtgggctgggtattgttcgtgctgtctttttgatctgaaagacaatggactgagcttaacctggtctccaggttcttctccagtgttgatattctatgactattggagtatagcctaagaatgaaaaatataataagaaattaaatattatgagccttgatgt

SEQ ID NO: 6442 - DNA, 494 bp, Homo sapiens
  MAP TO AC004254.1; EXPRESSED IN PLACENTA, SIGNAL = 3.7; EXPRESSED IN HELA, SIGNAL = 3.2; EXPRESSED IN HEART, SIGNAL = 3.7; EXPRESSED IN ADULT LIVER, SIGNAL = 3.7; EXPRESSED IN BONE MARROW, SIGNAL = 3.2; EXPRESSED IN BRAIN, SIGNAL = 3.6; EXPRESSED IN FETAL LIVER, SIGNAL = 3.4; EXPRESSED IN LUNG, SIGNAL =   4
cgctcttctagctgtttgctgattgattatctgacgatcaggtcaagtatcttctctggaatcacagtaaactaacgggtctataatttccaagatcattcgtattctccttttaaagataagcaagacagcaaatgcttcttcccgagttctctaaagcaacagctaatgctttgctaataatgaaccagggcagccaattccttaagtgcccttggaatcacatcatcagggttcattgattctggagataatctttaatcaggcccagaccctggtaaacaatgtgaagccctaactcagcctgggtctggaaggtcttggtgcctaagtctgggaaggaagttggtgatacaagctgtttaaatctgtactgcatgatgtcttcagcattgtgataaataaataagtaaaaataaagcccttgaaagaaagatgaaaggtgacattgacagaccaaactgagacatgattcaggcttcaccttcaggaat

SEQ ID NO: 6443 - DNA, 473 bp, Homo sapiens
  MAP TO AC004533.1; EXPRESSED IN LUNG, SIGNAL = 2.7; EXPRESSED IN FETAL LIVER, SIGNAL = 2.4; EXPRESSED IN BRAIN, SIGNAL = 2.5; EXPRESSED IN BONE MARROW, SIGNAL = 2.5; EXPRESSED IN ADULT LIVER, SIGNAL = 2.5; EXPRESSED IN HELA, SIGNAL = 2.4; EXPRESSED IN PLACENTA, SIGNAL = 2.4; EXPRESSED IN HEART, SIGNAL = 2.7
attcatgaggctatggcaggataacttgcaggataaaatctatcccatttaatttcttagcatctagatttctcccaacatctggaaatgccaggagaaagtgcagtagagagaacatcacatcgggagtcagtatagctggctgtgatagttactagcattgtggccttggacaagtcacataagcttgctaaacttcagttactttaccatgaatgtgaggacaataaaacatgccctacctggcaagagaaggaagaagaaggagagggagagggtgacagagagggagaaagacaaggagaaggaagaggaagtgaaggaggaagatgaagtggaagaggaggagggggagaaggaggaggagaaggaagtgaaaagaaagaagaagaaaaaggaggaggaagaggaggagatgaaatttaaatgcacgtttgagaagagattttgaaaagcattggaaactcacccac

SEQ ID NO: 6444 - DNA, 364 bp, Homo sapiens
  MAP TO AC006210.1; EXPRESSED IN LUNG, SIGNAL = 3.9; EXPRESSED IN HELA, SIGNAL = 4.4; EXPRESSED IN FETAL LIVER, SIGNAL = 5.3; EXPRESSED IN BRAIN, SIGNAL = 4.7; EXPRESSED IN PLACENTA, SIGNAL = 4.3; EXPRESSED IN HEART, SIGNAL = 4.5; EXPRESSED IN BONE MARROW, SIGNAL = 4.5; EXPRESSED IN ADULT LIVER, SIGNAL = 4.6
cctgttaccagaccctggagaccattattctactctgtttctatgaatttgacaaatcatacatcatttgtgcttctgtgactggtttatttcacttagcataatgtcctcaaaacatgtcatccatgttgtagtacatgacagaattcccttcttcttagtagtctgtagcatttttcattttatttcttcttttagtagaatccattgagtattgacatgaagcaagtagataagcttaacctgtactcatgaacaatgatgaaatagggagcagactcatgactgatgtttgcacttactagcccgttcatgtactcatcgaccttaacaagtgaaaagcatagaagaacaaggcttttca

SEQ ID NO: 6445 - DNA, 464 bp, Homo sapiens
  MAP TO AC003669.1; EXPRESSED IN LUNG, SIGNAL = 1.4; EXPRESSED IN FETAL LIVER, SIGNAL = 1.3; EXPRESSED IN BRAIN, SIGNAL = 1.5; EXPRESSED IN BONE MARROW, SIGNAL = 1.5; EXPRESSED IN ADULT LIVER, SIGNAL = 1.1; EXPRESSED IN PLACENTA, SIGNAL = 1.4; EXPRESSED IN HEART, SIGNAL = 1.6
cacagatattaaaatcaagcctggatatgaaacatttatgtggtacagaatagagggaaaggtagtcgtggaaggagcctagttaagtaagggacgctggactctaaaatatatctaaagaaaagagcataagtgatatttttgaaaatcaccaattttttcaaagtttcaaatttaaggcattatcttcagccagaggaaaatcctctcctgatttgtccaagtcatgaggaaataagaaaatgctctttcaatcactccttttaaatatcttaccttctacgttgccagatccctgataaaatcagtagtgcaattgcaactatgatgatgcaaaatatcacaccaaatataataatccagatgggcacagatgggtccatgggtggtgcaagtgtggaagggatttttaaaaattccagagtttggtcatttagaaagaaggcattgttgatccggttctt

SEQ ID NO: 6446 - DNA, 499 bp, Homo sapiens
  MAP TO AC005754.1; EXPRESSED IN BRAIN, SIGNAL =  14; EXPRESSED IN BONE MARROW, SIGNAL =  12; EXPRESSED IN ADULT LIVER, SIGNAL =  11; EXPRESSED IN PLACENTA, SIGNAL =  12; EXPRESSED IN LUNG, SIGNAL =  16; EXPRESSED IN HEART, SIGNAL =  15; EXPRESSED IN HELA, SIGNAL =  14; EXPRESSED IN FETAL LIVER, SIGNAL =  12
taacctgagctggggctgctcctcgcggtccagcgcttgatccagcacgagctctgggtatttcttgccgtcgctgtgattgcgagtgaaaaggtggaaataggagttggtgctaattgagtagttctgaactgtgttgctacctacgtccaaatcttgagctattttcaaaggaaatgaagtccctggatggctgccttcggagattttcaggaggatttcattttccaagaattctggggcatggtcatttacatcttggagctgtagttcaccttgaataaactgcaccggatttttcagtaacatctggaaatgtagtatacatggatctatgtcaccgcacaactcttcccggtccaatttttcttttaggagcaaattcccactcttccgttcgagctgcaaatactgtttgttccctttggaaagaatccgggcgcctctcgcggccagttcccctacacccagccccagatcttttgctaagttggccaca

SEQ ID NO: 6447 - DNA, 467 bp, Homo sapiens
  MAP TO AC004986.2; EXPRESSED IN LUNG, SIGNAL = 3.7; EXPRESSED IN FETAL LIVER, SIGNAL = 3.5; EXPRESSED IN BRAIN, SIGNAL = 3.3; EXPRESSED IN BONE MARROW, SIGNAL = 3.5; EXPRESSED IN PLACENTA, SIGNAL = 3.5; EXPRESSED IN HELA, SIGNAL = 3.8; EXPRESSED IN HEART, SIGNAL = 2.9; EXPRESSED IN ADULT LIVER, SIGNAL = 4.9
gattcaatccactgcaacccagtgctctggggagggaaggtgtcacccccctaggtggtgatctgacacagcagggctgagaagtccatgtctgcattggaggagaagtcttcatcccctgaaaggaggctgctggggagtcctggggcccccagtggagcaggagctgggtcagggggcctctgggtccctgtcacttggcgagttatagcctcagggtactctatcagcatgggcttagttgtgtgggaagccacagatacgccctgttcagcagttgctaaaactcggagttgttgatggatgccaggtctgtgaacacagctgggtctgtgctgttgccaagcaaggcccccaggtcttcatcatcaaactgcagatgcagcagggccttctgttccttccccagcctaggcaggcttgggggcaggtgggcccatagcttgaggaaagcctggggctagtac

SEQ ID NO: 6448 - DNA, 467 bp, Homo sapiens
  MAP TO AC002542.1; EXPRESSED IN PLACENTA, SIGNAL = 7.5; EXPRESSED IN HEART, SIGNAL =   7; EXPRESSED IN FETAL LIVER, SIGNAL = 7.2; EXPRESSED IN BRAIN, SIGNAL = 7.2; EXPRESSED IN BONE MARROW, SIGNAL = 7.7; EXPRESSED IN LUNG, SIGNAL = 9.1; EXPRESSED IN HELA, SIGNAL = 7.6; EXPRESSED IN ADULT LIVER, SIGNAL =   8
gttgccatctcaatggtacgtttgcctattttgttcaggcaggtgactatgacatatagacttttcataagcatccaaggatgcctgtcagatgaaagagcatagatggcttaactgcttttgagttcataaactcttacgcttccccaatataatccctctgtagcatcgaaagcagagaacaggaaaccagcctctgctgtatcagacaggtttgctgttaagtgtgtgtacacttcaagaccaaagtaattttctttcattcttttttatcctgtagatcgccagtacctactgcaacatcttttctccctacacagcgactccagcttgggagggcagggccagggttgtcacagcttcccctgtggtgtctgcctgccaagcacagctctggagttagccctgggtgtgaggtgagaaagagattgcatggtctggtttttttcattcacttgggcaggtgt

SEQ ID NO: 6449 - DNA, 466 bp, Homo sapiens
  MAP TO AC004384.1; EXPRESSED IN LUNG, SIGNAL = 3.2; EXPRESSED IN FETAL LIVER, SIGNAL = 2.9; EXPRESSED IN BRAIN, SIGNAL = 3.1; EXPRESSED IN BONE MARROW, SIGNAL = 2.5; EXPRESSED IN HELA, SIGNAL = 2.7; EXPRESSED IN PLACENTA, SIGNAL = 2.6; EXPRESSED IN HEART, SIGNAL = 3.1; EXPRESSED IN ADULT LIVER, SIGNAL = 2.7
ctgcttaaatgagtgcaggagtatattttgggggtgacaaaatgttttcaaacttgatataagtggtgattgcacaacgctgtgaattaactaaatgccaccacgtggtaaactttaaaatggttaattttatattatgtgaattttaccttaataaaataaaaatattggaggaggatgagattggctctattatgggtcctgttcacctgtctacctttattttgtacttcctagggcctagaagattctactttgtacttttctttctcttatattatatttagattgatgaaggaaaaccaaccaatgtctttgaaaggtgctccctcagcctttctttccaggtcaaggatgttggtgaaaggggctgcaactccaatagaatcacttatctcagtgagaataaagttattttgaatgaatagagttgatgaattgaatgagggggagcatgaattaggtt

SEQ ID NO: 6450 - DNA, 463 bp, Homo sapiens
  MAP TO AC006372.2; EXPRESSED IN LUNG, SIGNAL =  12; EXPRESSED IN HELA, SIGNAL =  11; EXPRESSED IN HEART, SIGNAL =  11; EXPRESSED IN FETAL LIVER, SIGNAL =  11; EXPRESSED IN BRAIN, SIGNAL =  12; EXPRESSED IN PLACENTA, SIGNAL =  10; EXPRESSED IN BONE MARROW, SIGNAL =  12; EXPRESSED IN ADULT LIVER, SIGNAL =  10
aacaaaggcctgtctcatctgtgtcatcaggctgaggaggggatgttgacctgcagatgacatcacggcggccacacacgtgcctggggctgctggagatgctggttggggaggagtttggccttctgaggaggaagtcccagagcagactttggctcaactctaaggtacatttgagcttgtagagggatccccgccgctctcctgcctgtgagctcgcccttgggcttggcagccgtggtgcctcctgcctgtgaacgcccctctcctcctttctgtgaacgtccctctccttcctgtgaacgtcccagactctcctcctgcctgtgaacgtccctctcctgcccgtgaacgtccctctcctgcccgtgaacgcccctgtcctcctgctccgctctctcgacctttccttccttttgttggagaataaagacctgcgtctcatggaggtggggcccaatac

SEQ ID NO: 6451 - DNA, 485 bp, Homo sapiens
  MAP TO AC004926.2; EXPRESSED IN PLACENTA, SIGNAL = 1.4; EXPRESSED IN LUNG, SIGNAL = 1.6; EXPRESSED IN FETAL LIVER, SIGNAL = 1.4; EXPRESSED IN ADULT LIVER, SIGNAL = 1.5; EXPRESSED IN HEART, SIGNAL = 1.4; EXPRESSED IN BRAIN, SIGNAL = 1.7; EXPRESSED IN BONE MARROW, SIGNAL = 1.4
tctagttggttgttactgatgttgactttttttgtaatttttcaacatttatatttgttttttgtgagcgattaagttttataggagtcatttggccatactgaaagcaaatgtccaattgtttgccttctgtactagtcctttttcacactgctataaagatactagccaagatagggtaatttataaaaagaaagaggtttaattgactcatagttctgcattgctgggtaggcctcaggaaacttataatcatgctggaaggcaaagaagaagacaataccttcttcacaaggaggcaggaaagaaagaaagcaaagtgggaagagccccttataaaaccatcagatcttgcaagaaatcactattgtgagaaaagcatggggaatgctgtcccccatgatccaatcacctcctccctgcctcaacaggtggggattacagttcgagatgagatttgggtaaggacccagagccaaatgata

SEQ ID NO: 6452 - DNA, 342 bp, Homo sapiens
  MAP TO AC005844.7; EXPRESSED IN BONE MARROW, SIGNAL = 6.4; EXPRESSED IN BRAIN, SIGNAL = 6.1; EXPRESSED IN ADULT LIVER, SIGNAL = 5.2; EXPRESSED IN PLACENTA, SIGNAL = 5.5; EXPRESSED IN HEART, SIGNAL = 6.7; EXPRESSED IN LUNG, SIGNAL = 6.2; EXPRESSED IN HELA, SIGNAL =   7; EXPRESSED IN FETAL LIVER, SIGNAL = 5.8
aagttctaggcggaagaggcccaagagacaccactttctcgctttcagacgtgtctacataagaccacaaaagaaaccgaggcaaaaacatccagaaacaggctccagttgtctcaaaagagagtacatatgaaacgagacaaggatcagaaaagtaaagctaaacccagtgtacggactcccccattcttccttctccccctctctcttcacagactgaggtaccttgggcggccgaattttgcagatgccggttttctccgccaaaggccggatgcggccgataaagctgagcggatctgtgaactcctcccaactcggctcaaagacggggcactctgg

SEQ ID NO: 6453 - DNA, 486 bp, Homo sapiens
  MAP TO AC005025.1; EXPRESSED IN BONE MARROW, SIGNAL = 1.8; EXPRESSED IN PLACENTA, SIGNAL = 1.8; EXPRESSED IN LUNG, SIGNAL = 1.9; EXPRESSED IN HELA, SIGNAL = 1.8; EXPRESSED IN HEART, SIGNAL = 1.9; EXPRESSED IN FETAL LIVER, SIGNAL = 1.8; EXPRESSED IN ADULT LIVER, SIGNAL = 1.8; EXPRESSED IN BRAIN, SIGNAL =   2
ggaatttgaacccagctgacttggttccaaaaccaaaggctcaaatttttgcgaggctgtctacaaacgggtgatgttactttaccatttaaaggaccaaatgaggcaagcaaatccaacaacaagcaaacccaacaacacttcatgtcactgtgtcactatcagaaagattcaaaaatgaattgcttgactaatttatagacagaacaaaactatttatatgacaaatagggctgctggaaatcaccaagtgctttaataaaggcagacagggaggaccccatatgacagctcatccgagaaccagaactgcaccatgtggggccatgtggctgcatgctgactcagaagaggggtggggaaggagggccgcttctgattcaccaagaccacatcctgcccctccttcattctttcccctggaagctgcatatcaatcttcttagtgaaatctccccaaagcatggggctcaggtattttcagca

SEQ ID NO: 6454 - DNA, 478 bp, Homo sapiens
  MAP TO AC004898.1; EXPRESSED IN LUNG, SIGNAL =   8; EXPRESSED IN PLACENTA, SIGNAL = 7.2; EXPRESSED IN HEART, SIGNAL = 7.4; EXPRESSED IN FETAL LIVER, SIGNAL = 7.8; EXPRESSED IN BRAIN, SIGNAL = 7.8; EXPRESSED IN BONE MARROW, SIGNAL = 7.5; EXPRESSED IN HELA, SIGNAL = 8.2; EXPRESSED IN ADULT LIVER, SIGNAL = 8.6
agaaatgatgggaaggggtgggaagggaggggcgggaacaagaccacacagtgttcaacgacttagcggttccagtgaaccaactgatgcccgtcttcagggacagacagctagaaattctagactagaacagaggcgtcatggtttgcctacccttatcctaaacaattaccatgcgaacaacttaatgtcgatcacaacagatgtaagtccggagtctctccacagtttccaggaggctggtggcaaataattgccctcgtcttggattcaaacacgtggctattcatgagacgttctgcctctactttagagattatcgacatcagcaaatgcgtgccgttcaccttctacaaccgaaaacgcccttcaggtggcattcgaaaagcagccactccctgatgccatgcgggagcgagcatggaaagcgcatttctgaaaggaaacacccagaaagggtaagttcaccttgggtggg

SEQ ID NO: 6455 - DNA, 492 bp, Homo sapiens
  MAP TO AC006425.9; EXPRESSED IN LUNG, SIGNAL = 3.5; EXPRESSED IN BRAIN, SIGNAL = 1.7; EXPRESSED IN BONE MARROW, SIGNAL = 3.7; EXPRESSED IN PLACENTA, SIGNAL = 2.8; EXPRESSED IN HELA, SIGNAL = 4.7; EXPRESSED IN HEART, SIGNAL = 3.8; EXPRESSED IN FETAL LIVER, SIGNAL = 4.5; EXPRESSED IN ADULT LIVER, SIGNAL = 3.6
ataagacccgccctttgttctgtataaagacttggggcttttctttgagtagcggctgctgccctgcaaattaacaaggaaatagagaaagtgtcagtattggtgtatggaatctacgctcaaaaatatatgtgcagtattagtctcttttctggttagcgcggagcgagaagccatgagcagcaaagtctcccgtgacaccccgtaggaggcggtgcgcgaagtcctgcaccgaaaccagcgcaagcaccccaagtttctggagatggtggagttgcagatcagcttcaagaactatgactccccagaaggacaagcgcttctcgggcaccgtcaggcttaagtccactccctgccccaagttctccatgtgtgtcctgggtaaccagcagcactgtgacaaggccaagcctgtggatttccaccacatggaaaacgaggtactgaaaaaactcaacaagaataagaaactggtcaagaaactggccaaga

SEQ ID NO: 6456 - DNA, 462 bp, Homo sapiens
  MAP TO AC004389.1; EXPRESSED IN PLACENTA, SIGNAL = 4.8; EXPRESSED IN ADULT LIVER, SIGNAL = 5.1; EXPRESSED IN LUNG, SIGNAL = 5.1; EXPRESSED IN HEART, SIGNAL = 4.1; EXPRESSED IN FETAL LIVER, SIGNAL = 4.1; EXPRESSED IN BRAIN, SIGNAL = 4.3; EXPRESSED IN HELA, SIGNAL = 3.9; EXPRESSED IN BONE MARROW, SIGNAL =   4
ttcactgttgagacctactgctcagaaaaaaagactcctttcaaaatattactacccattgacaatgcacctagaactctgatggagatatacaaggagagtaatgttgttttcaggctagctaaacacaacaccattctgtagcctatggatgaagaagtaagttttattatttaagaaatgaatttcatagggcaaaactgccatagatggtgattcctcagatggatctgggcaaagtacattgaaaatcttctggaaaggattcaccagtctagttgccactaagaatatttgtgatcaaatattaacattaacattaatgggaattttgaagaagttgattacaaccctaataaatgactttaaggagttcaagacttcagctgaagaggtaactgcacatgtggtggaaatagccaaagaattagaattagaagtggaacctgatgatgtggctga

SEQ ID NO: 6457 - DNA, 387 bp, Homo sapiens
  MAP TO AC004549.1; EXPRESSED IN LUNG, SIGNAL = 9.3; EXPRESSED IN HEART, SIGNAL = 8.4; EXPRESSED IN FETAL LIVER, SIGNAL = 7.8; EXPRESSED IN BRAIN, SIGNAL = 8.3; EXPRESSED IN BONE MARROW, SIGNAL = 8.4; EXPRESSED IN HELA, SIGNAL = 8.1; EXPRESSED IN PLACENTA, SIGNAL = 8.4; EXPRESSED IN ADULT LIVER, SIGNAL = 8.3
gcagcctgagtgacaaagtgagaccccaaacaaaaaacaaattatcgattaatttagtatatgaaaatttaaatatatgttatcatttcaagttttatagtcttagcttctcaaatttggagggaacaaatgtgggattaaaattctaagaatacatagttttcttaaagatatgcaaatttgctttactgattatgtttctgtgttttctcaaaataccttgttgtcacttctcagggtcttactgaagtaacacaaagcttaaaaatggaaaatgaagagtttaagaagaggttcagtgatgctacatccaaagcccatcagcttgaggaagatattgtgtcagtaacacataaagcaattgaaaaagaaaccgaattagacagg

SEQ ID NO: 6458 - DNA, 465 bp, Homo sapiens; identical to SEQ ID NO: 5877
  MAP TO AC006381.2; EXPRESSED IN PLACENTA, SIGNAL = 5.4; EXPRESSED IN HEART, SIGNAL = 6.6; EXPRESSED IN BONE MARROW, SIGNAL = 6.7; EXPRESSED IN ADULT LIVER, SIGNAL = 6.4; EXPRESSED IN LUNG, SIGNAL = 6.1; EXPRESSED IN HELA, SIGNAL = 7.2; EXPRESSED IN FETAL LIVER, SIGNAL =   7; EXPRESSED IN BRAIN, SIGNAL = 7.2

SEQ ID NO: 6459 - DNA, 479 bp, Homo sapiens
  MAP TO AC006453.3; EXPRESSED IN LUNG, SIGNAL = 3.7; EXPRESSED IN FETAL LIVER, SIGNAL = 2.8; EXPRESSED IN BONE MARROW, SIGNAL = 3.8; EXPRESSED IN PLACENTA, SIGNAL = 3.4; EXPRESSED IN HELA, SIGNAL = 3.7; EXPRESSED IN BRAIN, SIGNAL = 2.6; EXPRESSED IN ADULT LIVER, SIGNAL = 3.6; EXPRESSED IN HEART, SIGNAL = 2.7
aagagagtgacctcaaagggccgctgagagaattgaggtggatgcctgtacagctctaggtatggcacccattccggccccctggcaagctcttactacggttgcagatgtaatttccagtctctgcctccagggattgctgctgagcacagacacgtttctctgctcacagagtgaggccgccaagatgattctcagatctctggttctgtatacagcccagatagcctgtgaaagggggaatgataactcccaaagatgtccacgtcctaacctccagaactagtgaatgggatgttggcagaagagactctgtggatgagattacttcaaagatttgcgacggggagactattgtgggttatctgtgtggatacgcaatgtcatcacaaagtgtccttatagatgaagagggaggcagaggagattcgactacagaagagaaggtgatgtgaccgtggaggcagagattggagtga

SEQ ID NO: 6460 - DNA, 450 bp, Homo sapiens
  MAP TO AC004934.1; EXPRESSED IN BONE MARROW, SIGNAL =   2; EXPRESSED IN PLACENTA, SIGNAL = 1.8; EXPRESSED IN LUNG, SIGNAL = 2.2; EXPRESSED IN HELA, SIGNAL =   2; EXPRESSED IN HEART, SIGNAL = 1.8; EXPRESSED IN FETAL LIVER, SIGNAL = 2.1; EXPRESSED IN BRAIN, SIGNAL = 2.1; EXPRESSED IN ADULT LIVER, SIGNAL = 1.8
tcagtcgtgggagacagacctgatgtacttattattgtttctggggagataccaaagtaattgagtcttaactatttatttgttagcaacctatggttcgtcaacagatgttcaaaggtctttaagcttgaagcttttgtagtctgaggcaaaaccattttctaaaagggtggagtctgcctctttctctttgtttacccattgtggacttggaaacattactggggcactgttcaattaaaagtaatggaaaacctcacttagaagaacagtaagcatgctttcagaaaggatgggagaacttgttgggctaattttagttgtagttcaaatttaaattctttggttttttagctttcttgacaatgatgaaatacagcttcctatgtctttaaagaccaaactttaagattttaaaagtattttgagatcaaatggctattacatgaa

SEQ ID NO: 6461 - DNA, 493 bp, Homo sapiens; identical to SEQ ID NO: 5750
  MAP TO AC004414.1; EXPRESSED IN PLACENTA, SIGNAL = 1.3; EXPRESSED IN LUNG, SIGNAL = 1.3; EXPRESSED IN HEART, SIGNAL = 1.4; EXPRESSED IN BRAIN, SIGNAL = 1.4; EXPRESSED IN ADULT LIVER, SIGNAL = 1.3; EXPRESSED IN FETAL LIVER, SIGNAL = 1.2; EXPRESSED IN BONE MARROW, SIGNAL = 1.2

SEQ ID NO: 6462 - DNA, 492 bp, Homo sapiens
  MAP TO AC005849.1; EXPRESSED IN BRAIN, SIGNAL = 4.2; EXPRESSED IN BONE MARROW, SIGNAL = 4.1; EXPRESSED IN LUNG, SIGNAL = 4.1; EXPRESSED IN ADULT LIVER, SIGNAL = 4.1; EXPRESSED IN PLACENTA, SIGNAL = 4.4; EXPRESSED IN HEART, SIGNAL = 4.2; EXPRESSED IN HELA, SIGNAL = 4.4; EXPRESSED IN FETAL LIVER, SIGNAL = 4.5
ggctgatcgcatcacacgcccagccggtccaggaaagggccagaggctcacagcttctgtctcctggctcaacaggtgttggcatacagggctggctctcacaaagtgggagcagggtttgaagggggagcgaagaggagaaggtcagaagtcagaagccatgagcccccaggtgcagggtgactgcagctgctggaggctgcatcttcttcttgagccggttgaagtccttggccgagcgccacagccaggtctgcagctccttcagcagccagaagtcgtccatcttctggaggaagtcactgtgggcagggccaggagtccaagtgggttcagtcccaggcagcggctggggcagtgggtagcccagagctgccatgacgcccgcaatgctgcccagcaggccctggaggctggtgcagaagtgggccaggctgcggcgcagctcagcagtggcagcctgacggttgaggccacgcaagtaacacagaa

SEQ ID NO: 6463 - DNA, 450 bp, Homo sapiens
  MAP TO AC004552.1; EXPRESSED IN ADULT LIVER, SIGNAL = 1.9; EXPRESSED IN PLACENTA, SIGNAL = 1.1; EXPRESSED IN LUNG, SIGNAL = 1.2; EXPRESSED IN HEART, SIGNAL = 1.3; EXPRESSED IN BRAIN, SIGNAL = 1.1; EXPRESSED IN FETAL LIVER, SIGNAL =   2; EXPRESSED IN BONE MARROW, SIGNAL = 1.2
cgagatttagaacaggctctggatcgcgcagagaatatcattgaaattgcccaacagagacctcctagaaggagatactcacctagggcgggaaaaactctgcaggaaaaactttatgacatttatgttgaagaatgtggaaaagagcctgaggatcctcaggaattgagaagcaatgtaaacttgttagaaaagcttgttaggagagagtccttgccatgtttactggtcaatctatacccaggcaatcaggggtattctgtgatgctccagagagaagatgggtcctttgcagagaccattcggctgccttatgaagaaagggcattgctggactacttggatgcagaagaattaccccctgctttgggtgatgtcctggataaagcttcggttaacatttttcatagtgggtgtgtcatagtagaagttcgtgactacaggcagtcc

SEQ ID NO: 6464 - DNA, 387 bp, Homo sapiens
  MAP TO AC005736.1; EXPRESSED IN PLACENTA, SIGNAL =   8; EXPRESSED IN LUNG, SIGNAL = 5.5; EXPRESSED IN HELA, SIGNAL = 7.7; EXPRESSED IN HEART, SIGNAL = 7.9; EXPRESSED IN FETAL LIVER, SIGNAL =  14; EXPRESSED IN BRAIN, SIGNAL =   9; EXPRESSED IN BONE MARROW, SIGNAL = 8.8; EXPRESSED IN ADULT LIVER, SIGNAL = 9.5
taacgtgggtgagtggtgtgtctcgggggcccacggtctccctgaggccgcatctctctggagagatcgtggacgtccgtcgtaaactatgacctattcacattttcactttactctcaactttccaggagtgagtcctctccagagagcaagacggagctgcgtttcaacagacggtgctttcaatctgtgctgactgtaacttttatccatcataggtttgaagacatacctgatatcgggtcagagagccaaggagtctcgctgcagctgtgcagaggccttgctttctggctttgaggtcattgacggctcacaggtgtcctcaggccctaggggacaggggacagcgtcatcagggaatgtcagtgacttggcgcagactgt

SEQ ID NO: 6465 - DNA, 487 bp, Homo sapiens
  MAP TO AC004943.1; EXPRESSED IN PLACENTA, SIGNAL = 3.7; EXPRESSED IN LUNG, SIGNAL = 3.6; EXPRESSED IN HELA, SIGNAL = 3.5; EXPRESSED IN FETAL LIVER, SIGNAL = 4.1; EXPRESSED IN BRAIN, SIGNAL =   4; EXPRESSED IN BONE MARROW, SIGNAL = 3.3; EXPRESSED IN ADULT LIVER, SIGNAL = 3.9; EXPRESSED IN HEART, SIGNAL = 3.7
gctaatccatgcctctgtcccctgagggcagagaggatgataagggaggttgagaaacacatgttcagcactttgggctatggtcatgccaagtctaaggcagggatagtacaacaaaggtcacagaacaaggactgttttctgacgtttccaactctacactgactttctcgtccaataatacagtatcttgcccatgttactgcatcacctttgaccctggagaaagaccacagggtgctgctcctggctgccttaccgtcataatgagcttctccacgcagtcaggtgccacgctgtggaggtgggtgaggtgcagctggaggtggatcttgttgttgagcatgtcctggcacagggggcagcgaagcatgggttgcaccgagtgctgcgtcatggcatgcacccggagccggttgacatcggcattactgtacttgcagtagggacactggtacatctgtggggaacacacccactgctttga

SEQ ID NO: 6466 - DNA, 462 bp, Homo sapiens
  MAP TO AC005038.1; EXPRESSED IN BONE MARROW, SIGNAL = 5.5; EXPRESSED IN PLACENTA, SIGNAL = 4.9; EXPRESSED IN LUNG, SIGNAL = 5.2; EXPRESSED IN HELA, SIGNAL = 5.4; EXPRESSED IN FETAL LIVER, SIGNAL = 5.9; EXPRESSED IN BRAIN, SIGNAL = 5.3; EXPRESSED IN ADULT LIVER, SIGNAL = 4.9; EXPRESSED IN HEART, SIGNAL =   5
tggagactagcaggtccaggtaccgtgggcgcaggagagtagccaaagcctctggaagagaaggaggtagtgttgaggttggagcctggcaaagcaggagctccctcatccccaggagactaaatatgacccagtaggctggggccaagcccatatcaagagttctatggatggtatatggaaatggggaaattaaggcataaagcagttggctcaccctttgtgcatacacaggcaaaaccccttacccagggcatgggcacaggccggctcactcagcagcaccacaggcgctttggggtctgggttctgggcctcaaaggccttgacacagagctccaaggccacagaacgttgacgaagcacgaaggcaacgggcagtgggcgggctggagggcttaagcaggcagggccaaaatgtatgagagcctgagctccagcttgctcagcacccagcacatc

SEQ ID NO: 6467 - DNA, 467 bp, Homo sapiens
  MAP TO AC005738.1; EXPRESSED IN FETAL LIVER, SIGNAL = 6.9; EXPRESSED IN BRAIN, SIGNAL = 7.7; EXPRESSED IN BONE MARROW, SIGNAL = 7.2; EXPRESSED IN LUNG, SIGNAL = 8.5; EXPRESSED IN ADULT LIVER, SIGNAL =   8; EXPRESSED IN PLACENTA, SIGNAL = 7.8; EXPRESSED IN HEART, SIGNAL = 7.5; EXPRESSED IN HELA, SIGNAL = 8.2
tggagaaataccacatgcaaagctagtccttgttaaaaataaagatttaaactaaatgcccaacaatgggggattaagaaaacaatgaaagctctaaatttgtggagtaaatgcttatgcagtaagtagaaaaaacacaaggttgtgtaaacactgtgattataagtatgcaaaacagtaacctctgtacaaaggatggcaagacagagttacaaacgtcattctctttgagtggcgaaatgttgggcattgttgttgtaaagcttctctccttgctttccagtttttcagaatgttcttgttataacagcaactcaggagcagttgattcagcgagggcttgggcagccttcagcctcactgagcagacgctggcgatgggcgatgagcacctgtgctgtgcaggtggcactgcagagaggcaggtagagttgttggtggcttgggtgagtcccatggtgagggtc

SEQ ID NO: 6468 - DNA, 470 bp, Homo sapiens; identical to SEQ ID NO: 6264
  MAP TO AC005865.1; EXPRESSED IN LUNG, SIGNAL =  15; EXPRESSED IN PLACENTA, SIGNAL =  13; EXPRESSED IN HELA, SIGNAL =  13; EXPRESSED IN HEART, SIGNAL =  14; EXPRESSED IN FETAL LIVER, SIGNAL =  14; EXPRESSED IN BRAIN, SIGNAL =  18; EXPRESSED IN BONE MARROW, SIGNAL =  13; EXPRESSED IN ADULT LIVER, SIGNAL =  15

SEQ ID NO: 6469 - DNA, 454 bp, Homo sapiens
  MAP TO AC004914.1; EXPRESSED IN LUNG, SIGNAL = 1.6; EXPRESSED IN FETAL LIVER, SIGNAL = 1.8; EXPRESSED IN BONE MARROW, SIGNAL = 1.8; EXPRESSED IN PLACENTA, SIGNAL = 1.8; EXPRESSED IN BRAIN, SIGNAL = 1.8; EXPRESSED IN ADULT LIVER, SIGNAL = 1.7; EXPRESSED IN HEART, SIGNAL = 1.5
aggactaagtgaggcaacgcacaccccgtgcctaacacggtgcgtcccaaccgttctcaccatggcggtggggccacttattaccaatgccagggctacagcattgctaataagtggccctaggcgggtgacaagaggaacccggtggctccataagacaaagcctctgcaggggaacaacccgagtgccctttcccagtggcagggacagagccccagaagccaccccaggtgtcatggggtctgcccaacttgctggagtcatcgcagcgccccgggctgcagccgcacttacagagtaaaaccaggataggtctggggatgcagaattcgaagaaacgcttgcagtgtttcacaaagggatcctcaggggcctgccaggagtccaccggggtgccaaaggcgacgctggcaaccacatctgtggtgtaattgcagtagcacctacgggaga

SEQ ID NO: 6470 - DNA, 451 bp, Homo sapiens
  MAP TO AC005871.2; EXPRESSED IN FETAL LIVER, SIGNAL = 2.6; EXPRESSED IN BONE MARROW, SIGNAL = 2.6; EXPRESSED IN BRAIN, SIGNAL = 2.5; EXPRESSED IN ADULT LIVER, SIGNAL = 2.8; EXPRESSED IN PLACENTA, SIGNAL =   8; EXPRESSED IN LUNG, SIGNAL = 2.9; EXPRESSED IN HEART, SIGNAL = 2.7; EXPRESSED IN HELA, SIGNAL = 2.9
ggcaaaagttgcatctctccacttggactgaagtttcctgaggataaagaccttctcttcttcatttgtcaggccttaaagggtccaacatataggaagtcctcaggaaatccatgttaatttaaatggaattgaaagcaggtatgtttcccttctttctacagcctctgtacccaaagattggatgaaccagtggcaagaaaatgccaggtggaaacatcccaacagacagtccatgagcgatggtggaactctgtgctgcaccacccacatgcctcgcagctgagtccttctccagaactttccttcacctggaggaaggtgcctagttcaaggttacccccctccctggggcagctagcatccaaggactggtccaagcaggagtacaaagacccagtccccagcctcattcaggtcatctctgaaaggccatcccagctccagggtc

SEQ ID NO: 6471 - DNA, 479 bp, Homo sapiens
  MAP TO AC004531.1; EXPRESSED IN PLACENTA, SIGNAL =   2; EXPRESSED IN LUNG, SIGNAL =   2; EXPRESSED IN HEART, SIGNAL = 1.6; EXPRESSED IN BRAIN, SIGNAL = 1.8; EXPRESSED IN BONE MARROW, SIGNAL = 1.8; EXPRESSED IN ADULT LIVER, SIGNAL = 1.9; EXPRESSED IN HELA, SIGNAL = 1.7; EXPRESSED IN FETAL LIVER, SIGNAL = 1.9
catttgatgaaagtccagatacagtatttatatccctatcacctaggataatggcttggctggtaatatatagtataaaaacacttactgaattgaattttccttctggaaatatgctaccactcttagaaaatgtactaaatgtacattatttacataatgccatttagaacaatattttatatttatattcaaaaatatatttactttttttctgaaagtatagagaaaaaaagaactgcacattttaggtatatttcaaaatacctggctgacatattattttcaggaagaagtggaatttccagaacttttgtactggcaattattatctcttggcttgcagtagcgactgtcttcccagtgattcgatgcacctggtaaaatgcatgaggtcgtaaatatcgatcatctgctgtcccaataaacatttgtagatttattggcttttcgttatagcccaggagctaatcaggaaa

SEQ ID NO: 6472 - DNA, 469 bp, Homo sapiens
  MAP TO AC005751.1; EXPRESSED IN LUNG, SIGNAL =  19; EXPRESSED IN PLACENTA, SIGNAL =  17; EXPRESSED IN HELA, SIGNAL =  18; EXPRESSED IN HEART, SIGNAL =  16; EXPRESSED IN FETAL LIVER, SIGNAL =  16; EXPRESSED IN BRAIN, SIGNAL =  18; EXPRESSED IN BONE MARROW, SIGNAL =  16; EXPRESSED IN ADULT LIVER, SIGNAL =  17
cttggcttcccaaagtgttgcggattgcaggaatgagccactgtgcctggccttgtatggcatagttggtcctaagagaggaagaatgatttggctgggattgacttaatcacaccagtccattaaaagccgagaattttctgctgttggtcaaaaaagaggaagttagagatcagtgagaaggttttgatgcaccgtagctggtttaaagatggaagggccgtgccctaaggaatacagaaggtctgtgggactgagggctgcccttgtctgacagctgccagaaaacagagcctcagtcctgaaacgtcaaggaactgcatttttccaacaacgggaatgaatattgaggcagatttttctccagcacctccagatgaaaattcagcaaggtcgacagtttgatgtcaggcttgtaggactctaagcagacagagaccccagccatgccatgctagacatctgccct

SEQ ID NO: 6473 - DNA, 458 bp, Homo sapiens
  MAP TO AC005017.1; EXPRESSED IN LUNG, SIGNAL =   5; EXPRESSED IN FETAL LIVER, SIGNAL = 4.8; EXPRESSED IN PLACENTA, SIGNAL = 4.9; EXPRESSED IN HELA, SIGNAL = 4.6; EXPRESSED IN BRAIN, SIGNAL = 4.9; EXPRESSED IN BONE MARROW, SIGNAL = 4.9; EXPRESSED IN ADULT LIVER, SIGNAL = 4.8; EXPRESSED IN HEART, SIGNAL = 4.8
ttgatcatggaaaagcatgtgagtagaaaattcatgaattagggaaagaaaatacaaacttagggatctgcctggttgagaaggtagttactaggtgagactaggttgtgctgcagtaataaactgaattttaggtgataaagaccctaaaatcttagtggtttaaaacaatgcatgtcatgagtggctctgcaaggtaagtgctctctgtggggtgctcagcgctccagtgtgctttgacctcatcatccctctgtcttaagatgttaccattgccatccaagccttcagggatcactgaggtgggggaagagaacatgtgaccagctcttacatacttcctcatggaagagacacacatcaattctgctcactatttattggctaaagagtcaggtgaccactcataattttaaaggggcaaggaagaatagtcttcccactgcccatagtagcag

SEQ ID NO: 6474 - DNA, 487 bp, Homo sapiens
  MAP TO AC004924.2; EXPRESSED IN LUNG, SIGNAL = 1.8; EXPRESSED IN FETAL LIVER, SIGNAL = 1.2; EXPRESSED IN BONE MARROW, SIGNAL = 1.2; EXPRESSED IN PLACENTA, SIGNAL = 2.3; EXPRESSED IN HEART, SIGNAL = 1.7; EXPRESSED IN BRAIN, SIGNAL =   3; EXPRESSED IN ADULT LIVER, SIGNAL = 1.9
tgcccctggtttattgagactagagaatggcgatgacttttaccaagtatactgcttggaaacatcttgttaacaaggcatgtcctgcacagccctacatcccttaaaccttgatttcatacgacacatgttttttcagctccaggttgggtcaaagtggttggggcaaagtggctggggcaaagctacagattaacaacatctcagcaaagcaattgcttaaagtacagatctttttcaaaatggagtctcttatgtcttccctttctatgtagacacagtaacagtctgatctctctttctttcccctacatatcccccttttcgttttgacaaaaccaccaccatcatcatggccccttctccctggtcgctgtctctctggagctgctggatacacctgtagactaacaatagaaaagtcagacatacaaggattaatataaaatttgtaatagtggaatttccggtggttttaacccaagtg

SEQ ID NO: 6475 - DNA, 453 bp, Homo sapiens
  MAP TO AC005031.1; EXPRESSED IN LUNG, SIGNAL = 1.6; EXPRESSED IN ADULT LIVER, SIGNAL = 2.5; EXPRESSED IN PLACENTA, SIGNAL =   2; EXPRESSED IN HELA, SIGNAL = 1.8; EXPRESSED IN HEART, SIGNAL = 2.3; EXPRESSED IN FETAL LIVER, SIGNAL = 1.9; EXPRESSED IN BRAIN, SIGNAL = 2.1; EXPRESSED IN BONE MARROW, SIGNAL = 1.9
ttgggtactccttccaaacggcaccttctccctgccttccattcacaaatggaacacatgtcctgattttagcatttatcattcccatctaattctttatactttcatgactaatatgcatgttcctaaataacagaaaatttaatagttgtttttgaagttgtataagtatatgtcaatagaaacactgtactaatcacttaagttaaagacattttacactattaaataaggactaatgagacatcctttgaagttaaatctcaacattttaaaataacctgttgtaaggaagctgcagtattcttcttttggcttttattcttcttagcaggttttcttttaggtgtggtttttggtttacccgaagtttcacaaatgtcaccattctttagagcatgctacgaaaataggaataaaaatgtacatgttacagggtggtgcacagaataa

SEQ ID NO: 6476 - DNA, 482 bp, Homo sapiens
  MAP TO AC004941.2; EXPRESSED IN PLACENTA, SIGNAL = 1.8; EXPRESSED IN LUNG, SIGNAL =   2; EXPRESSED IN FETAL LIVER, SIGNAL = 1.8; EXPRESSED IN BONE MARROW, SIGNAL = 1.8; EXPRESSED IN ADULT LIVER, SIGNAL =   3; EXPRESSED IN HELA, SIGNAL = 1.7; EXPRESSED IN HEART, SIGNAL = 2.1; EXPRESSED IN BRAIN, SIGNAL = 2.1
gttaggggctgatgcagttggtgatttaagatgaagccaatgctcatttaccattctgaaagtcctagagctcttaagaattatgctcaatataatctgcctgtactctagaaatggaataacaaagcctagataagagtacatctgtttacagcatgccttattgaatatttaaagcccactgttgacatctactactcagatagattccttttaaaatattaccgctcattgataatgtgtctggtgacccatgagctctgatggagatgaacaagaagatgaatgttattttcatgcctgtgaagaaaacatccattctgcagcccatggatcaagaaataattttgactttgaagttgtattacttaagaaacacattttataaggctgtagctgtgatagataatgtggtccctctgacagatccggacaaagtaaattgaaaactttctggaaaggatttaccattttaggtgcca

SEQ ID NO: 6477 - DNA, 480 bp, Homo sapiens
  MAP TO AC005035.1; EXPRESSED IN PLACENTA, SIGNAL =   1; EXPRESSED IN LUNG, SIGNAL = 0.55; EXPRESSED IN HEART, SIGNAL = 1.3; EXPRESSED IN FETAL LIVER, SIGNAL = 0.91; EXPRESSED IN BONE MARROW, SIGNAL = 0.84; EXPRESSED IN ADULT LIVER, SIGNAL = 1.3; EXPRESSED IN BRAIN, SIGNAL = 1.9
ttcagtttcaagttcttctgggatatgttaactgaggcactctggtcctttatggaaaaagcactgactgaatatgaaaccttgggcaaggccctccactcctctgaaattcaatttcctagttagaaaatgaagaaaccagataattagctaaactctatggcccgttctagaactcatatgacacagttctgaagagtcgttatacgactttccagggcaatgtctaagtgacaaaggaaagaggatacctctcgcgctcggtcagcaggctcgtagtgggctttgggctcgggagcatggaagcttggcttgctcctttcctgctgcggtggtggcggctgctgcgagtgctgcgggtgcggcctcctatggtcatgctgtagagacaggagatatgcttgttcttgttgcaactgcctctggagcctctctgcctgccggtgctcctccatctcccgccatcggcactccttggag

SEQ ID NO: 6478 - DNA, 459 bp, Homo sapiens
  MAP TO AC004945.1; EXPRESSED IN LUNG, SIGNAL = 7.5; EXPRESSED IN ADULT LIVER, SIGNAL = 6.7; EXPRESSED IN PLACENTA, SIGNAL = 6.5; EXPRESSED IN HELA, SIGNAL =   7; EXPRESSED IN HEART, SIGNAL = 7.6; EXPRESSED IN FETAL LIVER, SIGNAL = 6.8; EXPRESSED IN BRAIN, SIGNAL = 8.3; EXPRESSED IN BONE MARROW, SIGNAL = 6.3
tgtcttctaccaactgccccccagctgcctaggacctccaggtggggatgcggctcagagtctagggagcacttccaccccctcctcttctcagccctggcagggtggtttcccaacaccctgaacacattcacgatgaatgagaggagctgacactgtctgtgaccactttctcttcagtcatggaggaagccttgctgtctctggctgtggcatcttctcccagatcccttaatcaacaactcccagagcttccagacccaagatacattttggaaccccaggacaatcctgaactggcacccgccctggtgtgtgccctttgctgctgctgctttggaatcatctcctgcagctatggccaccactgcttcaaggcagtgatgtttctctcaggcctgctgtctggagctctggtgatcttcctgctctttcacaaggagcaggtgctggagatac

SEQ ID NO: 6479 - DNA, 484 bp, Homo sapiens
  MAP TO AC006443.1; EXPRESSED IN LUNG, SIGNAL = 2.2; EXPRESSED IN HELA, SIGNAL = 3.1; EXPRESSED IN HEART, SIGNAL = 2.3; EXPRESSED IN FETAL LIVER, SIGNAL = 4.6; EXPRESSED IN PLACENTA, SIGNAL = 2.4; EXPRESSED IN BRAIN, SIGNAL = 3.1; EXPRESSED IN BONE MARROW, SIGNAL = 2.8; EXPRESSED IN ADULT LIVER, SIGNAL = 3.1
cggaagcaatgtttgctaaggagtcactcattgggcacccagaccagggtgccctcacaccacaaacgaacattcttagaggttctatttggcatgagcaatctggattacacacacacacacacacacacacacacacagagcactgactcctcctaggctccccatctctacacagaagactgtaattgaggggctcgcttcatccctctgcatccctagtgccctgggaggaatctagggccaccagcccccccacctcctccttcagggcagtccctccctccagggtccagggtgcagtgctgggctgcacaacctcatgcaggtccagggcagttctctgaaagctatgggagcacagagggaaggcagctgccccacagtccacacccacaagaaactcgacacacaacaagaacattctcactgagcctcagaagcttggatcttgcttccaagtcgagcttgacttgcaacacca

SEQ ID NO: 6480 - DNA, 461 bp, Homo sapiens
  MAP TO AC005029.1; EXPRESSED IN BRAIN, SIGNAL = 2.5; EXPRESSED IN PLACENTA, SIGNAL = 2.2; EXPRESSED IN LUNG, SIGNAL = 1.8; EXPRESSED IN HEART, SIGNAL = 2.3; EXPRESSED IN BONE MARROW, SIGNAL = 2.5; EXPRESSED IN ADULT LIVER, SIGNAL = 2.6; EXPRESSED IN HELA, SIGNAL = 2.1; EXPRESSED IN FETAL LIVER, SIGNAL = 2.5
atctcctcatgggtgaccagttaatccaggaggacaacatagtctcaataatattatatattaatcactcccaaattcacacacatccatgcacacacacacacacacacacacacacacacacacacacacacacacaccactcccacacaccaggatgtcgatggatgcatttctccaccccatttgtaaaagcagtttggataagctgatgcatcagttgttttttaaaattcatacgttacaggggcaaattgctattttctgagcatttcttcattcactgctttgtgcacccgcctactaaggcacacgtgatcaacgatgccctagtgcatcagatccctgaggtctctgccttccccagccttgaggaacttcccctggccatccacaagagcctcgagccctacatctattacaggagctgggccttggtggggcacaggagtgaagtgtga

SEQ ID NO: 6481 - DNA, 471 bp, Homo sapiens
  MAP TO AC006327.3; EXPRESSED IN HELA, SIGNAL = 1.9; EXPRESSED IN HEART, SIGNAL = 1.7; EXPRESSED IN PLACENTA, SIGNAL = 1.7; EXPRESSED IN LUNG, SIGNAL = 1.6; EXPRESSED IN FETAL LIVER, SIGNAL = 1.7; EXPRESSED IN BRAIN, SIGNAL =   2; EXPRESSED IN BONE MARROW, SIGNAL = 1.8; EXPRESSED IN ADULT LIVER, SIGNAL = 1.5
gacacggccaaggtcataagaaggtcaccatatagagagcctcagtgtcttggcattggtgacccaggtctggctcacagctgagttcatccctaggtgggaccggtgcccacgagaccgaagcctttgcctccgtggcttccagttggatttggtgttgcccgggctagtctccttcagtcttctcccccttattcctgaggctccagggctcccgagtgggtctccaggtaaggtaatcactgtgatcctttgttgtaaatgaaataggagaagaaatgggctccatcaagcagcagctagccattgtggcatgcattatttatgcgaaagatacgaacatttctgcctctaatcctaatgagatgagttcgagggagaaccctgggattcataaatttgtctacggagcagaattcataataaagccaaatgtgagtgcagagtcaggcatttcttttgtgtgtgcgg

SEQ ID NO: 6482 - DNA, 478 bp, Homo sapiens
  MAP TO AC005034.1; EXPRESSED IN LUNG, SIGNAL = 5.4; EXPRESSED IN HELA, SIGNAL = 4.9; EXPRESSED IN HEART, SIGNAL = 4.1; EXPRESSED IN FETAL LIVER, SIGNAL = 4.9; EXPRESSED IN PLACENTA, SIGNAL = 4.7; EXPRESSED IN BRAIN, SIGNAL = 5.6; EXPRESSED IN BONE MARROW, SIGNAL = 5.1; EXPRESSED IN ADULT LIVER, SIGNAL = 5.2
atcaaggtgggaggtcaggcattaataaacattattacacatactccttgataataacattttgatacagatacatcttttagaggtcacaatatcatggaccaaatcgatgttaaaaaccattatcaacactataaaatgtgagccagcatattacattttttatggagattctctcatattatattctaataaaaaatatcctaatcttcatatattggtaaatccatacttgattcctcagccatcctttgtctaagtgtttgaggtcttagagtaaatggtattctcttttcatggtcatcaggctcactctcagggtcatcttcgctctctctcttcataccagagatggaggaggtatgttgtacatccaaagaaatatagtcatcttgggccctggccaattcacgttttctgcgggctgcctgaataaaagctgcatctgggatcttaactgaaggaaacaaagacgagg

SEQ ID NO: 6483 - DNA, 461 bp, Homo sapiens
  MAP TO AC006460.3; EXPRESSED IN PLACENTA, SIGNAL = 2.3; EXPRESSED IN LUNG, SIGNAL =   2; EXPRESSED IN HEART, SIGNAL = 1.8; EXPRESSED IN FETAL LIVER, SIGNAL = 2.5; EXPRESSED IN BRAIN, SIGNAL = 2.4; EXPRESSED IN BONE MARROW, SIGNAL = 2.1; EXPRESSED IN ADULT LIVER, SIGNAL = 1.9; EXPRESSED IN HELA, SIGNAL = 2.4
atctcacattcccaccaacccctacaaaataatacatgtcaatctcaggtgccaactgcttaaagattaaaaaatttacaaattaaaatttgcaggataaattatctttttagaaaaatgaagaattcaaaaaataattttgataagagaacctgtaaaataatctctacaaaatatcataatttaaaaatcagccactgtcttctgtttctctttgaagtgcacatagtggccctaaaggcataggatattctaaagatgtaccttgtccatctgagttatcggaagtcaagccgttaggactgtgctcttctgagctctgcctgtaaagccctgcagacaacctcctctcggcatgctgcagtctctcatagccagcttggttgcaaaggaactccatctgctttgccatcaccttttcaggctgctagtaagtaaagcaaaaatcaaatcagtaactg

SEQ ID NO: 6484 - DNA, 471 bp, Homo sapiens
  MAP TO AC004943.1; EXPRESSED IN BRAIN, SIGNAL = 2.9; EXPRESSED IN PLACENTA, SIGNAL = 3.4; EXPRESSED IN LUNG, SIGNAL = 3.4; EXPRESSED IN HEART, SIGNAL = 2.8; EXPRESSED IN BONE MARROW, SIGNAL =   3; EXPRESSED IN ADULT LIVER, SIGNAL = 3.3; EXPRESSED IN HELA, SIGNAL = 3.1; EXPRESSED IN FETAL LIVER, SIGNAL = 3.1
cacttaaaaagcttaaccattaaaaactacagtataatgtagtataataaagaagaataaaggtgactgctcaaagaagcaaacgaaatctccctcccactcatcctttttctgggcagactaaggatgtatccgctccctgacttgttagctccattcttccagggaaggaaagatgagaaggctcaaggacagccacacacactacctgtccacttgccctggtctttctcacctccgccctcttggtccttagcaagctcctctggatcagcagctgtttcactgggtccttcaacatcttcaatggcttcttctgaaacagaagaaaaacatgtcaagggttaaaaataaaaagaagatgaaggacttttggcctctgttgcaaacaactgccaacgacagaacagacaccaatgactcgtcccccttctctttccagaggcccctgggagactgacggtgctaagg

SEQ ID NO: 6485 - DNA, 469 bp, Homo sapiens
  MAP TO AC005038.1; EXPRESSED IN BRAIN, SIGNAL = 3.1; EXPRESSED IN ADULT LIVER, SIGNAL = 2.7; EXPRESSED IN PLACENTA, SIGNAL = 2.8; EXPRESSED IN LUNG, SIGNAL =   3; EXPRESSED IN HELA, SIGNAL =   3; EXPRESSED IN HEART, SIGNAL = 2.8; EXPRESSED IN BONE MARROW, SIGNAL =   3; EXPRESSED IN FETAL LIVER, SIGNAL = 2.9
acagctgagaagcaggaaggggttactcaacagaggcccagtactgctgtttcactgacggtaaactagcctcactgaattgcagctcagtgtgccatcagatggaccccctagacctgccaggacagtcagtttgttacaacactgattgtgtgtaggcatgtggctctcccattctggataggatccagcatgctggctgtggccagggttgggtgctgtggctctgggaatatggtcatgggtgtgtgccaggtctcaccaatggtgaacatgacagtgtctgccagctgcacgttgctgatgctgatccgtgggatgaggccaatgagcccaggcaccacatcagaatagttgacgtcaatggtctctgcgatggattggaagccgtagaggagggcctctgtgtgctggggaaagagggtgccactggcttggatgaggaggagggtgtgacaggtctgggaag

SEQ ID NO: 6486 - DNA, 482 bp, Homo sapiens
  MAP TO AC002545.1; EXPRESSED IN BONE MARROW, SIGNAL =  18; EXPRESSED IN PLACENTA, SIGNAL =  12; EXPRESSED IN LUNG, SIGNAL =  15; EXPRESSED IN HELA, SIGNAL =  17; EXPRESSED IN HEART, SIGNAL =  52; EXPRESSED IN FETAL LIVER, SIGNAL =  25; EXPRESSED IN ADULT LIVER, SIGNAL =  20; EXPRESSED IN BRAIN, SIGNAL =  19
catgtgaatttattactcccgttgaaatcatgtacttaccaataaactatttgctattcaaaaaaaaagaagctggtaaataaagacccagcttttttgcccacagtggaacactcctgagatatgctctgtgtggccttttagaaagtctctaggatgatggagccccagttgtccatagtgataacccattcattcacctaaactgtattggcttttctcccttcctgtctcacctccccactgtccacgtgtgcctcacaggttcacctcccacaaaaactacttatacttgagtcctttcctgaaggtgtgctttttagacaattgctaccaaaattggcccttgatagttaccctcaggataagattctgcaattgaatcacttgccagtcaatggcaaggggcatcctcctgctgatggtaagtgtggtcatgataagcctggcgggctgcagcctcacacttactaagatgctca

SEQ ID NO: 6487 - DNA, 494 bp, Homo sapiens
  MAP TO AC004914.1; EXPRESSED IN LUNG, SIGNAL = 3.8; EXPRESSED IN BRAIN, SIGNAL = 2.9; EXPRESSED IN ADULT LIVER, SIGNAL = 3.5; EXPRESSED IN PLACENTA, SIGNAL = 4.3; EXPRESSED IN HELA, SIGNAL = 3.6; EXPRESSED IN HEART, SIGNAL = 3.2; EXPRESSED IN BONE MARROW, SIGNAL = 3.4; EXPRESSED IN FETAL LIVER, SIGNAL = 3.6
aggtcagctctcagggtcacatgtcctggtatcatgggaggaaatatggagacaccagttggcaagtgccgtctcatggcttaggggctcagacagtctcaagtgctatgacaggctcctgggagtacctttactgcttgccaggatgtggcttggtggtccgtgcactttgacttattggcttctccaacttctttaatcagcactccttgctgaggctgatggagcaacaagctacagctgcatttaataatcagaatcagtttcttgacagacggcttccaggggactttgagcgaggagatagcaatgcagtgtttgggaaagagaatctagaggcagcagagaagcagttaaacttctgcaattccttcggccatcctgaagggatggaggtagcaggccagccgcctccctccaggccacatccctctagaggccacgtgatgtctggagttgggcatgatgctctggggctggaagaagatgagcaa

SEQ ID NO: 6488 - DNA, 463 bp, Homo sapiens
  MAP TO AC003025.1; EXPRESSED IN PLACENTA, SIGNAL = 2.4; EXPRESSED IN HEART, SIGNAL = 2.5; EXPRESSED IN FETAL LIVER, SIGNAL = 2.5; EXPRESSED IN BRAIN, SIGNAL = 2.5; EXPRESSED IN LUNG, SIGNAL = 2.7; EXPRESSED IN HELA, SIGNAL = 2.5; EXPRESSED IN BONE MARROW, SIGNAL = 2.6; EXPRESSED IN ADULT LIVER, SIGNAL = 2.5
ctgctcagctgaacttgctcctcagttgaaaaggatgggctcggagaagttaaggaacctgcctgatatcacaccagccaggggcagtggggctgagtcctcttacacccgttttccaaaaagaccacccggaaactagaggctcactggcagctgcagctgtgtgcagccaggcagcaagaggttcctgagcacatgctaggtgtctggccagtggcagggaagggataaataaaagttgtgtcctctgcctacaagccactgccctcctcagcctccctccctctatctccctctgcctgctccatcccaagcctggcagccttgaccacagacccttggctgaaggcagctgaggagcaggagacagtcagcctggacaacccaggccctgattctggacttacaggtgtgtcctcagctcactgtgtgacccaggatgagtgtcttgccctctctgagc

SEQ ID NO: 6489 - DNA, 492 bp, Homo sapiens
  MAP TO AC003677.1; EXPRESSED IN PLACENTA, SIGNAL = 1.1; EXPRESSED IN LUNG, SIGNAL = 1.2; EXPRESSED IN FETAL LIVER, SIGNAL = 1.3; EXPRESSED IN BONE MARROW, SIGNAL = 1.2; EXPRESSED IN ADULT LIVER, SIGNAL = 1.3; EXPRESSED IN HEART, SIGNAL = 1.8; EXPRESSED IN BRAIN, SIGNAL = 1.2
ccaagtcttgaatcatttcagcattaattcaaaattccacagtccaaagtctcatctgagacaaggcaagtcccttctgtctatgagcctgtaaaatcaaaaacaagttagttacttccaagatacaatggtggtacaagcattgggtaagtgctcccattccaaaagggagaaatcagccaaaagaaaggggctacagtttgaaacatgcaagtttgaaacacaccagggcagtcattaaatcttaaagctccaaaataatctcctttgactccatgtctcacatccaggctacactgatgcaaggagtattttcccaaggccttgggcagctctgttcctgtggttctgcagggctcagtgtccatggctgctctcaagagctggcactgagtgtctgcagcttttccaggtgcacggtacaagctgtcagtgtggcttccattctggggtctggagggcggtgaaactcctttcacagccccactaggt

SEQ ID NO: 6490 - DNA, 473 bp, Homo sapiens
  MAP TO AC006468.9; EXPRESSED IN BRAIN, SIGNAL = 9.3; EXPRESSED IN ADULT LIVER, SIGNAL = 9.4; EXPRESSED IN PLACENTA, SIGNAL = 8.1; EXPRESSED IN LUNG, SIGNAL =  10; EXPRESSED IN HELA, SIGNAL = 8.4; EXPRESSED IN HEART, SIGNAL = 7.6; EXPRESSED IN BONE MARROW, SIGNAL = 8.5; EXPRESSED IN FETAL LIVER, SIGNAL = 8.8
aataaaaagggagggaggaggaataaaaaaccgaataaatgagaaagctttcccttctttctccccaggtttcagtaggagcccctgctacccagtggtgggttaacacagacccacctggatagaaagccacgcacccaaagaacaagaaaggttgtgaaaggctaccaatgctatgacattactttccctaacaaatggacacctctctggtccaggttatagcaaacctagcccctgctatctcaaagagtactccagttacctcttaggctggtctcctttagccaggtgagaagagctctgcctctcttcctgggcccagccacagtttgacatagcatatcgaagaatggcatcagacacagtcatggtacttcggccctggacacaggcttctatctcaggcaccgagagctggctttgcaggaataggtgcaactggctgtctgacaggagaaccacactctgca

SEQ ID NO: 6491 - DNA, 482 bp, Homo sapiens
  MAP TO AC004928.2; EXPRESSED IN LUNG, SIGNAL = 1.6; EXPRESSED IN BRAIN, SIGNAL = 1.4; EXPRESSED IN PLACENTA, SIGNAL = 1.6; EXPRESSED IN HEART, SIGNAL = 1.6; EXPRESSED IN FETAL LIVER, SIGNAL = 1.6; EXPRESSED IN BONE MARROW, SIGNAL = 1.4; EXPRESSED IN ADULT LIVER, SIGNAL = 1.6
gggcagggatttcatacctctctcccactgaagaccagactccttgagagaatatagagaagagaatagagagaaagtacatcctgaacattattcactttaccctcatttctctcatatagaatataatagagaatctcttgtagaagcccctgccttttccgcctttcagctgtgctacatcctggtggaatgcaccctcgccatgtgcacagccctcacctgtgaagagacatcaggcaaacatgggcccttttcaatctgatatgatttgtcagaactctgcttgcataggtaattttgctgttttaataccactagatagagaagctgcttggggcttgctgccctcaatatgggtttgggatgatacgatgagaagtgttcttcccttttgtggggtctcccatggccagagctgcccacctgggagcctacttgaaatatgacagatgtctgcacctgcacgcttgctctgctat

SEQ ID NO: 6492 - DNA, 488 bp, Homo sapiens
  MAP TO AC004883.2; EXPRESSED IN PLACENTA, SIGNAL = 1.9; EXPRESSED IN HELA, SIGNAL = 1.9; EXPRESSED IN HEART, SIGNAL =   2; EXPRESSED IN FETAL LIVER, SIGNAL = 1.9; EXPRESSED IN BRAIN, SIGNAL = 1.7; EXPRESSED IN ADULT LIVER, SIGNAL = 1.8; EXPRESSED IN LUNG, SIGNAL = 2.2; EXPRESSED IN BONE MARROW, SIGNAL = 1.9
agtgcttcgtctgtccagccctgcctgccttccgcctcccaagtgctgtaattgacagtgccccccagcaagcctgtgtaaactctcagtctactacttggagaatctgacctataagagattacaagggaattgtgttttttttttccttataaattctgtgttgtcttttgtttaaaatcaggccaaaaactatctcgaaagagaagtacctttaaaaaatgttagtttttttaattcatcgagcagaaatgatgctcttaaacgtccgcctgtaacatgatgtttgctgtttgtattgtagtgtaaagaactggccaagtccaaagccgaagtggcctgcattgcagtgtatgaaacagacgtgtttgtcgtcggaactgaaagaggacgtgcttttgtcaataccagaaaggattttcaaaaagattttgtaaaatattgtaagcattgtatttttatcttttgcatttcattaattttaagcc

SEQ ID NO: 6493 - DNA, 479 bp, Homo sapiens
  MAP TO AC003950.1; EXPRESSED IN PLACENTA, SIGNAL =  14; EXPRESSED IN LUNG, SIGNAL =  15; EXPRESSED IN HELA, SIGNAL =  14; EXPRESSED IN FETAL LIVER, SIGNAL =  13; EXPRESSED IN BRAIN, SIGNAL =  15; EXPRESSED IN BONE MARROW, SIGNAL =  15; EXPRESSED IN ADULT LIVER, SIGNAL =  14; EXPRESSED IN HEART, SIGNAL =  11
ttgtcttggcaacatttattggaaagactattctttcaccattacatggtcttggcagtcttgccaaaaatcaattgacaatagatgtgtgggtttatttctgaactctcaattctatttttaccatttatccttatgctagtatcacactggttagattactatagctttgtaatatagttgtgtccaatgtagttgtgtcacacccccacctcccccagcccccatttaattgccctggctagaacctctagtacaatgccaaatagaaatggcaagagtggaagtgcttgtctacttcctgatctttaaggggaacgccttcagtcttttgccattaagtatgatgatggtggaggcactttcatagatgcccttatcaaggttgatgaaggtttccttcttgtagagtattttcattatgaaagggtgttgaatttttttaagtatttcttctgtgtctattaacatggtcatat

SEQ ID NO: 6494 - DNA, 491 bp, Homo sapiens
  MAP TO AC004889.1; EXPRESSED IN BONE MARROW, SIGNAL = 2.8; EXPRESSED IN PLACENTA, SIGNAL = 2.7; EXPRESSED IN LUNG, SIGNAL = 3.2; EXPRESSED IN HELA, SIGNAL = 2.8; EXPRESSED IN FETAL LIVER, SIGNAL = 3.3; EXPRESSED IN ADULT LIVER, SIGNAL = 3.1; EXPRESSED IN HEART, SIGNAL = 2.9; EXPRESSED IN BRAIN, SIGNAL = 2.5
tgctgttgctattcctgcacggagagtgagccttaggggaggggggatatggggagcaatgggggatgcagtgaaggtgcggggaagggaggtcagtggagtatctgtgggctgggaaagagcggtgggagctgatgtacagggcgctcagatgtgatgctggggtaaccaatacagagggcggaatggggaaagtgtgctcttgggatagccctctgggctggggactggtgcatggtcacctcagggcctacatggggattaaatgggggatgagtctcacatcaggctctggaaggtgcgttcctgataggtctggttggtgacataaggcaggtagacccggcggaagtctggggcgtggttcaggactacgtcacatacttggaaggagaagatattgttctcaaagttctcttccaggtctgaaaggaacctgtacaggatttaaacgagtctcatgagacttctggacctcagctaaacagctg

SEQ ID NO: 6495 - DNA, 468 bp, Homo sapiens
  MAP TO AC003079.1; EXPRESSED IN PLACENTA, SIGNAL = 2.6; EXPRESSED IN LUNG, SIGNAL = 2.9; EXPRESSED IN HELA, SIGNAL = 2.9; EXPRESSED IN HEART, SIGNAL = 2.5; EXPRESSED IN FETAL LIVER, SIGNAL = 2.7; EXPRESSED IN BRAIN, SIGNAL = 2.5; EXPRESSED IN ADULT LIVER, SIGNAL = 2.7; EXPRESSED IN BONE MARROW, SIGNAL = 2.6
ttgctaaaaatgattgtctgggatttcaagtcctaggcccaagggtgggaaaagaaaaggagagacacgacttatacatatatatcagcccacaatgtgttttagtttaaaaagaaagaaaatatcaatttagaaatattttttaaatgaatacttaaagaaacaataaaaactactgtttagagtggataactgacactgtgcatttttttaaatcattttctaacagttctacaataacacctatatgtttttaccttgtttataagatgccaaaaccatattctcatcttcgacttcaaaaacagtgtccacatctatttgcctttggatcaaaatagccttcaattttccgaagtcattggactttagcgcctcaaggaaatttctcttaactaacttggcagctccagatttagtgacaggggcagtggtgccgtccatccttcctctccctctggaagcttt

SEQ ID NO: 6496 - DNA, 493 bp, Homo sapiens
  MAP TO AC004990.1; EXPRESSED IN PLACENTA, SIGNAL = 3.5; EXPRESSED IN LUNG, SIGNAL = 3.9; EXPRESSED IN HELA, SIGNAL = 3.6; EXPRESSED IN HEART, SIGNAL = 3.3; EXPRESSED IN FETAL LIVER, SIGNAL = 3.4; EXPRESSED IN ADULT LIVER, SIGNAL = 3.7; EXPRESSED IN BRAIN, SIGNAL =   3; EXPRESSED IN BONE MARROW, SIGNAL = 3.3
caaacaaacaaacaaacaaaaccaaaaaacaattaaagtggtgatttgtaattcctaactagaactgacatttgaatattgttctatatttataaaatatgtgggagaaattctgttatttcaaaaaatgtttttttcaaaatatttaaagtatctataaattggacatttctcactcatagtataatacagaataaaattatgtggtgatgtttttcaaacattgaaatttttttctttaaagaaattaaagaataatatataaatatactctgttgtcctattttacttttttcagggtctgcatttgcaaaggcaaagcctgaaagtccttggacttctctgaccagaaagggaattgttcgagttgtatttttcccctttttcttccggtggtggttacaagtaacatcaaaggtcatctttttctggcttcttgtcctttatcttcttcaaggtataattaagtgatttttgcttttacttttcagaa

SEQ ID NO: 6497 - DNA, 497 bp, Homo sapiens
  MAP TO AC004952.1; EXPRESSED IN PLACENTA, SIGNAL = 1.5; EXPRESSED IN ADULT LIVER, SIGNAL = 1.1; EXPRESSED IN LUNG, SIGNAL = 1.2; EXPRESSED IN HEART, SIGNAL = 1.6; EXPRESSED IN FETAL LIVER, SIGNAL = 1.3; EXPRESSED IN BRAIN, SIGNAL = 1.4; EXPRESSED IN BONE MARROW, SIGNAL = 1.2
gggcagaacctcaactaagctggagacacctacagcagcagatgtgtgtccctttcgtcccgcttgacttcatttctctctcccgtccttcaggagaagacagacctcccagggtccccctcgaccccatttctccctcccatccttcaggagaagacagacctccctgggtccccctcgaccccatttctccctcccacccttcaggagaagacagacctccctgggtccccctcgaccccatttctccctctagtcctccagaagaagacagacctccctgggagggcctacctgacacagccgtggaggggttgctgggctccccgtagcccgcctcattcacagccaccacccggaactcgtaagtcactccttgccggagcttatccaggctgagggtgtaggatgtggcgctccgcgggatgtccttcacaaacatgtcccataagccttcatctgcaagagggatggggaggcgagagcagaggttagaa

SEQ ID NO: 6498 - DNA, 483 bp, Homo sapiens
  MAP TO AC006530.4; EXPRESSED IN PLACENTA, SIGNAL = 2.2; EXPRESSED IN LUNG, SIGNAL = 2.3; EXPRESSED IN HEART, SIGNAL = 2.2; EXPRESSED IN FETAL LIVER, SIGNAL = 2.5; EXPRESSED IN BRAIN, SIGNAL = 2.5; EXPRESSED IN BONE MARROW, SIGNAL = 2.6; EXPRESSED IN ADULT LIVER, SIGNAL = 2.4; EXPRESSED IN HELA, SIGNAL = 2.1
ctgtaggggagctgatggagctgatccgcagagagggcaggaggatgacggccgctcagccctccgagaccaccgtgggcaacatggtgcggagagtgctcaagattatccgggaggagtatggcaggtcaggctcacgtcctgggctcctggttggatccagtgacactttttgcacgggcccctctacctgctcggagactttattggagctgaacagcccttgttacctgcctgaccactcctccccacctctctctttgggtcttgttgcctctatagactccatggacgcagcgacgagagtgatcagcaggagtccctgcacaaactgttgacatccggaggcctaaacgaggatttcagcttccattatgcccaactccagtccaacatcattgaggcgattaatgagctgctagtggagctgggtaagaggcctgatcgctgggaaaatgggactggtcacaggcaaataaggga

SEQ ID NO: 6499 - DNA, 469 bp, Homo sapiens
  MAP TO AC005041.2; EXPRESSED IN PLACENTA, SIGNAL = 1.8; EXPRESSED IN ADULT LIVER, SIGNAL = 1.1; EXPRESSED IN LUNG, SIGNAL = 1.3; EXPRESSED IN HEART, SIGNAL = 1.6; EXPRESSED IN FETAL LIVER, SIGNAL = 1.5; EXPRESSED IN BRAIN, SIGNAL = 1.8; EXPRESSED IN BONE MARROW, SIGNAL = 1.2
tggagaaacacaaaatccagctggagcaggtgcaggaatggaagagcaaaatgcaggagcagcaggccgacctgcagcggcgcctcaaggaggcgagaaaggtttgactctggatgaagggggtggctggggcagcctgagacctaaggaagcatgctggaaactagactggagctggagcctggaacatactgtgagaaaggcctggggcatctctgtgctggtaccccctcccacctccacttcttcctcaggaagccaaggaggcgctggaggcaaaggaacgctatatggaggagatggctgatactgctgatgccattgagatggccactttggacaaggagatggctgaagagcgggctgagtccctgcagcaggaggtggaggcactgaaggagcgggtggacgagctcactactgacttagagatcctcaaggctgagattgaagagaagggtaaggggcc

SEQ ID NO: 6500 - DNA, 493 bp, Homo sapiens
  MAP TO AC003959.1; EXPRESSED IN PLACENTA, SIGNAL = 4.2; EXPRESSED IN HELA, SIGNAL = 4.9; EXPRESSED IN BRAIN, SIGNAL = 3.6; EXPRESSED IN ADULT LIVER, SIGNAL =   5; EXPRESSED IN HEART, SIGNAL = 3.7; EXPRESSED IN LUNG, SIGNAL = 4.9; EXPRESSED IN FETAL LIVER, SIGNAL = 4.5; EXPRESSED IN BONE MARROW, SIGNAL = 3.9
agctggaaaggggaagaaaggaaagagattctctactagagcccccaggaaggaatgcagccctgctgacaccttcagtttagcccagtgagacctgttttggacttctgacctacggaactataagaaaagaaatttgtgttgttttaagcccctaagtttatgttagtttattagagcagcaacaggaagctgatccactgggaaaccatctgggatatgcagctgcccaaaatccctgctcgtggttagattcagccttacgaggctccacagcccctctgcgaaagactccattccctcttggagaagctcagactctagagccctgggcaaggaatgggccttcatggcatgggggcgatcaagaaggatgccccccaggacagtgactctgctggacttctctacagaaaacagtatatccctcagtggcgtgagaagatccaatagggtcaccacactccacaactgcaggggacactgttcacat

SEQ ID NO: 6501 - DNA, 485 bp, Homo sapiens
  MAP TO AC004903.2; EXPRESSED IN PLACENTA, SIGNAL = 3.5; EXPRESSED IN LUNG, SIGNAL = 4.3; EXPRESSED IN HELA, SIGNAL = 3.9; EXPRESSED IN HEART, SIGNAL = 3.8; EXPRESSED IN FETAL LIVER, SIGNAL = 3.8; EXPRESSED IN ADULT LIVER, SIGNAL = 3.7; EXPRESSED IN BRAIN, SIGNAL = 3.7; EXPRESSED IN BONE MARROW, SIGNAL = 3.7
caatttattttcttcaccacaaatgtattttttgctcagatatttggccacccaaatgtttcaaaataaacccacagactcacctccatatgtaatatatatatatatatatatatataacttacctcagtcaaatgtggtgtagggttaaatccacagagattacacacttgattcttgcattcagtgcaagtattgaagttaggaggatccttagaacctatgttgagttcagttttgcagagaggacaggttgattctggtttgggcgatttctccagttttgtgggaaggacagccttttgaggctcagctgttaaagatttgctatccttaataggtggtggctttttttctgtttctgttctttttactgttggagcttgttcagctttgggctctaatttttcagctgctggggcttttgtttcctttttcacaggtatactttttgcaggtgctggtggtgcttgacctgtggattt

SEQ ID NO: 6502 - DNA, 473 bp, Homo sapiens
  MAP TO AC004408.1; EXPRESSED IN PLACENTA, SIGNAL = 4.5; EXPRESSED IN LUNG, SIGNAL = 4.7; EXPRESSED IN HELA, SIGNAL = 4.5; EXPRESSED IN HEART, SIGNAL = 4.4; EXPRESSED IN BONE MARROW, SIGNAL = 4.1; EXPRESSED IN FETAL LIVER, SIGNAL =   4; EXPRESSED IN BRAIN, SIGNAL =   5; EXPRESSED IN ADULT LIVER, SIGNAL = 3.8
ttctttcagtccaagggtgggaagtcaatcagagtggagacaggggactggtctgcatgaccctaataatagtaaataatagctaacatgttgtatcagaccatttgctaagtgctatacattcatatgaggttgaaacacttgacaatacgatggagctttacagagaaggaaactaagactcaggcagattaattcacgtaattagtaagcagtggagctgggatttaaacccaagcagccctttcaaaccacgctgtcctggccagggtcaggctcctgcacccaccttgggagaggtgatcttgatgtaaacaatgatgggggccagcgaggtcttggacagctgggctgggtgattgatggtgtcagcatccagagcgaccaactgaagggtccgggccagctcgaagattcgctcgatttcactctgcacctcagctgggggcatggagtcatgtggatgggggaat

SEQ ID NO: 6503 - DNA, 478 bp, Homo sapiens
  MAP TO AC005084.1; EXPRESSED IN FETAL LIVER, SIGNAL = 1.7; EXPRESSED IN BONE MARROW, SIGNAL = 1.7; EXPRESSED IN HELA, SIGNAL = 1.7; EXPRESSED IN PLACENTA, SIGNAL =   2; EXPRESSED IN LUNG, SIGNAL = 1.8; EXPRESSED IN HEART, SIGNAL = 1.6; EXPRESSED IN BRAIN, SIGNAL = 1.8; EXPRESSED IN ADULT LIVER, SIGNAL = 1.8
ggactaattttccaccaccgagttaagtccttctgaatacattatgtaatgtcccatgaatcatgagcttctccagtctggccagtgagtcctgtgctacttgagctccaggcactgttcacctcaatcctttcaggagattcttcccctggcctctggcggtctcctcctgtgcatttgctgattagtgctcagctaaagactgacagagagccagcctcctgcagatttctggaattctctctctgttcagctttctccatctcattactccatcctgcaggttctggatgccttggtcttcctggactttctgctccatctttcaactcaggagtctgctagactctgcctgaatctctctgcaggagttgtgacctggaaattttctcaatgcagtgagcttgccttgtttgcttccatctctcagggatcactgtccttcactgactgatatccagtgtcatgcaaatcattg

SEQ ID NO: 6504 - DNA, 485 bp, Homo sapiens
  MAP TO AC003029.1; EXPRESSED IN LUNG, SIGNAL = 2.2; EXPRESSED IN FETAL LIVER, SIGNAL = 2.1; EXPRESSED IN BRAIN, SIGNAL = 1.7; EXPRESSED IN BONE MARROW, SIGNAL = 2.1; EXPRESSED IN PLACENTA, SIGNAL = 1.9; EXPRESSED IN HELA, SIGNAL = 2.1; EXPRESSED IN HEART, SIGNAL = 1.8; EXPRESSED IN ADULT LIVER, SIGNAL = 2.3
tcaaggtctgaggaactataagccatatgtaggattaccttattaaaccctagaactcaaaagtatcactggattaagcccttttctaccattttaatctcactttttccagtatacaaaggactgcctcaagccatagtacccctacaagtggttggagactagaatcccatctgtgctctgcaggtggaaagcccaggcttgcagaagtcagaagtaaccagaactgtttagagccaggtccaggaacttcctatggccttttggtagcaactgtgcatggcagccctgttggcgttttctccacaggctcctgaaggtcaaaccggaggagagactcaccatcgagggagtgctggaccacccctggctcaattccaccgaggccctggataatgtgctgccttctgctcagctgatgatggacaaggttttgaatgatgtttactttgttggctgaaaagactgtgttgggaaggaatgct

SEQ ID NO: 6505 - DNA, 482 bp, Homo sapiens
  MAP TO AC003681.1; EXPRESSED IN LUNG, SIGNAL = 5.4; EXPRESSED IN HELA, SIGNAL = 4.6; EXPRESSED IN FETAL LIVER, SIGNAL = 4.4; EXPRESSED IN BRAIN, SIGNAL = 4.9; EXPRESSED IN BONE MARROW, SIGNAL = 4.3; EXPRESSED IN ADULT LIVER, SIGNAL = 4.3; EXPRESSED IN PLACENTA, SIGNAL =   5; EXPRESSED IN HEART, SIGNAL =   4
tgcaagctggaaaacatctcattttagcaagacttatttcctgagaatccactgtttaagatgatcttctctgtatcattcctttagtagttcagaatttgaataactagatatatttgaattaggtgggtataaacccatcctctttagcttccttatctacttatgtgctgtgttttcaacttcagtggcagaggatttaccatccattcagccaactgatgtttgaagcttttttttttttaactgcttcagaactctgaagggtttctttcatttcgaaggttcctttccttgaacttcatggagagagcacagagtttgtgggccgtgccgaggatgccatcattgccctttccaattacagacttcacatcaagttcaaggagtctcttgttaatgtaagtgattaccagctgttctccctctaaggtaaatggagaaagtaagtcaaaaaacttaatgctctcaaagagaggaga

SEQ ID NO: 6506 - DNA, 471 bp, Homo sapiens
  MAP TO AC003036.1; EXPRESSED IN PLACENTA, SIGNAL = 0.8; EXPRESSED IN BRAIN, SIGNAL = 0.69; EXPRESSED IN ADULT LIVER, SIGNAL = 0.7; EXPRESSED IN HEART, SIGNAL =   2; EXPRESSED IN LUNG, SIGNAL = 0.76; EXPRESSED IN FETAL LIVER, SIGNAL = 0.76; EXPRESSED IN BONE MARROW, SIGNAL = 0.63
tgcccagagtgtagatgctcacttttgataactagtgatactctcactctgaataacccatgtttggtgacgttaatggaggcaagaaaaatgtataataaattggcctctcagctacgaatcagggcaaatcagaacataagttccactgaataaggagatttcaaccatcctctagggtctttaaatctttagagctaagccagaagttcctcactctgggaattcagcgtgtgtgagaagtggatttttaccatttattatggtgacaagctccttttagtagctacagtgtttaaaattactgccgtcatggacacggaacttggtaacatccctgtgccggacacaacgttagtgaaattccatttctacttgtgtttctttttcttcagtactgtcgccaccaccatcatcacatggtttttattaacttgtctgcctgttcctggtggtgtgtggacgtcagtc

SEQ ID NO: 6507 - DNA, 415 bp, Homo sapiens
  MAP TO AC005007.1; EXPRESSED IN PLACENTA, SIGNAL =  14; EXPRESSED IN LUNG, SIGNAL =  15; EXPRESSED IN HELA, SIGNAL =  14; EXPRESSED IN FETAL LIVER, SIGNAL =  14; EXPRESSED IN BRAIN, SIGNAL =  14; EXPRESSED IN ADULT LIVER, SIGNAL =  14; EXPRESSED IN HEART, SIGNAL =  12; EXPRESSED IN BONE MARROW, SIGNAL =  13
gaaacgttaccacctgcctcatcatagggtcaattattaagattaattaagattatggatgtaaaggcaaatgcaggtactcaataaatggtctttcctctcacccttctccatctgtatcccactggtcatttattctatgccaagaagatacaaagaagcaatcaaatgaaagtgtgtaatcataaacagaagaacagggaagtcaaaggcagacacattataaagcaaacatatgaaccaacataattaggacattaaccttccagcatctgtctccttgaaaattccatcctgattaggacacagttcacagctaggagaaacaccacatttacaggcatcacaaaaccaaggttcagtggagttttcagaagctgaactcataatagagtcactctctccatcaactcca

SEQ ID NO: 6508 - DNA, 470 bp, Homo sapiens
  MAP TO AC005045.2; EXPRESSED IN LUNG, SIGNAL = 2.8; EXPRESSED IN BRAIN, SIGNAL = 2.5; EXPRESSED IN BONE MARROW, SIGNAL = 2.6; EXPRESSED IN PLACENTA, SIGNAL = 2.9; EXPRESSED IN HELA, SIGNAL = 2.8; EXPRESSED IN HEART, SIGNAL = 2.4; EXPRESSED IN FETAL LIVER, SIGNAL = 2.8; EXPRESSED IN ADULT LIVER, SIGNAL = 2.6
cttagtaccatgatggcaacagtaattattgttgaatgggtgaacaaacaggaaaattaaaatgtactatattagggtatttaaccaggacaaaaactttcacttgcttatgggcttgtgacatttatctagaactactaatattcctaatgcctgaatgtcatttccaaagtctaggtttcacttaccacaaatatgatacaactcattgatttcatattttctgaaaacacttatggttctgtatactattactccttttttcctcaggagctaccaaatttcggtgttccaaagcactaccatggtgtttatctggttcctggtgccaggtactaggcttccgcctgttgttatagctttcccaacgctcattctcactgtcatacatctgaacaaagattgcttatggatacatagtacaatgtacaaacacacaattattgctgttctgggttgggcattgtgta

SEQ ID NO: 6509 - DNA, 466 bp, Homo sapiens
  MAP TO AC004453.1; EXPRESSED IN PLACENTA, SIGNAL = 2.2; EXPRESSED IN LUNG, SIGNAL =   2; EXPRESSED IN FETAL LIVER, SIGNAL = 1.8; EXPRESSED IN BRAIN, SIGNAL = 2.2; EXPRESSED IN ADULT LIVER, SIGNAL = 1.9; EXPRESSED IN HELA, SIGNAL = 1.9; EXPRESSED IN HEART, SIGNAL = 1.9; EXPRESSED IN BONE MARROW, SIGNAL = 1.9
ttgttgattttggaatcctcctgttaaacactgtttacctgtcagcttttggtgaagtggcagtgcatttccattttgccagtgggaaaacttgtcagtttctgacttttagttctctccttcacagattttacgacatttctacaagatatgtggtacagtattgggcagatgaactgattgctggattggtgtttgattttaggtattcaaaacctttgaccacatggcccgtcaggatgatgagaagagaaggcaggaacttgaagagaaaatcagaagaaaggaagaggaagaggccaagactgtgtcagctgctgcagctgagaaggagccagtcccagttccagtccaggaaatagagattgactccaccacagaattggatgggcatcaggaagtagagaaagtgcagcctccaggccctgtgaaggaaatggcccatggttcacaggaggcagaagct

SEQ ID NO: 6510 - DNA, 450 bp, Homo sapiens
  MAP TO AC005137.1; EXPRESSED IN ADULT LIVER, SIGNAL = 1.8; EXPRESSED IN PLACENTA, SIGNAL = 2.1; EXPRESSED IN LUNG, SIGNAL = 1.7; EXPRESSED IN HELA, SIGNAL =   2; EXPRESSED IN HEART, SIGNAL = 2.3; EXPRESSED IN BRAIN, SIGNAL = 2.2; EXPRESSED IN BONE MARROW, SIGNAL =   2; EXPRESSED IN FETAL LIVER, SIGNAL = 2.1
ttccctccactctgagttccccgtcagcccttagcagaccatgctgtgactttcagtatctggcaattctgagtccgtctcccaccctggctggggaccccctgagggcacggtggcatctggcttggctgtgtactcacaggtcccggcgccatcccatgcccccagggattggacaggcagtcggatggatggacccgagtgggagggcattctccagcaaccgtcagcccactccaagtggtcacctgtttgctttccgggagggccccgtctaaccactgtatcatccccaaacctgggtgtggctagtctccactcaccatgccgctcagcagctccccgctcatacacagcagaaacgaccaccttcccaatgggggagtccacaccgccttccagggccaggtctaaggatccctcctggttagaggaaaacaggccttaggg

SEQ ID NO: 6511 - DNA, 482 bp, Homo sapiens
  MAP TO AC003043.1; EXPRESSED IN LUNG, SIGNAL = 2.1; EXPRESSED IN HELA, SIGNAL = 1.7; EXPRESSED IN FETAL LIVER, SIGNAL = 1.8; EXPRESSED IN BRAIN, SIGNAL = 1.6; EXPRESSED IN BONE MARROW, SIGNAL = 1.7; EXPRESSED IN ADULT LIVER, SIGNAL = 1.9; EXPRESSED IN PLACENTA, SIGNAL = 1.8; EXPRESSED IN HEART, SIGNAL = 1.7
tgatggtgctcctcatcttgcagatggcgtcgtattttgggcattcagtggctgtcactgacgtcaacggggatgggtgaggagggacatgccccacccctacccagttgggtcccaaattaccagagctgccctctgtctccctttcctagccctagtctcacgtatccactggaggaacaggagagcaagggtcgaggagatttggccctagccccaatatacccctggtccagtcccatgtaaccactcatctggcccacaggaggcatgatctgctggtgggcgctccactgtatatggagagccgggcagaccgaaaactggccgaagtggggcgtgtgtatttgttcctgcagccgcgaggcccccacgcgctgggtgcccccagcctcctgctgactggcacacagctctatgggcgattcggctctgccatcgcacccctgggcgacctcgaccgggatggctacaatggtgag

SEQ ID NO: 6512 - DNA, 474 bp, Homo sapiens
  MAP TO AC004558.1; EXPRESSED IN PLACENTA, SIGNAL = 6.3; EXPRESSED IN LUNG, SIGNAL = 5.6; EXPRESSED IN FETAL LIVER, SIGNAL = 6.7; EXPRESSED IN BRAIN, SIGNAL = 5.9; EXPRESSED IN BONE MARROW, SIGNAL = 6.2; EXPRESSED IN ADULT LIVER, SIGNAL =   6; EXPRESSED IN HELA, SIGNAL =   6; EXPRESSED IN HEART, SIGNAL =   6
aaaatggctgaatgctgagggtccagggctgggctcacccagcctacaaagtgtgtgtgactgtgagtgtctgtgtctctgtgtgtgtgtgtgtgtgtctttgtgtgtgtgtgtgtgtctgcacataatgtgtgtagaggttgggtgagagaatcactggtgaaagaggcagaggactcagcaattctgagaggcttgaaacacagacagaaggggaaggggagggaggaaaaagggggcaggactgagaggggaggggacagggaggtgtcctgggcacagaccccgcccatgagcctgagaaatgctcctgccctgggaagaggctcagtgcagaagaaggaaaacagcacagctgacagctgtgttcagaaagtttctggatcccatgctcatctccacaaaggaggacaagcaggcagcagagaccatggtgatttcctcagctcctccctgcagatggcatgtttcctg

SEQ ID NO: 6513 - DNA, 456 bp, Homo sapiens
  MAP TO AC005243.1; EXPRESSED IN PLACENTA, SIGNAL = 2.2; EXPRESSED IN ADULT LIVER, SIGNAL = 1.9; EXPRESSED IN LUNG, SIGNAL = 2.3; EXPRESSED IN HELA, SIGNAL = 1.8; EXPRESSED IN HEART, SIGNAL = 1.7; EXPRESSED IN FETAL LIVER, SIGNAL = 1.8; EXPRESSED IN BRAIN, SIGNAL = 1.9; EXPRESSED IN BONE MARROW, SIGNAL = 1.8
tgcagtgagaatttagtgcccagagtataggaaaccatgtaggcagtttggtctattcaatctattttaatgaggcatatttttgttggactgagctatattgcattaagatcacttgtagtttctctccgtcttctcttcgcttccctccccaaatgacactgtgattgcctgaggttcctctacccaaaagccaggacttgctccttactttaactcactgtccactcagattagggtttggagagtctcctttggtgactggaaggggaagacaaatccctagcggcagcttctgtgcctcccccgactcctttttggcagagtctccctgtgccttccactcctctatggccactttcacaggctgagtttccagctctttgcccaccctttcccctttggaagccccattctgtttgggaacaaaatgcctgggagtcatgagaagcagga

SEQ ID NO: 6514 - DNA, 302 bp, Homo sapiens
  MAP TO AC005146.1; EXPRESSED IN LUNG, SIGNAL = 1.9; EXPRESSED IN FETAL LIVER, SIGNAL = 1.4; EXPRESSED IN BRAIN, SIGNAL = 1.5; EXPRESSED IN PLACENTA, SIGNAL = 1.6; EXPRESSED IN HEART, SIGNAL = 1.4; EXPRESSED IN BONE MARROW, SIGNAL = 1.5; EXPRESSED IN ADULT LIVER, SIGNAL = 1.6
gcagtgaggaacagaacagctaaacagtaggggagcaacgaaagactggtcgggcgcagatccacctcttctagagcccaagttctggcagttgttttataagattcaaaggtcctgtttttggtgagacagaacacagtgacagaaagataaaaggcagaactctgttgcttacagttccaaaagagagggaacttccaggcgggactatgcagacggctgcgttgtgggtgaaggctgcatcatggtcagggaaggctgcgtcatgggcagtgagggctgcgtcatggtcagggaaggct

SEQ ID NO: 6515 - DNA, 443 bp, Homo sapiens
  MAP TO AC004615.1; EXPRESSED IN PLACENTA, SIGNAL =   1; EXPRESSED IN HEART, SIGNAL = 1.3; EXPRESSED IN FETAL LIVER, SIGNAL = 1.1; EXPRESSED IN BONE MARROW, SIGNAL =   1; EXPRESSED IN ADULT LIVER, SIGNAL = 1.2; EXPRESSED IN LUNG, SIGNAL = 1.1; EXPRESSED IN BRAIN, SIGNAL = 1.1
ctgtgtatgacactgagtttcccaacagtgtagatcattaagctgctcacggggcctcccaatagtcctataggaaccaggtgttatctaaacaaaaccacgtctctttggatgaaatactgagcaggcaagaccaaaagggaatgacatgaatgttgagattttttccctcttttctattgtttccagagccaaactttgtgtcatcttatgacatcggaaattttacctacttctttttccgagaaaatgcagtagagcatgactgtgggaaaacagtgttctccagagctgcccgggtgtgcaagaacgatattggtgggcgcttcctgctggaagacacctggaccacattcatgaaggctcgcctgaactgctcccgtcctggggaagtccccttttactacaacgaattgcagagtactttcttcctgcctgagctg

SEQ ID NO: 6516 - DNA, 468 bp, Homo sapiens
  MAP TO AC005187.1; EXPRESSED IN BONE MARROW, SIGNAL = 2.1; EXPRESSED IN PLACENTA, SIGNAL = 2.2; EXPRESSED IN LUNG, SIGNAL = 2.4; EXPRESSED IN HELA, SIGNAL = 2.1; EXPRESSED IN HEART, SIGNAL = 2.1; EXPRESSED IN FETAL LIVER, SIGNAL = 2.4; EXPRESSED IN BRAIN, SIGNAL = 2.2; EXPRESSED IN ADULT LIVER, SIGNAL = 2.4
ccttcctcctggtcctccaggccgctggtctggcggcagatctcagccagcatgctgttgatcatgcaggagggctgaggcaccgacgtccccgtgagcttcttcacgggacgtttttccggcaaagggtagatcttgcattggccagccggtagctgccgtctttgacgttgtccaggaggccttggcccctgaccacagagttctccatctgctgcctctcgaagacaagcaggaagggcagcctcttgtagcgtgggtccaggaagatggtgacatttggaaacatgcccatttcaggcgtctcctagcaggtcttgtagagctccttggcaatcaccctcttggccatggggatctccttggagtcagtctccttgttgttgaacgtggtatttagcagcatgtgaaacagcagtttcactgtgctgatggtgggatacttcaaggcagacagtatcttggcca

SEQ ID NO: 6517 - DNA, 458 bp, Homo sapiens
  MAP TO AC004770.1; EXPRESSED IN LUNG, SIGNAL = 8.1; EXPRESSED IN BRAIN, SIGNAL = 8.7; EXPRESSED IN ADULT LIVER, SIGNAL =   8; EXPRESSED IN PLACENTA, SIGNAL = 7.7; EXPRESSED IN HELA, SIGNAL = 7.7; EXPRESSED IN HEART, SIGNAL = 7.6; EXPRESSED IN FETAL LIVER, SIGNAL = 8.1; EXPRESSED IN BONE MARROW, SIGNAL = 7.9
cccagtctgtgaaatgcctcttactctgggagggatggagggaatcaatggcttccctattctcctgcctctcccacaggggaaggggaggggaggcatgtggcccctggagggatctttcagggagcgccccggccccactgctcctccccgctgggaagtgggggtggtgtccttgacggacggacggctgggcgtcaggtccactgggagtggaaggcaggcagccagggtagtgggcacctccacccccactctcccgctcccaggactccatgggaatcgctgtcactatccagacaccttcacagagaactcatgcctaggctgaggcacagccaggccgagggtgagtcagccagggaaatcccggcactggcgcccaccgctggtgacggttccgctgacacctacggaacggggtgcccagcccctcccgcagagggtgagaggaacac

SEQ ID NO: 6518 - DNA, 465 bp, Homo sapiens
  MAP TO AC005255.1; EXPRESSED IN PLACENTA, SIGNAL = 1.8; EXPRESSED IN LUNG, SIGNAL = 2.1; EXPRESSED IN HEART, SIGNAL = 1.8; EXPRESSED IN BRAIN, SIGNAL = 1.9; EXPRESSED IN BONE MARROW, SIGNAL = 1.7; EXPRESSED IN ADULT LIVER, SIGNAL = 1.8; EXPRESSED IN FETAL LIVER, SIGNAL = 1.8
caggcaaggtggatcatctcattaagttcacagaaaaagtgagggatttccaagtctgtgcagaaggacaactgcaatgtcactaagctttgtaacatggagtttaggacactcatgatccaggacaccagaaccagcagtccacagagctgagggctcatgatgaccgtgtagtgcagggggtgacagatggccacaaactggtcataggccatcacggtcaggagtaagctgtccaacactataaagagtacaaaaaagcacatctgggtgatgcaacctgcataggtaatgactttgctctgtgtctggatgttcaccaacatctttgggaccatggtggaggcaaaacagatatctacgaaggacaggttggagagaaagaagtacatgggggtgtggaggcaggagtctgagattgcggccaggatgatgagcaggttcccgagcacagtgaccaggtac

SEQ ID NO: 6519 - DNA, 396 bp, Homo sapiens
  MAP TO AC005274.1; EXPRESSED IN LUNG, SIGNAL = 1.8; EXPRESSED IN HEART, SIGNAL = 1.6; EXPRESSED IN FETAL LIVER, SIGNAL = 1.5; EXPRESSED IN BRAIN, SIGNAL = 1.7; EXPRESSED IN PLACENTA, SIGNAL = 1.7; EXPRESSED IN BONE MARROW, SIGNAL = 1.5; EXPRESSED IN ADULT LIVER, SIGNAL = 1.7
actctctttgtgtggtgggggacgtgccaagtcacacatccattcctgttactgagcatccatctctcaagctggttttttgtaacttttctgtacctggagcagatacagattaattctttacttgaatagaagtcacagtgaaagacaaggaagctcatatgcagatagaaatgtatgtatttgtatgcatatatatgcatgtttatgtgcatacagacaagcatacatatattgcaccctacattacatataacaaacactgttagtggttttaacttttcatgtctatctggcacactcctccactgaggtactcctcttgtttttctctcttccttcttatctcctgctgtctccttatttttacttttgatttgctctttatctttctaa

SEQ ID NO: 6520 - DNA, 462 bp, Homo sapiens
  MAP TO AC004648.1; EXPRESSED IN LUNG, SIGNAL = 5.7; EXPRESSED IN BRAIN, SIGNAL = 5.3; EXPRESSED IN ADULT LIVER, SIGNAL = 5.5; EXPRESSED IN PLACENTA, SIGNAL = 5.3; EXPRESSED IN HELA, SIGNAL = 4.8; EXPRESSED IN HEART, SIGNAL = 4.9; EXPRESSED IN FETAL LIVER, SIGNAL = 4.5; EXPRESSED IN BONE MARROW, SIGNAL = 4.1
cacctttccaaaattctatagttcgaaagaaatacatttggatttttattggtaggatattaaagcaaataccggcaatcaaatataaagcaaacacttatttttttcttgtttccttttgtatgccttaattcagtttggtgcgattaattgttagcagatactttatatgaaaaacatgttttggtgtaggtagggaaaccttacactgtaaagcaaaagtggtgtcctttgctctttcagataaggagacaaggaggcatccagctcctggtggacctgttggatcatcggatgaccgaagtccaccgtagtgcctgtggagctctgagaaacctggtgtatgggaaggccaacgatgataacaaaattgccctgaaaaactgtggtggcatcccagcactggtgaggttactccgcaagacgactgacctggagatccgggagctggtcacaggttag

SEQ ID NO: 6521 - DNA, 466 bp, Homo sapiens
  MAP TO AC004659.1; EXPRESSED IN LUNG, SIGNAL =   3; EXPRESSED IN FETAL LIVER, SIGNAL = 2.5; EXPRESSED IN BRAIN, SIGNAL = 2.8; EXPRESSED IN BONE MARROW, SIGNAL = 2.6; EXPRESSED IN ADULT LIVER, SIGNAL = 2.4; EXPRESSED IN HELA, SIGNAL = 2.6; EXPRESSED IN PLACENTA, SIGNAL = 2.3; EXPRESSED IN HEART, SIGNAL = 2.9
ccccaaacctaggagaaacgtttcttcccctcccttgctcacgccgtccttcaagccctcagcatatgctcagagagaaacagagaccttatatacctttcattcctgctcctttatttcacttttccctcccccctaaatgagtcaagcagaacgtgtgttcagcccacggtcagttgggcaacagatgtgtcaccaggactcccctccccagcccccttccctcctctctgggggggcagagctggaggcccctcacatagcactctcgttgcctccccgtccccgggatgcccccttctcctgtgccatgagggacttgtagggtttccccaggctggggagggtaagctcagcttcctgaagctccagctcccgctgagacaagtgctcgatgacggccgctccaattgagtcccccagtacgttggtcattgtgcgaagccggtcactggtacaggggaga

SEQ ID NO: 6522 - DNA, 480 bp, Homo sapiens
  MAP TO AC005104.1; EXPRESSED IN PLACENTA, SIGNAL = 9.3; EXPRESSED IN LUNG, SIGNAL = 7.5; EXPRESSED IN HELA, SIGNAL = 6.7; EXPRESSED IN FETAL LIVER, SIGNAL = 6.7; EXPRESSED IN ADULT LIVER, SIGNAL = 7.1; EXPRESSED IN HEART, SIGNAL = 6.6; EXPRESSED IN BRAIN, SIGNAL = 8.1; EXPRESSED IN BONE MARROW, SIGNAL = 6.4
aaataacctgcaaatgtaccccaataaaataaaagttgaaattatttaaaaaaaaaagaagagacaaaaatatgaaaaatctttactagaaagtaggtggcaaagtagtggcttctgtttttcaggagcaatctctccttgtttaagattagtgatggagttacttcaaaatgcaaaatattaatgaggcttaaggaggaacctgtcatatttaagctgacacaatgttagtaactgcctgtcttccaggctaagggacaacagggcctacctctgacttcttgatatgtgcacatcaccttacacgtggtgcccgagagccccgccatcgccatccccgccctgcatctgcatctgcatctgcgcctgcatccttgcaatcatctcttgcatgcggcggagctgtgaacacacacacacattataggttttcaaggtttgctgtctttgaacattatttctgggtgttctgtgattcct

SEQ ID NO: 6523 - DNA, 470 bp, Homo sapiens
  MAP TO AC005146.1; EXPRESSED IN LUNG, SIGNAL = 2.8; EXPRESSED IN HELA, SIGNAL = 2.5; EXPRESSED IN BONE MARROW, SIGNAL = 2.5; EXPRESSED IN ADULT LIVER, SIGNAL = 2.7; EXPRESSED IN PLACENTA, SIGNAL = 2.8; EXPRESSED IN HEART, SIGNAL = 2.8; EXPRESSED IN FETAL LIVER, SIGNAL = 2.7; EXPRESSED IN BRAIN, SIGNAL =   3
ttgcaagcagaaagcacatcatcctcatcaaagtgtgcttgtggaatgagtgaatgaactgggagtggatagatggctgagcaggtcctgcaggagaaggaccatttcatttcattctgtgggctcacctagaatctgaaaaacaagggcatgcagaacttcttaacaatgaagactttgttctgtttcgattccttgtgctccaggcctacccgggaaagcgatgacgaggacgatgaggagaagaagggacgaggctgctccctgcagtaccagcacgccacagtgcgtgtcctcacccagtttgtggccgagtcacctgacttagggcagctgacctacatgctgggccccgactggcagtttgacatcactgaccttgtgaccgagttcatgaaggtggaggagccgaaaatcgctcagttacaggacggcaggaccctggctggtcgggagccgggaataaccac

SEQ ID NO: 6524 - DNA, 443 bp, Homo sapiens
  MAP TO AC005247.1; EXPRESSED IN PLACENTA, SIGNAL = 1.8; EXPRESSED IN LUNG, SIGNAL = 1.9; EXPRESSED IN HELA, SIGNAL = 1.8; EXPRESSED IN FETAL LIVER, SIGNAL = 1.9; EXPRESSED IN BONE MARROW, SIGNAL = 1.7; EXPRESSED IN ADULT LIVER, SIGNAL = 1.8; EXPRESSED IN HEART, SIGNAL =   2; EXPRESSED IN BRAIN, SIGNAL = 2.1
ctgctccatatgggttcctggtcattcattcctgcctccttcagggttcaagaccccatttgccatcagtagccagccaccatcctaggtcttctccacactcactcatatttttctcacttgccttcttgacttttaaaattttgctcatgatcttttctaatcttgaatatttaaatccttttgtaacaagactttcccattgttatcccctttgtttatttttattgagacagttttatttgctgggttttactattctctatttctctattttattacctggatcttctgcaccttcctgacgtagcacaggtcctcctttgtgaaatatttgttttcttcaagccccttggttctccccgtgggaacacacatggtatctaagccttgaccctcggctgaagcccctgctgaatcttgcccactttcttgtctgcctc

SEQ ID NO: 6525 - DNA, 450 bp, Homo sapiens
  MAP TO AC004671.1; EXPRESSED IN PLACENTA, SIGNAL = 3.7; EXPRESSED IN LUNG, SIGNAL =   4; EXPRESSED IN HEART, SIGNAL = 3.6; EXPRESSED IN BRAIN, SIGNAL = 3.8; EXPRESSED IN ADULT LIVER, SIGNAL = 3.1; EXPRESSED IN FETAL LIVER, SIGNAL = 3.6; EXPRESSED IN BONE MARROW, SIGNAL = 3.6; EXPRESSED IN HELA, SIGNAL = 3.5
aggtgtgggcaaattttgtgcgatgaatgagtcctccctggtgaggctgactggccagcagatgctgcaggagagctacccatgtgggaggttcctggaagcctttcagagacaaatggcatttgagaaggacttggaggaaacccctgaactggcaagcgagagagggaaaaacccttccaggtgaaggtcgagtggaaaggtagatagaggtgtggcagggaataaaggaacagagatggtaggagagattccatcctgggcagagcagagaagccaggtggggcagaggagcgaaggagaccagcgatcgggcaggagaaagagtggaaggaaggtcttgaaggagaagtgccaggaggtggacagggccatgcagctgcaggggcacagttcccatacgacctccagctgcccagtggttttctggcagtccctcagccagatgtt

SEQ ID NO: 6526 - DNA, 465 bp, Homo sapiens; identical to SEQ ID NO: 6407
  MAP TO AC005080.1; EXPRESSED IN PLACENTA, SIGNAL =  35; EXPRESSED IN HELA, SIGNAL =  34; EXPRESSED IN HEART, SIGNAL =  28; EXPRESSED IN FETAL LIVER, SIGNAL =  33; EXPRESSED IN BRAIN, SIGNAL =  35; EXPRESSED IN BONE MARROW, SIGNAL =  36; EXPRESSED IN LUNG, SIGNAL =  40; EXPRESSED IN ADULT LIVER, SIGNAL =  34

SEQ ID NO: 6527 - DNA, 487 bp, Homo sapiens
  MAP TO AC004676.1; EXPRESSED IN LUNG, SIGNAL = 2.3; EXPRESSED IN HEART, SIGNAL = 2.2; EXPRESSED IN FETAL LIVER, SIGNAL = 2.2; EXPRESSED IN BRAIN, SIGNAL = 2.2; EXPRESSED IN BONE MARROW, SIGNAL = 1.9; EXPRESSED IN HELA, SIGNAL =   2; EXPRESSED IN PLACENTA, SIGNAL = 2.1; EXPRESSED IN ADULT LIVER, SIGNAL = 2.2
taatggccagctcacacttgtctataggaattccacacaggtgaagctttcacacaaaggtttcaaggctgaagacagaaaattctaggaccgggaaagacttccttctggcctccccaaatttccctgagattggggcaggatgggctaagtgtgaacactccacacaaagaggagccaagccctctcccaccctacccacctcccccagtgagcaagtacattgtggtctttaaccaaaaccaaatgagaagtagtggctacactgggtggcaacagagcaggcaggcccagcgaaaatgggtctggcctttgaaaatggcctcccagaggctgcctcccaacgtggggccttcggcattgttctggcctttgtggttcctggaaatcacccacagcaggatctgttaggcctgaatacccatccacaagggcaggagggagaggtgtgtgagttattaggggttacctctttttctggcccatc

SEQ ID NO: 6528 - DNA, 444 bp, Homo sapiens
  MAP TO AC004816.1; EXPRESSED IN PLACENTA, SIGNAL =   6; EXPRESSED IN HEART, SIGNAL = 5.7; EXPRESSED IN ADULT LIVER, SIGNAL = 6.1; EXPRESSED IN LUNG, SIGNAL = 6.2; EXPRESSED IN FETAL LIVER, SIGNAL = 5.8; EXPRESSED IN BRAIN, SIGNAL = 6.6; EXPRESSED IN BONE MARROW, SIGNAL = 6.1; EXPRESSED IN HELA, SIGNAL = 5.8
acatgaggatgtcttgagccttgcaggatgcttagcagctcccctagcctcttctcactacatgccacttgtgacaaccaaaaaatgtctctggaaatggccaagtattccctgggtggtggggtggtggtaaaatcacccatgtttgggaatcactgatctgggtgaaactgtgacttttcaaggcagagccaagaaagagagggagcgagaggggaatggcctatttcagaaagtttgggaagccatgcatgccaggttggagcagagaaccagagggaagggtaaaaaaggtgaagctggaaaagaaagaaaccatgacacagagacccttctggtccacgtagaagatctgggacttcattgtgaggcaagagtggatttggatgatgaagtgatggtgactcaggtgaccagagtggaggcggataagcaggaaaaaca

SEQ ID NO: 6529 - DNA, 449 bp, Homo sapiens
  MAP TO AC004622.1; EXPRESSED IN PLACENTA, SIGNAL = 3.5; EXPRESSED IN HEART, SIGNAL = 3.6; EXPRESSED IN BONE MARROW, SIGNAL = 3.2; EXPRESSED IN ADULT LIVER, SIGNAL = 3.3; EXPRESSED IN LUNG, SIGNAL = 3.8; EXPRESSED IN HELA, SIGNAL = 3.2; EXPRESSED IN FETAL LIVER, SIGNAL = 3.3; EXPRESSED IN BRAIN, SIGNAL = 3.7
ttgaaagcagcaagtaaaatgcaatgcaaaatcctgaacaaaatgctagtaaatagatttcaacagcacattagaaggattacacaccatgaccaagtgggatttattcctggaatacaagaatggttcaatataggaaaatcattcaatataaagataccaccatttgcagaatgaaagaaaaacccgcataatcatttcacgtgatgcaaaaaaaaaaaatctgacaaagttcaacaccctttcacaataaaaacattcaaactaggagaagaaaattacctcaatgtaataaatgccacatatgaaaagcccacagcagacatcatactcaatggtgaaagactgtgagcttttcctctatgatcaggaacaagacatggttgtctactttcatgagttctactgaacaaaatactggaagtcttagccagagcaattaggcaaga

SEQ ID NO: 6530 - DNA, 447 bp, Homo sapiens
  MAP TO AC005191.1; EXPRESSED IN PLACENTA, SIGNAL = 1.8; EXPRESSED IN LUNG, SIGNAL = 1.5; EXPRESSED IN FETAL LIVER, SIGNAL = 2.9; EXPRESSED IN BONE MARROW, SIGNAL = 3.1; EXPRESSED IN ADULT LIVER, SIGNAL = 2.6; EXPRESSED IN HELA, SIGNAL = 2.1; EXPRESSED IN HEART, SIGNAL =   2; EXPRESSED IN BRAIN, SIGNAL = 1.5
gattcttgctctgctgctccagactttggaggctttaagcttccctgaaagcagacatgagctcagcttacctctttctggtggtatttgattgccaccttcaacttggccaggtcatggtacttctgagggtcaagctcttcactgtggtcatctcgatggttgaggatgatctccagttccctggagctccgagcttggtccagcaggtctttggcaaagagcttgcactgctgagagagctcctcatactcggccttgaactcattctccaccttgctgagctccttgagctcccagcccagacggaaggcagttaggatggggtcctcacttgataaggcaatgagtgaggggcttgccagagccttatagatgttcagtcgggagcgagagtggcgcaggctgtctacctctgaactagacacacactccacacagttgcag

SEQ ID NO: 6531 - DNA, 444 bp, Homo sapiens
  MAP TO AC004782.1; EXPRESSED IN PLACENTA, SIGNAL = 3.1; EXPRESSED IN BONE MARROW, SIGNAL =   3; EXPRESSED IN ADULT LIVER, SIGNAL = 3.3; EXPRESSED IN LUNG, SIGNAL = 2.8; EXPRESSED IN HELA, SIGNAL = 2.9; EXPRESSED IN HEART, SIGNAL = 3.1; EXPRESSED IN FETAL LIVER, SIGNAL = 3.5; EXPRESSED IN BRAIN, SIGNAL = 3.4
gtgccacagataacacgcagacacaaaggcatgagtgtctgtgttccagtaaagctttatttacaaaaacaggtggcgggttggatttgactggcaggtcatagtttgctgaccttacttgagaacataaagaaggcctgcaaagctgcagtatgtcaagtgagggtgagaggaggtcagaggggtaggaactaggccctaggggccttgtaagtcattctcagagcagtgggaggccactgatagattttaagcaggaaataacatgatgtgattttcattttcaaagatgactcttgctgctatgtgaagaaggggttctgggagcaagagtggaagccagtgacaagatgtgtcaggcggccagtggaagcgcccaggtgagaggtgaaggtggcctgggcttgggcgtggcagcgaagatggctggagaaactgaaggag

SEQ ID NO: 6532 - DNA, 486 bp, Homo sapiens
  MAP TO AC004802.1; EXPRESSED IN PLACENTA, SIGNAL = 1.3; EXPRESSED IN HEART, SIGNAL = 1.3; EXPRESSED IN BONE MARROW, SIGNAL = 1.4; EXPRESSED IN ADULT LIVER, SIGNAL = 1.4; EXPRESSED IN LUNG, SIGNAL = 1.2; EXPRESSED IN FETAL LIVER, SIGNAL = 1.2; EXPRESSED IN BRAIN, SIGNAL = 1.4
cccagaagtaggaaatggaaagatgaccttttacagacaactgtgaaaagagaagctatgactgtggaagagaaagctccctagaatgtcctcacaaaaccatccaatggaagacatcctccaggaggcctccaacggatccctcgatactacaaaaataccggaggcttaggagctgggaacttccaggggctagagatctcttgctgtggtcctttccatcatcgcactgacaacagctctctccaacacctttctgcttaccaccatcttcctcaccaggaagctatatacaccagccaactatctcactggctccttgttcatatccatgagcatcacatagaccatcacacacacctggaaatttggccaactcctgtgcaacatctggctgtcttctagcatcacgtgctacatggcctccaaccgatatttctgtctgttgctctgaccaggtactgggccatcaccaatgccctgtag

SEQ ID NO: 6533 - DNA, 480 bp, Homo sapiens
  MAP TO AC002454.1; EXPRESSED IN PLACENTA, SIGNAL =  11; EXPRESSED IN LUNG, SIGNAL = 7.5; EXPRESSED IN HEART, SIGNAL = 5.4; EXPRESSED IN FETAL LIVER, SIGNAL =   6; EXPRESSED IN BONE MARROW, SIGNAL =  32; EXPRESSED IN ADULT LIVER, SIGNAL =   9; EXPRESSED IN HELA, SIGNAL = 5.5; EXPRESSED IN BRAIN, SIGNAL =   6
ttgcttgctgttatggactgaattatattcctccaaaatttataggttgaagctctaacctccaatgtggctgtatttggagataggacatttatggagacaattaaggtaaaatgatggattttaccttataaggatggggccctaaactgacaggaccagtgtccttctgagaagcagaagaaacacccgatgatctctctatccacacacacacacacacagaacaggttgtgcgaggatgcaatgagaaggcagccatctgcaatttaggaagagaggcctcaccagaaaccaacttacagcctccagaactgtgataacttcattgactttgccctggtcaaaattaacaatgtccctattcttagcactaacggccattccattatttctctcttacttgctctctcagcagcatttaacaaagttgatcaccacttcctgctgatagttacttttcttggaaaccatggtacc

SEQ ID NO: 6534 - DNA, 464 bp, Homo sapiens
  MAP TO AC005156.1; EXPRESSED IN BRAIN, SIGNAL = 5.9; EXPRESSED IN PLACENTA, SIGNAL = 6.1; EXPRESSED IN LUNG, SIGNAL = 6.8; EXPRESSED IN HEART, SIGNAL = 5.4; EXPRESSED IN BONE MARROW, SIGNAL = 5.4; EXPRESSED IN ADULT LIVER, SIGNAL = 5.4; EXPRESSED IN HELA, SIGNAL = 5.6; EXPRESSED IN FETAL LIVER, SIGNAL = 5.3
cacttctgtttccctttccctcaacttttaaattgtaatataaagaccattacgtgacaaagaagaaattggttacagagcataaagacacagaggattttagacaagacttccactcagagatgtctggattttgtaaagctgctttgaacacttctgcagggaactcaaatccttatcttccgtattcctgtgaattgcctttatgttatttctcctcaaaatgtatgtgttcatccgggggacctgtagacagagcaccagactcctctaaggatggtagaaaccatcataaaacaatggggcattataaccacaatgactctttgcggaaaacacagataaactctttgaaaaactcagtggcctgccctggtgcacaaaaggctattacgtcttcagaggcagttgacagatttatgcctaggacaacacaactgcaggagcgcaaaagaagaagagaa

SEQ ID NO: 6535 - DNA, 469 bp, Homo sapiens
  MAP TO AC005291.1; EXPRESSED IN PLACENTA, SIGNAL = 1.5; EXPRESSED IN HEART, SIGNAL = 1.7; EXPRESSED IN BRAIN, SIGNAL = 1.9; EXPRESSED IN BONE MARROW, SIGNAL = 1.8; EXPRESSED IN ADULT LIVER, SIGNAL = 1.8; EXPRESSED IN LUNG, SIGNAL = 1.7; EXPRESSED IN HELA, SIGNAL = 1.8; EXPRESSED IN FETAL LIVER, SIGNAL =   2
tggaaagtcaagacgtgagtgaatttaaccaagtttattggatggtgccagcagtctctggatggcaaaggtccaaattgtatggttctatctatgcgaataccataaatacactcacccatccatccccatcttctctctcccattcatctctatccatgctcccttacctctgcccctaatcttgccttggtccttcaaatccttggttcccatcatatgtctgcaattcactgcagggctgacactttctcaaactctcaacctgatagagccttaaattaataagctacctggtcttcccagcttcactttggatgtactgcagagtggagtcaagggtgtttagatcacaaacccctggttctggctcctggatcttgacaacagtcatcacataaattttctaacaagagacacatccgcataattaaaccaaagatatcacagacgcagacacatgcaaaga

SEQ ID NO: 6536 - DNA, 461 bp, Homo sapiens
  MAP TO AC005165.1; EXPRESSED IN BRAIN, SIGNAL = 3.4; EXPRESSED IN ADULT LIVER, SIGNAL = 3.3; EXPRESSED IN PLACENTA, SIGNAL = 3.4; EXPRESSED IN LUNG, SIGNAL = 3.7; EXPRESSED IN HELA, SIGNAL = 3.6; EXPRESSED IN HEART, SIGNAL = 3.1; EXPRESSED IN BONE MARROW, SIGNAL = 3.2; EXPRESSED IN FETAL LIVER, SIGNAL = 3.2
gacaattatttgggaactggcttctatccactaattaaaattttaatattcatgattattgccaattacttacttactggggtttcctaatgccaggcattgtgttaagtgctctgtatacattaactcatttaatcttcattatatctcataaaggatgtaaaaatggaggtaataataacctacctcattggtttattgtgaggattgaatgaggactacgcgaaagttccatgcttctgagttccatgcctgtaagcctggcaggttgtgagtactcaatacgtgtttgctatcaccatcatcgttattatcatcacgatcatcatcattaccatgatcatcaaatccattttacagaagaagaaactgagttgtcaagtaatttacatataagtacaccactagtaaaaagtgaaacttgtatactgtgttaatcactgccctataccacattttaa

SEQ ID NO: 6537 - DNA, 403 bp, Homo sapiens
  MAP TO AC005234.1; EXPRESSED IN LUNG, SIGNAL = 1.4; EXPRESSED IN BRAIN, SIGNAL = 1.6; EXPRESSED IN PLACENTA, SIGNAL = 1.5; EXPRESSED IN HEART, SIGNAL = 1.3; EXPRESSED IN BONE MARROW, SIGNAL = 1.5; EXPRESSED IN ADULT LIVER, SIGNAL = 1.5; EXPRESSED IN FETAL LIVER, SIGNAL = 1.4
caggcctgaataaaacgagggagccagatctggaaatatctggaggaagagcacgtgcaaaggtcctgaggagtgaatccccccgccccagtcctagaaaagagcaggtggctgctgtggctgggggagggcacaccgggaaatgaggctggagagatgctggggcagacgcctccagtggggagcactaggggcctggactttattccaagctgggcagcccctggaagactttgagcagaggagcaataacatctgatgcatgtgacagaagagacactcagggtcctggggacagaagaggccttaaggaggcacaagtgggaactggaagaatggggtgagatcactgcagaagttcaggcaaaggtcacagtggggtggccactgggacatgagagtt

SEQ ID NO: 6538 - DNA, 475 bp, Homo sapiens
  MAP TO AC005102.1; EXPRESSED IN HELA, SIGNAL =  35; EXPRESSED IN HEART, SIGNAL =  34; EXPRESSED IN BONE MARROW, SIGNAL =  37; EXPRESSED IN PLACENTA, SIGNAL =  43; EXPRESSED IN LUNG, SIGNAL =  48; EXPRESSED IN FETAL LIVER, SIGNAL =  37; EXPRESSED IN BRAIN, SIGNAL =  47; EXPRESSED IN ADULT LIVER, SIGNAL =  35
gatgagcaaagtgggctgtcctgtgccccttgccttcctggcgaggttaaaagccttgtgggggcagagatgcttcccggatgcagtggcagggttggtgttgagaatcttcctatttcccctctcagtgcctttgtctgccttggtgtgtcctgcctccccctggggctccctggggattctaccttccctaagcttccagactccctgggtgactaactatccagcttgtccaaagacttcctttgtggcctgagctgatgaacagaagctgattcccaggggggttgggtggctggggcatcgccgtcatttcactgttcattgttctgcaatgctttgcggtttgcaaagtgctcctgtgtcggccgggtgtggtggttcacgcctataatcccagcatcttgggaggccaaggcaggcagatggcttgagtccaagggttcaagatccacctgggcaacatggtaaaacc

SEQ ID NO: 6539 - DNA, 453 bp, Homo sapiens
  MAP TO AC004132.1; EXPRESSED IN PLACENTA, SIGNAL = 3.5; EXPRESSED IN HELA, SIGNAL = 3.9; EXPRESSED IN HEART, SIGNAL =   3; EXPRESSED IN FETAL LIVER, SIGNAL = 4.3; EXPRESSED IN BRAIN, SIGNAL = 5.4; EXPRESSED IN ADULT LIVER, SIGNAL = 4.4; EXPRESSED IN LUNG, SIGNAL = 5.5; EXPRESSED IN BONE MARROW, SIGNAL = 3.8
tttctgactcctttcggaggagcctccgggaccccggggagtaacaggtgtctggaggctgaagggtggaggggttcctggatttggggtttgcttgtgaaactcccctccaccctcctctctcgcacccacccaccccctcacccccttctttttccgtccttggaaaatggtgtccaagctcacgtcgctccagcaagaactcctgagcgccctgctgagctccggggtcaccaaggaggtgctggttcaggccttggaggagttgctgccatccccgaacttcggggtgaagctggagacgctgcccctgtcccctggcagcggggccgagcccgacaccaagccggtcttccatactctcaccaacggccacgccaagggccgcttgtccggcgacgagggctccgaggacggcgacgactatgacacacctcccatcctcaaggagct

SEQ ID NO: 6540 - DNA, 478 bp, Homo sapiens
  MAP TO AC005237.2; EXPRESSED IN PLACENTA, SIGNAL = 3.5; EXPRESSED IN LUNG, SIGNAL = 3.8; EXPRESSED IN FETAL LIVER, SIGNAL = 3.7; EXPRESSED IN BRAIN, SIGNAL = 3.6; EXPRESSED IN BONE MARROW, SIGNAL = 3.3; EXPRESSED IN ADULT LIVER, SIGNAL = 3.4; EXPRESSED IN HELA, SIGNAL = 3.4; EXPRESSED IN HEART, SIGNAL = 3.7
gtccttcctctgctgacctgaatgtggacttggccccgtcatagtgactggcccagggttggctatggacaggtaacttgtacttgggatgcagctgaaggtggccaggatgcaccaagaggccatggaaggtcccatgaggtgccagggaagacccacacctgctcgccatcttctgagtgggaaggaggagggtggctagtggaccccaccagagtcgagggctgggctgtttggttctaaaggcttttctgctgtgtgtgtccccagatgaacgacaatctccttgagagctggagcgacctcgacgagctgaagggagccaggagcctggagacagtgtacctggagcggaaccccttgcagaaggacccccagtaccggcggaaggtcatgctcgccctcccctccgtgcggcagatcgatgccacgttcgtcaggttctgagtccttcttggctcctcatgtggtccctctc

SEQ ID NO: 6541 - DNA, 483 bp, Homo sapiens
  MAP TO AC005317.1; EXPRESSED IN BRAIN, SIGNAL =   2; EXPRESSED IN ADULT LIVER, SIGNAL =   2; EXPRESSED IN PLACENTA, SIGNAL = 2.2; EXPRESSED IN HELA, SIGNAL = 2.3; EXPRESSED IN HEART, SIGNAL = 1.6; EXPRESSED IN FETAL LIVER, SIGNAL =   2; EXPRESSED IN BONE MARROW, SIGNAL = 2.2; EXPRESSED IN LUNG, SIGNAL = 2.6
ttcagcatacaagggtcacttcataagacagactcattaataaacataaccacgctgtatgtgaagcccttggctaaggatctagttagagaaggtgcacagtaaaccaggaccgtgcacatgacacacaagcacaactccatggccctcccctccagggcctctgtcaaatccagagtccagggcccagatggacaccactgaacagaagggctccattctttcagcctagaaaagctaaggtccccaacctgagatagaaccagcgccacctgattacagtgggcccgggtaccaggaacacactgacccccagagattcccacatgggctccccctcacctctccaagaagagcggtagctgctgctggaaaacctcatgggtggcccacacgtcctgggcacagtactgcatcaggtcctggcacaaggtgacaggaaggcgcaaggtgggcagccatcccattaccaccaccagctct

SEQ ID NO: 6542 - DNA, 477 bp, Homo sapiens
  MAP TO AC005244.1; EXPRESSED IN PLACENTA, SIGNAL = 2.6; EXPRESSED IN HEART, SIGNAL = 1.5; EXPRESSED IN FETAL LIVER, SIGNAL = 1.8; EXPRESSED IN BONE MARROW, SIGNAL = 1.5; EXPRESSED IN LUNG, SIGNAL =   2; EXPRESSED IN BRAIN, SIGNAL = 1.1; EXPRESSED IN ADULT LIVER, SIGNAL = 1.8
aatacacagtccaaaggtgccgacgatgcagtacatggttttattctcccatcgcacagtgcagctcctgtcagcagagctgtcccagaagcaggaacttgccatgtgtaatccagctccattcttttgcataattacacaggtcacaatgtatttaagtggttttcccagcttggtgagttggcttgaagtttgttctactacatttgtgttccactggttcactttgctgtgttaataagcgttaaccaccaattgtgctttctatagcctcttttacaatttgctcacttcatcaacaacaaaagcagtctcctccgcagcctggtagtcttccatctttctccggcccgtcacctctacctcctttataccatattttgaccgtaccttttctatatttagacacacaaatagttgctgttgtgatataattacctacagtatttagtacagtaacatgctgtataggcttgt

SEQ ID NO: 6543 - DNA, 475 bp, Homo sapiens
  MAP TO AC005151.1; EXPRESSED IN PLACENTA, SIGNAL =  12; EXPRESSED IN LUNG, SIGNAL =  12; EXPRESSED IN FETAL LIVER, SIGNAL =  11; EXPRESSED IN BRAIN, SIGNAL = 8.3; EXPRESSED IN BONE MARROW, SIGNAL =  10; EXPRESSED IN ADULT LIVER, SIGNAL =  11; EXPRESSED IN HELA, SIGNAL =  11; EXPRESSED IN HEART, SIGNAL =  11
gtgaaataatttgcccgaggccacaaggctacaggtgggggaggaagagtggccaggctgcctggctccacagcactccctgcactgactcctgagcctctgcccctgcccccagggagggttctcccctcctccaagctcaccccctacaagacactttgcttttcctaggccttgtcctatccatcagggttggtgtgcagggctggaaccttttaactgttttacagttgacgtccaaggaagtgaaggtggacactcaccacagacagtccccaggcagcaggggtccttggtgggtaggagcaaggccacctccccgaatcgcaggcagctctcagggcggggactggggcagcccagatccaccgggacaatggtgtctggggcttggcactggtgctggcagcagccgctgagggagctgttccaggtctcccccagggccctcggcacccccatgctgtcagtgcag

SEQ ID NO: 6544 - DNA, 466 bp, Homo sapiens
  MAP TO AC004148.1; EXPRESSED IN LUNG, SIGNAL = 7.3; EXPRESSED IN HELA, SIGNAL = 6.6; EXPRESSED IN BONE MARROW, SIGNAL = 6.3; EXPRESSED IN ADULT LIVER, SIGNAL = 7.8; EXPRESSED IN PLACENTA, SIGNAL = 6.5; EXPRESSED IN HEART, SIGNAL = 5.3; EXPRESSED IN FETAL LIVER, SIGNAL = 7.9; EXPRESSED IN BRAIN, SIGNAL = 7.4
caaggctctttgtatctgtccctgaagattgcaatatagagaccagaaagtaacatgcagactggtggaccaagtaagttgggcaaccttctaacttctttccacttagactgctaagtgtgcttcagctacttttttaactgtttaatttccaaaatatcagaagttccataagtaagttaaaattccttctcatatattaagcattcatattgggtcaggaactatgccaggtgttgaagatacaaacaaccacagcagcctgcacttaccgtgtggtcatcttcttcttccccttctagcacgacacagtgatacagcattcctgattcagtagcgatcactaagatattggggacacagggtaagcagagtacagcacacgcatcataaccatagttatcttcagccgcaggatgcatgggcaatggacccaacagctttccaatatttccagggctaaaga

SEQ ID NO: 6545 - DNA, 486 bp, Homo sapiens
  MAP TO AC002519.1; EXPRESSED IN PLACENTA, SIGNAL =   2; EXPRESSED IN LUNG, SIGNAL = 2.3; EXPRESSED IN HELA, SIGNAL = 2.2; EXPRESSED IN HEART, SIGNAL = 2.3; EXPRESSED IN BONE MARROW, SIGNAL = 2.1; EXPRESSED IN FETAL LIVER, SIGNAL =  17; EXPRESSED IN BRAIN, SIGNAL = 2.5; EXPRESSED IN ADULT LIVER, SIGNAL =  23
ttgcacttttggctcatgtccttgatgctgtcctgaagaggaagcatgtgagtgagagacttaccagaacagctcccatggatgctcattcccagaatgtccccatgcaccttcaggtgaaccccacttgtctttcctcctccttccctgccccctctgtctccctaagcaagggaggctaaacccctcctgggaccccaaatgctttctggatgtcaggatctctaaaatcctctcagccactgagaaacccctttcctgctcaatctctgtataaataacctgcttatctgccctttggaacaaaaaagcaagatcctacctgctctatcttggcagctgtccatggaatggatttctctcttcctagagttcccccatctgagctggactctgattctgtggataaaatgggagtttgagtgactgcctccaactgaacaccttaggcactctagtccatcctggacacaccagagctgaggt

SEQ ID NO: 6546 - DNA, 493 bp, Homo sapiens
  MAP TO AC004159.1; EXPRESSED IN PLACENTA, SIGNAL =   6; EXPRESSED IN LUNG, SIGNAL = 7.3; EXPRESSED IN HELA, SIGNAL = 8.1; EXPRESSED IN HEART, SIGNAL =   6; EXPRESSED IN FETAL LIVER, SIGNAL = 7.9; EXPRESSED IN ADULT LIVER, SIGNAL = 9.3; EXPRESSED IN BRAIN, SIGNAL = 5.3; EXPRESSED IN BONE MARROW, SIGNAL = 6.1
atttgccaggtacacgcaaggcttttatttgttcttagcactgttctgttcgtgaaacgctacgtggaggtcttttccaaatgtttgacggggaagaaaataaagagtaaaccagggttttcactgagggaagcattaggaaaatctttacaggttaagattcgtgagttagggttttcttttgtttgcatgttttcttctcacactctaggtatttagatagatgaaaaatttctcagaatcttcatttgcatttccaaggactgcttgtatttttataccagttataataaaaaagaaatgttgcacaaacctgttttcagtaagcttctgtttcattggtttaatgactgcagaaaaaatggtgggttttttttctccattactagtaggcttgggagcagcaaagttggcatgactaaaagtaataatgatctgagtcattttgcaagtaaactgtgaaataactttgcattttaaagacctgggtggc

SEQ ID NO: 6547 - DNA, 461 bp, Homo sapiens
  MAP TO AC005281.2; EXPRESSED IN FETAL LIVER, SIGNAL = 3.5; EXPRESSED IN BONE MARROW, SIGNAL = 3.2; EXPRESSED IN ADULT LIVER, SIGNAL = 3.4; EXPRESSED IN HELA, SIGNAL = 3.8; EXPRESSED IN PLACENTA, SIGNAL = 3.4; EXPRESSED IN LUNG, SIGNAL = 3.7; EXPRESSED IN HEART, SIGNAL = 3.9; EXPRESSED IN BRAIN, SIGNAL =   4
tctcaagacttctgggacgccgattccgctcctggcctggggcaaggcgtgggagcttggaagccagcgctgcgctccccgtgggaagcgatcgtctcctctgtcaactcgcgcctgggcacttagcccctcccgtttcagggcgccgcctccccggatggcaaacactataaagtggcggcgaataaggttcctcctgctgctctcggtttagtccaagatcagcgatatcacgcgtcccccggagcatcgcgtgcaggagccatggcgcgggagctataccacgaagagttcgcccgggcgggcaagcaggcggggctgcaggtctggaggattgagaagctggagctggtgcccgtgccccagagcgctcacggcgacttctacgtcggggatgcctacctggtgctgcacacggccaagacgagccgaggcttcacctaccacctgcacttctggct

SEQ ID NO: 6548 - DNA, 495 bp, Homo sapiens
  MAP TO AC005074.1; EXPRESSED IN LUNG, SIGNAL =  26; EXPRESSED IN HELA, SIGNAL =  22; EXPRESSED IN BONE MARROW, SIGNAL =  23; EXPRESSED IN ADULT LIVER, SIGNAL =  23; EXPRESSED IN PLACENTA, SIGNAL =  21; EXPRESSED IN HEART, SIGNAL =  20; EXPRESSED IN FETAL LIVER, SIGNAL =  21; EXPRESSED IN BRAIN, SIGNAL =  23
gtcgagaggattgcttgaggccaggagttcaagaccagcccggccaacatagcgagaccccatttcaatttaaaaaagaaagaaattatacaaattacgaacattaagctagtctccagtttcaacatttctcgtatactttgatttaccttgcaatttttatctgtctagagttctgaagaggaagaattctgtaaactgtggttttgaatgctcagtgatactctgtattatcttctccagcagtaaaatcatcctgcaatcctgatctattcactgtcttattaatactggttgtgatttgtagatactggctcttctcagatgaagttccaggattattcattgaaaaaggctgggtacatgacagcattgactaccgattcaaccatcactgcaaagaccacacagtctctggtgatgaggattactgtcctcgcagtgagtatatctgtatatctaagagttatttcaccctgctcaagtgggctcaac

SEQ ID NO: 6549 - DNA, 456 bp, Homo sapiens
  MAP TO AC005284.1; EXPRESSED IN PLACENTA, SIGNAL = 2.4; EXPRESSED IN ADULT LIVER, SIGNAL =   2; EXPRESSED IN LUNG, SIGNAL = 2.6; EXPRESSED IN HEART, SIGNAL = 2.5; EXPRESSED IN FETAL LIVER, SIGNAL = 2.3; EXPRESSED IN BRAIN, SIGNAL = 2.7; EXPRESSED IN BONE MARROW, SIGNAL = 2.2; EXPRESSED IN HELA, SIGNAL = 2.5
ttccagttggctttaggctggttcttcttcacgttaccgcttctgggaagttaaattttccttgtgatctctgaggtccctgactcttggaccactggcataacttcacacccttgttgttgaagcattccattctctggccacagacggctctgacttcctcattgtcaacgactcagcttccattcacttcaccaatccagtcctgttgtcacctcctatacctttttcctccccatcacttgggatgacccaacctgcaaaatccatatgctcagaagtctagctctgcaacccttttgggtcacacattcatgggcctgagtcttagagtcagagaagtccacagtaatctgacttttctgaattgcagttactcttctgcaaagtgagagagtactaaatgagaccctacatgtaaagctgttagcatgatgcctggtgcataaataccaa

SEQ ID NO: 6550 - DNA, 480 bp, Homo sapiens
  MAP TO AC005212.1; EXPRESSED IN PLACENTA, SIGNAL = 6.7; EXPRESSED IN LUNG, SIGNAL = 7.1; EXPRESSED IN HELA, SIGNAL = 6.7; EXPRESSED IN FETAL LIVER, SIGNAL = 6.5; EXPRESSED IN BONE MARROW, SIGNAL = 6.6; EXPRESSED IN ADULT LIVER, SIGNAL = 6.8; EXPRESSED IN HEART, SIGNAL = 6.5; EXPRESSED IN BRAIN, SIGNAL = 6.3
ttcctgactggcattcaaagttccacatactgaatgatgacaaaaccttgccagaaattatactctccttaggagaagggtgatggggcgggcagctcagaggatgctggcaccactctattgggtccctgattagccatgctcaggtggcagggggtgcccaggtgtcacctcttcctgtgtcccctgactctgccattgctccccaggtgacctggaggagttcttgatcttcagggcttctgtggaggggggcggctttaatgagcggtgccttgtggcagcgtccttcagagatgtgggagagcgcacggtcgtcaacgccttgttcaacaaccaggcgtaccactctccagccactgccctggccgtcgtggacaaccttctgttcaagctgctgtgcgggcctcacgcctccattgtggtctccaacttcccccagccccggagcgccctgcaggctgccaaggaccagtttaa

SEQ ID NO: 6551 - DNA, 352 bp, Homo sapiens
  MAP TO AC004061.1; EXPRESSED IN PLACENTA, SIGNAL = 2.8; EXPRESSED IN LUNG, SIGNAL = 1.8; EXPRESSED IN HELA, SIGNAL = 2.3; EXPRESSED IN FETAL LIVER, SIGNAL = 3.1; EXPRESSED IN BRAIN, SIGNAL = 2.3; EXPRESSED IN BONE MARROW, SIGNAL = 2.6; EXPRESSED IN ADULT LIVER, SIGNAL = 2.2; EXPRESSED IN HEART, SIGNAL = 2.2
ttgatcaaagatgcaggtggttttatggtagttcataaaatatattctctccatgaggataatatgtatggaggctgtatcttatagatagtattatctttaatgtaatgaatgatactgaattcataaataaggtaacttttattgtttttggtttaagagatattcaaaataagctttgttgttttcaaggctagtgttatttttgtttctttttaaaatttatttagggggaggggaggaagaggaggtcatggtcagactagcagcacatgccgccatcagacttcagacactctctgaaggtgtttcacacctcaccctccatttctccaaatcactgcaaaagcac

SEQ ID NO: 6552 - DNA, 455 bp, Homo sapiens
  MAP TO AC005544.1; EXPRESSED IN LUNG, SIGNAL = 1.9; EXPRESSED IN BRAIN, SIGNAL = 1.9; EXPRESSED IN HEART, SIGNAL = 1.5; EXPRESSED IN FETAL LIVER, SIGNAL = 1.6; EXPRESSED IN BONE MARROW, SIGNAL = 1.5; EXPRESSED IN ADULT LIVER, SIGNAL = 1.6; EXPRESSED IN PLACENTA, SIGNAL = 1.7
ctctttcccgatttgctctgcagcggcaggctgctaagtccaccgtgtgtcttctcagatgctccttcgtgggcacacccttccacgtatatacgcgtggggttctgcccatcttaaaaaaaattacacttgtcttgaaataattgtagagtcacatgcagttgtaagaaataatactggaacacctaccctttatactcagcttctccccatgacaacatcgtgcaaaactgtagtgcaatatcacaaccaggacgctgacattgacagtcaggatacagaacacttggtcactgcaaggagtccccacgctgccctcgcacagccccacccaagccctcctgcccgtcccctccctgacccaaggcatccaggaacatgttctccatgtcaatagttttgtcattttgagactctcctacaaatggaatgatacagcatgtaagctttgggga

SEQ ID NO: 6553 - DNA, 469 bp, Homo sapiens
  MAP TO AC004126.1; EXPRESSED IN PLACENTA, SIGNAL = 1.1; EXPRESSED IN HEART, SIGNAL = 1.5; EXPRESSED IN BONE MARROW, SIGNAL = 0.95; EXPRESSED IN LUNG, SIGNAL = 0.9; EXPRESSED IN FETAL LIVER, SIGNAL = 1.3; EXPRESSED IN BRAIN, SIGNAL = 0.89; EXPRESSED IN ADULT LIVER, SIGNAL = 1.6
cccccattaagaggtactgttcagaaaaatagattcctttcaaaatattacagtgcacctcattaccctaaagctcagatggagatgtttcatgcctgcaacatccaatcttcggcttatggatcaaggagtaattttgactttcaagtcttattacttaagaaatacattttataaagctatagctgccctggatagtggttcctttgatggatctggacaaagtaaattgaaaacctggaaaggattcaccattctacacgcccttaagaacatttgtgattcatgggaggaggttaaactatgaacataaagaggagtttggaagaaattgattccaacccttcagccctcatggatgactttgagggattgaggacttccatggagggagtaactgcagatgtggaggaaatggtaagagaattagaatccaaaggggagtctaaagatgggactgaattgctgc

SEQ ID NO: 6554 - DNA, 451 bp, Homo sapiens
  MAP TO AC005552.1; EXPRESSED IN PLACENTA, SIGNAL = 1.7; EXPRESSED IN HELA, SIGNAL = 1.9; EXPRESSED IN HEART, SIGNAL = 1.8; EXPRESSED IN ADULT LIVER, SIGNAL = 2.2; EXPRESSED IN BONE MARROW, SIGNAL =   2; EXPRESSED IN BRAIN, SIGNAL = 1.8; EXPRESSED IN FETAL LIVER, SIGNAL = 1.7; EXPRESSED IN LUNG, SIGNAL = 1.7
agaagataaaccggggttggaaggtgaacagtgattaggagtgtgctgcctggcttgggtcagggagggattctctgaggaggtggcatttgagaaaatgcttgaatgttgagaagcggtagccatacagtgatttaagagaagggagtttcattctccatcaccatcaccatcaacaacatcatcatcatcatcaccatcaccatcatcattaccatcattattatcaacatcatcctcaccatcatcattatcatcatcaccatcattaccatcaccatcatcatcttaaccattgttatcatcatcactgtcatcaccatcattatcatcatcaccatcactatcatttgcttctgattatataacaccttccatgccaagcactgctctttacatgtattgactcatttaatcctcttaactacgctatgaagcagatgtatgattt

SEQ ID NO: 6555 - DNA, 465 bp, Homo sapiens
  MAP TO AC004219.1; EXPRESSED IN PLACENTA, SIGNAL = 5.8; EXPRESSED IN LUNG, SIGNAL = 6.9; EXPRESSED IN HELA, SIGNAL = 5.9; EXPRESSED IN FETAL LIVER, SIGNAL = 6.7; EXPRESSED IN BRAIN, SIGNAL = 6.3; EXPRESSED IN ADULT LIVER, SIGNAL = 6.6; EXPRESSED IN HEART, SIGNAL =   5; EXPRESSED IN BONE MARROW, SIGNAL = 5.8
tgctgaagataggcatgacgtctcactggcacagtcagtttccttcccttgtgtcttttgtataaaaggagtaaatccaaaatgtactccaccccgtgcatggggttaactctgcggtagccatactgaatttccttgaagtcaatgagccgtcctctgctcttggcattctcattgatcatctccatcacctgtaggacggtatcatccagtgctgttcttaaaatgctactgaggctctgtcgagggggctggttctcagctgctgagtatagaagcttccctgtcaggaactcccattctatcacttcatttctctcccgaggctggaagtggttgaaagaaggtatcactcccagctgctggtcctctttgctcacttctgtgttactgagcttgctcatcagggcactttccctgtggagctggatggtgcggtagcgaagttcagaaattttgcggctg

SEQ ID NO: 6556 - DNA, 470 bp, Homo sapiens
  MAP TO AC005291.1; EXPRESSED IN ADULT LIVER, SIGNAL = 0.85; EXPRESSED IN PLACENTA, SIGNAL = 1.1; EXPRESSED IN LUNG, SIGNAL = 1.7; EXPRESSED IN HEART, SIGNAL =  61; EXPRESSED IN BRAIN, SIGNAL = 0.71; EXPRESSED IN FETAL LIVER, SIGNAL =   1; EXPRESSED IN BONE MARROW, SIGNAL = 3.3
tcatcttaatcgatcataaccagcattttaaaaaataccatagaatgggatatatttggttagaaaatatttgagtagtgctgtaaaatgcctgcaaacaatgtttagtgatagagaataatgggtgttcttacagatgattaccttcatttagagacagtattgggtaccttggctttggaaatggcctctgcgttactgctgaggtcatcagtctccatcttcagctcactcttctccttctccagcttctgtttgacccgctgcaagttgtcaatctgctccccaagctcagccatactgtctgcgtgcttcttccgaagagcagccaccatagcttcatgctgcagggtggcctcctccaggtccctgcgcagtttctgaaactcagcctcccgcttcttgttcaattccacctgagcagaagttgccccaccggcttcttccagcctctcgctgatctcctccag

SEQ ID NO: 6557 - DNA, 446 bp, Homo sapiens
  MAP TO AC005217.1; EXPRESSED IN LUNG, SIGNAL = 2.2; EXPRESSED IN BONE MARROW, SIGNAL = 2.7; EXPRESSED IN PLACENTA, SIGNAL = 1.5; EXPRESSED IN HELA, SIGNAL = 2.3; EXPRESSED IN HEART, SIGNAL =  68; EXPRESSED IN FETAL LIVER, SIGNAL = 2.7; EXPRESSED IN BRAIN, SIGNAL = 1.7; EXPRESSED IN ADULT LIVER, SIGNAL = 3.9
ctacccaaggtcaaagccacactgttgcctgtggagatcaagggacctactatccatagtaggttttcttcttgctcatctcaaatgtaacgtatctccaaaaatcaaaaatgtctaagtttaaaatttcaatcatagcttaagctttgatttcatgagcaaatgagttactatttcacatgattacagggcactgggatgaacttctccagttctcctgcaaggtcacccgttggatacttaggtgtcactctataatcacttgttcattttcttacctgaatcttattaaagaagagttcatcccagatactatcattcctgatgattccactccggacctcggcttgcttacgctttgctgcaaactccaggagccagcgctttaatggtgtgtttgcctggctgaagatctgaggaacataagttggaagcagctgtcagag

SEQ ID NO: 6558 - DNA, 474 bp, Homo sapiens
  MAP TO AC004065.1; EXPRESSED IN LUNG, SIGNAL = 2.7; EXPRESSED IN BRAIN, SIGNAL = 3.6; EXPRESSED IN BONE MARROW, SIGNAL = 3.9; EXPRESSED IN PLACENTA, SIGNAL = 3.3; EXPRESSED IN HELA, SIGNAL = 3.4; EXPRESSED IN HEART, SIGNAL =   3; EXPRESSED IN FETAL LIVER, SIGNAL = 4.2; EXPRESSED IN ADULT LIVER, SIGNAL = 3.3
gcctccctattccctgagacacagcaatgttgaaattaggacaattagtaaccctacaatggcctctatgtgttcaagtgaaagtaagtgttgcatgtctctcactttaaatcaaaagctagaaaaggttaagtctaatgagaaaggcaagttgaaagctgacataggccaaaagctaggcctcttgcaccacttacccaacttgtgaaacaaaagaagctttcggagaaaattccagatgctactttagttaacacactaatgataagaatgtgaacagcccttttgctgatatggagaaagttttaatagactggataaaagatcaaaccacctatgacattctcttaagccaaaacctaatctacagcatgagcctaattcccatcaagtttgaagctaagagaggtgagtttatgagacttaagaataaaaaagccatctctagtaacataaaagtgcaagatgaagcaa

SEQ ID NO: 6559 - DNA, 347 bp, Homo sapiens
  MAP TO AC005355.1; EXPRESSED IN PLACENTA, SIGNAL = 1.4; EXPRESSED IN ADULT LIVER, SIGNAL = 1.3; EXPRESSED IN LUNG, SIGNAL = 1.5; EXPRESSED IN HEART, SIGNAL = 1.4; EXPRESSED IN FETAL LIVER, SIGNAL = 1.1; EXPRESSED IN BRAIN, SIGNAL = 1.2; EXPRESSED IN BONE MARROW, SIGNAL = 1.1
agcagcatgattttgaagtagtgatgagtaaaatgatactttttcaataaattactcataaagtgtaacgatattttaagatatttgcaacaactctaaagtgatatgaaaatatctgtgatttctaccagcagtaatgtcacaggtgctgctaatatcactgatttgttatctgtattcataattgaaggacacgctacattttaattagtgaaaataaagttgtaatttttttctcacctaaggtcaagatcctctgaattctatccacagacccatggagaggagagtctatggtctccaggttaagaacggctggcttctcttcccccatgtacatacacaca

SEQ ID NO: 6560 - DNA, 472 bp, Homo sapiens
  MAP TO AC004225.1; EXPRESSED IN LUNG, SIGNAL = 2.5; EXPRESSED IN HELA, SIGNAL = 2.6; EXPRESSED IN BRAIN, SIGNAL = 2.7; EXPRESSED IN BONE MARROW, SIGNAL = 2.7; EXPRESSED IN ADULT LIVER, SIGNAL = 2.7; EXPRESSED IN PLACENTA, SIGNAL = 2.8; EXPRESSED IN HEART, SIGNAL = 2.9; EXPRESSED IN FETAL LIVER, SIGNAL = 2.7
ggcatgctaacattatcacaaacttttgaaaacaatattatattttgaaaaattgaaaggatcaatgtaatctttatgaattaaaaaattctttaaaatttatgaaaacaacggatcattacctttgtccaattccatcctactgatcttacagttgatttaaaaacaaagtaaatatgaagcgttgagaaaacgtatcaacttaattcagagagagttttcatttgtccataaaaaaagtgatattttggccttggagacatttagtgtcttttgactatcagcaggttgcttgttactcattgacttctctcagttgtagggaaaaatatgaaaactccatgatcatgacggccttgccagaagtgtctgccagtctgcagcaatagcagaaaagggcagaaggagcaggaggacacttaatctggcttcaggctgtgccacctgcagttccaccagcactgcctttagt

SEQ ID NO: 6561 - DNA, 409 bp, Homo sapiens
  MAP TO AC005521.1; EXPRESSED IN PLACENTA, SIGNAL = 1.2; EXPRESSED IN HEART, SIGNAL = 1.3; EXPRESSED IN ADULT LIVER, SIGNAL =   1; EXPRESSED IN LUNG, SIGNAL = 1.1; EXPRESSED IN FETAL LIVER, SIGNAL =   1; EXPRESSED IN BRAIN, SIGNAL = 0.99; EXPRESSED IN BONE MARROW, SIGNAL = 0.97
ttctttctttggaaaaacagggataaaataatacctatttcatagacttgttatgagcattaaaaaatatgtgaagtgcttggtccttggtggtacttggtgggtacttggtccttggtgggtactcagtaaatgatagcatttactatttggaaaatgataatacatggcaagcaaaaatagttaaacatttggagtaaaaaacagatctaggttaaaattcagcctccctcaaggctccctgaaggactactggtgaatttagcctgcataagacttaatttctggatttttgtagggtcagagggtttcaggagacttgctggctcttggacccttgcttggtacacagttgttattagtaagcgatacccattaatacagtagtagtggtggaagtcatggtagt

SEQ ID NO: 6562 - DNA, 482 bp, Homo sapiens
  MAP TO AB019437.1; EXPRESSED IN LUNG, SIGNAL = 1.1; EXPRESSED IN BRAIN, SIGNAL = 1.4; EXPRESSED IN HEART, SIGNAL = 1.3; EXPRESSED IN FETAL LIVER, SIGNAL = 2.3; EXPRESSED IN BONE MARROW, SIGNAL = 1.4; EXPRESSED IN ADULT LIVER, SIGNAL = 1.8; EXPRESSED IN PLACENTA, SIGNAL = 1.4
aatttgctgaactactcaggatgttttttaatgtgcccagtatttgggaaatataaatgaacagccatgtgtggttcactgagtggacatagtcagttaagtacattagtaaaaacatgattgctgaattgtatagtgaaactacaattagatttgcagaaaattgcctccagtaatgtctgaagggagagccacccagccaatcccgtctctgggcttggaggaagctcactacacaggccaggtcacatgggtgatatccaaggtgcagctcccagcgttactgtgctattttccaggaaccagacatacaacttggcatctcagaagaagatctccaagatttcctttacctggacttcatgggcagcacaggaccagcaggagatgctcagaactcacccaaggcagaaccccagggaagagcaggtgcggagaggaaccagccagggaacctctgaccaccatctagggttgccttc

SEQ ID NO: 6563 - DNA, 477 bp, Homo sapiens
  MAP TO AC004685.1; EXPRESSED IN PLACENTA, SIGNAL = 3.6; EXPRESSED IN HEART, SIGNAL = 3.8; EXPRESSED IN BONE MARROW, SIGNAL = 3.6; EXPRESSED IN ADULT LIVER, SIGNAL = 3.5; EXPRESSED IN HELA, SIGNAL = 3.9; EXPRESSED IN FETAL LIVER, SIGNAL = 3.7; EXPRESSED IN LUNG, SIGNAL = 3.6; EXPRESSED IN BRAIN, SIGNAL =   4
gtaggaggagacgcagcaacagaggcagaggctggcatgatgagattgctggctgggccaagagccaaggaatgcaggcagcctccagtagctggaaaaggcaggaaaaaagaatctcccctagagcatccagaaggaatgcttccctgcagattcattttttactttggaactgtaagagagtaaatgtgtgttgctttaagccaccgagtttgtgataatttgccagagaagcaatcaaaaatgaattcaggtggaaaactaaaagggtatggcatccagcagccaggtgaagaaagtgtactggaggggaggaagggtgatcaatggtgtcaccagttgctgccaggccatgcaaggtaaggtgagcactgaccaccgggtggaggaaggcgaaggtcctggtaacgccagcaagggctgtttctgtgatgtggtgggtttcagagcgcatgggatgcttatcacctgtctaaa

SEQ ID NO: 6564 - DNA, 469 bp, Homo sapiens
  MAP TO AC002506.1; EXPRESSED IN PLACENTA, SIGNAL = 1.9; EXPRESSED IN ADULT LIVER, SIGNAL =   2; EXPRESSED IN LUNG, SIGNAL = 2.2; EXPRESSED IN HEART, SIGNAL = 2.1; EXPRESSED IN FETAL LIVER, SIGNAL =   2; EXPRESSED IN BRAIN, SIGNAL = 2.1; EXPRESSED IN HELA, SIGNAL = 2.3; EXPRESSED IN BONE MARROW, SIGNAL = 2.1
aaaccagacaagaagggacgcatcccaagtgactgattggtttatgtacagtttaagaacaggcaaatctcactgctatttatagatggcacagcagtggttacctctgctagtggggcggggggtcgcttgtgtactgggaaggggctccagggaaccttctggaggctgagggtgcccttgatcctgatttgagtggtgactatataggtataaaaaatgatcaagctggacacttaaagtcaacatagtttatgcactttcacgtgtaaacattattccttaagaaaataaaaacagcaccagtggctccccccttccctgcagactcccccgacaccaccacctccttcttcgccttgcatcggtacgataaggcacttgcttgacgggaaagagaaactcagctgccagctggggttcatttgcactttcccccgcctggtctgcggtctggctgtgcagctag

SEQ ID NO: 6565 - DNA, 455 bp, Homo sapiens
  MAP TO AC002480.1; EXPRESSED IN LUNG, SIGNAL = 3.3; EXPRESSED IN HELA, SIGNAL = 2.7; EXPRESSED IN BONE MARROW, SIGNAL = 2.6; EXPRESSED IN ADULT LIVER, SIGNAL = 2.9; EXPRESSED IN PLACENTA, SIGNAL = 2.8; EXPRESSED IN HEART, SIGNAL = 2.4; EXPRESSED IN FETAL LIVER, SIGNAL = 3.1; EXPRESSED IN BRAIN, SIGNAL = 3.1
aacatgtctcaagaagggggaaccgaccattcctactgtgtgcagctgagaaatcaaagaagatgtgggtagagaactgctgttactgataaatgcccattcagtggtgtggcagagatgaaagcccattggagtgggctgaggatgagaatgaatgatgaggaaacgtagaccttggggttggatgactccctccagaaatttttcagtaaaaggaaacagggaactgcgcaatagttagagggagcatgggatcactttttttgagagagatgatactaagtaatttttataatatatgctagtaggaaagatccagtagtgaaggagaagtcagtggtgcacaagaggaaggagacagcttcaggattgacacccttgagaaggtgagaagggctggattcacaacatacacatgcttctccgcaaacaggaccctttgtgtctaatacagc

SEQ ID NO: 6566 - DNA, 480 bp, Homo sapiens
  MAP TO AC004150.8; EXPRESSED IN LUNG, SIGNAL = 8.9; EXPRESSED IN FETAL LIVER, SIGNAL = 7.4; EXPRESSED IN BRAIN, SIGNAL = 7.5; EXPRESSED IN BONE MARROW, SIGNAL = 6.8; EXPRESSED IN PLACENTA, SIGNAL = 7.2; EXPRESSED IN HELA, SIGNAL = 7.1; EXPRESSED IN HEART, SIGNAL = 6.3; EXPRESSED IN ADULT LIVER, SIGNAL = 8.9
ggcgaagggaaaggagaggcctgggtcctcatctgtccctcgtgcatcttggctggacactaccccagcaagctcagccatgtcgggcagtagtgccagctacttctttcctctgagttgtgacgctgacctgtccaggagccatctgcagtccctgcttcccatggggctggggtctaactcttggccaagggaattgaagctgcctagcggcatctgttggtggcttggaaaggatttttcccagctttggggtttctttcccttgcagggaaatgtgataatcaacccaggatagatgaagttattgggttacctttccagatgctggcggtccaagtttcccttgcagctacctctgtgggagctgacaagagtgttggaggagctggacgtgtccaccaacgcaggaggctggcagcttgagagccactgctgagccctggccaggaggggcgtcctgagtgggcctgtggaatg

SEQ ID NO: 6567 - DNA, 483 bp, Homo sapiens
  MAP TO AC005317.1; EXPRESSED IN BONE MARROW, SIGNAL = 7.5; EXPRESSED IN PLACENTA, SIGNAL = 7.9; EXPRESSED IN LUNG, SIGNAL = 8.8; EXPRESSED IN HELA, SIGNAL = 7.3; EXPRESSED IN HEART, SIGNAL = 6.4; EXPRESSED IN FETAL LIVER, SIGNAL = 7.9; EXPRESSED IN BRAIN, SIGNAL = 8.4; EXPRESSED IN ADULT LIVER, SIGNAL = 7.7
agatacactgctgggggtgggcagggctcacccagggtgtccaggaaggtgctggggccgcttgggcaggagctctgtggtccccttcagcttctgcaagcaggcgcgggccatgacatcttgttgaaactcctcctcctcactgcaggggccgaggtctgtgagggtgggggaagacaatcaggagcaggagaaggaactctcaataagatctgctcccacccgctcatctccagaaggctggagcaatcctttcgaaggaccccctcaatcacaggaccttcccagagacaacccctaccctaccctacctcccacccatgctccccaccttcctgatccatgggatcaccaggggccccagccccctcgatgggcaacttgctggctgtggctggttccttcttcaccttcttagctttcttctgcttaaattcttgcaggtcccactccaggtcccagagccaggggtcttctttgtac

SEQ ID NO: 6568 - DNA, 468 bp, Homo sapiens
  MAP TO AC005527.3; EXPRESSED IN LUNG, SIGNAL = 4.6; EXPRESSED IN BRAIN, SIGNAL = 4.2; EXPRESSED IN BONE MARROW, SIGNAL = 3.7; EXPRESSED IN PLACENTA, SIGNAL =   4; EXPRESSED IN HELA, SIGNAL = 3.8; EXPRESSED IN HEART, SIGNAL = 3.3; EXPRESSED IN FETAL LIVER, SIGNAL = 4.4; EXPRESSED IN ADULT LIVER, SIGNAL = 4.2
ttggacactaaaaagcaaacaaactctattgttttccacagaaagtatagaaaataaagttcagccaaatcctcttggctcagacctggcactaacaccttcaggaggtgttagtgaaaaacaggtggaccagagtgataggcatcggctgcaggggaagtttcaggaaggaagaagcaagctctccccagaaaatctggctctgatctctgtcccacatcaccatgagaagtcaccagagccccaaccctctcctcacctgaagagccgcagacacatcttctcctggggaaattccttgggcccctccacactgtcgtcatggctctcggtctccaggtaaacatccagcagcacacacagccgctgcagctggttggtcaacagctggtggctgggccaagggccacacagctccttgtagcacacattgacttcgccctccatggcctgtgtgataggaaagcc

SEQ ID NO: 6569 - DNA, 481 bp, Homo sapiens
  MAP TO AC002527.1; EXPRESSED IN LUNG, SIGNAL = 2.6; EXPRESSED IN HEART, SIGNAL = 2.3; EXPRESSED IN FETAL LIVER, SIGNAL = 2.2; EXPRESSED IN BRAIN, SIGNAL = 2.6; EXPRESSED IN BONE MARROW, SIGNAL = 2.5; EXPRESSED IN HELA, SIGNAL = 2.5; EXPRESSED IN PLACENTA, SIGNAL = 2.4; EXPRESSED IN ADULT LIVER, SIGNAL = 2.3
gctcactacctgggtgacagatcaattgtatcccaaacctcagcatcatgaatacatccatgtaacaaacatacccatgtacaaccttgaatctgattaaaaaaaaaaaaaaaaaaagcagtaactgtagtaagcaaaagccagctagaacctggaacctaaatttggaacatcatacatcaaactcccctctagccttagaagtggaactcaccatacatcacccaagaggacagaagacgcagcctggagcaacccacactccctatctgttggcaagaactacgtccggacagaccttgctttgaaataaagcgggaaactgacatggagatgcgtaaaaccctttcaaaaccatatcacaaagtctcagtgggaggagcaagcctcaaaacaattcaaggacacgtggacttcatgaaatgtgagtaaacatctatagtgagagagcctcctaaaggaaaaatgaaatggaaggaga

SEQ ID NO: 6570 - DNA, 443 bp, Homo sapiens
  MAP TO AC005320.1; EXPRESSED IN PLACENTA, SIGNAL =  12; EXPRESSED IN HELA, SIGNAL =  11; EXPRESSED IN BRAIN, SIGNAL =  14; EXPRESSED IN BONE MARROW, SIGNAL =  12; EXPRESSED IN ADULT LIVER, SIGNAL =  13; EXPRESSED IN HEART, SIGNAL =  10; EXPRESSED IN LUNG, SIGNAL =  15; EXPRESSED IN FETAL LIVER, SIGNAL =  12
gaagtctgggaggaggaaggcagctctggggtacagctgtagcccctcctgggaaccctaacaaccagataggaaaagcagaattcatagggctgctgatgtggcatttctcgtttactggcagcttctggcctgcaggttgagctccccagtctagatttgtggaggccaagattcttctcctgtctccactgccgcaccaccacgcctcaccatgactactaaacagaagatccaggcaggaacagccaaagaatcagtcaccttctccctgctcattcccaagtccaatactcatcactgtcctcctcagggagaaggctccctggatgccgtagctcccaaaagggcagaagataggtggaatgagggcccaggccaagactagaaggcacccaggtccatctttaataatattaccccagcttgggcaacatggcaag

SEQ ID NO: 6571 - DNA, 464 bp, Homo sapiens
  MAP TO AC002066.1; EXPRESSED IN FETAL LIVER, SIGNAL = 1.4; EXPRESSED IN BONE MARROW, SIGNAL = 1.6; EXPRESSED IN PLACENTA, SIGNAL = 1.6; EXPRESSED IN LUNG, SIGNAL = 1.5; EXPRESSED IN HEART, SIGNAL = 1.8; EXPRESSED IN BRAIN, SIGNAL = 1.7; EXPRESSED IN ADULT LIVER, SIGNAL = 1.3
tctttagtggttggagaaaaacagcacagtgctgtgatctttctgagaatagtaacaactacgaatcctatgattgtcttggctttcttcttagagtcaatttctaactgttggcacagggaggaaaatccaaacagatcttgtaatcattgatgagttgtgaaaatggagaccagagttggagaatctgaggcagctagcaaagttttggaaaagggggcactcaataagagaactccataaacctgcatgggctcctctctgatctttgttgagtaccaagctgcccatgtgtagaattaagctccacgaagatgggctaaggatggccaaggagttgcaaactgaaaaattcccagagctcacaaaggacaggaagacatttgagctctggccttccagaatgaagtccttgatgatgatctgggaaatttggtggagactcctggagtcctgccttacaa

SEQ ID NO: 6572 - DNA, 447 bp, Homo sapiens
  MAP TO AC000025.2; EXPRESSED IN PLACENTA, SIGNAL =   2; EXPRESSED IN ADULT LIVER, SIGNAL = 2.4; EXPRESSED IN LUNG, SIGNAL = 1.9; EXPRESSED IN HEART, SIGNAL = 1.8; EXPRESSED IN FETAL LIVER, SIGNAL = 2.2; EXPRESSED IN BRAIN, SIGNAL = 1.2; EXPRESSED IN BONE MARROW, SIGNAL = 1.5
tctacggaatcagggaatgcagggaagtttctatttgctgatttaccttttttctttccacagtggatatgacgtcagatattgacacagccaacaatcgactcatcatttctgaagacctgtggagtgtccattgtggatttcttagaaccgcacagagtatgccgagattcaaacaagtcatctgtgtcctgggctcccctcgcttcacctctggacaccattactgggaggtagacatggggacaggcaaataatgggatttgggtgcctgcaaagaatctgttaatcgacaagagaattgtgtggtcttcagaacttggcttctggactgtgggtatgaggaaagaaaagctctttgcagccagcactgtgcctttaaccaccctctgggtgagtccggggctatgcagggtaggcattttcctggatatgggtatgacaatg

SEQ ID NO: 6573 - DNA, 471 bp, Homo sapiens
  MAP TO AC002069.1; EXPRESSED IN PLACENTA, SIGNAL = 1.3; EXPRESSED IN ADULT LIVER, SIGNAL = 1.5; EXPRESSED IN LUNG, SIGNAL = 1.7; EXPRESSED IN HEART, SIGNAL = 1.5; EXPRESSED IN FETAL LIVER, SIGNAL = 1.1; EXPRESSED IN BRAIN, SIGNAL =   1; EXPRESSED IN BONE MARROW, SIGNAL = 1.1
caaggaaattacatttaagggaggagaaacagataaaaaattatgtaatacacactattcattatggattacagaggagaaagcaaatgtatttttgtggagatttgtggggtagatttatgaaagcattggcattgaactgagcatagagaaatgacagaattttgtttagtaaatgaagaaggaaattccaggcagagagaatgtcataattatattcatggagctaatactgtatttcattacagatggtctgatggtgaggaggaaggagaaggaggagaagaaggaagaggaggaggaagaggaggagaaggaggaggaaagagggaggagggagaaggaaaaaaagaagaagaacaaggaggatggggaggaggacaggaagtggaagaagaaggaggaggaggagggggaaattaatgctggaaatgcagtttgtaagcaaagcaggaagatctttgaatgtca

SEQ ID NO: 6574 - DNA, 481 bp, Homo sapiens
  MAP TO AC005324.1; EXPRESSED IN LUNG, SIGNAL = 1.7; EXPRESSED IN FETAL LIVER, SIGNAL = 1.7; EXPRESSED IN BRAIN, SIGNAL = 1.8; EXPRESSED IN BONE MARROW, SIGNAL = 1.5; EXPRESSED IN PLACENTA, SIGNAL = 1.9; EXPRESSED IN HELA, SIGNAL =   2; EXPRESSED IN HEART, SIGNAL = 1.5; EXPRESSED IN ADULT LIVER, SIGNAL = 1.6
tttcctagggaaacagcagcctgggtaaatagagaacagagaaatggatgttttctcatatgtgctttggagcccagctgggtttaaagcattctgtctgaatcagctgtcagttcctgaaccactctcctgccttctgtgtctcctcagatgcgtatgacatcacgtttgacccggacacagcacacaagtatctccggctgcaggaggagaaccgcaaggtcaccaacaccacgccctgggagcatccctacccggacctccccagcaggttcctgcactggcggcaggtgctgtcccagcagagtctgtacctgcacaggtactattttgaggtggagatcttcggggcaggcacctatgttggcctgacctgcaaaggcatcgaccggaaaggggaggagcgcaacagttgcatttccggaaacaacttctcctggagcctccaatggaacgggaaggagttcacggcctggtacag

SEQ ID NO: 6575 - DNA, 472 bp, Homo sapiens
  MAP TO AC005539.1; EXPRESSED IN LUNG, SIGNAL =   2; EXPRESSED IN FETAL LIVER, SIGNAL = 1.6; EXPRESSED IN BONE MARROW, SIGNAL = 1.8; EXPRESSED IN PLACENTA, SIGNAL = 1.9; EXPRESSED IN HELA, SIGNAL = 1.8; EXPRESSED IN HEART, SIGNAL = 1.5; EXPRESSED IN BRAIN, SIGNAL = 1.7; EXPRESSED IN ADULT LIVER, SIGNAL = 1.9
accctcccctttgtcttcacttttatctgtctgtatatttcctaacaacctgtttttacctcatctccctcttttattattaccatttttattcccctgccctgcatccttggcttcccctgtaagcactttgaaaaatgaggtgaattttatattggtaaaagatgctgaaaggtgaatctgtgaagcccccgcccccgtagcctccttccatatgagtaccttctttccatgtaaggtaacagctctctctcttctttttttttttttttttttttttttggtgctcattctccccaggcaaccagaaaagctgtccgcttcaaggaatggcttgatctaagatccaatcatgggatacaactaaagaacaaaacctcctgttaccaggttgcaaatgtccaggtatttgcaagcagtgttttgctttcttaaataccagactatggctagcaatcttccccaacttcag

SEQ ID NO: 6576 - DNA, 414 bp, Homo sapiens
  MAP TO AC002463.1; EXPRESSED IN LUNG, SIGNAL = 0.75; EXPRESSED IN BONE MARROW, SIGNAL = 0.55; EXPRESSED IN ADULT LIVER, SIGNAL = 0.58; EXPRESSED IN PLACENTA, SIGNAL = 0.59; EXPRESSED IN HEART, SIGNAL = 1.5
ccaatctgataattgaactgattttctacttacaacaaatttcagagcatctaagaccatttaattctgaattgaaaattttcatcttgataaatcttatgatttaattcaatttttgtatgtccccatccatcttttgtattttaaaatcactatcaaaatgattaaatcactatcaaaatcactatcaaaatgaacaaagaaagacatttttctcctttccattttagggaatagaaaatgaacaatgccagatgtataacaatgtgggaaagggtatagctgatagagaagcctgtcaggaccatacaaatcttactaaattctatatattagtaagggattctgctattgaaaaagttgaagcatcctcacctcaggaaggtgagattctcagacattttgcttccaaaa

SEQ ID NO: 6577 - DNA, 470 bp, Homo sapiens
  MAP TO AC005343.1; EXPRESSED IN HELA, SIGNAL = 3.8; EXPRESSED IN FETAL LIVER, SIGNAL =   4; EXPRESSED IN BRAIN, SIGNAL = 4.3; EXPRESSED IN BONE MARROW, SIGNAL =   4; EXPRESSED IN ADULT LIVER, SIGNAL = 4.8; EXPRESSED IN PLACENTA, SIGNAL = 3.8; EXPRESSED IN HEART, SIGNAL = 3.3; EXPRESSED IN LUNG, SIGNAL = 4.2
aaatgcagcctgtccttcctgccgttggaagggatcactggatacaacacaggtgttgtgggcaaaatgcatgccgcagccgacaaacacgcagaaaccccagtgtcgtggggccactgcagccctgcactgtgctggcggccagaggccatgtgtgtgtctgtccaagacccgtgttggggtcaccatcacagcagcaacttctccaaacacaacccctgtccccaccctcgcctcaattcttccaaggatgccttcgcctgcttttattcccatctcctattccaagaaagtggtagcgctccacctgccccaaccacagctcttccccatgactgggttgtctctgtttccccagaaagtgcgggtgaacccatggtggtgacggcaagcacagctgtggcggtgaccgtggacaagaggacagccattgctgcaggtaggaacggcccttgtggtgttgaggccag

SEQ ID NO: 6578 - DNA, 466 bp, Homo sapiens
  MAP TO AC002467.1; EXPRESSED IN BONE MARROW, SIGNAL = 1.3; EXPRESSED IN PLACENTA, SIGNAL = 1.3; EXPRESSED IN LUNG, SIGNAL = 1.4; EXPRESSED IN HEART, SIGNAL = 1.4; EXPRESSED IN FETAL LIVER, SIGNAL = 1.3; EXPRESSED IN BRAIN, SIGNAL = 1.6; EXPRESSED IN ADULT LIVER, SIGNAL = 1.3
tcttggcaaagttccacaatcatccagaaaacaaaagtttcctggctcctctgttctcccagttttcttcctagacaacatcaaagtttgggctgaggtgaaacccatccttaaaaattcatctccttgatgtcttgcttaccaaggaacagtgtgtaggtcttttggataatttgatatgaatggttgaaagatttcaaatctttgacaattaagttgacagtgttttcttcgtttagaatggcatcataagtgatgctgtttcaacaaataatgcttttgagcctgatgaggatattgaagatctggaggaacttgatatcccaaccaaggaaatagagattcaagtggattggaactctgagcttccagtcaaagtgaacgttcccaaagtgccaatccatagccttgtgcttgactgtggagctatatctttcctggacgttgttggagtgagatcactgcg

SEQ ID NO: 6579 - DNA, 454 bp, Homo sapiens
  MAP TO AC005323.1; EXPRESSED IN LUNG, SIGNAL = 0.91; EXPRESSED IN ADULT LIVER, SIGNAL = 0.49; EXPRESSED IN HEART, SIGNAL = 2.3; EXPRESSED IN BONE MARROW, SIGNAL = 1.5
ttgataatgagggccaataaagatattaacacaatagaatacgggggcagccttagaatattatatgaagcaaatcaacaatagtttttcaaagcaaaacagtgaaagatttctcagtaatgcagaattactattctgtattatttgaaaagaaaatttgatagacatattaggtctagctgtcttatgaaaactcaggcttatctattctgggacatataaaatttactaaggagagttctttgtgctgaatcccacctgggtgtgcagtagctgaacacgctcactggcatccaggagctcctgttctgcgatttttctgctcctctctgtctgttccagagtggcccgcagctcctcgatctcagcctgcagcaggttggctctgcgctccaccatggccagctgttccttcaggtcctcctggctccggagagcatcatccaggtggatc

SEQ ID NO: 6580 - DNA, 581 bp, Homo sapiens
  MAP TO AC013634.3; EXPRESSED IN LUNG, SIGNAL = 2.8; EXPRESSED IN FETAL LIVER, SIGNAL = 4.3; EXPRESSED IN BONE MARROW, SIGNAL = 4.2; EXPRESSED IN HELA, SIGNAL = 3.3; EXPRESSED IN HEART, SIGNAL = 3.6; EXPRESSED IN PLACENTA, SIGNAL = 3.3; EXPRESSED IN ADULT LIVER, SIGNAL = 3.7; EXPRESSED IN BRAIN, SIGNAL = 4.1
cctcaggcaggtccttcaggaggcatccagaagaaggcattgttatcataggagatgacagctccatgcatgtcattgccccagcagaccgtccagttcggcaagatgtggcggtgggagacagtggtattgatgatcctgaccctgtatgggcctaggctaatgtgtgtgtttgtgtcttagtttttaataaacaggtttaaaaaagttataaaagatttaaaaatagaaaaaagcttatagaataagatatagagaaagaaaatatttttgtacagctgtacaatgtgtttgtgttttaagctaagtgtttttacaaaagagtaaaaggtttagaaaagtaacaagtttataaagcaaaaaagttacagtaagctaaggttaatttattattaaaggaagaaaaatgtttttaagatgaacagtgtagcctaagtgtacattgttgatgaagtctatggaagtgtacagtaatgttgtaggcctcacattcactcaccattcactcactgactcacctagagaaacttccagtcctgcaagctccattcatggtaaatgccccatacagtgtggcatta

SEQ ID NO: 6581 - DNA, 592 bp, Homo sapiens
  MAP TO AL157381.7; EXPRESSED IN BRAIN, SIGNAL = 1.1; EXPRESSED IN BONE MARROW, SIGNAL = 1.1; EXPRESSED IN LUNG, SIGNAL = 1.3; EXPRESSED IN PLACENTA, SIGNAL = 1.4; EXPRESSED IN ADULT LIVER, SIGNAL = 1.7; EXPRESSED IN HEART, SIGNAL = 1.2; EXPRESSED IN FETAL LIVER, SIGNAL = 0.93
ctgcctccagcttttctttgcagagagaggataatttcccatcatcatagtttcaatatttcaatttatcatgcttactagaattgtactctaagtcctacactcattcctcagtctaaccccaaagaggcaagttatagaatctcccaagatagtctgcattttgagtatttccatttgcctttattcaccaagtggaatttaaaaatgaacaataaccagaaatatgttaataaggaactagtaaaaacatttcataaggacacattaaatccaattaaaaccctctagaaaagctggtgtatttgcttttttaatatatttcatttagaaagtgcctatcaggcaaaatgcagaaacaccattaaagtatttagaatacatccttttttgtcagttttctttttgttatttctcttgcctaatgactccacttatatcattcaaaaggagtcagtccggatgataggagctctttgttacatgtaatagcttacaagagcaatttactcctacctgagccagactgccctttatctataaagacaggctgtgctgtagattgaagtctaggattggtggtacgttggac

SEQ ID NO: 6582 - DNA, 525 bp, Homo sapiens
  MAP TO AC019159.3; EXPRESSED IN LUNG, SIGNAL =  13; EXPRESSED IN PLACENTA, SIGNAL =  12; EXPRESSED IN HELA, SIGNAL =  19; EXPRESSED IN HEART, SIGNAL =  11; EXPRESSED IN FETAL LIVER, SIGNAL =  10; EXPRESSED IN BRAIN, SIGNAL = 9.7; EXPRESSED IN BONE MARROW, SIGNAL =  13; EXPRESSED IN ADULT LIVER, SIGNAL =  13
tctaatcagccacctcccaggaagctatgaatagagagaaatgggagacacactgccatccttgactgaaggtgacagagagaagacaataggaaggaagactgtcagacttctgggatgtggcaggatgggaaaatagagctatctagctgcaagcacatgttttcattcaaggaaagggaagaaggactcaaaggtgactcaaagattgcaagggctgtcactgcggccactgtcctggaggacacaggctcaggggtcaaggctgcctccaattcattttctgaggttgaggctacccccttaatctcagcagcccagctgccattacccaactcctatggatggggctaccacccaggaactcaggaggtaatgctgccacttcagtgggccttgaatataaggccaccatacctaccagcaggcctggaggatgagcatgaagccaaaaagaattagtctggagccttaaaatctaataaaatttgccatactaggatttggtcttgcttgggacctatg

SEQ ID NO: 6583 - DNA, 532 bp, Homo sapiens
  MAP TO AL158012.2; EXPRESSED IN LUNG, SIGNAL = 1.9; EXPRESSED IN ADULT LIVER, SIGNAL = 1.7; EXPRESSED IN FETAL LIVER, SIGNAL = 2.3; EXPRESSED IN HEART, SIGNAL =   3; EXPRESSED IN PLACENTA, SIGNAL = 2.2; EXPRESSED IN BRAIN, SIGNAL = 2.5; EXPRESSED IN BONE MARROW, SIGNAL = 2.7
tttcagatggggaaaactggtgctcagagagtggggtgatttttttcaaatctccttccctagtaaattatacagcaaaggttagaacatggacacccctgtcttcagctctggctctctttctgccatagctgcagtggggtagtaacttcgataggactaagaatccactgcggtctgccccttttatttttagcccctctactggtctttatttctcctggagatcagcagttgatactcaaacgcaaggagtagggagggattttggcatcaagaatgagtcctccaaacggctttcctgaagttcctcctggtatatcacccacagttcttctcacacctctgttctatgaacaactagtaatcactatggtgggaattaatttgggagtcaaagttcaaggaaaaaattctcaggtaatgcgccgtttgctgggcacctatttagtaggtgagtctcagggcttaaggctgcaggtcttcacagtagcctctctgtttttcctctagcactcttggagtctcaggg

SEQ ID NO: 6584 - DNA, 555 bp, Homo sapiens
  MAP TO AC022753.3; EXPRESSED IN BONE MARROW, SIGNAL = 5.7; EXPRESSED IN PLACENTA, SIGNAL = 3.7; EXPRESSED IN ADULT LIVER, SIGNAL = 4.1; EXPRESSED IN BRAIN, SIGNAL = 4.5; EXPRESSED IN LUNG, SIGNAL = 3.8; EXPRESSED IN HEART, SIGNAL = 5.2; EXPRESSED IN FETAL LIVER, SIGNAL = 5.9; EXPRESSED IN HELA, SIGNAL = 3.4
ataaatgtgcaaggcgaagcagcaaatgctgatggagaagctacagcaagtgatccagaagatctagataagagaattaatgaaagtggtgatgctaaaagacacgttttccaagtagatgcaacagccttctattttaggataccatctaggactttcataactaaagagaagaagtcaatgtctggcttcaaagcttcaaaggacaggctgactctcttttgagtggatgctgcagctggtgactttaagttgaagccaatactcatttaccattctgaaaatactaaggaccttatgaattatgctaaatactctgtctttgcgttatcagtggaacaacaaatcctggattatatcacatctgtttatttcagagtttactgaatatttttagcccactgttaagacctactgctcagaaaaaaaaagatttctttcaaaatgttactggtaattgacaatgtatctagtcacccaagagctctcatggatgtgtacaaagagattagcgtggttttcatgactgctaacaccacatccattctgtagccc

SEQ ID NO: 6585 - DNA, 586 bp, Homo sapiens
  MAP TO AC010802.4; EXPRESSED IN PLACENTA, SIGNAL = 1.2; EXPRESSED IN ADULT LIVER, SIGNAL = 1.4; EXPRESSED IN HEART, SIGNAL = 1.3; EXPRESSED IN FETAL LIVER, SIGNAL = 1.1; EXPRESSED IN BONE MARROW, SIGNAL = 1.1; EXPRESSED IN BRAIN, SIGNAL = 1.3; EXPRESSED IN LUNG, SIGNAL = 1.3
actgaaggtcagaagcctgcccctgggtgggtgtgacaatgagaaactctcaccttggccaggggaggagagatagtggagggcatgaccaggagccccagcttcatggcttctgaagagtgtaaactagggtatgcactgaaatacagaccaacatgtgtcttcacgcacactggcacgtccctgcacactcttgggcaaatattttatttgtctttcacaagataactaacacacaatgctacaaattataaagtttttttaaataaatcaaataatgatatggttctcccttttcttccttttgcaatattctcatggtgatgtgttttaacttatgcatgtttatatactttacttcatctgtacatttctttaaacatttcttactgaaaacaagcaaattagcccatcagtggaacaaaaaactgtgtttaatcattatacatataaaaatgaatattaatatatagtgataaaaattttatatttatattatatgtaaaaatatagacatacaaaatatatacataaattaatgtattcttaaaaatccagtcaacattgaatgccctggcttattcaa

SEQ ID NO: 6586 - DNA, 500 bp, Homo sapiens
  MAP TO AC009467.3; EXPRESSED IN LUNG, SIGNAL =   5; EXPRESSED IN PLACENTA, SIGNAL = 6.7; EXPRESSED IN HELA, SIGNAL =  14; EXPRESSED IN FETAL LIVER, SIGNAL = 6.9; EXPRESSED IN BONE MARROW, SIGNAL = 6.6; EXPRESSED IN ADULT LIVER, SIGNAL =  14; EXPRESSED IN HEART, SIGNAL =   7; EXPRESSED IN BRAIN, SIGNAL = 6.9
tcacagacatgccctcaaacagataaaaattgtaactcagtattccaaaatgagctttgaaatttaagaaaaggacagaaggtatgagggaaaaagcaacataaatcagaacttgaaaaaaatcataaatgatgtgagagaagaaaaggaagatttcacacaaaaacttccaatactcaggaaacatttagagagaaatattatttcagaaatgaactagaaaaaaacgcaaacaatagataatgactgtcttagtccatttatttgctgaaaaggaatacctgaagctgcgtaatttataaagaaaagagttttattttactcacagttttgcagactgttcaagaagaatggtgccagcatctgcatcaggtgatggcttcaagttaaagaaagaaggttcatggaagaaggtgaaggggagccaagctggctgtgtacagatagcacataaccagaaaggaagcaagaggtgagtggggaggtgccaggttcttttt

SEQ ID NO: 6587 - DNA, 503 bp, Homo sapiens
  MAP TO AL136146.5; EXPRESSED IN HELA, SIGNAL = 6.3; EXPRESSED IN LUNG, SIGNAL = 5.9; EXPRESSED IN PLACENTA, SIGNAL = 1.9; EXPRESSED IN BRAIN, SIGNAL = 3.2; EXPRESSED IN BONE MARROW, SIGNAL =   8; EXPRESSED IN ADULT LIVER, SIGNAL =   4; EXPRESSED IN FETAL LIVER, SIGNAL = 7.7; EXPRESSED IN HEART, SIGNAL = 4.5
tctttgtggttccttgagggctttgcagaaacccttctggcagtggcagatggtaccacctcactctgggtctgttctgaatggtcagtttcactataatccttagacccttccagtcaccggttgccttggcagtgtcatcaccaaccttttttgcagacatacccagagggccaatcttgggggccagcacagacatggcatcaactttatccaaggtacacctcaggtatacgactttgatcttgttggggttgaacttcagtggtgtgctggaggcagctggtgtcagatgaacctggattcaggatgacccaataaagttgcaccttggcctcctccaagccgaaagccaaaagtggagactattcttattcctattttacagatcaggaaagtgaggcttaactagattatgaattcaagggtcacagctgcaaagtggtggggctgggactggagttcaggtctgtcggactctggcctcctgtcttttcgctgtc

SEQ ID NO: 6588 - DNA, 510 bp, Homo sapiens
  MAP TO AC016648.3; EXPRESSED IN LUNG, SIGNAL = 1.3; EXPRESSED IN PLACENTA, SIGNAL = 1.3; EXPRESSED IN ADULT LIVER, SIGNAL = 1.5; EXPRESSED IN HEART, SIGNAL = 1.2; EXPRESSED IN FETAL LIVER, SIGNAL = 1.3; EXPRESSED IN BRAIN, SIGNAL = 1.3; EXPRESSED IN BONE MARROW, SIGNAL = 1.2
taaacagatgccaaccttgcatatatttttaaaaagtagtttcaatgttttcaaatatgtttgagttttataaatattatcatagaataaaatcttatgggtatatttagttttttcttatgtattattatgcaattgaagaattaaatgtaaaggacatgaaagagcatgctccagataaagacatagaaaacagagacatagagaacatagagaataatactctttacctttgcttaagaggtaagatacccattttctgcttgatcaatcttaggcaagctatggtattagggaagtagtggcaggatggttatattgggaattggagaaaaagctgtgtcaagacttgtttaaagtagaaaaagaactcacccctgtgttccccttctctagtatcttccttctcagttgctaagaatgtggcacagcctgtaatgtagcctgattctttacctggactgcatgattctgtagtccactaatatttcagggaatgctagggttgtg

SEQ ID NO: 6589 - DNA, 550 bp, Homo sapiens
  MAP TO AC009046.4; EXPRESSED IN BONE MARROW, SIGNAL =  15; EXPRESSED IN PLACENTA, SIGNAL = 1.8; EXPRESSED IN ADULT LIVER, SIGNAL = 4.8; EXPRESSED IN HELA, SIGNAL = 9.3; EXPRESSED IN BRAIN, SIGNAL = 9.1; EXPRESSED IN LUNG, SIGNAL = 5.8; EXPRESSED IN HEART, SIGNAL = 3.6; EXPRESSED IN FETAL LIVER, SIGNAL =  22
tcagaatctgggggtgagacccagaaatctgcgttttattaagccctccagccaattctcatgtaccgtgaagtttgacaacatttggagtaaaccaacaatgaggaacctcatgtaaaatgctacttaagagactttttctcaccccccactgtaatgtcaatgtgcacattttcttttcttttctttttttttgcatccaaaatcattttaataagagagtaggatccagggttagtttttgtagcctcagctggcccgtcagcctctggcgcgctcgaacttccggcccttggagtggacgtagggtttggtgtggctgtgcggggttcccggggccttgccaaaatgcccgtacacctttcggcccttgagaggaccggagagcaggacggtgctgcagcccttgcgggagtccacggccagctggtcgaaaagtgaggatcttgccccctgccctgaggacgcggctgcgggccaggttggtcacactcagcacacacaccttcagtttgggcacctcctgaacccgcacgtcatctgttatgct

SEQ ID NO: 6590 - DNA, 515 bp, Homo sapiens
  MAP TO AL139245.2; EXPRESSED IN PLACENTA, SIGNAL = 4.6; EXPRESSED IN FETAL LIVER, SIGNAL =   3; EXPRESSED IN ADULT LIVER, SIGNAL = 3.7; EXPRESSED IN HEART, SIGNAL = 4.4; EXPRESSED IN BONE MARROW, SIGNAL = 3.2; EXPRESSED IN LUNG, SIGNAL =   4; EXPRESSED IN BRAIN, SIGNAL = 3.3
atgaaaagagcagagccaggcagacacctcatctgtctgcttccagccttggccaaacagacccttccccaaggctgagccgagcctgggccccaggtacctgcacagactcccagcaccactcgggaaagacgatcagctcaaaagccttggccactttgctgactcccatcaggatggcggggatgatggcaaagatgtgttgatcagcagggtcccctttctgcaagacagtgagcccagagggcaggggtgcgtggaggccgcggaagccctcccaacaccagctcctattctgcgggcagtcactacagaggcgcggggaatgtgcccgagaaagagctgaagcagggggccgtggactgaatggtgtcccccaaattcctatgttgaaggccttaaccccagtgtgatgggatcagcaggagggacctctgggaggtgaataggtcatgtggggccctcacgatgggataggaagagacatacaagaaaccactctctttttctgcccc

SEQ ID NO: 6591 - DNA, 542 bp, Homo sapiens
  MAP TO AC015908.4; EXPRESSED IN ADULT LIVER, SIGNAL = 5.8; EXPRESSED IN HELA, SIGNAL = 8.1; EXPRESSED IN BONE MARROW, SIGNAL = 4.6; EXPRESSED IN LUNG, SIGNAL = 5.8; EXPRESSED IN HEART, SIGNAL = 4.8; EXPRESSED IN BRAIN, SIGNAL = 4.4; EXPRESSED IN PLACENTA, SIGNAL = 5.6; EXPRESSED IN FETAL LIVER, SIGNAL = 4.3
acctttgggctccaggataggaagcttgattcaagatgatgtcctaaccaccatggtcccaaaaaaggctgaaggatgctggttggtgagggtgttggtggaaatttcttttccgtggcattacaactccaaggtatgggaattgaggatctaaccaccaggctggcatagattcttcttgaatttgtcttcttgttccacagggaatggcaaggaacctgaggaaccagcgtgaggaaaacctggatgatctgacgtcttcctcactttatccctacctgtccacgcctccatccatccacccatccatcactgatcaagctctcactatgtctatagtgtagaaggtgccaccaaatgcaatggaacctcttgtctcatgtgtctacttgcatctttaagttgatacacggaaggcacagtccaagcacaggatactggaagctatggaggtacagtggcctctgagcaaactgaaaactctctatcactaaagggttgggcatacagggtatctcctctgctctgccacctaccttgag

SEQ ID NO: 6592 - DNA, 593 bp, Homo sapiens
  MAP TO AC018528.3; EXPRESSED IN HELA, SIGNAL = 2.8; EXPRESSED IN LUNG, SIGNAL = 1.6; EXPRESSED IN PLACENTA, SIGNAL = 1.6; EXPRESSED IN ADULT LIVER, SIGNAL = 1.7; EXPRESSED IN FETAL LIVER, SIGNAL = 1.4; EXPRESSED IN BRAIN, SIGNAL = 1.8; EXPRESSED IN BONE MARROW, SIGNAL = 1.3; EXPRESSED IN HEART, SIGNAL = 1.4
tgcatgtgttcagaaatggcacatatcaaattaattgtggttaactctggagagaaaagaactggaaaaaataaataagacttcaactctatctaaggtattttatgttttcttcctttatttaaaaaaatctaagaaaatgttaaccgttaactctgtagagcaatcaggtgtcaaggtggaaaattcagtcaacaagacaaactgaaagcaacaatcaagcttcctattcacttacacaacaatgcaagcaagaggtgcaaaggggctccacctcccccagtgtttcatttttcctccacagaatggaactgggtgaggttcaagaatgagggggagtcatctcactgctgaaaagccccaaacaaaaggcctttgtctcttcatggacccatggacctgggagaagaggagaagggctttaaggaagaaagtactaagtcaaaatgaggaaaagtgcttcagtcaaggctgctgagcaagaggcctctggatggcagcagcagggtgaggaattagatatgcaggtgagcatggctggtggtggtggggagaggggatgaattcttgactgcaactccctgcagagaact

SEQ ID NO: 6593 - DNA, 533 bp, Homo sapiens
  MAP TO AC011686.3; EXPRESSED IN LUNG, SIGNAL = 1.6; EXPRESSED IN ADULT LIVER, SIGNAL = 1.6; EXPRESSED IN PLACENTA, SIGNAL = 1.6; EXPRESSED IN FETAL LIVER, SIGNAL = 1.6; EXPRESSED IN BRAIN, SIGNAL = 1.5; EXPRESSED IN BONE MARROW, SIGNAL = 1.7; EXPRESSED IN HEART, SIGNAL = 1.6
tgaagccttgtgaaatgtggtgtttcaatctacctggactattatgagaaaggaaccaggaaaaggccagaaaaatgaagatctcccccttttaaatcaaagtctcataacatctcttaaagatgaatggagaacatgtatgcattcaacagtatcaattatgccaagacagttattatgaacctttcagtttcccagatttttaataaagaacaatcacatacaataaaacaattgttactgctgatgtgagactttacttttcttaattttctctttacttccctttccttcctggggtcacatgtcagcttcctccacccgaaaagaggaaattgtgggtgaaatgaaagcaatactaccccaccacaaagcagagcaacaagatgtcaagtcagaaccaggaaaggcaacatcatcttcctcagtccagaggagttagtcacaaagctaccaatccttctaccagcttttacagggatttttaagtgtttagtagcactgaagcaataactcacccttccttcacctca

SEQ ID NO: 6594 - DNA, 593 bp, Homo sapiens
  MAP TO AC022470.3; EXPRESSED IN PLACENTA, SIGNAL = 1.4; EXPRESSED IN BRAIN, SIGNAL = 1.9; EXPRESSED IN BONE MARROW, SIGNAL = 1.6; EXPRESSED IN LUNG, SIGNAL = 1.3; EXPRESSED IN HEART, SIGNAL = 1.6; EXPRESSED IN FETAL LIVER, SIGNAL = 1.5
gagggttctaaaagccccagattgtgagtcaaatgactctgaacaaagccttaagaaatgttttccttaaagccaaatataagaagattacctcttccttatttaacctttacctctttagcgtctcttaactttcattcttttcttgcctgcttccctcccccattaaagaaatggttttcttttgttaataaacaaagcttacaaagatggtgcttgtggcagagttggtctcaatttcactatcagacaaagtgccccgagagcttgccaggtgaacactgccctcgccacctggtccatcacctgcattgctgctcaagtcactgtcagctccaagggtctctccagagctattactcacctggaaaggaaaaaaggtagtaagagacagtccccagggatgggccccagaaataccaagctgttagagctccctgccaccataaaaaagtattaaatttcaaaagtgtgtcagatagcctctggaagtaccttctttataagatgagaagctctgggtgaaatctcgtatacacacacctatgatggtaaacatctccaccatgagaaccatgctgacctgagactca

SEQ ID NO: 6595 - DNA, 536 bp, Homo sapiens
  MAP TO AC021774.3; EXPRESSED IN LUNG, SIGNAL = 4.6; EXPRESSED IN PLACENTA, SIGNAL = 5.3; EXPRESSED IN ADULT LIVER, SIGNAL = 7.4; EXPRESSED IN HELA, SIGNAL =   8; EXPRESSED IN HEART, SIGNAL = 5.6; EXPRESSED IN FETAL LIVER, SIGNAL = 4.6; EXPRESSED IN BRAIN, SIGNAL = 4.3; EXPRESSED IN BONE MARROW, SIGNAL = 4.3
ctgcgtatcacggcacttagtagagggacagaattttgtggtacaagattactaatcaacaaagtgtctctcaggtcttctgagtaactggggatggtaatatattgtttaatagagaaattttttaagtattattgtacctcaactttactattatacatgttgactgactatctatgaaggttcagaagtatttgtaagtacttagaatgtaagatgaatagaattctgtgcctgacttcaaggggctcacagtctggcaggtaaaccagctgggtgcagacccaggctcctgctccatggagcaggtaggagccccacccccaccccaggtgcagctgctgctgctgaagccgcagcagcagactcagatatccctgcactcttgggggtccaggaaggcccccctgacctggcaggctcggaagtgcctcctcctgctgcctggcttctccctgctctctgagcccactcagatctcagaacatcaggcagagccctgggcaccatgaatagcagcaggaggcagagagact

SEQ ID NO: 6596 - DNA, 594 bp, Homo sapiens
  MAP TO AC009635.4; EXPRESSED IN ADULT LIVER, SIGNAL = 1.7; EXPRESSED IN LUNG, SIGNAL = 1.6; EXPRESSED IN PLACENTA, SIGNAL = 1.4; EXPRESSED IN FETAL LIVER, SIGNAL = 1.4; EXPRESSED IN BRAIN, SIGNAL = 1.6; EXPRESSED IN BONE MARROW, SIGNAL = 1.5; EXPRESSED IN HEART, SIGNAL = 1.5
ttctctgggttccagtttggtatctgcaagacaggatgagaaaataatagaacttattgtgtatgctttctctgattgaataaattaataactgtataacacttagaatggttcctgacagtaagtaccacatacttatttgttactatatcattattattattattatttacaagtatcttcactgttaattttcagtttgctcacccacataaattttagaatcagcttgacaagttctgtgaaaacatcttgttctgattctttgtcattgtactgagactataaaataaatagaactgaaatcattatgctatttattctctccctatatgaacactgtatgtttctccaattatttaggtaatatcttcaaaaaattatttaatttcctaaataaagtattaacttctcttatgaattctttaaggttttctatggagaatattttgcatgttaaatgttaaagttttgtatcttcctgtacaaaccttgaatcttatatccatttgtatttgtgattattgttatactcttgttattattaatgctgagagcaatgtggaatagtaatggggagagtgagcatgtctc

SEQ ID NO: 6597 - DNA, 594 bp, Homo sapiens
  MAP TO AL157405.2; EXPRESSED IN BRAIN, SIGNAL = 1.1; EXPRESSED IN LUNG, SIGNAL = 0.85; EXPRESSED IN PLACENTA, SIGNAL = 0.8; EXPRESSED IN ADULT LIVER, SIGNAL = 0.64; EXPRESSED IN HEART, SIGNAL = 1.2; EXPRESSED IN BONE MARROW, SIGNAL = 0.99; EXPRESSED IN FETAL LIVER, SIGNAL = 0.83
tggaataaaccagctgctccccagggccagcagctcccagagctccatcctgcggagatgtgccagagaggccttcctatcagtgaagcttctgttcacagactcttctccagcttggctcaagtccaagaaacatctttgttctccagcatcaaaggcatgcacagattggagtccaagatcagacacccaggcattaaaggaagcacgaggctaatgaacagggagagtccagacttatcagagagaggggaaatctgctgattacaggggaggcctctacggttaggaaggggacaagtctgcagattgcagataggagagcaaacgccaagcagccagcaggccttcatctagctctgtcataggaacctccacacctcctcatcctcacagaggtctgccccagccactgcctgggccactgctgctgcagcctggtctcttaagacacagaccaggtccacagccacagaggccacagggacagctaggacacagcattcagacttccccagctgccgcttctgtgctgagcctttcaggaagtagggaggggccttaccaaggaaagccctggatgttaggggttct

SEQ ID NO: 6598 - DNA, 575 bp, Homo sapiens
  MAP TO AL137786.2; EXPRESSED IN LUNG, SIGNAL = 3.4; EXPRESSED IN PLACENTA, SIGNAL = 4.5; EXPRESSED IN ADULT LIVER, SIGNAL = 6.6; EXPRESSED IN HEART, SIGNAL = 5.7; EXPRESSED IN FETAL LIVER, SIGNAL =   6; EXPRESSED IN BRAIN, SIGNAL = 6.3; EXPRESSED IN HELA, SIGNAL = 6.1; EXPRESSED IN BONE MARROW, SIGNAL = 5.7
gactatcagctgggctcctggcggcctcaccagccatccgagagcccaagggtctggaccgtttcaggccggtctggcacgagtatctctccaagcgtgctgaaagtcgctccaacaattaagcttggtccttttgtctctcctccccttcctccctctctctctctgcttcctgcgagtgtcccactgcgcggggctctgcagccaccctccccatcaggccgtttcgcagtggcaccgcggcgccgtggagaggagctaattggatttgttgtcagctcctgaagctgccaggagctcacgtctgctctggttacagatgaagacatcacggtgacaggctcagagacagctcagctggcatcccaaggccactaatagagccatgttgatttaatgtccgagtggagaggtgcagacaagctgttcaagttttcccttccaaacaaagcagggatataccatccgtcatctgtggatcagtaaataagcatccgcgtgcctctaggagctcttaaccattgccacaaaagaatgacgaactattttaaacagggaaacgggactttgaaaca

SEQ ID NO: 6599 - DNA, 527 bp, Homo sapiens
  MAP TO AC016080.3; EXPRESSED IN BONE MARROW, SIGNAL = 2.9; EXPRESSED IN ADULT LIVER, SIGNAL = 2.5; EXPRESSED IN LUNG, SIGNAL = 2.3; EXPRESSED IN PLACENTA, SIGNAL = 2.8; EXPRESSED IN HELA, SIGNAL = 4.4; EXPRESSED IN HEART, SIGNAL = 2.6; EXPRESSED IN FETAL LIVER, SIGNAL =   2; EXPRESSED IN BRAIN, SIGNAL = 1.8
ctgcaactctagcctcctgctttctaggtgtgaacacctccctcagatgttatcatccctgagaaaatctgcagataaaaatgttattcattctcggtcacttgtttttatactaatgataaagctcattacctgttattttccctcagtttaaaggtgctttcacagttcaaagtaatattatttgacagatagaatgcataatggtaattggtgaattcaataaatatgcactgtgggctgtacattttgttgtttactggttaaaagaaagtaaataagaaacagcttgcctttaaaaatccacattttaatggtgggaaagtatataagctaatattataatattaccaagtgaaaaattctaattgcatgaattgcaatatttactgtaaataagtacctgttacatgaatcatgattaagcatctaaccctttaggagacatcaaggattcccccactccttgaagctcagacttgtaaggtatgtttacatctgtaaatggcccaagtgtaactccctga

SEQ ID NO: 6600 - DNA, 518 bp, Homo sapiens
  MAP TO AC019276.3; EXPRESSED IN PLACENTA, SIGNAL = 3.1; EXPRESSED IN FETAL LIVER, SIGNAL = 4.2; EXPRESSED IN LUNG, SIGNAL = 4.2; EXPRESSED IN BONE MARROW, SIGNAL = 4.6; EXPRESSED IN BRAIN, SIGNAL = 3.6; EXPRESSED IN HEART, SIGNAL = 3.4; EXPRESSED IN HELA, SIGNAL = 5.2; EXPRESSED IN ADULT LIVER, SIGNAL = 4.2
cgtctcttccagggtctcagcagcacactcttcatagcagctgcacggcccagggcagtggtgtgtggcccccaggtatggggccacagcgggcagggggtccaccccaccacttggggggagggaggcctgtccactatctcccctctggcaggcacaaggtggaacagctcagaacaaacagcctgctgctcctgtgaagccactggagtgggcactacagatgctccacagcatcaaagcctcccttcctcacaaaaaacatcccaaagggctgagagaaggcacccaggagacctcactgccaggaagtggaaaggcagcagcaaggctgggagctgctcaggcccagggaggcttacagaccccagggagagtgaccgtgggtggggagggtgctcagcaagctcctgaagccccacatggtgagccccgcatggtgaccccacatggtgaccccgcatggtgaccctgcatggtgagactcgcgtggtgaccctgcatggtgagactcgtgt

SEQ ID NO: 6601 - DNA, 514 bp, Homo sapiens
  MAP TO AL136419.2; EXPRESSED IN ADULT LIVER, SIGNAL = 7.8; EXPRESSED IN FETAL LIVER, SIGNAL = 9.6; EXPRESSED IN BRAIN, SIGNAL = 7.7; EXPRESSED IN LUNG, SIGNAL = 7.9; EXPRESSED IN HELA, SIGNAL = 8.1; EXPRESSED IN PLACENTA, SIGNAL = 7.1; EXPRESSED IN HEART, SIGNAL = 5.9; EXPRESSED IN BONE MARROW, SIGNAL = 8.2
agcaaaccacattgaacagcctactaaaatgatcatttaccatgatcaagaaggatttatccttgggatgtgagaatggttcaacacatacaatcaacaaatgtgatacactatgttaatagaatgaaaactaaaaatcatatgatcacatcaataaatgcaaaaaaaatgcatttgatgaaacacaacatcctttcatggtaaaaactattaacaaattaggtatagagggaatgtgcctcaacataccaaaggccatatatgacaagcccacagctagtatcatactcaacagtgaaaagtcaaaagcttttctgctaagattaggaataagacaaagatgcccactctcatcatttccattcaacgtagtactgtaagtcctagccaagcaatgaagaaggaaggaaggaaggaaggaaggaaggaaggaaggaaggaaggagatagaaaggaagaaagaaagaaaaggaagaggaggaggaggaaagggaggaggaggaggaaatgaagg

SEQ ID NO: 6602 - DNA, 534 bp, Homo sapiens
  MAP TO AC011599.8; EXPRESSED IN LUNG, SIGNAL = 7.1; EXPRESSED IN ADULT LIVER, SIGNAL = 7.3; EXPRESSED IN HEART, SIGNAL = 6.3; EXPRESSED IN BRAIN, SIGNAL = 6.2; EXPRESSED IN HELA, SIGNAL = 8.4; EXPRESSED IN BONE MARROW, SIGNAL =   7; EXPRESSED IN FETAL LIVER, SIGNAL = 6.3; EXPRESSED IN PLACENTA, SIGNAL = 6.2
atatccagccatttgcaaccacatggatggaactggaggtcatgatgttaagtgaaataagccaggtacagaaaaacaaaatatcacatgttctcacttatttgtgggatctaaaaatcaaaacaattaaacttatggacatagagactaggacagttatcagaattgggaagggtagtcgggggacagagggggaggtaggtatggttaatgaatacaaaaaatagaaggaatgagtaagtgaataagacttactatttgatagcacaatagggtgactatagccaataataactgatttgtacgtcttaaaaataattgaaagagtataattggattatttgtaactcgaaggataaatgcttgaggggatggataccctcaatgtcgggggaaagaatgtagggacacaggactctcacccactgctggtaaggctacatactgccagggccactttggaaagcaagctcactaagccatgaattctccatgaagtgtgtatttcacattgcgtgcctgtgtcaaaacatc

SEQ ID NO: 6603 - DNA, 599 bp, Homo sapiens
  MAP TO AC013629.3; EXPRESSED IN PLACENTA, SIGNAL = 1.6; EXPRESSED IN FETAL LIVER, SIGNAL = 1.4; EXPRESSED IN HEART, SIGNAL = 2.3; EXPRESSED IN BONE MARROW, SIGNAL = 1.2; EXPRESSED IN ADULT LIVER, SIGNAL = 2.3; EXPRESSED IN BRAIN, SIGNAL = 1.7; EXPRESSED IN LUNG, SIGNAL = 1.6
ggggtgaaatgggaaacagtatggcaagttgcagccggatactggaggaagctacaaattcaggattcagtccagataataaacgtaactcaaacattatggacagggctagaatctaatagtaggtgtgcagtaattttcttctgaaacataatttttctttctctggtccctcagttctataaaagatgtttatggaaagactaacttgtttgtaaaacaatttgcattaacttgacctgtaactttctgtaaagttacagataatgacttatcatacaggctgtacttaaattggctttgctgtaacttctcaaaaggaatccaagattagacttttaaaagccactgaaggctaagaaaccaagccaagaatttgactcaccttcagactggtaatacctgtatgaattgggtgaatttctctcttcttgaggtctctaaaacttctcttgagtttcctcagcctgtcaaaaagtgacattatttacttaccacaaagctaggaattttatgagggaactgtgtatataaggttctaggcaagtctttccaagggtatgaggttggctttataaagtcaaccccaccttctcaaa

SEQ ID NO: 6604 - DNA, 514 bp, Homo sapiens
  MAP TO AC022714.2; EXPRESSED IN LUNG, SIGNAL = 2.4; EXPRESSED IN FETAL LIVER, SIGNAL = 2.6; EXPRESSED IN HEART, SIGNAL = 2.6; EXPRESSED IN PLACENTA, SIGNAL = 2.9; EXPRESSED IN ADULT LIVER, SIGNAL = 2.7; EXPRESSED IN BRAIN, SIGNAL = 2.6; EXPRESSED IN BONE MARROW, SIGNAL = 2.6
cccaccaaaacaaacaaaccactcatgaaaacccatctacaaaattaaaagcaagaaaggctagattctctggaatatacactgcatcctcattgagataaaagtaagcaatgcctatctcaatgtttgtgccatgaataatttgattaaattactacctgcatgtgttaacttggtaagaggtacaggcatttagtgacaagacaaatatcagtcaaaacacttccccctagtgaaaccataaatcaagaatgacttgagtctctggtgctttccaacagcttcaggcacagcattgaagtaattcatgacctgtttatctatgccttgatgctggtgtactataatccatataccccagccccctactgccaccctgttaacacaaagaccaaaaatgttctcaggatgactctgggagatatgaaaatcaatgatcctataactaactaagcttgctatacacagtagaggtcagttacatggtggaaaccggaacccatgaagcattgat

SEQ ID NO: 6605 - DNA, 573 bp, Homo sapiens
  MAP TO AC013764.3; EXPRESSED IN HEART, SIGNAL = 3.8; EXPRESSED IN BONE MARROW, SIGNAL = 3.8; EXPRESSED IN LUNG, SIGNAL = 3.9; EXPRESSED IN HELA, SIGNAL = 4.3; EXPRESSED IN PLACENTA, SIGNAL = 4.1; EXPRESSED IN ADULT LIVER, SIGNAL = 4.6; EXPRESSED IN FETAL LIVER, SIGNAL = 3.5; EXPRESSED IN BRAIN, SIGNAL =   5
caaaggacggctgatttttccatctaccagaatgtgttccttactgaaaggtcttctgttgttcagctcttcctgtatgcccagctttagatgaaggggggaaaaataaaaacaagaaagccagtccctataggacagagtggtctggtaggagatcatctcagctactctaatttgctcaccaattttacttacttgtttcattcgagtattgatttgattctttggagagtgtgtgtgtgtgtgtgtgtgtgtgtgtgtgtagggagggagcaggctttggatgtttgtatggactcaggcatattgagtccttttttaaaaaaattgtgataatatgataaaatatatatatataaaaaacataaaacttaccatccaatatggtttggctgtgtcgccacccaaatctcatcttgaattgtagctcccataattcccatgtgttgtaggaggtgacccggtgggagataattgagtcatgggggtggttcccccatactgttctcatggtagtgaataagtctcatgagatttgatggttttataaggggaaaccccttttgcttggtt

SEQ ID NO: 6606 - DNA, 550 bp, Homo sapiens
  MAP TO AC013490.3; EXPRESSED IN PLACENTA, SIGNAL = 1.9; EXPRESSED IN FETAL LIVER, SIGNAL = 1.9; EXPRESSED IN BONE MARROW, SIGNAL = 1.9; EXPRESSED IN HEART, SIGNAL = 1.9; EXPRESSED IN ADULT LIVER, SIGNAL = 2.1; EXPRESSED IN LUNG, SIGNAL = 2.1; EXPRESSED IN HELA, SIGNAL = 2.6; EXPRESSED IN BRAIN, SIGNAL = 2.6
tttccatgtcaacccacaaccaataagattcctcaagaaagtggtaccactaattttactgggggttttctcaccgtaatggatttggaatttaataaacacctttatttattttcctaatttctgttttttgctaatgcatgatgatttgtattaggataccttccttcagaatttgaagtggactttagaaaatgttaagtagcagactcaacccacactctgttaatttttgtatttttcaatagaaaaaagaaaaggcttccgttatgatacagaacaacgcttatgcagtggctgttgccaattatgccccgaatctttcaaaagatccagttctctccaccatctccaagagtgcaaccacgccagaacccaacaagaagccagaaaacaagccagctgaagcaaagaaaactttcaacagtgttagcaaaattgacagaatgtccagaatagtttttccagttttgtttggtacctttaatttagtttactgggctacatatttaaacagagaacctgtattaggggtcagtccttgaattga

SEQ ID NO: 6607 - DNA, 582 bp, Homo sapiens
  MAP TO AC026414.2; EXPRESSED IN ADULT LIVER, SIGNAL = 1.6; EXPRESSED IN HEART, SIGNAL = 1.2; EXPRESSED IN BRAIN, SIGNAL = 1.4; EXPRESSED IN LUNG, SIGNAL = 1.5; EXPRESSED IN PLACENTA, SIGNAL = 1.1; EXPRESSED IN FETAL LIVER, SIGNAL = 1.3; EXPRESSED IN BONE MARROW, SIGNAL = 1.2
gaagcaggccttcatcagacaccaaatccgatggtgttttgatttaggacttctcggcctccagatacgtgaaaaatacatttctcctgcttataagccacccagtctatggtagtttgttatagcagttcatacagattgagataggtaattaataaaaatttgtctcttattcagaaccttcaactgttcattcaagataaagttaataatgacgaatgttgaaaactcagcactgggcaccagctggtgctgctgaaagaatacagaataaaattagtgtttctaatattggcaaaaactgccagctgcactcagctgttgctacaggaagaaattttcactgccagagtgaaaaagtgtgttaaggtgatactcacaagtagagaaacagacaaaaagcccacaagaatgccccaggaattaagaagtcccttcctcctcctccaagcttatagtctcctggtgccatctattttcagaccttaacccatttatgtcaggtgttccattactggaacactaagcttgtgggagtcatgtatatactactgctcaaggtcatcgccaaggtctgatttt

SEQ ID NO: 6608 - DNA, 568 bp, Homo sapiens
  MAP TO AC021000.3; EXPRESSED IN LUNG, SIGNAL = 1.5; EXPRESSED IN PLACENTA, SIGNAL = 1.4; EXPRESSED IN HEART, SIGNAL = 1.7; EXPRESSED IN BRAIN, SIGNAL = 5.2; EXPRESSED IN FETAL LIVER, SIGNAL = 1.8; EXPRESSED IN ADULT LIVER, SIGNAL = 1.8; EXPRESSED IN HELA, SIGNAL = 2.6; EXPRESSED IN BONE MARROW, SIGNAL = 1.8
gaacgtcctggtgtttgtccttgacattatacatttgaaaagctgaaaccactagatgaaatattagaaaccaaaactctgttcatgcttccagcatttgaaaacatttttccataaaaagtttaagcatgtgcattgagattaatctgcacctcctttgtgtaattcaaaaaccttttgtttctactagtattcattcttttaaagctgcataaaaagagataaaactacacttgcaattctttagaataatttctttttaagtaagcaagataaccaggtgctgagttgatgcctgcaccctgcctgctttaacttaagtggtggaagctctgccggaacagcctctgcactgcggttagtgttccggccacgcacgtagtaagcatcgtacctgtacgcagcgatttctatatccagagccatcttgacgttgaggaggtcctggtattcgcgcaaatgacgagccatttcccactttgtgccccgaagctcattttccagctgctggatggtgtcctgaaacagacacagagaatctccccagactcatccttgcaaacagcaa

SEQ ID NO: 6609 - DNA, 548 bp, Homo sapiens
  MAP TO AC007321.2; EXPRESSED IN PLACENTA, SIGNAL = 3.4; EXPRESSED IN FETAL LIVER, SIGNAL = 3.3; EXPRESSED IN BRAIN, SIGNAL = 3.7; EXPRESSED IN BONE MARROW, SIGNAL = 3.8; EXPRESSED IN LUNG, SIGNAL = 3.3; EXPRESSED IN ADULT LIVER, SIGNAL = 3.5; EXPRESSED IN HEART, SIGNAL = 3.8
gaatgaggaggcattcttctgaatgacgttttaaaatatttcctctagagtcatctgccatattaacaatggtttttgtctgagtagtcttttttttttttgattttataaacagacatgatttattgttctgttatgaatgcatgatgctctactccttcaacaagcccatcatacattttcaccatgtcatctatagccacttttcctgcagtatcgacatcatcttggtcatcaatactatcatgcttaccttgatttggaaccattttgactcttcacaatcagtcaatgagtgaagaactagagcctcattatcaatgttaaaaacactttcaatatccatttctagggcaataacaccaaaacagcaatgtttcattagcattatagacttgttctggcatcagattttcatcatgtttcggcaaactcatcagtgaatttctctactactttgtgatcagaagatgctttaacatcacaagtcttaaaaaatgtaatgctgtgtcttttcataaatgtctgcacccagcctgctgaatatt

SEQ ID NO: 6610 - DNA, 599 bp, Homo sapiens
  MAP TO AC016549.4; EXPRESSED IN LUNG, SIGNAL = 4.4; EXPRESSED IN HELA, SIGNAL = 5.2; EXPRESSED IN PLACENTA, SIGNAL =   4; EXPRESSED IN FETAL LIVER, SIGNAL = 3.4; EXPRESSED IN ADULT LIVER, SIGNAL = 4.6; EXPRESSED IN HEART, SIGNAL = 3.6; EXPRESSED IN BRAIN, SIGNAL = 3.8; EXPRESSED IN BONE MARROW, SIGNAL = 3.7
gaaatgactcagagcgagccttttggggacatgagcctctgggtctgtgtgcaaatcattaaacattaaaatagaagacagttttgtgatcacagacatggaatttaaatgttgtgctatgatcatgtttcttaagttgatttaatggatgtggataaagctgctgtgttggcattggatagaatggttaaggaattaactgtcactctggcaacccagtaattttattttctccttctgtatttcagggtttcgaaaaaacgatgaaatgaaagctatggatgttttaccaattttgaaggaaaaagttgcatacctttcaggtaaagtttaactttcaactctgctctatccaactgctctgacacaatttcagagtctgacgtaataaatgaactcacctgccacaacatataaaaacattggcatttctatgaattttgaatggctttattcttgtagcactgtttctgagaaattagtgcccaaagcattttcttccagttaggaggcacatgataagttagttagtgttggtgatgaaaatacatttgtttctgccattcaacaaaaattcagctgttctgccccaatcagtt

SEQ ID NO: 6611 - DNA, 592 bp, Homo sapiens
  MAP TO AL139008.3; EXPRESSED IN PLACENTA, SIGNAL = 2.3; EXPRESSED IN ADULT LIVER, SIGNAL = 2.4; EXPRESSED IN HEART, SIGNAL = 2.2; EXPRESSED IN FETAL LIVER, SIGNAL = 1.9; EXPRESSED IN BRAIN, SIGNAL = 2.3; EXPRESSED IN BONE MARROW, SIGNAL = 2.5; EXPRESSED IN LUNG, SIGNAL = 2.3
ttgatggccaagaaactgtgctgaggtcacttattgaaagtgggcaaagatttaggtgaagattttcccattgctttcccattgcttcgaattatattgtaattcaaagtcagctagggatcaaataagtaagagctatctgcaggctgaaaacaacagcatcaacaacaacagcaacaactataataataataataataataataataataataataatgataatggtaatagtagtagttgtaaactgaaagttaaagtctacacttcataaaattaataaaatacaaaacccctttagctaatataagattacaggacaaaaacatcaaattacaaataacagtctataagagaagatgaatcctactatatactgttttttatgttgcttagtccaaataacttcttttctacctgattattcatgttattttttactatatgccaataattataagtttaatcttattaacatttctgacttgagcgactgttaccactctagaacactcaggtttttaggaaaaaagaaaacagaaaacaaaaactattgcaccttttgaaattgtcaacggcatgtatatttgcc

SEQ ID NO: 6612 - DNA, 578 bp, Homo sapiens
  MAP TO AC019253.3; EXPRESSED IN LUNG, SIGNAL = 1.3; EXPRESSED IN ADULT LIVER, SIGNAL = 1.3; EXPRESSED IN BRAIN, SIGNAL = 1.5; EXPRESSED IN PLACENTA, SIGNAL = 1.1; EXPRESSED IN HEART, SIGNAL = 1.4; EXPRESSED IN FETAL LIVER, SIGNAL = 1.2; EXPRESSED IN BONE MARROW, SIGNAL = 1.2
tcgtttcctccctctcacagctgttgctaagagggaaaatcacctggcagagagtggcagcagcagctgtcagtgcagagaaaggctgtggcccagcagccagagctcctgcttcctgctaaaggcagcaatgagcttagatcaggtgagcagcaacactcaaaatcaggcttcccccagggcagctggacatctgcctagggaccttcagggccacctgcctcttcacaaacagccaaggtggagggaagagcagtagctacctgttgtcgcttctgctccatttctgatgagcctcaagtccatctcttatcctggtgttaagccccagatgccccaacactagagattctgtatgtctagtttctgacagtagatagtctggatggcatagactgaggagcctctgctccctctagcatttcctgatgcatgttcactcttgaggggaatggagatctagctgtcactatttacactatttgcctttctgacctttgctgacttgaatcatggagccactgaatgttcaatttgtgtcttagaaatcgctgactccaaccacctaaaaacgggaa

SEQ ID NO: 6613 - DNA, 590 bp, Homo sapiens
  MAP TO AC025324.2; EXPRESSED IN ADULT LIVER, SIGNAL = 1.2; EXPRESSED IN HEART, SIGNAL = 1.2; EXPRESSED IN FETAL LIVER, SIGNAL = 1.4; EXPRESSED IN LUNG, SIGNAL = 1.1; EXPRESSED IN PLACENTA, SIGNAL = 1.8; EXPRESSED IN BRAIN, SIGNAL = 1.2; EXPRESSED IN BONE MARROW, SIGNAL = 0.98
cagtccatattcacatgcggggcgtggtcagccattacccataaagggcttcctttcattgaaacaacaaagaggactttttaacattttaaacatgttatatcttaataaaaataatgaaattcctttcatgtgaagttcaaccttacgatgggatgactgtatcttctcagatattactgacgttgccccggaaagaagaaatttggcctggagaccccagcaccaactcctgcctgagtttccagcctgtggatttcagacttgtcagtcccacaaccaaccatgtgagccaattccttcaaataaatttctttaaaaaaatacatacatatgtttacgtgtgtgtgtgttcatatataacctatgggttctatttctctgcagagatcccactcaagtcagacagaagagaccaggcaaagagcagacgctcctcaatgtacttggaggggacctcacctgttacattgcaaagtacactcagggcccttggacttggctgcagccaatcaggactgcagaggagaggtggagaggagagtgtctggaggtggagggcaggtgtctggaaaggagaagtggaaggc

SEQ ID NO: 6614 - DNA, 533 bp, Homo sapiens
  MAP TO AL133334.14; EXPRESSED IN ADULT LIVER, SIGNAL = 1.6; EXPRESSED IN PLACENTA, SIGNAL = 1.6; EXPRESSED IN HEART, SIGNAL = 1.4; EXPRESSED IN FETAL LIVER, SIGNAL = 1.4; EXPRESSED IN BONE MARROW, SIGNAL = 1.3; EXPRESSED IN LUNG, SIGNAL = 1.5; EXPRESSED IN BRAIN, SIGNAL = 1.5
tatccccagtaaagacccccttctcctgcaaagtgtctatcattgtccccaaactggaaactttctcttctgaaattaattcaagatactgccttctgagctgggatggcaatgagcaaagcaggaaccatcctttcctctcttgtgagaaccacactttcccctgaaggagggaaaccctacctggcaactgtgggctgcctcatgcagcgtgtcctctgggccagtggtggagatacacaaacagctttctctggagaggccaaggacattgagtggtgagtgagcatgttatcctgcacatccaatctattctaaagaaagaggaggaccacaattggaaggctttattttcattgcaggaggatatttaattcttggggataaaataatgtattttcctcctgaatgtctctgctccctctatgtccccagccttcccaggattaggtcccactggccctgtggagattacctctcagaaatgacaggaggcatttaggtagctggagggagctgctgcatgaaaatca

SEQ ID NO: 6615 - DNA, 582 bp, Homo sapiens
  MAP TO AC021641.4; EXPRESSED IN PLACENTA, SIGNAL = 5.4; EXPRESSED IN BONE MARROW, SIGNAL = 7.3; EXPRESSED IN ADULT LIVER, SIGNAL =   5; EXPRESSED IN FETAL LIVER, SIGNAL = 5.6; EXPRESSED IN BRAIN, SIGNAL = 5.4; EXPRESSED IN LUNG, SIGNAL = 4.8; EXPRESSED IN HELA, SIGNAL = 3.9; EXPRESSED IN HEART, SIGNAL = 4.4
caaacttgtccccagctgactctgcagtcttcagagaatcccatccccacccctggatagaagattttctctaactctcattatgttttgtttaggtgcaatacaccgaggtttatttaagttatccaaattgacaatgacatgaaatttcacttttttcttctacatttatgttttgatctatctatccattcatctatagctgtctatatctctatataaaagctgcatgggggtgttatttattgtaaaaggctgcattagaatctgcttgctggattaccatcttctttatttagtcacttcattggcctttaactcagggtctttaccctgtaaggaaccagacacaagcgtggtagatctcccactctaattaattcattcacctccaaatatttattgagtgcctccccagggccaggtgaaagtgatgaagacacaccctgccctgaagcagatcacactgtagttgtagaggctgacactgtagtcttcattacaccaaataaacaagtaatacaccatgtttcctgcatttgatttcccaccaatccaataagcacagctccgtctaccttc

SEQ ID NO: 6616 - DNA, 543 bp, Homo sapiens
  MAP TO AC025747.3; EXPRESSED IN HELA, SIGNAL = 5.5; EXPRESSED IN LUNG, SIGNAL = 4.1; EXPRESSED IN PLACENTA, SIGNAL = 3.6; EXPRESSED IN ADULT LIVER, SIGNAL =   6; EXPRESSED IN FETAL LIVER, SIGNAL = 4.3; EXPRESSED IN BRAIN, SIGNAL =   4; EXPRESSED IN BONE MARROW, SIGNAL = 4.4; EXPRESSED IN HEART, SIGNAL = 3.1
tctctctttgggtccacaccacctttatgagctgtaacactcaccgctaatgtttgtggcttcactcctgaagtcagcgagaccacgaacccaccaggaggagcgagcaactcccgttgcgccacctttaagagctgtaacactcactgcaaaggtctgctgcttcactcctgaagtcagcaagaccaaggaagaaactctggacacatctgaacatctgaaggaacaaactccggacacaccatctttaagaacggtaacactcactgctagggtccacggcttcattcttgaagtcagcgagaccaagaacccaccggaaggaaccaattccggacacaatagtaggcatttggtaatattagcaagactgtaaatgcccagagacatgaaataagaggccataggtatttataggtcatttggtatggttgaagtatgtggtaatgagcattgatgctataatgaaaagcaggtatttgtaagacaagaagtttaaactttatcctgacacctgtggaaagccactggagggttttaaca

SEQ ID NO: 6617 - DNA, 558 bp, Homo sapiens
  MAP TO AL139250.2; EXPRESSED IN PLACENTA, SIGNAL = 2.9; EXPRESSED IN ADULT LIVER, SIGNAL = 1.1; EXPRESSED IN FETAL LIVER, SIGNAL = 2.8; EXPRESSED IN HELA, SIGNAL = 4.6; EXPRESSED IN BRAIN, SIGNAL = 2.5; EXPRESSED IN BONE MARROW, SIGNAL = 2.5; EXPRESSED IN LUNG, SIGNAL = 2.2; EXPRESSED IN HEART, SIGNAL =   3
cctcttctccagagaaccccagaccctcagccccacatcaggggtgtccctgtgatggggcaccgtggctcccacctggaagccagagaggggacagcagctggcatgacacatactgtgtgccatcaactcgcccatcagagcctcagcttccccacctacaacagggatgcccgcctcccagctgctgggcgtcctcgctgctgggccctcaccacttagcatgagagtgtgtttagtctgcaggcagcctgagaggtgggtttcctcacctcctttttagacacagggaagctgaggctcagatgggaagggacctacccaaagccccccaggaggatgaggcaggccgggaaagggaggtccatgtgcgtccctgcaacccagcaggtgtacagacggaagaatggcaggaaagagctggagctcacggaggggcactgccaagggaaacagtaggatttgggggcacacacaggggtgtctaccactccccaggcatcagggtggagccaaagggaggggcagcgttgctcctgctacacctcagggctgaac

SEQ ID NO: 6618 - DNA, 502 bp, Homo sapiens
  MAP TO AL121917.12; EXPRESSED IN ADULT LIVER, SIGNAL = 4.4; EXPRESSED IN HELA, SIGNAL = 4.9; EXPRESSED IN LUNG, SIGNAL = 5.6; EXPRESSED IN PLACENTA, SIGNAL = 2.8; EXPRESSED IN FETAL LIVER, SIGNAL = 6.4; EXPRESSED IN BRAIN, SIGNAL =   9; EXPRESSED IN BONE MARROW, SIGNAL = 5.4; EXPRESSED IN HEART, SIGNAL = 7.7
tttgcctgaagtgtggtttggatgctcctgcccatgtgcagggctgtcactcatgttcctatatggacactgtgctcaggtgggcggggctaaggccacacaagtcggggtgtagcttacgggagggaagtcaaagtcaggcacgttcatcacactcaggatgtagtccactctgaactggttctcggggttggccagctccacggggggcaccaggttgctcatggcggccacaatggtctgaaaatgatttagcaaagcggtcagggaacagcactggctgggagggcgctacaagacagacagcacaaggagccagcacgtacttcaatcgcctctttcaggttgtttttgatgtcctgcactttggttgccttctcactgcagtgggattgaaaagaaaagaaaatcatattgcaccatgtcagttaggagtactgctttcataaagacatcccgactaaaaagcatagtattctgttcttcagggagttgtgggttc

SEQ ID NO: 6619 - DNA, 570 bp, Homo sapiens
  MAP TO AC022429.2; EXPRESSED IN LUNG, SIGNAL = 1.7; EXPRESSED IN PLACENTA, SIGNAL = 1.6; EXPRESSED IN ADULT LIVER, SIGNAL = 1.8; EXPRESSED IN HEART, SIGNAL = 1.8; EXPRESSED IN FETAL LIVER, SIGNAL = 1.9; EXPRESSED IN BRAIN, SIGNAL = 1.7; EXPRESSED IN BONE MARROW, SIGNAL = 1.7
tgggcatgtgtgtgtctaccaaatctaattccagttttgttttcttccatctgtaaactctttgagcatgcttgtgtagacacagaaattgcctgaaagccatcagcaggcctaacagcagggcctctcatcgataacataatagctgaaattctcagtgcctttgtgttccatggcattccaaaggctccaagcacattatcttactgattctgactgtaactcaacaaaggaggctgataggatcatccccattcagctgatgaaaaacataaaccaaaaaagaaatcagcctgaagtgacccagctggcccaggaaaagctgatactaaaccccagcctcctggtggcccctttctgcaaatcaatggctcctgtttccagacagatggaacagagacaaaggctacagccatgggcctggaaatctggctgtgtgcttggagccagccgacctcagcttaagactgactctgattctggacatgagtaaggtgcttttccaagcaggccttgtgggcttggaaatacagccttggggtttgatttcccctggtggcttaatcagaa

SEQ ID NO: 6620 - DNA, 599 bp, Homo sapiens
  MAP TO AL121586.28; EXPRESSED IN ADULT LIVER, SIGNAL =  10; EXPRESSED IN HELA, SIGNAL =  15; EXPRESSED IN HEART, SIGNAL = 8.5; EXPRESSED IN FETAL LIVER, SIGNAL = 9.3; EXPRESSED IN BONE MARROW, SIGNAL =  11; EXPRESSED IN LUNG, SIGNAL = 8.6; EXPRESSED IN PLACENTA, SIGNAL = 9.3; EXPRESSED IN BRAIN, SIGNAL = 9.6
agacaggaggcctgacacagcccaagaaggatgaacccaaaaagctgccccccagaccgggcggccctgaacccaagccaggacaccctccccaaacaaggcaggctacagcccggactgtgaccccaaaaggacagcttcccggaggcaaggcacccccaaaagcaggatctgtccccagctccttcctgctgaagaaggccagggagcccgggcccccacgagagcccaaggagccgtttcgcccaccccccatcacaccccacgagtacatgctctcgctgtacaggacgctgtccgatgctgacagaaagggaggcaacagcagcgtgaagttggaggctggcctggccaacaccatcaccagctttattgacaaagggcaaggtgagggggcggggtggcaggggcacggctcagagggaggggcatctgcatgaatggaggggctttcaaagccctggcactgccctggtgggagacactgtgtgcatctggcccggggtgggtgtctggggacactgacacatatctcacacatagcagatcctaggctgcccacacatcagggctggagggcacctaggaagcaccaggtc

SEQ ID NO: 6621 - DNA, 529 bp, Homo sapiens
  MAP TO AC015873.2; EXPRESSED IN BONE MARROW, SIGNAL = 1.6; EXPRESSED IN PLACENTA, SIGNAL = 1.6; EXPRESSED IN ADULT LIVER, SIGNAL = 1.8; EXPRESSED IN HELA, SIGNAL = 2.4; EXPRESSED IN HEART, SIGNAL = 1.7; EXPRESSED IN LUNG, SIGNAL = 1.5; EXPRESSED IN FETAL LIVER, SIGNAL = 1.7; EXPRESSED IN BRAIN, SIGNAL = 1.6
agggctccttctccagtagcagccccagggttcctaagtaaacagtgagccagagattcctgcaggcccctcctcagaggttgaaggtggccaggaagctgtagagggagatttgggtggaatgtctgaaaaaagaaaagtaggaaacaactcatctcatttcctacagccaaatattcgaggccccctgttcttatgtggagactcagagctggagtctctgctgtctgaagtaggctaagaaaccatcatgctagactccaggccactttctgtctgacaggattcaggatgccctgtgtgccctagagggttcccaggctctggaacccaaaggtggtgagggatctgaaggagcagaggctgaggagggtccagggacagaaacagagacaggcctgcctgtctccacactgaacttctgcccagagatccagattgacacagcagacaaggagatagaacaaggagaagttaccacctctgttacagctttgctggaggggctggaaaagacctgctcctcacg

SEQ ID NO: 6622 - DNA, 594 bp, Homo sapiens
  MAP TO AC015525.3; EXPRESSED IN LUNG, SIGNAL = 1.7; EXPRESSED IN PLACENTA, SIGNAL = 1.4; EXPRESSED IN ADULT LIVER, SIGNAL = 1.5; EXPRESSED IN FETAL LIVER, SIGNAL = 1.2; EXPRESSED IN BONE MARROW, SIGNAL = 1.1; EXPRESSED IN HEART, SIGNAL = 1.3; EXPRESSED IN BRAIN, SIGNAL = 1.1
ttgcaatataggcctcctgctcactgtagctatctcttggctttaagccctcagataatgggccagtttcaacttagctctgaatcatctaagagaattctcttaccaacatctggtcaataaattccttcaagaccatggctacttttctggtcttactagaggcatgggtatatattaaagttgtagctcctcgattccaatcaacaacaactacgttcatgtcttcaacagagagcaaaccctttactaagtcatccatccaaacaggaggggagcctgttggcctgaatccatggacaatgaaggtggttttcttggtcacattcaagttcccaaaagctgaggagttgatggtttgtgcgcaggtcaggtttttccttgtgtagagcatcagcctcacatttagtcccgtaccaaccactgcactgtgaaagctcagcctggtgaatgaaggacatgtttcttctgcgtctgaaaataaaaattagatggcatcacgacaggtctttccttagctgggcatcaagcaagagtgctgttctatatttgtaggagttcttcttatgttcctgataggacctggctaagggc

SEQ ID NO: 6623 - DNA, 591 bp, Homo sapiens
  MAP TO AC012629.4; EXPRESSED IN PLACENTA, SIGNAL = 5.6; EXPRESSED IN ADULT LIVER, SIGNAL = 7.2; EXPRESSED IN HEART, SIGNAL = 4.7; EXPRESSED IN FETAL LIVER, SIGNAL = 7.3; EXPRESSED IN BRAIN, SIGNAL = 4.8; EXPRESSED IN LUNG, SIGNAL = 6.2; EXPRESSED IN HELA, SIGNAL =  11; EXPRESSED IN BONE MARROW, SIGNAL = 5.5
cctttctggtgctgttctccagttcacgtctgccagctggtgagggcagaggcagacctggtcagacccagcgcccctcctccctgagggagcatggcacagcctcacacttgaaagacggtgtttggtttcccatctaatcaacttaagggaagccggcatgtacccttcaaggccctgtcaccacctatttcctgatcagttggtataaactgagggtggcttttagagacccagacttggttggcagcgctgccatggaacaccccagcaagcacctcccagcctgcctttcggagcagcacccaggaggggatgccgcgctccagcaacaccaggtcaggcctgtgcagacccctgccctgccgctgcagaaatccagaagcatccttaatgcttctcagtcttcagccagagggagggctgttatttccagaggtgcgctttttatgtacttttagctagatgtggcatgcatctgtgagctttagatcattaaatccaaaatgtttgcctaaatgagtttatcagttgttaacttcaagaatattaaatgatttataataaagctcctgcatttctctccagctt

SEQ ID NO: 6624 - DNA, 508 bp, Homo sapiens
  MAP TO AL109614.27; EXPRESSED IN PLACENTA, SIGNAL = 5.6; EXPRESSED IN ADULT LIVER, SIGNAL = 4.8; EXPRESSED IN HEART, SIGNAL =   6; EXPRESSED IN FETAL LIVER, SIGNAL = 5.6; EXPRESSED IN BRAIN, SIGNAL = 5.1; EXPRESSED IN LUNG, SIGNAL = 5.8; EXPRESSED IN HELA, SIGNAL = 6.6; EXPRESSED IN BONE MARROW, SIGNAL = 5.3
ttatggagaccagtccagggctccagggggctcccaaatggaaatatggatccagatgttgacaggcttctggggcatttttaggcgaggggatggctgaggacaaaaaaatcaagcccaaggagcaccaacatttggagattagaaaagagaagaagaatcctctgagagcactgaaaagaaagagccgggaggtgtctcagcagaaagacagggtggtcagcagtgggtgtgtgcagagaggtcaggaggaccagggcaatccctgaactactccagtgtgcacctgcacaacctccatggtgcctctggaattgggtagcatggtggccctgctgatgagcaccccaaggggccattgggggacctctgagaatctctgccagagcagtttgggtgggagtcgattaaggaaagaagcagcaagatccaggacttttaatcttaaaagagagagaaatgctggcagatgaacattctgaggataaggagcctgagtaattgagcg

SEQ ID NO: 6625 - DNA, 593 bp, Homo sapiens
  MAP TO AC018530.4; EXPRESSED IN LUNG, SIGNAL = 1.3; EXPRESSED IN ADULT LIVER, SIGNAL = 1.2; EXPRESSED IN FETAL LIVER, SIGNAL = 1.1; EXPRESSED IN BRAIN, SIGNAL = 1.3; EXPRESSED IN HEART, SIGNAL = 1.2; EXPRESSED IN PLACENTA, SIGNAL = 1.3; EXPRESSED IN BONE MARROW, SIGNAL = 1.3
tctttaccagccctgtgacctagagcaagtcccttactggatgagtcttgggtttttgtttttgttttcttctttgtaataagggaaaattaattgcactgtttcctatggtaattgagagtactgttgccagcaggggtggggggctgtgttttcatgtggaagatgcctataaacaaacacttctaggtcctctccacctctcagataacttattggaacaaggagctatattcatagctcagcaccatccctttcctcctaggaatctttctgtcttcacagaacctttgcctgggtgtgccccctgccatgcaatgaaccaggcagtaaaggtcctggccgtgccagagagacctgaggacatccatgattgctgtgaccaagtgggcacatctgactaattccagaagaaacccactgcacattttatacagctctttcagtaataaagtcaacatttggctttctatccactcaactcatttgtgtaacttggttatacaaattcagaacttgagaagctccctaaaatcccaacaagttgtagatcaagtgattaatacaatgctcctggtgctatttggaggcat

SEQ ID NO: 6626 - DNA, 543 bp, Homo sapiens
  MAP TO AL137228.2; EXPRESSED IN LUNG, SIGNAL = 1.9; EXPRESSED IN ADULT LIVER, SIGNAL = 1.4; EXPRESSED IN BRAIN, SIGNAL = 1.1; EXPRESSED IN BONE MARROW, SIGNAL = 1.3; EXPRESSED IN PLACENTA, SIGNAL = 1.8; EXPRESSED IN HEART, SIGNAL = 1.5; EXPRESSED IN FETAL LIVER, SIGNAL = 1.3
ttacctcccatgcaacttcctcttaattcattttattagacaaatgcattcaaactgtggagaagaagaagtaacagagattgttgatagtgaaaactcagagaaccaaagtcaatttgcagctaattttataaataacacaagaaaggcacagtcaggattagcactcaggtctctgtgaatccaactgaagggctgcttcactatgtttccctgatagttaagaccacgtgtgaatttcgtatattgagtgtttagagtttcaaaatgcaggccatagaaattagagccaagagatatcttgaccaccactgttctaatattgacctcaccagtgttttagatggaatggatagggactacatttgacttccatcagcagaaaataaaaattctgacattcttggcaaatgaacctgtgtaggtctcttaggtgactaggagtgatgaaaagttagaggcagttggattccccataatgataaggataattggattgggacacaggtctaggctctgtctgggacacatgctcagctctga

SEQ ID NO: 6627 - DNA, 543 bp, Homo sapiens
  MAP TO AL157381.7; EXPRESSED IN LUNG, SIGNAL = 1.9; EXPRESSED IN HEART, SIGNAL = 1.8; EXPRESSED IN FETAL LIVER, SIGNAL = 1.7; EXPRESSED IN BRAIN, SIGNAL = 1.8; EXPRESSED IN PLACENTA, SIGNAL = 2.7; EXPRESSED IN ADULT LIVER, SIGNAL = 2.4; EXPRESSED IN BONE MARROW, SIGNAL = 2.4
cttagccttcagcaagcacctcagcaggttgtgttttttttccctggtaacatgacccaaatcttcattcctgaggtatctgggccatttgtaatcctgcctggattgcactgttgtagttctcattgaccttaatgacagggcatggtaataccaagagacacctaatggatctcctgaattccatgcatactcttccttacctccattgtggagtagtagactgatttcatcctgatagtctgggtcaatcaccctagccaacactgtaactgccttcttagcctgttgacttaaaggtaggaggagcccaaagtgtccaggtggcaatattaacttccagttcaatgggattgttgtgtctcctggtggcagcattcctccagctggaactaagacctctaggccaggagaatgtaatgttgtgggaacggaaagcaaaaattttgctagtggatcactaggggtgatggtgagtgatgccacttctacttccaccccttgattccaggacttatgaatcctggcaatgggaaaaacagt

SEQ ID NO: 6628 - DNA, 580 bp, Homo sapiens
  MAP TO AC011111.3; EXPRESSED IN LUNG, SIGNAL = 1.2; EXPRESSED IN PLACENTA, SIGNAL = 1.1; EXPRESSED IN HEART, SIGNAL = 1.3; EXPRESSED IN FETAL LIVER, SIGNAL = 1.2; EXPRESSED IN BRAIN, SIGNAL = 1.2; EXPRESSED IN BONE MARROW, SIGNAL = 1.3; EXPRESSED IN ADULT LIVER, SIGNAL = 1.2
ttgagacctgtgcatgcttcacactgcaacttaattatcattgccttggtggagcctctcctgactcctcagtctagatgagattcctttgtttcacaccaccaaagaatcttgcttctttcctacagtacactctttttcaataattcgccccttctctgggcaagggcatagactccccagcttcaggcaactcctctgtcttctttataaactcctgtacaatttccccaatgctaatacctaatatataattttataattagcacttcccagttaccagcttcaactggtctgcaacaccctctggaactttgatgtgctagaacctttaatactttccccttccccctcagcagagttggctgagaaggagggtgccgaagaaggggttgaagaaggtgctgaagaaggaggtgagttattgaaaaagagtcttctgtaggcaagaagcaagattataattgcttataattgtatgtccagtagtgtgattatttgtcaaacatctgtttcctcactagactataaattttatttattatagcaggtagcaaagtgcttgacacacagttggcat

SEQ ID NO: 6629 - DNA, 556 bp, Homo sapiens
  MAP TO AL161777.1; EXPRESSED IN ADULT LIVER, SIGNAL = 1.3; EXPRESSED IN PLACENTA, SIGNAL = 1.1; EXPRESSED IN HEART, SIGNAL = 1.2; EXPRESSED IN FETAL LIVER, SIGNAL = 1.3; EXPRESSED IN BRAIN, SIGNAL = 1.2; EXPRESSED IN LUNG, SIGNAL = 1.3; EXPRESSED IN BONE MARROW, SIGNAL = 1.5
ctggatatcccagtgcatccatttctgcagcaaaacttggtttggtattaaatacttgctggagtaatgtgtcctctccaaaaacataaagacataaagtacctatcttgtctccaaatctgttcttataagtgagttgctattttggtggtgcatatttatatatatttaaaaaataatttaactaaccctttccaggaaacaaggtcccactctttctggagcatgagcacaattttccaggctgctcaagaaaatgctgtgaaaatttcagagaaaaaaaattgcatgattttatgtgaaatataataaactggtaaagagagcactttaaatagttttataaaaaataaatattcaattcagcaattacatactcgttatggaattcatatatttctgccatgtttccaaagagaatgtcctttttatttctcaggagaggtggcataagatcaaacatctctggattatccatctccgctctataaccctacccaaaataaatacattcatgcattttaaaataattacatgcacatttggttgggctact

SEQ ID NO: 6630 - DNA, 519 bp, Homo sapiens
  MAP TO AL158206.3; EXPRESSED IN LUNG, SIGNAL = 2.6; EXPRESSED IN PLACENTA, SIGNAL = 3.1; EXPRESSED IN HEART, SIGNAL = 3.7; EXPRESSED IN FETAL LIVER, SIGNAL = 3.2; EXPRESSED IN BONE MARROW, SIGNAL = 2.9; EXPRESSED IN ADULT LIVER, SIGNAL = 2.6; EXPRESSED IN HELA, SIGNAL = 2.4; EXPRESSED IN BRAIN, SIGNAL = 3.1
gcagcttccctgactcaatcttagaaagcaccatataaaggctacactctagccctctagagctcttttttgagattatctgtttaattttcatgtgaacattcctgatgccttgggtctgaatatcctaaaagcataaactctattagcaatgactgtggcttattcatctttatcatctcagcactttgcatagcacagtatagaaatgcattaaaaggaggtcgcattgaaatttttgtgatttttatgattttgtaacttcaaacactgagatgtttattcctgtcctgacatttaggttggagagacaattggcatcagtgaagagattatgggcctgaccatcttggctgctgggacctccatccctgatcttatcaccagtgtcatagtggcccggaaggggttaggggacatggctgtgtccagctctgttggaagcaacatttttgacatcactgtagggtgagtagaggtagttctacaaaggtgtgcaccagctccaccagtgtcttt

SEQ ID NO: 6631 - DNA, 547 bp, Homo sapiens
  MAP TO AC011472.3; EXPRESSED IN PLACENTA, SIGNAL = 1.8; EXPRESSED IN FETAL LIVER, SIGNAL = 1.6; EXPRESSED IN BONE MARROW, SIGNAL = 1.4; EXPRESSED IN LUNG, SIGNAL = 1.7; EXPRESSED IN ADULT LIVER, SIGNAL = 1.9; EXPRESSED IN HEART, SIGNAL = 1.4; EXPRESSED IN BRAIN, SIGNAL = 1.3
ccccatccataggtcacaagccccacccacatccctcaggccccagcttctacctgcagctacagggctcaaacctaccttcagcccacctccattgctaataaagccccgcccctcctgtcaagcctcctccacccacagcccttcaagccccacccacagtccttcaagccccacccacagcccttcaagccccacccacagcccttcaagtcctacccacagcccttcaaatcccacccacagccctctcaccccacccccaggtgaagagtatggcgctgcacctgctgcttggccagcgactagacacaccccgcaagctgcgcttccccggacgcttcctggacgacatcactgccttggtgggctctgtgggcctggaggtcatcacccgtgtccacaaggtgagagatgcagggtctcaatgtgggaagaaacctgagggaggacatagagccagccaggtgggggcgccaatcctgcccagtgtctcctggccgtaagaccaggaatccactttgctgggtggatccgttcattcatt

SEQ ID NO: 6632 - DNA, 573 bp, Homo sapiens
  MAP TO AL118525.17; EXPRESSED IN HELA, SIGNAL = 2.3; EXPRESSED IN PLACENTA, SIGNAL = 2.5; EXPRESSED IN ADULT LIVER, SIGNAL = 2.4; EXPRESSED IN FETAL LIVER, SIGNAL = 2.2; EXPRESSED IN BONE MARROW, SIGNAL = 2.2; EXPRESSED IN LUNG, SIGNAL = 2.3; EXPRESSED IN HEART, SIGNAL = 2.6; EXPRESSED IN BRAIN, SIGNAL = 2.5
acagaccccatatgaccaggcgcccctgccatttacctctgggtctgtgtagatttctgggtctctctgggggctcaggaaggggaagaggaggaggcggtcaccacgtcgcaggttgaattctcgcccgtctgccatgggcatggccaggtccaccacaacctcgcgggtgatgaagggggcagctgtaagcctgaggctctcactcagcacgctatctgcatggggcaggtgcaaggaagagtcagcgggctatcccttcacctgctcatatgccaaccccagctcttattttacagaggaagatgaagaggctcagagagggtgcctgcctcgcccacacagtcacatagcaaggtgaaaaaggacacacgatgacatgtggtctctgtggtccctcagagacgtttgaacatgagggtatccaggtctgaccccaagagaagttgtgagggaaggtgggagctagggagatatcagaaggctggggagagagtagggccatcaatctctgttcctgtctgcccggcatatatttctcttctggaaacgggcccctgattttcctctagg

SEQ ID NO: 6633 - DNA, 565 bp, Homo sapiens
  MAP TO AC013818.3; EXPRESSED IN PLACENTA, SIGNAL = 2.3; EXPRESSED IN ADULT LIVER, SIGNAL =   3; EXPRESSED IN BRAIN, SIGNAL = 2.1; EXPRESSED IN BONE MARROW, SIGNAL = 1.8; EXPRESSED IN LUNG, SIGNAL =   2; EXPRESSED IN HELA, SIGNAL = 3.2; EXPRESSED IN HEART, SIGNAL =   2; EXPRESSED IN FETAL LIVER, SIGNAL = 1.4
cgcccttgatcatctctctcaagttcaaagtttcaaagatttttagagcagggacaaaattcctctagtctctttgctaaaatatagcaagaatgacctttgctctagtttccaataagttccccatctgcatctgagaccacctcagcctgggcttcattgtccatatcactatcagcattttggtcacaaccattcaacaagtctctaggaagttccaacctttcccacatcttcctgtcttcttctgaacccttcaaactgttccaacttctgcccattacccagttccaaagttgcttccacattttcaggtgtcattatagcagtgccccactcccaataccaattttctgtattagttcattcttacactgctgtaaacacatacctgagactggatcatttataaagaaagtaagtttaattgactcacaggaagagagagagtgtgtttggggggaagtgccacacactttgaaacaaccagatctcgtgagaactctgtcatgagacagcactagggagatggtgctaaacctttagaaaccaccctcagaatcca

SEQ ID NO: 6634 - DNA, 540 bp, Homo sapiens
  MAP TO AC009695.4; EXPRESSED IN LUNG, SIGNAL = 5.2; EXPRESSED IN PLACENTA, SIGNAL =   7; EXPRESSED IN ADULT LIVER, SIGNAL = 5.8; EXPRESSED IN HEART, SIGNAL = 4.7; EXPRESSED IN FETAL LIVER, SIGNAL = 4.8; EXPRESSED IN BRAIN, SIGNAL = 5.3; EXPRESSED IN BONE MARROW, SIGNAL =   5; EXPRESSED IN HELA, SIGNAL = 5.8
ctgggaaacagagaggcaagctgaaagagactgatcctgtttgatatggtttggctctgtgtccccactcgaatctcattttcgattgtaatctccagcttgtcaggggagaggcctagtgggaggtgattgaatcatgggggcagacttacctcttgctgttctcgtgacagtgagttctcacgagatctggctgtttgaaagtgtgtggcacttctccttcatgctctccctgtctcctgctccaccgtggtaaagacgtgcttgtttccttttcgcctctgccatgattctgagtttctttaggccttccaaccatgcttcctgtaatgcctgcagaactgtgagttatttaaatctctttttttcataaattacccagtcacaggtagttctttatagcactgtgaaaatggactataatacacttgttcaggtgggcaacttctgccctgggtcatgtagagagatggacttctgcttggagcttgtccaacatttgagtcctggggccacttctctctccaccctcctctttcc

SEQ ID NO: 6635 - DNA, 599 bp, Homo sapiens
  MAP TO AC024193.2; EXPRESSED IN HELA, SIGNAL = 2.3; EXPRESSED IN LUNG, SIGNAL = 1.8; EXPRESSED IN ADULT LIVER, SIGNAL = 2.1; EXPRESSED IN HEART, SIGNAL = 1.5; EXPRESSED IN BRAIN, SIGNAL = 1.8; EXPRESSED IN PLACENTA, SIGNAL = 1.5; EXPRESSED IN FETAL LIVER, SIGNAL = 1.6; EXPRESSED IN BONE MARROW, SIGNAL = 1.6
gcaatttgaggctttcttggcctcagactttttacctgtaaagtggggacagagactgtccctgcctttctcttacagttgtttaaggagtaaatgggttaattcacatttagagaacagcatctggctcagagttaaggctccctgtaagttagcaatgattgttctggtagctttctgagcttgaacgagttgcttaccttctctgaatctcagttctctcttctgaaaaaaaaaaaaaaagatttaaaaataacaccatctgtcgtgtctaccacacagggttgttgtgtggtattaattaatcagatgagatagtgttgatgagaacattggcgatctgtaagtgctctacaagtattaactgttagcatcatgccatcaaaaggtaattagttggtaaataaagacaaagagtcaagcatttttcccatctttcctatacaaactgtactactgggtaccgaaattgcagatgaggggatgtttctccttttagaagtattccagctcgtaaatgaggaagggatgataggattggaatctcaccattttgcaacccctaatggattaatggatccaagctgtgagcatccata

SEQ ID NO: 6636 - DNA, 584 bp, Homo sapiens
  MAP TO AL121895.18; EXPRESSED IN HELA, SIGNAL =   8; EXPRESSED IN LUNG, SIGNAL = 4.6; EXPRESSED IN FETAL LIVER, SIGNAL = 5.8; EXPRESSED IN BONE MARROW, SIGNAL = 5.3; EXPRESSED IN PLACENTA, SIGNAL =   5; EXPRESSED IN ADULT LIVER, SIGNAL = 5.6; EXPRESSED IN HEART, SIGNAL = 5.4; EXPRESSED IN BRAIN, SIGNAL = 5.2
ttacagcacagcacagtccctgcgtgcagcattttgttagcctatttcaagttaatggtaatagtagtcataatgagcttttattaagcactcgcgatgtggtaggcagtgtgctaactaccatgctgcatggatgatcttggtagccctaggagacagacgttatgaaaagtgggtgtggtgaaaaggtcaagaccattgggttttggagtctaacagattgggtttcactctctaatcaatccatcatgttcacagcttcatgactgtgagcaagccacttaacatctctgaccctcagtttcctcatttgtaaaatgaatgagcaggtaacagtacttgtgttgagtgcacagcctggtgcctggcacagggtaagctttccataaattatagcgattgttattactgtgatgatcattgccatttggctgacgaggaatcataggctgaaaagtttaaatgatttgctaaaaggtcacacagctaataaagggcagggcttgagactctgcaggagtacagagctcttccttggggtaccaagaggcatccatccattaagccaatgtttccaagcactt

SEQ ID NO: 6637 - DNA, 521 bp, Homo sapiens
  MAP TO AC022882.3; EXPRESSED IN ADULT LIVER, SIGNAL = 7.2; EXPRESSED IN HELA, SIGNAL = 8.5; EXPRESSED IN HEART, SIGNAL = 6.9; EXPRESSED IN BONE MARROW, SIGNAL = 6.2; EXPRESSED IN LUNG, SIGNAL = 5.5; EXPRESSED IN PLACENTA, SIGNAL = 6.2; EXPRESSED IN BRAIN, SIGNAL = 5.8; EXPRESSED IN FETAL LIVER, SIGNAL = 6.4
gtccccaacactgggactactatagtaaaatctagcacctggcagcccctcatggcccctgaatctgggctggtaactcctgacggaggtcagagcctcctgcagactgagtctcctggcctgccctggtgccaggcacgaacctataggcacggcaaaatgtacctgatttcttgccttactgatggctgactacattggtcttgggctctgggcaaatcaggccttagtggcagtagactttgagtatactccagtgctgcaccagcctcaacagtcaccaggattccagccccaagatgcactgaccacagcagtcttgggtttagggtaccacctagcactgcaacagctgccgtggtcacaggattaaggacaatgccacccaacctgcccaaaaattataagcaagcttacagtttaagagtgttcccagaaaagaatttcccagactgtgaagaccaaaataaataataaaatgcctcccatcaaaacaaagcccaggacccgatgtcttcact

SEQ ID NO: 6638 - DNA, 507 bp, Homo sapiens
  MAP TO AC015750.4; EXPRESSED IN BONE MARROW, SIGNAL = 2.1; EXPRESSED IN PLACENTA, SIGNAL =   1; EXPRESSED IN ADULT LIVER, SIGNAL = 0.96; EXPRESSED IN HEART, SIGNAL = 1.3; EXPRESSED IN BRAIN, SIGNAL = 1.1; EXPRESSED IN LUNG, SIGNAL =   1; EXPRESSED IN FETAL LIVER, SIGNAL = 2.7
ccaactgctggtaaccaaggaggtaaaatcactgaatgcaagtccaatccaactgatataatgtgatatataattactggacctttagggaaatgattaatctttcaagtttctaaccatttccctcacttctccaacagcatctggattatgagtgtgtctacgcattttagaacagtcagcagcctcatctgcagagaatcttccagtttccctagtcccagaagaggagctgagtcagctgctttttcaggtgagcactgaggcacaatctccccaaacctttgctggaggccaggtaagacagtgctgcccactccaacaagatatggtgaggatgtcccaggcaaactcattgccggtgttgctccagcatcaagactttttctcagtacatttaatggcatcaaaatatgcaccccactttttgccatgccctcatccctccccctgggttatttccaggggataattagactaccagtgtcgactcttcttgttacgggc

SEQ ID NO: 6639 - DNA, 577 bp, Homo sapiens
  MAP TO AL158175.6; EXPRESSED IN LUNG, SIGNAL =   6; EXPRESSED IN BONE MARROW, SIGNAL = 4.9; EXPRESSED IN BRAIN, SIGNAL = 5.2; EXPRESSED IN FETAL LIVER, SIGNAL =   5; EXPRESSED IN HEART, SIGNAL = 5.6; EXPRESSED IN HELA, SIGNAL =   6; EXPRESSED IN ADULT LIVER, SIGNAL = 5.9; EXPRESSED IN PLACENTA, SIGNAL = 5.6
atatctgctgtgggagggtgagccagaggtgaggcattgatatggagaaggatggcgacatatttctgatacctactgtgggcgcctatgagcaaaagtctttcctggatgtagttatgcagcaccacacactaacaatattcatcatcatcatcatagctaccactgaattgggggctttctctgtcccaggtaggggaatgcttggcagatttgacacctcaagttggtcgttttttaaccatgcaccttatgacacaattattttcagtaccaatcatgaaataaatcaagtaataatagtggttagaaaagaaacatgaacatggaacacttttaatgaactttgcatatttaatcatgccaacaaataataataacaaagagcaaaaaagcaaacaagaaaatagattaattcttttaaatagaattaatgtatattttggaaaaaatacagaagaatggattctgcaagtttcagagaatgatttatgcataaatgacaagattgaagtaatttaaattctggtttttcagctttataatcagtttgtaatcatttctcctggctccaaac

SEQ ID NO: 6640 - DNA, 567 bp, Homo sapiens
  MAP TO AC025747.3; EXPRESSED IN ADULT LIVER, SIGNAL = 3.9; EXPRESSED IN HELA, SIGNAL = 4.7; EXPRESSED IN BONE MARROW, SIGNAL = 2.8; EXPRESSED IN LUNG, SIGNAL = 3.4; EXPRESSED IN BRAIN, SIGNAL = 5.1; EXPRESSED IN PLACENTA, SIGNAL = 4.1; EXPRESSED IN HEART, SIGNAL =   2; EXPRESSED IN FETAL LIVER, SIGNAL = 3.2
gagaatccaggaaacccacctatttatctgtaaacttgattcaacctgttttaaaactgttgcttttaagtttttttccctaggaaatgaaatttatagatgaggggagactgaagcagcaaatatacatgtaatacatttatcctataggagaaggagatgccttgaatgcctagtgtggttgttaccaacctgtggtctctctgtcatgtttgctgtcttttaatgttattgaaactattataatctcagttttatggttaaaatgtttgtttcattttgactgaaagagaatagtgtctcctctcaaacttgttttcttctcttttatttgggttcaattcactgtttttagaagttactcaaattatgtaagactttcattgaaaaggaaacattgactttgtaaactaatttattttcttttgtctctcaccctttaattctagatacgaggaatgtctattgaccaggctttggctcagttggaattcaatgacaaaaaaggggccaaaataattaaagaggtaaacttacaagtttgagtgtggtagggaatggggaact

SEQ ID NO: 6641 - DNA, 577 bp, Homo sapiens
  MAP TO AC025746.2; EXPRESSED IN ADULT LIVER, SIGNAL = 1.2; EXPRESSED IN HEART, SIGNAL = 1.7; EXPRESSED IN PLACENTA, SIGNAL = 1.6; EXPRESSED IN FETAL LIVER, SIGNAL = 1.5; EXPRESSED IN BRAIN, SIGNAL = 1.4; EXPRESSED IN BONE MARROW, SIGNAL = 1.5; EXPRESSED IN LUNG, SIGNAL = 1.8
gtggacaaagggaagcattgtctgtagcaaatttcaaatcctagtgtgcagatgcactgtggaatctctgacttaacactgggatggttttcttactcatatcatcaggaatgctctgattctgctctccactgataagtagtggaggattaagcaccatattggggccttcagagtccatggttcctttggaattatgtgtgccgtttcctcattaagaaaacaaacacaaaaaatttagtaagcatctgccctttttcatgcccattctgcaattacacttggcaagtgctgctaaagaaaaatatattctcacatttgttaaatacatcaataacgacattattcaagggggatgactacatcgaggttttgtaggaggggaaagagattgggctcaactctgaataagacaagaaaaagtgagtggagcagggtggggccaagggatggaaaattactaagaagaaatatgaggggcaagggggatctggctaaaccaacttgataggattcttgctgaaggccagcagaccagggtgacctgggggatggtggaggctgagcaatgtcatca

SEQ ID NO: 6642 - DNA, 503 bp, Homo sapiens
  MAP TO AC018389.3; EXPRESSED IN HELA, SIGNAL = 4.8; EXPRESSED IN LUNG, SIGNAL = 3.2; EXPRESSED IN ADULT LIVER, SIGNAL = 3.4; EXPRESSED IN HEART, SIGNAL = 2.5; EXPRESSED IN BRAIN, SIGNAL = 4.4; EXPRESSED IN BONE MARROW, SIGNAL = 3.1; EXPRESSED IN PLACENTA, SIGNAL = 2.4; EXPRESSED IN FETAL LIVER, SIGNAL = 3.6
aaaattccctttaaattcaggagagaaaaaaaaatacagggcacttaccatcaacttttgtatttaatcttgtactggaggttttaaccaatacaatagaaggaagttgaagagtatagatgggatatgataaaacaaaatagtcattattcacagttgatatgatgtctacgtagtctttcgcagagaatctacacaaaaatacaagccaattaaagagctgaacaattttgacaaaaatgcaatatataaaactaaaacattagtacaatcagaatgtataattttaaagaaacataacttataatagcataaaacacatgaggtgttagttggacacagtggtatgtacctgtagtttcagctactcaggaggcagaggtggatcaatcgcttgagcccaggagttcaaggccagcctgggcaacatagtgagactccgtctatgagacaaaaaaaaagagataatctactaaagatgtgcaaagctgaatggggagaat

SEQ ID NO: 6643 - DNA, 500 bp, Homo sapiens
  MAP TO AP001441.1; EXPRESSED IN PLACENTA, SIGNAL =   2; EXPRESSED IN FETAL LIVER, SIGNAL = 1.7; EXPRESSED IN ADULT LIVER, SIGNAL = 0.95; EXPRESSED IN HELA, SIGNAL =   3; EXPRESSED IN BONE MARROW, SIGNAL = 1.8; EXPRESSED IN HEART, SIGNAL = 2.1; EXPRESSED IN BRAIN, SIGNAL = 1.9
ggaaagacaggctggaaatgacagtgacacacaggttactagacaaagggcttctgagaaatggcaaaggtaaccaattctaagaacttactaatcttaaggtgatttatagataaaagtcccatcctataaatgtctggattcttgagcccagagatattctgggtctgtctgtactggtattctgctgggcaggtaaaggggttatgaagagaagtactatcttacttgcctgtcaactaatactgatgacagagcaaaagcgtcatgcactttacagtcgtggtcatagccaaagattgcagatgtcctagacacagtatttgagacagagaatggaacatacatagccaagttactaatatacatgttgggtaagaagattcccaaatggaaggaaggtaaaaaagctctgttctagtacaaccatttgaggatagtatggagattcctcaaaaaactaaaaatagagctaccatacgatccagcaatcccactac

SEQ ID NO: 6644 - DNA, 558 bp, Homo sapiens
  MAP TO AC008773.3; EXPRESSED IN PLACENTA, SIGNAL =   3; EXPRESSED IN LUNG, SIGNAL = 2.7; EXPRESSED IN ADULT LIVER, SIGNAL =   4; EXPRESSED IN HELA, SIGNAL = 4.1; EXPRESSED IN HEART, SIGNAL = 2.6; EXPRESSED IN FETAL LIVER, SIGNAL = 2.7; EXPRESSED IN BRAIN, SIGNAL = 2.3; EXPRESSED IN BONE MARROW, SIGNAL = 2.4
gtttcttcgactcccttccccaaagctgtttgctttcacttgatgatgctttcacttgatttgaatgtatgccagaaatggaagtttctatttcataagtaagataagcatctgagattgtcaggcatgatgtagccacaagacactgatgtagttaaagcggagaaactagaaaagttgtattttttagctggttggactttgcaggaagattttctctaaaattattctgacaatgtttgagatacgccatcatgagcaagtcttgtcacctttctagagctgtagaccttcacttacagaattagagaattggactagaccatctccccccttttttgtggtattaaaataactcaactgtgaactgacatttccagattcccctgatgataatgaaacctgatgagaaagccgaagtaccaacaggagttataataggaagtataattgctggaatccttttgctgttagctctggttgcaattttatggaaggtaagaaaagctttatattttaaaatacagggctcctgaaggccagccttgaatttgctta

SEQ ID NO: 6645 - DNA, 522 bp, Homo sapiens
  MAP TO AC007009.2; EXPRESSED IN HELA, SIGNAL = 3.8; EXPRESSED IN LUNG, SIGNAL = 2.1; EXPRESSED IN ADULT LIVER, SIGNAL = 2.5; EXPRESSED IN FETAL LIVER, SIGNAL = 2.3; EXPRESSED IN BRAIN, SIGNAL = 2.3; EXPRESSED IN BONE MARROW, SIGNAL = 2.3; EXPRESSED IN PLACENTA, SIGNAL = 2.1; EXPRESSED IN HEART, SIGNAL = 3.7
aaaaaccccatttcaatccccaccttacctaccttgtagcgaggcctgtaagtctttcatattttggtctaaaagctgcgaaggaaggaaacctgagcctgtctgggccttggggtctggctctcccagggccatagtgggcactggctccttcacttggccgtctccaaacacagcggcccactctttgctgaactcgccctcttccaaggaggaagcattgaagatctcactcaacagcagcaggtcatctttgtcagcaccttcaggttccggggtccctgccactggtcccaggcaagctgattgaagtaacagagaacaaaacgtcaccacggagggctcaagccctcaggaatcaatgctgtgggggctgcgaagggggagactggttgatggctagatttaagaaaaatgtcatcaaaatataagttcatcctattattatagcctctcttaagagtttatagaattaaatttcgaatcccatgttcccttgtcccctgtcctccaaagcaagtt

SEQ ID NO: 6646 - DNA, 588 bp, Homo sapiens
  MAP TO AC009924.4; EXPRESSED IN ADULT LIVER, SIGNAL = 2.1; EXPRESSED IN HELA, SIGNAL = 2.2; EXPRESSED IN LUNG, SIGNAL = 1.9; EXPRESSED IN PLACENTA, SIGNAL = 1.7; EXPRESSED IN FETAL LIVER, SIGNAL = 1.8; EXPRESSED IN BONE MARROW, SIGNAL = 1.9; EXPRESSED IN HEART, SIGNAL = 1.6; EXPRESSED IN BRAIN, SIGNAL = 2.1
gaaaaagaccagatggcaggtctctaagacaaagatttgaagcaactgtgaactaaagaagaatgtaataatgtcatcaaaacaatgtatgaataaaataaaaatatcaataaatacatgaaaaacctaaaaagaaaacaaaaagaaattctggagctgaaaagtacaataactgaattgaaaattttactggagcaattcaaatgcaaaattgtatagaaagaagaaagaatcaacaaatttgaagatgggataattaaatttattatgtctaacgaataggaagaaaacgatctttaaaaagtgaacaggccttagcaatctgtgggacaacatcaaatgtgccaacttatgtgttgtggtagttacagaagaagagatggtgggggaggaaaggatattggaaaacaaaataatggctgaaaacttcccaaatctgatgaaagacataaatataaacatccaagaattttaaggaagtccaagtagataaactcaagaagactcataccaatacagcttgattataatcaagctttgaaaagaaaaagaaaatgaatcttgaaaccagcaagaaagaagtgtgct

SEQ ID NO: 6647 - DNA, 517 bp, Homo sapiens
  MAP TO AC009155.3; EXPRESSED IN ADULT LIVER, SIGNAL = 8.3; EXPRESSED IN HELA, SIGNAL =  11; EXPRESSED IN HEART, SIGNAL = 6.8; EXPRESSED IN FETAL LIVER, SIGNAL = 9.7; EXPRESSED IN BRAIN, SIGNAL = 7.7; EXPRESSED IN BONE MARROW, SIGNAL = 7.5; EXPRESSED IN LUNG, SIGNAL = 7.5; EXPRESSED IN PLACENTA, SIGNAL = 9.1
tttctcaagcagagttttccagtactttaataggagaaacttataaaatgaggatttgcatgtattttattagtgtgaaatgatgtaagagcaaaagcaataggaattattaactcacattttgcatctgctgcctcttcgtaagcatgagattttgtatgattggatcaaccctacttatctggacatggattaccaagttcaaattcaagaagagtttgaagaaagttctgaaattctcctgaaggagtttcttaaggtaagcttagcgtatgttgttctgaatattttgtttggcatgcaattttgcttcccaaatgggtgaataggcatcactggggagtttttgttttgttcctgattagaatgtttttgtcattcccttcttcaagtgaaacatagaaatgatgataacactaacattagtatcagcagtatgcttagtgggttaagaatcccttggatattccccagttctctagagtcttaaacacacacacacacacaagcttccacc

SEQ ID NO: 6648 - DNA, 544 bp, Homo sapiens
  MAP TO AL133174.9; EXPRESSED IN PLACENTA, SIGNAL = 1.9; EXPRESSED IN HEART, SIGNAL = 2.2; EXPRESSED IN FETAL LIVER, SIGNAL = 2.7; EXPRESSED IN BRAIN, SIGNAL = 2.2; EXPRESSED IN LUNG, SIGNAL = 2.2; EXPRESSED IN ADULT LIVER, SIGNAL =   2; EXPRESSED IN BONE MARROW, SIGNAL = 2.4
cagcgaccagccttctaaaccccccacccatctataagtaatgaaaacaccttctgtgttcagaaaagttctcaccttgactatgggttttgttttctttttgattctaggctttactcgttcaactgcaggcaggggcggtaacttcttcagctcctcaagaacagctatggcggcatttttctttgaaatcttcttgcttttcccttcaccttcccccacaaactccccaaccgaaaccttggtcacaaagttcttcatgtggggtgggccactctcccgggccacctgtttcagagggaaagactgagtgaaagcggacagacacttattaaaagctccaaggcacactggctggcacacttcacacagacacagggaaggggaaccaaggacaagacctactaaatgaaaggaagcggggatcatttcaaatgctttctcgcctttcttcttacttctcaaactggtttatgctcttgagtctggtgagtcccaaacagtcaggcatgaaatagggagacctttttactcccatgcccct

SEQ ID NO: 6649 - DNA, 569 bp, Homo sapiens
  MAP TO AL117336.16; EXPRESSED IN PLACENTA, SIGNAL = 1.7; EXPRESSED IN ADULT LIVER, SIGNAL = 1.7; EXPRESSED IN HEART, SIGNAL = 1.3; EXPRESSED IN FETAL LIVER, SIGNAL = 1.6; EXPRESSED IN BRAIN, SIGNAL = 1.3; EXPRESSED IN LUNG, SIGNAL = 1.5; EXPRESSED IN HELA, SIGNAL = 2.2; EXPRESSED IN BONE MARROW, SIGNAL = 1.6
agagcctctccttgctacccactctcccacaacctcagactacatctgtgtcttcactttggaagtggcatgttgacagtcaaggcctcaaatgagtgcatttccctgccctctttgtctggctttaacatggtttgaaacatgatgttaaactacaatattgatgccaaccagagaaggacagtgtgcaagttggcgatacacttcttagtgttctgttccctaagctcattttcataaatgggtttctttcttgattagtcatattcacatatgaatgtgtatttgctaaatctcaattcttggtgtgaaattcaaggacactttaaagcaggaattgataaggaagctatagcagggtttctccctcccagcactgttgacattagggggggctgccctatccattgcaggatgtttagcggcctcccacctctgtccaccagatgccatgccagctgcagcaacagcaccctccataacaacaacaaaaaaatgtttccagatgtggccaaatgaaatctcccctgagagggcaactcctctactctgcctgaaaatcagtgcct

SEQ ID NO: 6650 - DNA, 592 bp, Homo sapiens
  MAP TO AC021186.2; EXPRESSED IN PLACENTA, SIGNAL = 2.8; EXPRESSED IN ADULT LIVER, SIGNAL = 2.8; EXPRESSED IN HEART, SIGNAL = 2.4; EXPRESSED IN FETAL LIVER, SIGNAL = 2.4; EXPRESSED IN BRAIN, SIGNAL = 2.2; EXPRESSED IN BONE MARROW, SIGNAL = 2.5; EXPRESSED IN LUNG, SIGNAL = 2.9; EXPRESSED IN HELA, SIGNAL = 3.3
cagtcatccatcctgtgctgccgactgcggcgtattctccggaggatgcagctgcgaggctggcttctgcaacacagcaatcaatatcacacttctcaaacagagtctctaaagtgataggggactttggcagtggtatgcaggtgtggataaggcaagattcgactttcctcattaccaaacaactcagacttttctgcatacatgctttcctttagaagtcacactataaaaattatgctcacactcctactcctatgaaaaccaggaggaggacaatgatgaaggcagtgaagatgactaatgaaaattttctggaacattttaaaggtcatgtcacttttataatagttttttttttttttttttagcgcagtgtgataatggacaaattgagcataaaaacggaacaataaaaaccaagtaaaaataacctattaacaataaactattagaatagtattgatgaaaaaatgaaactatacattagctttttctttaaatagtacaaaatctatatattgtacaacacatcatccaagataaacacaattaaattgatgctattagtcccatttgatggatgagaaaa

SEQ ID NO: 6651 - DNA, 518 bp, Homo sapiens
  MAP TO AL138796.2; EXPRESSED IN HELA, SIGNAL = 6.3; EXPRESSED IN HEART, SIGNAL = 5.9; EXPRESSED IN BRAIN, SIGNAL = 3.4; EXPRESSED IN BONE MARROW, SIGNAL = 3.8; EXPRESSED IN PLACENTA, SIGNAL = 2.6; EXPRESSED IN ADULT LIVER, SIGNAL = 1.2; EXPRESSED IN FETAL LIVER, SIGNAL = 3.8
gcatatggtacaagggcagcaagtgttgaactgaaatacttagattatgcaactgactcaagggttcaacacaaactgtcctgctaaaaagttatgatcagggcaaagtcagcatttagggcaataaaatagttaatgatttacctggttatgtttccaagaagcctctttctgctgttcactctcgtgtgctgcagcctctacaaattgcacacattgtttggcatcagccagttggcgctctttctgtcgtaccaccctctggagcttctgtatttcaagttggctgcagaataaagcactctgaagatcaagcagagctacctgttgctgagctggagaagtaccctctgagctctgaaaagagagtagaaatcacaatcacaaggagggcaagcactgagctcccacaaagactaaaaataaaatcaagactgcaaccaaaatggcacatccccaactgaagtctctcctgtcctacgtgaccctcacatacgtgaagttgtccaagctggctt

SEQ ID NO: 6652 - DNA, 582 bp, Homo sapiens
  MAP TO AL121917.12; EXPRESSED IN ADULT LIVER, SIGNAL = 2.8; EXPRESSED IN LUNG, SIGNAL = 3.1; EXPRESSED IN BONE MARROW, SIGNAL = 3.4; EXPRESSED IN BRAIN, SIGNAL =   3; EXPRESSED IN FETAL LIVER, SIGNAL = 3.4; EXPRESSED IN HEART, SIGNAL = 2.7; EXPRESSED IN HELA, SIGNAL = 3.9; EXPRESSED IN PLACENTA, SIGNAL = 2.9
taggatgttagctgcaccccagcctctacccagtagacgctacccaccccagtcatgacaactaaaaatgtctccagacattgccaaatgctcccctggggggcaaaattgccccagttgagaaccactgagataaatggaatcatgtacctactgttcggtatgaacccgatgtctggaggaagaaaagagtaaggctttgtcttaggacttttgtgtcctttggttttttggcagcagagtccagggtcaaggtccactctgatatttacaagggaagaactttacgtaaatgaccgccctgagcctcagtttccacatctgcaaacagggacagtgacgggacaatgcctgtgccacaggtcgttgaaccgcgtcccagaaacgatgtgtgggaggggattcctgtggggcccatcgaaaccctgcctggtgggtcccactgtgcgcctggcttcctgttcctgtggtggggactgggcaggggagggcaccccaggctgagcgattctgggcaccatggctgagcagcagtggtggggctgacgaaggcaaaagtcgtgacgttctgtttgtgggctt

SEQ ID NO: 6653 - DNA, 516 bp, Homo sapiens
  MAP TO AC011111.3; EXPRESSED IN HELA, SIGNAL = 3.8; EXPRESSED IN HEART, SIGNAL = 3.4; EXPRESSED IN BRAIN, SIGNAL =   3; EXPRESSED IN BONE MARROW, SIGNAL = 3.6; EXPRESSED IN PLACENTA, SIGNAL = 3.1; EXPRESSED IN ADULT LIVER, SIGNAL =   3; EXPRESSED IN FETAL LIVER, SIGNAL = 3.6; EXPRESSED IN LUNG, SIGNAL = 3.5
tgggccaattattcttcagcttggacattcttctgaggccaggacaccctcggtctgggagctgtgtgattcaggtctctaatgtctttttcagggagggaggcagcacagtagttaaaaatttcccagctctcagtccctccagatcatcttccacatgtgaagagggggtgtcctgcactcatcacctggacagcagtctggcaaccgctggccaaagtggtttataacatctggattattgtttccagatgtggcattgaaatacttgattaaaagtttcacacacagcatcttgtaataactgacatatgcacagagagtttctatcatctggagccagggtggaagcagcagggacactcagaagatgagagagagcaaggacagtttgcaggatctaagcggcctgagaaaaccgtgaggctgagtttctactgggtcctcattaaagtcaagcaaatggagctgagcctggtggaagtcaagtagactggacagagcaaggcctcagac

SEQ ID NO: 6654 - DNA, 583 bp, Homo sapiens
  MAP TO AP001440.1; EXPRESSED IN LUNG, SIGNAL = 7.2; EXPRESSED IN PLACENTA, SIGNAL = 3.2; EXPRESSED IN FETAL LIVER, SIGNAL = 3.3; EXPRESSED IN BRAIN, SIGNAL =  10; EXPRESSED IN HEART, SIGNAL =   4; EXPRESSED IN HELA, SIGNAL = 3.9; EXPRESSED IN ADULT LIVER, SIGNAL = 7.1; EXPRESSED IN BONE MARROW, SIGNAL = 2.4
ggggaagtgtgagtacctgctgtgtagagatgaccttgtggaggtagctgccctgtgaccctttgaccttcaagatggaatggacaggggttgaacctctgaataacagtgctcaaggcatttctcctcattctttttgtatggcttccagttcccagtgccccacccttactgtctgtgctgtgacctgaagtgtgaactcggctgcagcgagacctacccgaggaggaacagcctgcagagcggtgatgtagttctccagggccaggcggcggcggtcattgagcatggcttccactctggccatgtgtgtctccaccagctgctgtctctcgttggctgcttcctgttccaaagattccactttctcctggaaatgctgccatcataaacacatatgtccatggggactgaataagtaggatgaagcagcaatttcaagtcttctaaaaaagacatcctattccattttcttctagtgctaaaaagtatcctaaagactgcatagtcattccaacattgactaattctacgttttatagcttacttcactttcttgcactctccaaccctcatcaaacct

SEQ ID NO: 6655 - DNA, 513 bp, Homo sapiens
  MAP TO AC015897.3; EXPRESSED IN LUNG, SIGNAL = 1.3; EXPRESSED IN ADULT LIVER, SIGNAL = 1.6; EXPRESSED IN HEART, SIGNAL = 1.6; EXPRESSED IN FETAL LIVER, SIGNAL = 1.3; EXPRESSED IN BRAIN, SIGNAL = 1.3; EXPRESSED IN PLACENTA, SIGNAL = 1.5; EXPRESSED IN BONE MARROW, SIGNAL = 1.1
tcattagtttcccattgctgctataacaaattaccacatactagtagcttaaaacaatacaaatctattctcttatagctctggaggtcagaagacagaaacgactcaaattaaggtggcattccttctgcaggatctaaaggagaatccagttatttttcccttcaatattctggaggctgcctacatgccttgggtcctgggccctttccattgccaaatgcagccatggctggtcaactatttctcacaatgatatctctctggttctggctcttctgcctccctcttccccatttagggacctttgtgattacatggggcccacccacattaatccagaataatttccttattttaggtcagatgatttacaatattaattccatctgcaacttttattcctccttttcatgtaaagtaacagatccacatgctctgaaggctagaatatggacatctttgagggccattcttctatgttctgcaaggtctctcccataagcctgatgc

SEQ ID NO: 6656 - DNA, 558 bp, Homo sapiens
  MAP TO AC015638.4; EXPRESSED IN PLACENTA, SIGNAL = 1.3; EXPRESSED IN ADULT LIVER, SIGNAL = 1.4; EXPRESSED IN HEART, SIGNAL = 1.2; EXPRESSED IN FETAL LIVER, SIGNAL = 1.2; EXPRESSED IN BRAIN, SIGNAL = 1.5; EXPRESSED IN LUNG, SIGNAL = 1.2; EXPRESSED IN BONE MARROW, SIGNAL = 1.2
aagtgctggaattgggagtgatgattactgaatgttggtggaattatagattctttttgttttcttttatttctaatttttctaaggttttgaaagtagaccttttcagttgaataacctttttcaactggaaaaatatcatttaaaacttggctattttattttaatttccaactgattacttccctttcccctctcctagactttaatagacaaaaaacatttgtttatttaaaattttattaccaaagggtttgcttgataaatgaatagaaagataagtatataccaacctgttaatattctccccatatttcacagtaccaaataaaacaactccagcaaaagcgtaacacagcagcaagagaaacatgcctactatgataaagaagctcttgtacatgctgacgaccactgtcaagaggagcatctttagcgttacctggggaccaggggtgggaagcggggagacagagagagagagagagagagacagagacagagagagagagagagagagaatattcaatctattaagctatggaagacctgggtagc

SEQ ID NO: 6657 - DNA, 548 bp, Homo sapiens
  MAP TO AC022860.3; EXPRESSED IN LUNG, SIGNAL = 3.7; EXPRESSED IN PLACENTA, SIGNAL = 3.6; EXPRESSED IN ADULT LIVER, SIGNAL = 4.7; EXPRESSED IN HEART, SIGNAL = 5.3; EXPRESSED IN FETAL LIVER, SIGNAL =   6; EXPRESSED IN BRAIN, SIGNAL = 6.4; EXPRESSED IN HELA, SIGNAL = 6.4; EXPRESSED IN BONE MARROW, SIGNAL = 5.1
tcagttttaaggtgggccagggttacccgcatgatccccccaaggtgaagtgtgagacaatggtctatcaccccaacattgaaatcgagggcaacgtctgcctcaacatcctcagagagaactggaagccagtccttacgataaactccataatttatggcctgcagtatctctacttggagcccaaccccgaggacccactgaacaagaaggccgcagaggtcctgcagaacaaccggcagctgttggagcagaacgtgcagccatccatgcgggatggctacataggctccacctacttcgagcgctgcctgaaatagggttggcgcatacccacccccgccacggccgcaagccctggcatcccctgcaaatatttattgggggccatcagtaggggtttggggggcggccggtgggggaatcccctgccttggccttgcctccccttcctgccacgtgcccctagttattttttattaacaccatgtgattaaggtcagcgctgcctcccccgacccactcagcgatgggaaatgaattggctg

SEQ ID NO: 6658 - DNA, 588 bp, Homo sapiens
  MAP TO AC023296.2; EXPRESSED IN LUNG, SIGNAL = 1.7; EXPRESSED IN PLACENTA, SIGNAL = 1.8; EXPRESSED IN ADULT LIVER, SIGNAL = 1.7; EXPRESSED IN FETAL LIVER, SIGNAL = 1.7; EXPRESSED IN BRAIN, SIGNAL = 1.5; EXPRESSED IN HEART, SIGNAL = 1.6; EXPRESSED IN BONE MARROW, SIGNAL = 1.4
aataatccccaagctgacccatcatttaacagttatgtaaactgaatgtatcacttaatctcccaaagcaccaacgaaggcctttcctgcatcctgtattggtaatgaccaaaaggatgagattacggatgtttgtaagcagtagagcagcaatcaactgtaagttgctgttaattttcatgtttacaattactaatagagatgtggtacatactgtcagacgtgagtgtctcggaccacctagctccctcccagtggaactgggctccttcagaggaccaagctccaggcagaagagcttgtccatatcaaagctgcctaaaggagagtgctgttccatagccaatttcagaaggatatttaggaatgcatggaaactcctagaaggacttgtgactctctacatgaagaagcatacatagtccaaggaaatgtcatcgtctactgaaaactgtaatgaggacacccaacgacagacacatatgcacacactcatatatataattgtgttcaataatatataatgcactaaatatattacataatacactagacagagtgagaaagagtgtgagaaaccaagcagca

SEQ ID NO: 6659 - DNA, 574 bp, Homo sapiens
  MAP TO AC025738.1; EXPRESSED IN LUNG, SIGNAL = 1.6; EXPRESSED IN PLACENTA, SIGNAL = 1.5; EXPRESSED IN FETAL LIVER, SIGNAL = 1.5; EXPRESSED IN BONE MARROW, SIGNAL = 1.5; EXPRESSED IN ADULT LIVER, SIGNAL = 1.7; EXPRESSED IN HEART, SIGNAL = 1.5; EXPRESSED IN BRAIN, SIGNAL = 1.8
tgctgggtgacgaacttattcattctgtgtgtattggaacttttggagctatgttaatgattttaggccatgagggtatcatttttctatgactgattaaatgcaaccctcatagtttgaaaaagtagagagatcatttatattttaggaaaaaaatgcacttatcaaggaagatctattcagttaaaaaacatatttaaaattccaaaaaatccaaaccacactggcaattaccaataaccttcaaatacctccactgtaatctcctttggggctaccggccacttgtgttcatatttttctttcacagtttgctccgtgttagcagttggatttgaattctcaacacgcactccatggcttggcttacccaccaaattttgaacagattttaccatattctttaaatcctctgggtaaggagttggatatcgttttaggtttatttcaacctagaagtttacaaaaagaaatttaacataaaaataacttcagcaagcatgttcacaaaactatcccattttatattcagtagtataatcaaatgcaatacagtgagtgttgagctggctga

SEQ ID NO: 6660 - DNA, 519 bp, Homo sapiens
  MAP TO AC015649.5; EXPRESSED IN PLACENTA, SIGNAL = 2.4; EXPRESSED IN ADULT LIVER, SIGNAL = 2.5; EXPRESSED IN HELA, SIGNAL = 3.1; EXPRESSED IN BRAIN, SIGNAL = 2.6; EXPRESSED IN BONE MARROW, SIGNAL = 4.9; EXPRESSED IN LUNG, SIGNAL = 2.6; EXPRESSED IN HEART, SIGNAL = 2.8; EXPRESSED IN FETAL LIVER, SIGNAL = 5.8
tctggatggaaaggatgctctctgttgggcacttgggaacacataactcgccctactttttaggttttggctgtcggactgtcctcggactgctgaggctgtgaactttgccaccctgctgtacaaagagctcactgcagtgccctacatggccaaattcgtcatctttgccaagatgaatgacccccgagaggggcgcctgcgctgctactgcatgacagatgataaagtggacaagaccctggagcagcatgagaacttcgtggaggtggcccggagcagggacatagaggtaacagggctgggccctgcaccgcctctgggacaaaccgtcctgccgttttctccagaacaccattaccaggtgcaggcaggcagtcctccctctgtagacgaggggctccacagctgtctgtctttgagacccctcttgagaagcatcttagagaagcttcaggaaaggagagagatgccaccatgcacatctcagaggaggctgcaggcttttggtccagtgat

SEQ ID NO: 6661 - DNA, 508 bp, Homo sapiens
  MAP TO AL157405.2; EXPRESSED IN LUNG, SIGNAL = 2.6; EXPRESSED IN ADULT LIVER, SIGNAL =   2; EXPRESSED IN HEART, SIGNAL = 2.8; EXPRESSED IN BRAIN, SIGNAL = 2.3; EXPRESSED IN PLACENTA, SIGNAL = 2.7; EXPRESSED IN FETAL LIVER, SIGNAL = 2.3; EXPRESSED IN BONE MARROW, SIGNAL = 2.3
tggtagtggtgatggtggtggaggtcacaaaggaataagaaaacaatctattttaaagaaaaacaaaccactgtgcctacaacacagcgcagcacgttgacatggcagtgatgacaatggtagtgatggtgcaaaaggtagtggatgtgatagtggtggtagcaatggagatgggggaggtggtgaaagtggcagcgacggtgggaataagtgaagatcaaagtggcagtccttgtgattgtgatggcgatggcgatactggtgaaggtgatgaagttggtgcagctggtggaggtggtggtggtgatggtggtaagagtgagcagaggcaacagtgttagtgtggggatggtggtgacgattacggggcagatgataacaataaagtgttaggcatttggcacagaactgaaagtaatggcaagatagacatggtgcccatggtgatgatgaaaacaggttggtgatgatgaaaacagaggtgtttagttcaagcaggtgaaaagcc

SEQ ID NO: 6662 - DNA, 582 bp, Homo sapiens
  MAP TO AL162261.1; EXPRESSED IN LUNG, SIGNAL = 3.3; EXPRESSED IN PLACENTA, SIGNAL =   7; EXPRESSED IN ADULT LIVER, SIGNAL = 4.6; EXPRESSED IN HEART, SIGNAL = 3.8; EXPRESSED IN FETAL LIVER, SIGNAL = 4.4; EXPRESSED IN BRAIN, SIGNAL = 6.2; EXPRESSED IN BONE MARROW, SIGNAL = 4.8; EXPRESSED IN HELA, SIGNAL = 4.4
ccttagaagggtagggcaggagcactagccccggttagatgacagctgggaccaggagctgctggtggagacacgagatggtctcctgctgtgaggggcttccccggactccaccaggcccttcctttcccagagcctccacgtgggtcagggagtcaaggacggcagccacctcctcagtgtggacacaggccccgcccccacgccctgcagccaggtgaactgacagacaccaggggtagatctggggctgctgataaaaaggaatgagcccccacggcctgtggcagaatcagggaccaccccaggcagagcctccagccttctaagggggagagttgagccctgggccctggggctctctaagctgagagttgctaggggcttcccaacaaactccctttctgtcccaggtgggggctgcctgaacccctgggccgtgggagcagccagactccgtgaagctttgcacaaaggaagggaaaaggggaagtctgcagtggacttgaaaggccctgagtgattaggacctggaccaggagtgggagagagacccagagaggaggtacagcctgctcaagg

SEQ ID NO: 6663 - DNA, 585 bp, Homo sapiens
  MAP TO AC024193.2; EXPRESSED IN BONE MARROW, SIGNAL = 2.6; EXPRESSED IN PLACENTA, SIGNAL =   4; EXPRESSED IN ADULT LIVER, SIGNAL = 3.9; EXPRESSED IN HELA, SIGNAL = 5.5; EXPRESSED IN HEART, SIGNAL = 2.1; EXPRESSED IN LUNG, SIGNAL = 4.4; EXPRESSED IN FETAL LIVER, SIGNAL = 2.6; EXPRESSED IN BRAIN, SIGNAL = 2.2
acatcttctgcatgatccccatgtgacttatttggccaagcttagccctggaagaaatcttactgggtccatctgagtctgtgctcccatcccattcctcagcctgcttccttgcacctgttgggggttctggcacacctggcctggggcaggtgccttcttcacagccatgccaagaagggaagggaggcaggccattcacagtctattttcaccttacacttctcctggatggtgtctgcctcagggatgttggcaaggaattctatgtaaactggatagaggcccacaatctgggacaaaaacccttcaaaggttggagaataggcataaaggaatgtagctgggggctgagaggaaggaggctgtgaaggcaagcaggaattagagtgaaagaagagcaccccgtccctcgcacctcattacagtatggtgtccaccctcattagagggcatcatgacaacaacactcctttgcagtgtatgtggaccctctttgggctggtagattatggagatatctataaggtggttgtaacatgtagactgactcaatcatgggctgcagcccgggtatacagatgt

SEQ ID NO: 6664 - DNA, 573 bp, Homo sapiens
  MAP TO AC015954.3; EXPRESSED IN PLACENTA, SIGNAL = 1.7; EXPRESSED IN ADULT LIVER, SIGNAL = 1.9; EXPRESSED IN FETAL LIVER, SIGNAL = 1.9; EXPRESSED IN BRAIN, SIGNAL = 2.2; EXPRESSED IN BONE MARROW, SIGNAL =   2; EXPRESSED IN LUNG, SIGNAL = 1.8; EXPRESSED IN HELA, SIGNAL = 2.5; EXPRESSED IN HEART, SIGNAL = 2.3
gaaatttcctgtccctgtgcttttggggagtttttaacttgctagatggagtcttatccagacagttccacctcacggtgtcactaaatgaaatgagaggagattctgtctggttttgaaatcatattttctttggccttttagaaaaaaaacaatctagcctgggtttaaatcggcatccatatgggctgtgctatggagcgaaaagagggctctatagcctgatgtcaatcaggaacagtaaaatatgagccctaggggttgggtgcgcggtggagccctggaagaaggtggggggaagaaaataccaggggagaaagtatcctaaagaaaagtgcttcttgcttgacattcaggcctcaactgcctgtccacagtaccttcatgatgggtaccttttcataataccctccctctcacctgccagggcagctacacacagatagccacacctccggacttcataggagatgagagagaaatacaagtcaattacaactacgttaaaacggctctgtccattgaacattgaagggcaattaagggatagagacaggatagggccattcagaa

SEQ ID NO: 6665 - DNA, 556 bp, Homo sapiens
  MAP TO AL121586.28; EXPRESSED IN HELA, SIGNAL = 3.8; EXPRESSED IN FETAL LIVER, SIGNAL = 2.3; EXPRESSED IN BONE MARROW, SIGNAL = 2.3; EXPRESSED IN LUNG, SIGNAL = 2.2; EXPRESSED IN PLACENTA, SIGNAL = 2.3; EXPRESSED IN ADULT LIVER, SIGNAL = 2.6; EXPRESSED IN HEART, SIGNAL = 2.1; EXPRESSED IN BRAIN, SIGNAL = 2.2
cattaagatgggggatgctggggacttctgtggccccagcctcttcttcccggtgccaggtgtcggggccaatctactgtctgccaggggcaccatcatcagggccagagatcatgattcgatacaggagtttgggcctggtggctgcctatgtcctttcattgtggctgatcacctccttcctacaccagcactccagccagaaggacctccgtaatatggccaagatacacccaggaatctgccaccatcccagcaacttttccagaaaatgcaactgctcatctgaggtccacacatgctctgcctgcctccacgtgcctggcgagtctgactggtttgacagacgcttcgacagtaccgttgaacccctacagaggccacaagatcccacgtccaatgatgctctgatattgtggctggtcagtgcgcaaacttggtctttgtccagtccctgacccaaccccaggtcctagccatctctccatcaaggccccaggctctaaccttcttccacaggtaggtggaacctgggtcaagcccctaaattcttccc

SEQ ID NO: 6666 - DNA, 508 bp, Homo sapiens
  MAP TO AC021880.2; EXPRESSED IN ADULT LIVER, SIGNAL = 2.6; EXPRESSED IN HELA, SIGNAL = 3.5; EXPRESSED IN HEART, SIGNAL = 2.7; EXPRESSED IN BRAIN, SIGNAL = 2.6; EXPRESSED IN BONE MARROW, SIGNAL =   3; EXPRESSED IN LUNG, SIGNAL = 2.7; EXPRESSED IN PLACENTA, SIGNAL = 2.5; EXPRESSED IN FETAL LIVER, SIGNAL = 2.9
tctccttgctccctctcttgccatgtgacgccgtgtgacgcacctgctcccccttcacctctcgccatggctaccagctccctgaggctctcgagccgatgctggtgccatgcttgtatggcctgcagaaccgtgagccataaaacctcttttccatgtacattactcagtcgcaggtattcctatttatagcaatgcaaaacggactaacgcaggcccactttgaaaatcaagaataattgtctcatctcagagtccgtaatcacatctgcaaagccctttttgccacgtcaggtgacatattcactggttctaggagtagggtatttggggaggagtagatgtatttgtgggggcaggtggcaaagatcaggaatctcaaggtctttttcctgcagaggtgagaactctgacagggaggcccctgagcgcagctgggctcttctgtctgtgtctctggggtccactggagcagaggaagctttgttggtgccggtctcattgtatt

SEQ ID NO: 6667 - DNA, 577 bp, Homo sapiens
  MAP TO AC021782.2; EXPRESSED IN BONE MARROW, SIGNAL =  11; EXPRESSED IN PLACENTA, SIGNAL = 8.4; EXPRESSED IN ADULT LIVER, SIGNAL =  12; EXPRESSED IN HEART, SIGNAL = 7.9; EXPRESSED IN BRAIN, SIGNAL = 9.7; EXPRESSED IN LUNG, SIGNAL =   9; EXPRESSED IN HELA, SIGNAL =  15; EXPRESSED IN FETAL LIVER, SIGNAL = 9.5
cttgatgttgatggctgctgaaggttggagtgtctgtagcaatctcttaaaacaagaaaacaatgaagttttgccacatcagttgactcttcccttcacaaaagattactcagcagtatgtgatgctgtttgatagcattttcccatagaacttctttcaaaattggagtcagtcctctcaaaccctgcagctgctttatcaattaagtttgtggaatattctgaatgctttgttgtcatttcaataatgttcacagcatcttcaccaggaggaaattccatctcaagaaaccgttttctttgttcataagaagcaactcctcatcctcaaaagttttattatgagattgtaacaattgctattgctatttccactatatctgcagtgatttcctccactgaaatctttaattcctgaaagtcatccatgaaggttgaaattagcttctcccaaactcctgttaatgttgatattttgacatccttccatgaatcacaaatgttcttaatggcattgagaatgttgaatcctttccagaaggtttttgattgattttgcccagatccatcagagaaa

SEQ ID NO: 6668 - DNA, 507 bp, Homo sapiens
  MAP TO AF241727.1; EXPRESSED IN FETAL LIVER, SIGNAL = 0.99; EXPRESSED IN PLACENTA, SIGNAL = 1.3; EXPRESSED IN ADULT LIVER, SIGNAL = 1.3; EXPRESSED IN HEART, SIGNAL = 1.3; EXPRESSED IN BONE MARROW, SIGNAL = 1.2; EXPRESSED IN LUNG, SIGNAL = 1.3; EXPRESSED IN BRAIN, SIGNAL = 1.2
agtgaaatggacccagcaactatagagccagcccctgggtgtttcatatcttcaactagaaaaacaatcgtaacgatgtggccaaagttccttaagtcccactacctaccttgacaaggtgctgtctctttagagagaaaggaattactttgatggtttcttcctttttgcccaatttggtgtttaataattacttctgctgaaggaaatcaaatattccatttttcatttttttccctgagggcaagtctgctttttcccctggcatgctctcaggattccctgctatcatcaaccccactaaggggaaagacaaccagggctccattcaaaatcatccaagggagctatggggcatgtgcaagggttcctctgctgccagctatcctaattcttgatggctttgcaggagaagtgactctctttggggaagaagaaaagaaggtcaggaatagtatcctctgtttggtggtagctagagtaacaccttgggaattagaagggcaa

SEQ ID NO: 6669 - DNA, 554 bp, Homo sapiens
  MAP TO AC006038.2; EXPRESSED IN ADULT LIVER, SIGNAL = 1.8; EXPRESSED IN HELA, SIGNAL = 2.2; EXPRESSED IN BONE MARROW, SIGNAL = 1.8; EXPRESSED IN LUNG, SIGNAL = 1.8; EXPRESSED IN BRAIN, SIGNAL = 1.7; EXPRESSED IN PLACENTA, SIGNAL = 1.5; EXPRESSED IN HEART, SIGNAL = 1.5; EXPRESSED IN FETAL LIVER, SIGNAL = 1.6
ttccatgcctggcttatttcacttaacataatgtctttcaggtttatccatgttgctgcaaattttttatggccaagtagggttttttgttttgttttgttttgttttgttttgagacagagtctactctgtcacccaggctggagtgcctaaaccgtatttttatatagatggcttaaagtttatgtcagactttggactaagttatgcagtagtagctaacaacttccaagtcttaatgccttacaactacaaaagtctatttcttgttcatgttacatgtcttttacaggttggccacaactctgtgccacatcctcttcattttagaatccaggatgaaggatatgcccttatctggtatgttgccattctgggtcagaggaaaaaatcatggaagcatgagactcttaaagctagtcatataacctagcctgaccttattgggatgggaaaatacagtcctcctataggaaggggcagtgattatttgggagcaataatacagttactatagggttataaccagaaataagatgcttgtcttggccatg

SEQ ID NO: 6670 - DNA, 540 bp, Homo sapiens
  MAP TO AC021804.3; EXPRESSED IN PLACENTA, SIGNAL = 1.8; EXPRESSED IN FETAL LIVER, SIGNAL = 1.7; EXPRESSED IN LUNG, SIGNAL = 2.1; EXPRESSED IN BRAIN, SIGNAL =   2; EXPRESSED IN BONE MARROW, SIGNAL = 1.9; EXPRESSED IN ADULT LIVER, SIGNAL =   2; EXPRESSED IN HEART, SIGNAL = 1.9
gctgcagactgttagaggggagagtgtctttccctttcctggcgttttctttcatgttgagaaaagcactaccagtgtaatactgctggctctccagcccaatctcatcacaggagtgaacacagtcacttctctatctgataaaattgggaagaacaaacgaggtattctcatgtcatcttctccctttttcctcttggtagcaaacctgattgccaggatgagtggtaggagctgccaaaaacctcacgggaccttccaccagccccagagagagagcctgcccttcatccagcactgccagtgggacaaagaggtgcatctggccctcccatctggggttctgtaaatccattttattttacatctccaatcctgaagtttatcaataagaatggtgatactgtagcccttgtcagttcttggctgtattcctcaatttgttcagagttcaggtctctcctgccatcccagatcccacttatctctgcctcctaccagcgtatattccctccatctccacccctcctccacaataaa

SEQ ID NO: 6671 - DNA, 542 bp, Homo sapiens
  MAP TO AC020919.3; EXPRESSED IN PLACENTA, SIGNAL = 1.1; EXPRESSED IN ADULT LIVER, SIGNAL = 1.3; EXPRESSED IN HEART, SIGNAL = 1.5; EXPRESSED IN FETAL LIVER, SIGNAL = 1.3; EXPRESSED IN BRAIN, SIGNAL = 1.5; EXPRESSED IN BONE MARROW, SIGNAL = 1.2; EXPRESSED IN LUNG, SIGNAL = 1.6
gtggaatcaatcaggcacagaaagacaaacatcacatgttctcacttatttgtaggagctaaaaattaaaacaattgaacccatggaaataaaaagtagttactgaaggctggaaagggtagtggatggggagtggggggagtggaaatggttaatgtatataaaaatatagtttgatagaatgaataagatctagtatttggtagctctacgggataactacagtcaacaatactttattgtatatttaaaaataactaaatgcttgagatgatggataccccatttaccctaatgtgggtattacacattgtatggctgtatcaaaatatctcatgtacactgtaaatatatacacctactatgtacccacaaaaattaaaaatgaaaatgaaaataatcaagaaaaagatgggagcaatagactggagactactagacaggggagagatggaggggagaaggactgaaaaacccactgggtactatgctcactacccaggtgacgggatcattcatatcccaaatctcaccatcatgca

SEQ ID NO: 6672 - DNA, 528 bp, Homo sapiens
  MAP TO AC008103.27; EXPRESSED IN ADULT LIVER, SIGNAL = 1.8; EXPRESSED IN HELA, SIGNAL = 2.4; EXPRESSED IN HEART, SIGNAL = 1.8; EXPRESSED IN BRAIN, SIGNAL = 1.9; EXPRESSED IN PLACENTA, SIGNAL = 1.7; EXPRESSED IN BONE MARROW, SIGNAL = 2.3; EXPRESSED IN LUNG, SIGNAL = 1.7; EXPRESSED IN FETAL LIVER, SIGNAL = 2.5
tggaggctgtcttcccatacctgggacatgacctccaaggaccagctgtcagtcatggtgatgggctggctggggttggcagggagcttgctctccttctcggagggccggagcagcgtggggccaaacaccgtgccaaggttgtgcagggacatcttattgactgcctccttctctgccatcctgtagaggaccgaagcagagggtgctgtttcaacgccaccaccaggagagaggcagaggggctgtgccgtgctagagtcctcagggagggagtgacctcgaccctggctgtgctgcaagctgactccagccttggtacttctgggtctcagtggcccaggacaaggggccagctctgggctgatggggaggtcttcatgatgtgcttgggagggaagggggggcggtccaaatgcactgctggccacggccaaagctctgagctctttgttaaggccacagtgcagagggaggagggtggcaaagaggagaggcaggggcgggggtggcagtggtgctagtcct

SEQ ID NO: 6673 - DNA, 501 bp, Homo sapiens
  MAP TO AL161668.1; EXPRESSED IN PLACENTA, SIGNAL = 1.2; EXPRESSED IN ADULT LIVER, SIGNAL = 1.3; EXPRESSED IN HEART, SIGNAL = 1.5; EXPRESSED IN FETAL LIVER, SIGNAL = 1.4; EXPRESSED IN BRAIN, SIGNAL = 1.1; EXPRESSED IN BONE MARROW, SIGNAL = 1.2; EXPRESSED IN LUNG, SIGNAL = 1.5
tcaggaaaaggtatgctggcctctggttctgaagccaccatacccttatctggcttgctatcttgtagcagcttcacggtttgtagctgcatgttcagaagctcttacggctccagccagagtagtcacacactcaaaaagggggtccagcggggccaccagattgtccaggtgctgctctgcctggatcagctgttgctccaactgcaatgggtgcttcttgcctgactcctcttggagaactgcagcttcatctttcccctgttgtggaagaaaaaaggggcaatactgcagcaaaattgttctgctccatcacctcagtctccaaagccagtaaagagaggagtgtcatttaaggtagagaatgctattgggattttacctcagagaatcacaattacttctagtctagttcctcacccagcacatgaagcaacatgtcatcgtgtcccacacatggtcattcggtctgctgaaacacctccaggaatgagcagctct

SEQ ID NO: 6674 - DNA, 549 bp, Homo sapiens
  MAP TO AC012571.3; EXPRESSED IN ADULT LIVER, SIGNAL =   3; EXPRESSED IN HEART, SIGNAL = 1.7; EXPRESSED IN FETAL LIVER, SIGNAL =   3; EXPRESSED IN BRAIN, SIGNAL = 3.9; EXPRESSED IN LUNG, SIGNAL = 2.3; EXPRESSED IN HELA, SIGNAL = 2.9; EXPRESSED IN PLACENTA, SIGNAL = 2.1; EXPRESSED IN BONE MARROW, SIGNAL = 2.5
agctgccactgccctaatacttttaaaggccctcaaaatcacaaactatattcaactcattctctacagttctcataacttccaaaatctgttttctttctcacacctgatgcatatactttctgctccccggctccttcagctatattcactctttgttgagtctcccacaattaccattgttcctggcctggacttcaatccagcctcccacattattccggataccacacctgacccccatgactatatctctctgatccacctgacattcacttcacttctccatatttccttctttcctgttcctcaccctgatcacacttggtttattgatggcagttccaccaggcctaattgccactcaccagcaaaggcaggctatgctatagtatcttccacatctatcattgaggctactgctctgcccccctccactacctgtcagcaagccgaactcattgccttaacttgagccctcactcttgcaaagggactatgcatcaatatttatactgactccaaatatgccttccgtatctttcacca

SEQ ID NO: 6675 - DNA, 541 bp, Homo sapiens
  MAP TO AL161788.2; EXPRESSED IN ADULT LIVER, SIGNAL = 3.6; EXPRESSED IN HELA, SIGNAL = 3.2; EXPRESSED IN HEART, SIGNAL =   3; EXPRESSED IN BRAIN, SIGNAL = 3.3; EXPRESSED IN LUNG, SIGNAL = 2.9; EXPRESSED IN PLACENTA, SIGNAL =   3; EXPRESSED IN FETAL LIVER, SIGNAL = 3.2; EXPRESSED IN BONE MARROW, SIGNAL = 3.4
acagaacacagatcctggggcaagggtatggcaatcataaacttggtttaaaagtcattttggtcctgccattccggctgccaccatcatggtgcggaagcttaaattccatgtgcagaacctgctgaagcaggtggacttcctgaattgggaggtcactgatcacaacctgcatgagctgtgcatacagtggcattaccagttgaagcagtgggaggacaacaggtgctacaatcagctgagccataccgtgtgtaagagagcatggcatgcctgtaagacctgcctgagcgtgacccattctgcatgtgtgtttcagctgcactgctagacaagctgtatgctctcagcctggtgcctacacgtggctcagtcaagctctgtcacttaattatggcctcattcttctgccaccaccacctgtctactatgctactcaagctgcacatcatgaagcaccttcaggctgctgtggcctttgtggagcaaggccatatgtgcatgggccctgacatggttacccaccctaccttccttgtca

SEQ ID NO: 6676 - DNA, 541 bp, Homo sapiens
  MAP TO AC020719.3; EXPRESSED IN LUNG, SIGNAL = 2.6; EXPRESSED IN PLACENTA, SIGNAL = 2.4; EXPRESSED IN HEART, SIGNAL = 2.2; EXPRESSED IN FETAL LIVER, SIGNAL = 3.1; EXPRESSED IN BONE MARROW, SIGNAL = 2.5; EXPRESSED IN ADULT LIVER, SIGNAL = 2.4; EXPRESSED IN HELA, SIGNAL = 2.6; EXPRESSED IN BRAIN, SIGNAL =   2
tcaggaaggatttggaggagtaacttttaaatgcttggctcaacatcttaaagacaagtttctgttaaggtgagaagacaacagtatagaatgaaaagcttacacagctggattctaaggctgactccccaattaactaattatgtgactttaaaccaatcacttactttctccaactctctccagggttctttgtttttaatgaaatgggctggtgggtgaattggactctttcaaggagctctcccaggacaaagacatggtcatgcatattcaccagaccatatccagcatctagcacagctcctcaaacataagaggattccaattcgtattttaagagaacaaaaaaaaccagaatatcaaataattggttacatccaaaaacctgtcaatccggaaaatttctcacattcgtctacctccttgacctggatcttttcaggtttatcacgttttcccccaagagagcctccagaagtgaagacggcgtataatgcaatatgaccactagatggcagcacgaacccacctcagaatt

SEQ ID NO: 6677 - DNA, 526 bp, Homo sapiens
  MAP TO AP001429.1; EXPRESSED IN HELA, SIGNAL = 6.8; EXPRESSED IN BONE MARROW, SIGNAL =   8; EXPRESSED IN LUNG, SIGNAL = 4.3; EXPRESSED IN HEART, SIGNAL = 7.5; EXPRESSED IN PLACENTA, SIGNAL = 6.2; EXPRESSED IN ADULT LIVER, SIGNAL = 2.6; EXPRESSED IN FETAL LIVER, SIGNAL = 7.2; EXPRESSED IN BRAIN, SIGNAL =   7
tcagcgttgtcagttccttgatgacagaattctacagtgtataaagcagtatgctgacaagattaaatccggcatacagaatacagccatgcttctcaaagaattgctttcttggaaagttttgagcacagaagactatacaacctgtttttctagcagaaattttctaaatgaagcagtggactatgttattcgccacttgattcaagaaaataacagagtaaagacaagaatatttctgcatgttttgagtgagcttaaagaagtggagcccaaattagccgcctggatccaaaaacttaatagctttggtatgtccctttatattccagagcaataaactttaatacgaaggggaagtgtaggtctctgagtcattttcattttcctgccatataatttataactttaaatgcaggactataaatttgtatggttaagaatacttttccagtcccagctacttgggaggcggaggcaggatgattgcttaatctcaggaatttgagaccaacctggcaatgtt

SEQ ID NO: 6678 - DNA, 501 bp, Homo sapiens
  MAP TO AL157773.3; EXPRESSED IN LUNG, SIGNAL = 4.1; EXPRESSED IN ADULT LIVER, SIGNAL = 4.4; EXPRESSED IN HEART, SIGNAL = 3.8; EXPRESSED IN FETAL LIVER, SIGNAL = 3.6; EXPRESSED IN BRAIN, SIGNAL = 3.2; EXPRESSED IN BONE MARROW, SIGNAL = 3.8; EXPRESSED IN PLACENTA, SIGNAL =   4; EXPRESSED IN HELA, SIGNAL = 6.4
agttggggattgttgctcagggatcagaacagtgaaactcaggttaatgagtaaagagtgagaatatgtgtttatatgtttcttaatcccatctactaggtgattacaaaactcattcaaagttgaacacagtagaggtatttcaagttgctttagagagagaattacacacacaaaaaaaatctttaggagccagacaaccactgtggacaccaataagagagctccaacattggtgaggtatagacccgtcaaagttgttggtaataacagcaaggtccatctggcaagattggtcacctgtggtggaagtggtggtgacagcagggatgcaactgcagcaatcaatgatgatgatctcactagggtggggaggtgttaaaggcatcttcacagcagcacagtgcccagaatgccaaagagcagcaggatggatccagcatcctctcctgataaaagagggctagaagacgggaggctccgggaagtctactgggtgag

SEQ ID NO: 6679 - DNA, 581 bp, Homo sapiens
  MAP TO AP001429.1; EXPRESSED IN HELA, SIGNAL = 8.4; EXPRESSED IN ADULT LIVER, SIGNAL = 7.4; EXPRESSED IN BONE MARROW, SIGNAL = 6.1; EXPRESSED IN LUNG, SIGNAL = 7.1; EXPRESSED IN PLACENTA, SIGNAL =  11; EXPRESSED IN HEART, SIGNAL = 6.4; EXPRESSED IN FETAL LIVER, SIGNAL = 5.9; EXPRESSED IN BRAIN, SIGNAL = 6.6
gaactctgctgggggtacagaaatttcttaagcaaaaatattgatccttagttattgtgattatttgtgtatttataacttttcacttagctcattaggtaatgttatttcctgaggtattaacattttacatttatttttcattggtagggacctaatctaatattttaagtaatgaatcagttttcaagcaaaacatttttccttacctgttttctttaacttaagcatatttttgagaaaaaattaaatttatctttttggaacagggtcattatcgttattgtgatgctctttctatgctgggggaatatgactgggccctgcaagcaaacataaaagctcaaaaactctgtaaaaatgaccctgagggaatcaaggatctaattcagcagcatgtaaagttacaaaaacaaatagaagacctacaaggtatttcacctaagattcttttggttacagtcttaattccctttcaaactttggagggtgggtttcttggattaacagaggaccacaaatcaatcctcagatgatttatccttattttatcatgttatcttggtcatggcacttgagtt

SEQ ID NO: 6680 - DNA, 581 bp, Homo sapiens
  MAP TO AC015861.5; EXPRESSED IN LUNG, SIGNAL = 7.2; EXPRESSED IN PLACENTA, SIGNAL = 6.9; EXPRESSED IN HELA, SIGNAL = 2.9; EXPRESSED IN FETAL LIVER, SIGNAL = 7.3; EXPRESSED IN BONE MARROW, SIGNAL = 7.8; EXPRESSED IN ADULT LIVER, SIGNAL = 5.6; EXPRESSED IN HEART, SIGNAL = 8.1; EXPRESSED IN BRAIN, SIGNAL = 7.2
ttgcattttcttaggtgccctttatcaggttagaagtagcctcctatgtctagattacttagaaattttaatcatatatgaatgtcaaattttctaaaatgctttgtctgcacctattaaggtgattgtttgactttttgttttttgttttttaataggatgaattaccctgggatgaattacactgggatggattacactgggatggattacactgggatgaattacactgggatgaattcatgggcaggaaaaaattctctgttggtcacaatgtattattatttttacatattatgggattagatttgctgaaattgtattttgcatccttgcattgatttatacacataagttgttttttataacctattacatagtattgtgtttttatttttattttatttgtcaagggtgtgtgtgtgtgtatgtgtttaatcaggctaacgctagattcataaaagttaagaaatattcagtacctctttgttgggctgtatgtagaattggtgttgtttctttcttaaatacttactatatattgacattaatattggctgggtgcggtggcttacacttgt

SEQ ID NO: 6681 - DNA, 552 bp, Homo sapiens
  MAP TO AL136442.10; EXPRESSED IN LUNG, SIGNAL = 1.5; EXPRESSED IN PLACENTA, SIGNAL = 1.3; EXPRESSED IN ADULT LIVER, SIGNAL = 1.8; EXPRESSED IN HEART, SIGNAL = 1.2; EXPRESSED IN FETAL LIVER, SIGNAL = 1.1; EXPRESSED IN BRAIN, SIGNAL = 1.2; EXPRESSED IN BONE MARROW, SIGNAL = 1.1
atctggtcagtcaaggccacatacacttgcctagtatttaatcacatttgatcagcaatcgatgcagcccctaacatgacataatacagtgctggaaatcactattgctgatgcagtaacattcatcaaagctgcaactgatgaattaaaaccagaaactgtagatgtctccctgaagaatgtttggagtaaagttatgaatgattttaaaggcttcttggggatcagcagagaagccaggaaaatcacacagcaagacaagttggtggagaaggatttgccaatatgcttgatgaagaagtagaagggcatactgatggccatcaagaagtgttaataatgaggatatggaagaattagagtcatctacagaggaagaggaagatgaagaagaaaatgaagcagaatcagtaacgtggccattaccaaaatctgctgaagtgtttcaaatggcacggacattaaatgtcaaaattatagaatatgatccttaatggggcacagtatcaaagtcacccatatgatcactgaagcactacaacctctgcagca

SEQ ID NO: 6682 - DNA, 517 bp, Homo sapiens
  MAP TO AL122008.9; EXPRESSED IN LUNG, SIGNAL = 3.3; EXPRESSED IN ADULT LIVER, SIGNAL = 3.7; EXPRESSED IN HELA, SIGNAL = 4.7; EXPRESSED IN BRAIN, SIGNAL = 2.8; EXPRESSED IN BONE MARROW, SIGNAL = 3.3; EXPRESSED IN PLACENTA, SIGNAL = 3.1; EXPRESSED IN HEART, SIGNAL = 3.2; EXPRESSED IN FETAL LIVER, SIGNAL = 3.3
cacagcctgggatgattctcccaaggtcaagacagtctttacatgtcattatgaagagccacatttctcagcactcaccacgtgctggtgtggtactaagcacatgtgcgtactctatctcacttccaccgcacagtcatcctgacaggtaagcataatgactgtgttccttttgcaaatggggaaactgaggctcagagagattgaacaacttgtcatttgtcacaggcagaatttgcacccaagtaggactccagatcctacctggcttactcactactctgccctcatcccaaccagaatgctgaagttctgtgtgcaccagctggggctcccatatgaagggctgcggatcctgcacagcagcttgggttccatgctgcatgccttcctaaaggcgggagtcagccaagggcatgccttcccagcctactgtgttcttatgtgagtgttatgggctaaattgtgtcccccccccatgctcaaattcatatgctgaagccctaacccccagtac

SEQ ID NO: 6683 - DNA, 600 bp, Homo sapiens
  MAP TO AC022459.3; EXPRESSED IN LUNG, SIGNAL = 1.6; EXPRESSED IN PLACENTA, SIGNAL = 1.4; EXPRESSED IN ADULT LIVER, SIGNAL = 1.7; EXPRESSED IN BRAIN, SIGNAL = 1.4; EXPRESSED IN HEART, SIGNAL = 1.3; EXPRESSED IN FETAL LIVER, SIGNAL = 1.3; EXPRESSED IN BONE MARROW, SIGNAL = 1.2
gcattcccaagttccagatgaagtctgctccacttcctgtcctgggttgggtggtctcttccctcctttctgactgtggccatcagcagcaggttggccttattcatttaatctcaaaatttggaatgcacattcagaagccttcaattatttggagtggaaggaatagactgtatgttttgctcttaagataccacttccctacttttttttccctcatacaataaatgcctttcctctgtcatttcactgccaggcacaatgcctcttctagtcatgtgtgtgtgcatgcacacacacacattattagctggctatacatgtagagggccagtagctggctatgcattcagatgttactgtttcctgtgctggctccccgactggattctaagcatttccaagtgtccaacataactttgtatccccttcccctagaacctacataacctaccgcaggcttgctcagtgggtggtagttgttatcaaggaggatggtgcacagtcaggctttcagagagggggagtcaggatggcacaagcattctgctgcaagtggcatgtgagtttctgttcccttctgcttttctgcctttccac

SEQ ID NO: 6684 - DNA, 536 bp, Homo sapiens
  MAP TO AL133377.4; EXPRESSED IN HELA, SIGNAL = 3.8; EXPRESSED IN HEART, SIGNAL = 2.7; EXPRESSED IN BONE MARROW, SIGNAL =   3; EXPRESSED IN BRAIN, SIGNAL = 2.8; EXPRESSED IN FETAL LIVER, SIGNAL = 3.2; EXPRESSED IN ADULT LIVER, SIGNAL = 1.8; EXPRESSED IN PLACENTA, SIGNAL = 2.3; EXPRESSED IN LUNG, SIGNAL = 1.9
ttgactccagcagtgacaggtatgtgttgttttaaatccactagccatgctcaaaaaaaaaatattcttcatgttttaattttatacaatggctagcaggcaccttagtaaccagccagaaatcaatttcaaccaccatcaacccctaaactacagtaccaggatggctggctaaagaaaggaaacggactggctgcagtctgacgcgtgcccagtacaaggtgtctggctgactttgtcctaaataaggctaacattagtgaactaagaacagcgtcacgtggtggccatgcctggccttcaggagcacccctccccgatgcgctggcaggagcgccccactttccggtccagcttcaccattttcatgatggcttcctcccggccacggcccatgtggtcgaatgtgcagtcgtgctgctcggggaggcgatgtaacatacagaacacataacctgcagcagcgggagaagcagaggaaagagtgtgttagggtggcctccaagtgcgcagagcctcacaattgcctttgtcca

SEQ ID NO: 6685 - DNA, 533 bp, Homo sapiens
  MAP TO AC010329.3; EXPRESSED IN HELA, SIGNAL = 3.8; EXPRESSED IN FETAL LIVER, SIGNAL = 2.7; EXPRESSED IN BONE MARROW, SIGNAL = 3.3; EXPRESSED IN LUNG, SIGNAL =   3; EXPRESSED IN PLACENTA, SIGNAL = 2.3; EXPRESSED IN ADULT LIVER, SIGNAL = 2.9; EXPRESSED IN HEART, SIGNAL = 3.2; EXPRESSED IN BRAIN, SIGNAL = 2.9
aaaatgttcccatgctctggcatggaccaggctcagctctgggaggaagccctgcctgaaaaggctgcagcttaggctgtcactcttttcttcactccgcccagcagctgatcacatcttctgtcactcagtgtctgagggggcgggaccttaagcattagccaatcagaggcgctgggctggaaaccgtccaatcaggcacgcagctggaatgaacaggacggcttccggatttggcggggtctttgtctctccctgcagctggagctccaggtcgtctgttcactgctctctgtcttcttctcctagaggcccagcctctgtggccctgtgtcctgcaggtattgggagatccacagctaagacgccaggaccccctggaagcctagaaatggtgagagtgccggtccagcatcccgagagaggtgaagtgtctgtggcgggactcaggcctcccctcagtcagctccacaatctgcaccccgaattctccttacccagctctgcctcagtcccattcagccataagatgg

SEQ ID NO: 6686 - DNA, 551 bp, Homo sapiens
  MAP TO AC016113.4; EXPRESSED IN PLACENTA, SIGNAL = 1.2; EXPRESSED IN ADULT LIVER, SIGNAL = 2.2; EXPRESSED IN FETAL LIVER, SIGNAL = 1.6; EXPRESSED IN BRAIN, SIGNAL = 1.7; EXPRESSED IN BONE MARROW, SIGNAL = 2.3; EXPRESSED IN LUNG, SIGNAL = 1.9; EXPRESSED IN HEART, SIGNAL = 1.2
cccaaatagactctggcagcagtgactctccaaaaatgccgaggcctagacctcctcactactgagaaaagaggactctgcaccttcttaggggaagaatgttgcttttacactaaccagtcagggatagtataagactccacccagcatttacaggaaaaggcttctgaaatcagacaatgcctttcaaactcttataccaacctctggagttgggcggcatggcttcacccctttctaggtcccatgacagccatcttgctattactcacctttggaccttgtatttttaaactccttgtcaaatttgtttcctccaggatcaaggccatcaagctacagatggccttacaaatggaactccaaatgagctcaactaacaacttctgctgaggacccctggatcgacccactggctctttgactggcctagaaagttcccctctggaggacactacactgcagagccccttcttcacccctatccagtaggaagtagctagagtggtcatcgcccaattcccaacagcagctggggtgtcctgtttaga

SEQ ID NO: 6687 - DNA, 528 bp, Homo sapiens
  MAP TO AL158138.1; EXPRESSED IN PLACENTA, SIGNAL = 2.5; EXPRESSED IN HELA, SIGNAL = 2.8; EXPRESSED IN FETAL LIVER, SIGNAL = 1.7; EXPRESSED IN BONE MARROW, SIGNAL = 2.5; EXPRESSED IN LUNG, SIGNAL = 3.3; EXPRESSED IN ADULT LIVER, SIGNAL = 2.9; EXPRESSED IN HEART, SIGNAL = 2.7; EXPRESSED IN BRAIN, SIGNAL = 2.3
tgggtttcactatgccacacaagctatagtgcagtggcatgatcatagctcactgcagcctcggcctccctgggctcaggtgatcctcccaccatgctgatttgtcattatacataatgcgtctgtatataatacattcctttgatgatttgtcaaatttttatgttttttcttcagcaaaaatagatcctccagtcatgaatataacccaagtcaatggctctttgttggtaattctccatgctccaaatttaccatatagataccaaaaggaaaaaaatgtatctatagaagattactatgaactactataccgagtttttataattaacaattcactagaaaaggtaagttcagatgaatagatatatttagagtttttttcttttgtttatttaaccaatattgtggtcatatgagatgtcctcttctgctactctgcctcctcttacttttccttatctttaatttcttcttactctcagccatcattgatcaacggttggtggtggcatcaccatcagaatg

SEQ ID NO: 6688 - DNA, 520 bp, Homo sapiens
  MAP TO AL161662.1; EXPRESSED IN BONE MARROW, SIGNAL =  18; EXPRESSED IN LUNG, SIGNAL = 7.1; EXPRESSED IN ADULT LIVER, SIGNAL = 6.2; EXPRESSED IN HELA, SIGNAL = 7.1; EXPRESSED IN HEART, SIGNAL = 8.7; EXPRESSED IN BRAIN, SIGNAL = 6.9; EXPRESSED IN PLACENTA, SIGNAL = 4.1; EXPRESSED IN FETAL LIVER, SIGNAL =  17
tttttgtagcccagaggtcctttattattattattttttttaacacctattatgccatgaattcacagggaataggttccagcagctcaggctccttcccactggttctcacaaagtgtgcttctctgggtggagcaggctggcgctttagttgaacccaggtacctttctctttggcttctttctttttctgatcattttccttcacgcgtttcaggaagctatcttggctcttagagtgcttaatgtgcttaatacgcacattaattctcttggcaagaatcttgcccttaacttgtttgtttacaacaatgccaacagcatgctgggtaacactgtagactcttccagttttgccatggtaacacttgtggggcattcctttttgaacagtacccattcccttgacgtctacaatatcaactttcttatagattcgcatatatgtggccaaaggaacaactccatgttttctaaaaggcctagagaacatatatcgggtgcctctcctctttccctt

SEQ ID NO: 6689 - DNA, 579 bp, Homo sapiens
  MAP TO AL158091.7; EXPRESSED IN BONE MARROW, SIGNAL = 1.5; EXPRESSED IN LUNG, SIGNAL = 1.2; EXPRESSED IN PLACENTA, SIGNAL = 1.6; EXPRESSED IN ADULT LIVER, SIGNAL = 1.7; EXPRESSED IN HEART, SIGNAL = 1.4; EXPRESSED IN FETAL LIVER, SIGNAL = 1.6; EXPRESSED IN BRAIN, SIGNAL = 1.6
tgacttctctgcggtgtgtctctttcctaggagccaagtgattccaacagagggttttggtggaggaagtcggagcgtgaacacctctggactgcagaaatgctctcctgatgagaacgccaaggcacgctggcctggaccacctgaaagtgcagcaccatgtccaccaaatgccctttagtcggcaactgttcacaattccagtctcgatccagaatcaagttaaagttctcgattcatcctttaaataccacagggaaacagtctttaaaccacaaccaaaacaaagacaagctgcaactgttctctgcaaaacgcctcctgacgcccgggcccagccgctccgccatctccacggccaccttctccagtaacgagctggtcagaagccgtccccgcaggaaaggactgcagggagctggggtgagcttcacgggaggcggcaccgcaccgccatggctgtccctagaatccttgactctttaaaagagtgaggggggttacaccagcaacgctccagaggccgcgtcccacatttccgggcacggctgatgcggggcttacagtctcctgtccccg

SEQ ID NO: 6690 - DNA, 600 bp, Homo sapiens
  MAP TO AC019159.3; EXPRESSED IN HELA, SIGNAL = 5.7; EXPRESSED IN BONE MARROW, SIGNAL = 5.1; EXPRESSED IN LUNG, SIGNAL = 5.3; EXPRESSED IN PLACENTA, SIGNAL = 4.5; EXPRESSED IN ADULT LIVER, SIGNAL = 4.6; EXPRESSED IN HEART, SIGNAL = 3.6; EXPRESSED IN FETAL LIVER, SIGNAL = 4.2; EXPRESSED IN BRAIN, SIGNAL = 5.4
tgtccaaggagacactgctgcaggtggcggtacctgcaatcaaacccaagcctcctgtcatcacatgggactccttccattattctttctgcctctctataacaatctttgtataatggaagccagatggcacccagtcagaagtaagcatactgatgatggtgaaatgacaatggtgatggcagcagtgatggtggtggtggtagtgctgtggtagtggtggtattgatggtggtggtgggcataatgttaatgctgatggtgatggtggtgctgatgggggtggtggtgatggaggtgatgatgatggtgatggtggtggtggtgatgatgatggtggtggtcgtggcaatggtggtgataatggttgtggtgatagtggtggtggtgaggggggtaatggtgatagtgatagtggcagtgctgatggtggtaatggtgatggtagtgatggcactggcagtggtggtgttgatagtggtggtggcagtggtggtgatggcgatggtgatggtaatggtgacagtgatggtgatggtggcagtgctggtggtggttaatggtgatggtggtaacggtggtggtgatggtggtgatgaa

SEQ ID NO: 6691 - DNA, 561 bp, Homo sapiens
  MAP TO AC016851.3; EXPRESSED IN HELA, SIGNAL = 5.2; EXPRESSED IN LUNG, SIGNAL = 2.8; EXPRESSED IN PLACENTA, SIGNAL =   3; EXPRESSED IN ADULT LIVER, SIGNAL = 2.8; EXPRESSED IN HEART, SIGNAL = 2.1; EXPRESSED IN BRAIN, SIGNAL =   2; EXPRESSED IN FETAL LIVER, SIGNAL = 2.5; EXPRESSED IN BONE MARROW, SIGNAL =   2
tgaaaatggaagggaactgtgaatattcaacagacttgttgtagaaatgtaagaaaacacccatgacattacatttttaaagatttgtggtgacaaagcatcggctgattatgaagcagtggagaagttctttgatgagtttgccaaggtcatcgctaatgaaaatcggatgccaggacaaatctataatttcaatgcatgaaatgtcactgttttggcattgttgtcccagcaagacactcatgagatagcgcttacaggaattaaggatgtcaaggacaggataagtgtgctgagatgtgctaatgcagcagacagacataagtgtaaagtttttgtgataagcaaaagcttgagtcctcacttttttcagagggaatttcttaccagttaattattatgttaacaaaaagatatggctcatcagggacatcttttcctgatttgtctcttaaacattttgtcccaacagatcttgctcgctgcagggaagctggactggatgccaactgcaagattttcttattccttgacaactgttctgctccttctccagctgaa

SEQ ID NO: 6692 - DNA, 502 bp, Homo sapiens
  MAP TO AL161422.3; EXPRESSED IN HELA, SIGNAL = 5.8; EXPRESSED IN LUNG, SIGNAL = 3.9; EXPRESSED IN FETAL LIVER, SIGNAL = 6.1; EXPRESSED IN BONE MARROW, SIGNAL = 6.8; EXPRESSED IN PLACENTA, SIGNAL = 2.7; EXPRESSED IN ADULT LIVER, SIGNAL = 3.5; EXPRESSED IN HEART, SIGNAL =   4; EXPRESSED IN BRAIN, SIGNAL = 5.7
ctggaattggtgggttcttggtctcactgacttcaagaatgaagccacggatcctcgcggtgagtgttacagttcttaaggatggcgtgtccagagtttgttccttctgatgttcggacgtgttcggagtttcttccttctagtgggttcatggtctctctggcttcaggagtgaagctgctgaccttcacggtgttacagctcttaaggcggcactctggagttgttcgttcctcctgtctggagttgttcattcctcccggtgggttcgtggtctcactggcctcaggagtgaagctgcagaccttcccagtgagtgttacactcataaaggcagtgcgagcccaaagagagagtagcagcaagatttattgcaaagagctaaagaacaaaacttccacagcatggaaggggacccgagcaggttgccactgctggcttgggcagcctgcttttattcccttatctggccccacccacaccctgctgattggtccatttt

SEQ ID NO: 6693 - DNA, 597 bp, Homo sapiens
  MAP TO AC021037.4; EXPRESSED IN PLACENTA, SIGNAL = 1.6; EXPRESSED IN HELA, SIGNAL = 4.9; EXPRESSED IN FETAL LIVER, SIGNAL = 6.7; EXPRESSED IN LUNG, SIGNAL = 3.6; EXPRESSED IN ADULT LIVER, SIGNAL =   3; EXPRESSED IN BRAIN, SIGNAL = 2.9; EXPRESSED IN BONE MARROW, SIGNAL = 5.1; EXPRESSED IN HEART, SIGNAL = 2.7
taggaaatttggatgcaggcacagagagaagactatatgaagagacacacaggaacaatactactggcgtgattccatcctgtatggctgttctcttgagcagtggtcgtttatctccgtctgctttctctcccacctaagtgtgtgccgccacctgatggaagattcgatggacatggacgtgagccccctgaggcccagaactatcttttcagttgtgaactaaaggccgacaaagatgatcactttaaggtggataatgatgaaaatgagcaccagttatccttaagaacggtcagtttaggggctggtgcaaaggatgaactgcacattgttgaagcagaggcaatgaattatgaaggcagtccaattaaataacactggcacctttgaaaatgtctgtacagccaacagtttcccttggggtctttgaaataacaccaccagtgcttttatggttgaagtgtggttcagggccagtgcatattagtggacagcatttagtagctgtggaggaagatgcagagtcagaagatgaagaggaggaggatgtgaaactcttaaggatatctggaaagtgatctgtccctggaggtg

SEQ ID NO: 6694 - DNA, 507 bp, Homo sapiens
  MAP TO AL135844.8; EXPRESSED IN LUNG, SIGNAL = 1.4; EXPRESSED IN PLACENTA, SIGNAL = 1.3; EXPRESSED IN ADULT LIVER, SIGNAL = 1.3; EXPRESSED IN FETAL LIVER, SIGNAL = 0.74; EXPRESSED IN BRAIN, SIGNAL = 1.1; EXPRESSED IN BONE MARROW, SIGNAL = 1.1; EXPRESSED IN HEART, SIGNAL = 1.8
agagattgtgctgcattcccagtctgctccacctcctggtgaggtctgtcaggcctggtcctgtccttggagccaccagcatcctcagacaagaatctagacagtgttgccagttccatccccaggatgcttgctcaaagccaatgcatggtctgagctccatgccaggccctggtgggggcagccacgttgacaccttcaccctgtccctcctcacccagcacatcctttactgcattgtggacagcgagtgtaagtcaagggatgtgctccagagttactttgacctcctgggggagctgatgaagttcaacgttgatgcattcaagagattcaataaatatatcaacaccgatgcaaaggtaaagttaacccagggctctgtggagtgtgctgggttgtccagaagttcacctggagtcctggtctgccaggctttaggcacaggttttacgttagagacgacgggggagtctgggcagtctttggcaaacattcattggaacc

SEQ ID NO: 6695 - DNA, 572 bp, Homo sapiens
  MAP TO AC013785.4; EXPRESSED IN ADULT LIVER, SIGNAL = 1.5; EXPRESSED IN HEART, SIGNAL = 1.7; EXPRESSED IN BONE MARROW, SIGNAL = 1.6; EXPRESSED IN LUNG, SIGNAL = 1.6; EXPRESSED IN PLACENTA, SIGNAL = 1.5; EXPRESSED IN FETAL LIVER, SIGNAL = 1.5; EXPRESSED IN BRAIN, SIGNAL = 1.4
agcgggtgtagaatgactggaaggagcagggaaggaagatgggtgtcaactgtcccggccagtggctgcgtgcatgtgtgtgtgaacagggaaaaggccaccctctcccatgtttctcccgtctcctcggttctcctcggagacccgcagggctgcccgaggtagctccgagttgccctgggtcgctggggcttggtccgcatcctcctccgctagtccgctcccgcgttccacagcgccccgccgctcggtgtgcacgcctgggtgggacacagtaacagcccctaagccgccaacgcaaaagcaaaaacaaccgtacaccgcatcgcagtcgtagctcttctccgcaaggtaagttgtttattcgtcgccgttttggcgatcctccctggacagctgcggcagcgacggcagctgcgccgcgggcgccgagctcccagcctcttccttcctccgccctctcagggctgcctctcacccccaccctcttccctcctatccccgccttctctcttcttgccctcttgtgggccacgcacacacccggagacaccctctgcacttggctactc

SEQ ID NO: 6696 - DNA, 561 bp, Homo sapiens
  MAP TO AC018684.2; EXPRESSED IN PLACENTA, SIGNAL = 1.2; EXPRESSED IN ADULT LIVER, SIGNAL = 1.3; EXPRESSED IN FETAL LIVER, SIGNAL = 1.1; EXPRESSED IN BRAIN, SIGNAL = 1.1; EXPRESSED IN BONE MARROW, SIGNAL = 1.1; EXPRESSED IN HEART, SIGNAL = 1.2; EXPRESSED IN LUNG, SIGNAL = 1.2
caaggatgtgtgaattacatgagctaatctatgtaaattacatagaattgtgtgagtatagagtgaacactacctaaatgttagctgattctattattatcattactgttgtcatcatcatcattatcactgaatgatattattgttttaacctctgctatatgtgcaatgtttcttagatttttacctgagtattttatatttttatgctttgtaaatggtactgttttaaaatttttgactccaattgtttattgttattatacaatattagagttcatttttgtctatttacctggtatcctgtgacttaatgatgagttctaggtgctttcttggacgttctctgggactgtccacatagacaatcctatcttctgtgaatggagaaaattttattttttctttttaaatctatatgtctttcatttgtttttactgcattttgacacttgttaggaattccagtgagatggtgaataaaaatgtgagagttgatatatttgccttgttcttgattttataatgttagctatagattcttggtagcagcccttgatc

SEQ ID NO: 6697 - DNA, 588 bp, Homo sapiens
  MAP TO AL096863.10; EXPRESSED IN LUNG, SIGNAL = 1.6; EXPRESSED IN ADULT LIVER, SIGNAL = 1.5; EXPRESSED IN HELA, SIGNAL = 2.2; EXPRESSED IN FETAL LIVER, SIGNAL = 1.6; EXPRESSED IN BRAIN, SIGNAL = 1.4; EXPRESSED IN PLACENTA, SIGNAL = 1.4; EXPRESSED IN HEART, SIGNAL = 1.3; EXPRESSED IN BONE MARROW, SIGNAL = 1.6
ttcaacccaaaacaccatcccctactgtatcaagatgtaaaaggtggccttatagttaactctacttttataaagatttgaagtataagattgcttttgttttcagagcaaagatattatgtgttctatgaaatgccaatgactcaatttccagaatgcatttatgggcaaaatcgcaatttaaaacaaggaaaggaagacaaaatgtaactcagtgttatggttaaggctcttacaacttttcttgttttcattcattcagtgaaccaagcattaacagtgagctacagcctagcgcaggggaagacttagaaggaggaggaggagtaagaggaggaaggagaaagaaggagataaaagaaggaaaaagaaggaggaggaaggggagtgaggagaataaggaagaagaaaagtaaagattatacgatccagaccttctaggaattaacaccaagtcatggaaaaaaaacaaaacaatggacaaaataaggtccaatccagttgtgacaagtgagatattcagacaatgaccagaacaaggattcaggaagagaaagagccctgagaagtaggtgagccacaaaaggc

SEQ ID NO: 6698 - DNA, 586 bp, Homo sapiens
  MAP TO AL139352.8; EXPRESSED IN LUNG, SIGNAL =   2; EXPRESSED IN PLACENTA, SIGNAL = 1.7; EXPRESSED IN HEART, SIGNAL = 1.9; EXPRESSED IN FETAL LIVER, SIGNAL = 1.8; EXPRESSED IN BONE MARROW, SIGNAL = 1.8; EXPRESSED IN ADULT LIVER, SIGNAL = 1.7; EXPRESSED IN HELA, SIGNAL = 2.7; EXPRESSED IN BRAIN, SIGNAL = 1.7
aggcctgtcttcttgcaatccctgtgccgggatccagggtgccccagcaggctggtggagggctggggagaggtgcatatcctgggctggagccctgggcagggcccagctactgtgaggcagctgcctcaggcagcgggatctgggcagctctgcagagaaggctgtgccgctttgcgggtcaccgatgggggtgcggtttttcctccgcagtggcagaggacgacagcagctgtgaggtgaacggccgcctgtatcgggaaggggagaccttccagccccactgcagcatccgctgccgctgcgaggacggcggcttcacctgcgtgccgctgtgcagcgaggatgtgcggctgcccagctgggactgcccccaccccaggagggtcgaggtcctgggcaagtgctgccctgagtgggtgtgcggccaaggagggggactggggacccagccccttccagcccaaggtgagcgcagcggtggtccaggtcagggcaggactgcctgggggcgccaagggccacctagggggtggggtggggggcggcttcctgggtaccaggacccagggacacatcagaagct

SEQ ID NO: 6699 - DNA, 549 bp, Homo sapiens
  MAP TO AF241729.1; EXPRESSED IN LUNG, SIGNAL = 1.5; EXPRESSED IN BONE MARROW, SIGNAL = 1.3; EXPRESSED IN HEART, SIGNAL = 1.4; EXPRESSED IN PLACENTA, SIGNAL = 1.5; EXPRESSED IN ADULT LIVER, SIGNAL = 1.4; EXPRESSED IN FETAL LIVER, SIGNAL = 1.3; EXPRESSED IN BRAIN, SIGNAL = 1.4
acctcttcccctgactctccacccctactactcacttacaaatgtgcttctgctgctgtttgagtattctctgttcattaaagacatcatcatattccttgtttcttggctcttttgaccctccatatttagtttgacaccgattctgtcatcaattaaaaaaaaggtctttggaacatatctactcctgtcttcacatagtttgccatcactatatatcacttggattattttcagtcatggcctatatttccattcctgctacaatgcttagcacatagtttgtgactgactatggaaaatatagcttttatgtctgccttcaaatgtttaatggaacatgatgtttgagaagcaataaatttattttttggctgcttcagatatcaaggaggccaattttcattaatgtgggatagaacttaagacagattgactccaactatggactaaaccatttcataaatctttgagctctttatcattggaactattcaaggagagactggatagacatcagggagaagtgctgtcaaaaggatgctggct

SEQ ID NO: 6700 - DNA, 518 bp, Homo sapiens
  MAP TO AC016105.3; EXPRESSED IN LUNG, SIGNAL = 3.9; EXPRESSED IN BONE MARROW, SIGNAL = 3.1; EXPRESSED IN HEART, SIGNAL = 1.6; EXPRESSED IN PLACENTA, SIGNAL = 2.2; EXPRESSED IN ADULT LIVER, SIGNAL =   3; EXPRESSED IN HELA, SIGNAL = 2.9; EXPRESSED IN FETAL LIVER, SIGNAL = 2.8; EXPRESSED IN BRAIN, SIGNAL =   4
gttcctccagaacctcctcccccaggagcttgctacaagtgccagaaatctgaccaccaggccaaggaatgcctgcagcccaggattcctcctaagccgtgtcccatctgtgcgggaccccactggaaatcggactgttcagctcacctggcagccactcccagagcccctggaactctggcccaaggctctctgactgactccttttgggcttagcggctgaagactgacgctgcctgatcacctcggaagccccatagaccatcacagacgccgagctttggataactctcacagtggaaggtaagtccgtccccttcttaatcaatacggaggctacccactccacattaccttcttttcaaggacctgtttcccttgcctccataactgttgtgggtattgacagccaggcttctaaacctcttaaaactccccaactctggtgccaacttagacaatactcttttatgcacccttttttagttatccccacctgcccagttcccttattaggc

SEQ ID NO: 6701 - DNA, 558 bp, Homo sapiens
  MAP TO AL157777.3; EXPRESSED IN LUNG, SIGNAL = 2.2; EXPRESSED IN PLACENTA, SIGNAL =   2; EXPRESSED IN ADULT LIVER, SIGNAL = 2.2; EXPRESSED IN HEART, SIGNAL = 1.9; EXPRESSED IN FETAL LIVER, SIGNAL = 1.6; EXPRESSED IN BRAIN, SIGNAL = 1.6; EXPRESSED IN BONE MARROW, SIGNAL = 1.7
tggggcttaggtcagtcaacttaccaaagttcatcttcctggtgatgaaaggactttcatcaaaatcccagctactttttattcgttcccacattttgtggattaagaaactgagaaccagaatttatagagatcactcaatcaattggcatattcccggatcacaacaaattgataaaattcttgagaaccctctttctaatacagattgactataattttgtctttcatttttagttctcttattttgtctcatgcactgtggattatctggtttactgcagtccttacctgaatagatgtcagtgttttgatcccattgttgtattcccctaaaacacgtcaaatgaaaaactggacactttaataggtttattgttagcactctctcatgctgatcaattctcaacacatgcagttgtaggattaggaagacaaaatcctttagaagaagctatgaaacctaatccttctgcatctggatcattttaaactacaagttgtaagaggaatgagcatctctggattctagttatcagtgcagaccagatggaaggt

SEQ ID NO: 6702 - DNA, 562 bp, Homo sapiens
  MAP TO AL161781.2; EXPRESSED IN ADULT LIVER, SIGNAL = 1.7; EXPRESSED IN HELA, SIGNAL = 2.3; EXPRESSED IN HEART, SIGNAL = 1.3; EXPRESSED IN FETAL LIVER, SIGNAL = 1.4; EXPRESSED IN BRAIN, SIGNAL = 1.5; EXPRESSED IN PLACENTA, SIGNAL = 1.4; EXPRESSED IN BONE MARROW, SIGNAL = 1.6; EXPRESSED IN LUNG, SIGNAL = 1.6
gagacaggaagcatcaagcctggggtaattggaggatccaaaccaaaggtcgccacacccaaagtggtggaaaaaatcgctgaatataaacgccaaaatcccaccatgtttgcctgggagatcagggaccggctgctggcagagcgggtgtgtgacaatgacaccgtgcctagcgtcagttccatcaacaggtgaggggctcgtgcctgtgggggttggggatttggagggatggcagggcatcctggaggctctgcatgtgcctttcctgaagatctggtctcttttttcaccaaggccccttaggggttactgaacaggagggatgctaatggggcctgctcggtctctgttacccttctcttctttccaaagcaggtaggagtcctaggcccagggagaggggagcatgccaacaccctggccgctcgagtttcttctgagcccagagttatttccatccctcccttcaccacccacctatatgtgtggaacacttcacagtgaattgtcctgactagatcttcacaaatgtcgctgtccctgcaaacctaggctcaag

SEQ ID NO: 6703 - DNA, 592 bp, Homo sapiens
  MAP TO AP001254.2; EXPRESSED IN BONE MARROW, SIGNAL = 1.2; EXPRESSED IN ADULT LIVER, SIGNAL = 1.6; EXPRESSED IN HELA, SIGNAL = 4.3; EXPRESSED IN LUNG, SIGNAL = 1.9; EXPRESSED IN PLACENTA, SIGNAL = 1.3; EXPRESSED IN HEART, SIGNAL = 1.2; EXPRESSED IN FETAL LIVER, SIGNAL = 1.8; EXPRESSED IN BRAIN, SIGNAL = 1.5
gaggcagaagcattaccagcaaaagagtgggtagcactaaagcacaatattaatatccacagtgaaatgtcattgagtcatcaaggtttgtgccatatgggtctgtggcttaactcatccccaaagactgaattgatttgcaattacagcatattttggggttaaagaaaaaaatgtaaaaatggtagttaatcatcaattaggatcgcattttaccgtgctgaaagttatttaataaaagatgataagagcaggaacccgcatccaggaacagagccctttgctcctccctcagaatggagaccagaaatcagatatttatgcccaagaaaagcaggatttcattcggcacttctcccagatctttagagtgctgactgaggatgagatggggcacccacagacaggagatgctattgcccagctcaaggaggtcctggagtacaacgccagtggaggcaagtatcagcaggctttgagagtgctagtagcattcaggaagctgatagagccaagggaacaggatgctgatggtctctagcgggccctgctgtgggatggtgtgtggaactgctgcaaactttcttcctgg

SEQ ID NO: 6704 - DNA, 524 bp, Homo sapiens
  MAP TO AC015805.3; EXPRESSED IN PLACENTA, SIGNAL = 2.1; EXPRESSED IN BONE MARROW, SIGNAL = 2.2; EXPRESSED IN LUNG, SIGNAL = 2.1; EXPRESSED IN ADULT LIVER, SIGNAL = 2.7; EXPRESSED IN HELA, SIGNAL = 3.3; EXPRESSED IN HEART, SIGNAL = 1.9; EXPRESSED IN FETAL LIVER, SIGNAL =   2; EXPRESSED IN BRAIN, SIGNAL = 2.2
gaacagtaaagcctggcagctcatgtagctgcaactacttactgaggagtttcttgtgaatgtgcacttggctgcctctctgggccgaggacatgacatcctcaggcttcagtgactctcgcaaataaagtgcttgtttcttagctgcagcttgcctttgtgattccatcaacgtgtgcatttcattagggtaccagtgtgtagcccacgtgccagggagccgtcttctcctgatgaaggtgtcggggttgcaatgagaatatttgagacaatggtcatggtatatctacttggtggtgagagtgacacatgggccatttgcaggtgtcacaccctgtggacgaatggtcatgctacacggtggtttgtgccaaggcctcatggacacagttcacattcttagtgtcctaggagctcctgccatgattccttagcagtggttatgcttgtttttatgatggcaaggctccccaaactttgtggacaatgcacagataacaactgctgatggaaatcaatggcct

SEQ ID NO: 6705 - DNA, 574 bp, Homo sapiens
  MAP TO AC018773.2; EXPRESSED IN LUNG, SIGNAL = 1.2; EXPRESSED IN PLACENTA, SIGNAL = 1.2; EXPRESSED IN FETAL LIVER, SIGNAL = 1.2; EXPRESSED IN ADULT LIVER, SIGNAL = 1.3; EXPRESSED IN HEART, SIGNAL = 1.2; EXPRESSED IN BRAIN, SIGNAL = 1.2; EXPRESSED IN BONE MARROW, SIGNAL =   1
tggggactcttgctaactggacatcaatactgtctaatggaagcgaccacaacttaattccagttaatcattgccatgttggaatatgggcctagtgttttgagattttccattttttcaagaaaagctggaagtccagacttactatacagtttctttatagtcaatgttgccaactaatttgtttttattttttaattgaacagctaaacaatacatggctcatggttaccactaacctccttgaaatgctgaggattgagccaaccatgcagccagtggtgcccacgcttctgaggcagggagccagtgctcaggaagggcaggctgctgcttctctccttctccttgttagcccccatgtgggtctcacccacctgcaggcctgtcttggctttgcagcaatactccacctctttgcccctgccctcctagcttgtctcccgttctttccctgctgtcaggggtggtgactgccctgtctccttcgcagagatcctcgacactggatctcaccctctaatttagctccttgtctttattgcgatgaatgaggttgagcagatgacaagca

SEQ ID NO: 6706 - DNA, 542 bp, Homo sapiens
  MAP TO AC016498.4; EXPRESSED IN LUNG, SIGNAL = 2.4; EXPRESSED IN ADULT LIVER, SIGNAL = 2.7; EXPRESSED IN HEART, SIGNAL = 1.9; EXPRESSED IN BONE MARROW, SIGNAL = 2.1; EXPRESSED IN BRAIN, SIGNAL = 2.4; EXPRESSED IN PLACENTA, SIGNAL =   2; EXPRESSED IN HELA, SIGNAL = 2.4; EXPRESSED IN FETAL LIVER, SIGNAL = 1.9
tcccagatccataaagcagggatcatgaaaaccaaccgaaggcagcagggcctacggggcactcaggtaagggaggcgtccacctgggcagggagacatccctcgcactggctgtccccacaccgccccatccccagcacgctctggtctgtgacgtccacctgatgtggcacccgtcagcaggtgctggacacagtggctctcccttgtctccccagatgtcaagaatatgaacacgtggctgctgttcctccccctgttcccggtgcaggtgcagaccctgatagtcgtgatcatcgggatgctcgtgctcctgctggactttcttggcttggtgcacctgggccagctgctcatcttccacatctacctgagtatgtcccccaccctaagcccccgatccccccaaggctgggtggtcagagctgctcatcttacacctctacttgagtatgtcgctaaccctgagccccccacgcctggggccagagtctttgtcccccgtgtgcgcatgtgttcagggtcagcctctcccagaagtg

SEQ ID NO: 6707 - DNA, 502 bp, Homo sapiens
  MAP TO AC016326.4; EXPRESSED IN LUNG, SIGNAL = 0.93; EXPRESSED IN PLACENTA, SIGNAL =   1; EXPRESSED IN ADULT LIVER, SIGNAL = 0.68; EXPRESSED IN HEART, SIGNAL = 1.5; EXPRESSED IN FETAL LIVER, SIGNAL = 0.95; EXPRESSED IN BRAIN, SIGNAL = 1.3; EXPRESSED IN BONE MARROW, SIGNAL = 1.1
attgccatgcatttgaaaacagaaagtgccccatactagagaaaaaactgagatataaaacataaagagcagtgaacacactagctaaacaaagcagggaacagtcagcaaacagaaagcagagaaatacagtgagattacaaggaggctctatattagtctgttctcacactgctatgaagaaatacctgagactgggcaatttataaagaaaagaggtttaattgactcacagttccacatggctggggaggcctcaggaaacttacacttatggcagaaggcatctcttcacagggcagcaggagacagaatgagggcaagcaggggaaatgccagatgcttatgaaaccatcagatctcataagactcactcactatcatgagaacagcatggaggaaactgtccccatgattcaattatctccacctggtcctgtccttgacatgtggagattattacaattcaaggtgagacttgggttgggacacagagccaaat

SEQ ID NO: 6708 - DNA, 522 bp, Homo sapiens
  MAP TO AL118505.13; EXPRESSED IN HELA, SIGNAL =  10; EXPRESSED IN HEART, SIGNAL = 6.4; EXPRESSED IN BONE MARROW, SIGNAL = 6.5; EXPRESSED IN LUNG, SIGNAL = 6.4; EXPRESSED IN ADULT LIVER, SIGNAL = 7.3; EXPRESSED IN FETAL LIVER, SIGNAL = 6.4; EXPRESSED IN BRAIN, SIGNAL = 5.6; EXPRESSED IN PLACENTA, SIGNAL = 6.1
agctctccaactgcaccaactttagaagtttatgtgttgggtgatccttttcctgcttcttccagtgattgttgtatcttgtagaaaaagagagagaatgaatggatgagaatggattgtctttgtagagctgcagacggaccttgagtgtattgttcttatgggggatctggagctaacagggtgatcacagagcagccggtgcatgtgaagagaggttgatgtctgtttctgttcagctggccgcccggatcctggaggcgcaccagaacgtggcccagatgcccctggtcgaagccaagctgcggttcatccaggcgtggcagtcactgcctgagtttggcctcacctactaccttgtcaggtgattacaatgttcacttgtttctcacactttccattcaattttaagtggcttttggggagccccagttttctcatttagcatagaatatagaatgctttttatttgagaatattgcccttttataaatagtcctgacactttgggctgctcataaa

SEQ ID NO: 6709 - DNA, 505 bp, Homo sapiens
  MAP TO AC019281.4; EXPRESSED IN ADULT LIVER, SIGNAL = 1.1; EXPRESSED IN BONE MARROW, SIGNAL = 0.69; EXPRESSED IN HEART, SIGNAL = 1.3; EXPRESSED IN FETAL LIVER, SIGNAL = 1.2; EXPRESSED IN BRAIN, SIGNAL = 0.69
agtgtatgggcctccaaaacaatatactcctagtaagcatacaatatactcctttgcaaggtaagtttaaacacaatttttatgttataggctgacaatagcaactaacctcctcctgagatacaaccccattgctgtacagtatatttttttgcaacaatcatgtgttatttttgagatattaaaaataaaaaaatagttaatttgttatatctctagtctacatttgaaaataaaaatctagatatacatacctgtttgccagtgaaaccctggcaaataatctttgtatttttatcaacatagagatgttgccgagaagctgtgtaggaacaatgccgaattccattttgcggcactaagaggttaaaaaaaaaaaaaaaaaaaaaaaaagacacattataatttttctaaacttttgaacaataattcaacttgatcacaaaaaaaaaattctttaatgcacgcgctatcctgtgatcacggcaaacctaaatgccacctt

SEQ ID NO: 6710 - DNA, 583 bp, Homo sapiens
  MAP TO AL162471.1; EXPRESSED IN PLACENTA, SIGNAL = 3.4; EXPRESSED IN ADULT LIVER, SIGNAL = 3.8; EXPRESSED IN HELA, SIGNAL = 3.7; EXPRESSED IN BRAIN, SIGNAL = 3.2; EXPRESSED IN BONE MARROW, SIGNAL = 3.9; EXPRESSED IN LUNG, SIGNAL = 3.1; EXPRESSED IN HEART, SIGNAL =   4; EXPRESSED IN FETAL LIVER, SIGNAL = 3.7
gagcttcaaaaacagcctgggaccacctacatttaaggaccgtcagcccaagatgtggaccagggaggtggcaggaaatccaagagggtctgtgtctgctaagggaaagaatcaatcaaggagagatagaacattaataccagagagataatagttaatggaacaagattcctgagggaagtggtaggagtagccttgtcccctagaatgaaaggaaaggaaaaaaaggaatgaaggtgggtgaggagtagattagcttgtgagcggggaagttgtcagttgagaatagggatgaagggaggtggttgggtctgagggaggtggagcctttgaagaggatggaagagaaggctgccaagggcatcccatgggacagctctagggcaaggggaggggagaagtccgagaacgtgaactttaagtggctccaatccatgtaaccatgtgtgttttttctttgtttgtttgtttgtttgattaggacatagcagccctttgtgggatgttgaaaagtcagacaatgggattaatctagggaaggagtctgctccaaagagacctaggtctcagcaggaaagggatg

SEQ ID NO: 6711 - DNA, 598 bp, Homo sapiens
  MAP TO AC022882.3; EXPRESSED IN LUNG, SIGNAL = 1.4; EXPRESSED IN ADULT LIVER, SIGNAL = 1.4; EXPRESSED IN HEART, SIGNAL = 1.4; EXPRESSED IN FETAL LIVER, SIGNAL = 1.6; EXPRESSED IN BRAIN, SIGNAL = 1.1; EXPRESSED IN BONE MARROW, SIGNAL = 1.5; EXPRESSED IN PLACENTA, SIGNAL = 1.2
aacattcagcagctcccaagaagacaaaaaagaacatctgggcaaagcagcccatgaaggaaatatagttggaagtcagtaagttcgctaaggttttaggtgtgatgacagttgagtaactgaggtcaataaatgacaagtgagtaaggaaaaaatacatgggagtgtgaagctggaggtccaggcggattatcaatatcatccccacattgcccagcatagtaattaggtatatcaggagaaatagtataaagagggccatctggacctcttcagaatctgacagtcccgtaaggatgaagtcaggcacatttgtgttatttcttctacccatgatgttcaattgctttaaactgctgagaaatcaaagttgatacttaacatgaatgacttcaaaaggtttctgattatacaataacctagcatttaattcatttagtgtttctataaattgctaatacatttatagaatgtgaccttaaaacggaattatattgccaatgtagataaaagtgtaaattaacatttagatgtgatataataaaatgtaacatattgcataattagaatgaacctgaccttgttctgaatgccttcc

SEQ ID NO: 6712 - DNA, 516 bp, Homo sapiens
  MAP TO AC021371.3; EXPRESSED IN PLACENTA, SIGNAL = 1.2; EXPRESSED IN FETAL LIVER, SIGNAL = 1.2; EXPRESSED IN ADULT LIVER, SIGNAL = 0.94; EXPRESSED IN BRAIN, SIGNAL = 1.7; EXPRESSED IN BONE MARROW, SIGNAL = 1.4; EXPRESSED IN LUNG, SIGNAL = 1.1; EXPRESSED IN HEART, SIGNAL = 1.5
tgaaggaatagaaagcccccatagcccgaaaatgacataattccacacgaagcctagcccaacctactagagtaataacaagggagaaagctggcttcctctactctcagtagccaattgaaggagattgttctcagtatcagaaatgtcttagacaattaggaggttgtcttagtcagcttgggttgccataacaaaataccatagaatgggtagcttaaacaacagacacttacttctcacagttctggaggctgggaagtccaagatcaaggtactggcagatttggtgtctggtgagggctctcttcctggcttgcagactgttgccttcttgcctggtgaggagagaaagagagagagagctcttcttataaggatactaataccatcatgggattgggaccccaccctcatgtcctcatttaaaccgaattacctcccaaaagctccatctctaaatatcatcacattggaagttagggcttcaacatatgaatttggaggggacacaaa

SEQ ID NO: 6713 - DNA, 500 bp, Homo sapiens
  MAP TO AL136308.4; EXPRESSED IN LUNG, SIGNAL = 1.5; EXPRESSED IN PLACENTA, SIGNAL = 1.3; EXPRESSED IN FETAL LIVER, SIGNAL = 1.1; EXPRESSED IN BONE MARROW, SIGNAL = 1.1; EXPRESSED IN ADULT LIVER, SIGNAL = 1.5; EXPRESSED IN HEART, SIGNAL = 1.2; EXPRESSED IN BRAIN, SIGNAL = 1.3
tttatgaagatactctttccatgaggtttaactttttttctaataaatattttagtactattatttctgcagtttaaattgatgctaaagatgtatagaaatgaaactggtaagaaaaaagcgattttttttgtttgttttgttttgtttttaattcccagaggaaaagcctcaagctgcagcaggacagtttttctccagggtccaattataacagagccaattatgttttgggatgcattcacgacccttgcaattcttctacatgcatacataaaactctgcacatgtatgtgtcagaatttactaatatggattccaaatattgcttcatccatcaacagaactgtacacccaaaaacgaagtggaaactaaaatgtgcttcattagcttttcaaataatgttaaatttacagacatgctaaagagcaggctgctgactcagattgagccacactcttcaaggtaagaaccaataaaggtaaatattttcagttga

SEQ ID NO: 6714 - DNA, 600 bp, Homo sapiens
  MAP TO AC021468.2; EXPRESSED IN ADULT LIVER, SIGNAL = 1.6; EXPRESSED IN BRAIN, SIGNAL = 1.6; EXPRESSED IN HEART, SIGNAL =   2; EXPRESSED IN BONE MARROW, SIGNAL = 1.7; EXPRESSED IN LUNG, SIGNAL = 1.6; EXPRESSED IN PLACENTA, SIGNAL = 1.4; EXPRESSED IN FETAL LIVER, SIGNAL = 1.9
tcctatctccctccccattctctcctgccttccagtggacccttctgtgaacaccccccacccatggtcctactgcagaccagcccatgcgaccagtacgagtgccagaacggggcccagtgcatcgtggtgcagcaggagcccacctgccgctgcccaccaggcttcgccggccccagatgcgagaagctcatcactgtcaacttcgtgggcaaagactcctacgtggaactggcctccgccaaggtccgaccccaggccaacatctccctgcaggtgtgtcccgccctgccctgcccttggaaggacctcaacatgcccacaagctctgatagttcagaaaattgctggaatgccccatcttaacagtaaagcaccatcagggacaacactcagcttgaggacatctggaccaactcatccagagagttctatagataactcctgaccagctctcgctgcaaactgcagcccccacttccagcctcattcactcattcctccagaaaatatgcattcaactattgtacaccagacactgtgctgcagaattgggattcagttcaagacagacaaaaccccttgtctgaggcctatcca

SEQ ID NO: 6715 - DNA, 555 bp, Homo sapiens
  MAP TO AC011022.4; EXPRESSED IN LUNG, SIGNAL =   2; EXPRESSED IN PLACENTA, SIGNAL = 2.1; EXPRESSED IN ADULT LIVER, SIGNAL = 2.1; EXPRESSED IN HELA, SIGNAL = 3.2; EXPRESSED IN BRAIN, SIGNAL = 2.9; EXPRESSED IN FETAL LIVER, SIGNAL = 2.6; EXPRESSED IN HEART, SIGNAL =   2; EXPRESSED IN BONE MARROW, SIGNAL = 2.3
tcataattcccaggtggagcaatgtaagttacagttcctctgtttcgtgggggtaacatgattttgtgtttgataagcgagttctcactgacaattccataaatgtctccgccagtgatatgactaccaacctagagataaatgtatttgctgtttaatttgcaaataaatgtcaagtagacttgcccctgctgctataatttaaatcaattacctgacttatcaataaaacattagttctaaaatcccatgaagtagagttaagaaaaactttaaactatccttctgtagtctatttttatttggactaagagtacaatgtagtttactaaacattcattttatattctttcaataacttcagaaattcttggttacacagacatacccgtaggtttttgcaaggtgtaaagtcccatttgatatctctgctaagagcagacacgtttactcctctggggatgtagatgctttgggtctgactgctgatatccgacaaaggtctttgaataccatcaaaaatggctcccataatgccaggaccaagctctacag

SEQ ID NO: 6716 - DNA, 543 bp, Homo sapiens
  MAP TO AL161644.1; EXPRESSED IN LUNG, SIGNAL = 1.5; EXPRESSED IN PLACENTA, SIGNAL = 1.4; EXPRESSED IN ADULT LIVER, SIGNAL = 1.4; EXPRESSED IN HEART, SIGNAL = 1.4; EXPRESSED IN FETAL LIVER, SIGNAL = 1.6; EXPRESSED IN BRAIN, SIGNAL = 1.1; EXPRESSED IN BONE MARROW, SIGNAL = 1.5
taccagacccaaaggacctgattcagggttaaggtctttcccttccattacttaaatcttccttctggttcccactggaggtggtggtgggtggtatgtgagtttgtgatgtctggatccagccaggaagaaaatcccagcatccattaactgtgaccttgtgcaagacacttaactgttcgtgtcaccagcaagataggtcggatataaaataaatgagtggattcactcacctcaggagattgttgggaggattaagtgagatcagcctcctttggtgcctacatagagtcttaggatgtgggggcttattattgttcctgggacagagagccaggaggctttgggggcagggatggcaaggctctgggagtctggtctgccggagagtgatacccagctggtccccaggggacaggccacccttggggaaaacaggtagagagggtttagaatgaatacccatttggcaagtatttctggagcacctgatggatgcgtgccaggcactgttccaggggatgcagcagaaacttgaccctc

SEQ ID NO: 6717 - DNA, 563 bp, Homo sapiens
  MAP TO AC011831.4; EXPRESSED IN LUNG, SIGNAL = 1.9; EXPRESSED IN PLACENTA, SIGNAL = 1.9; EXPRESSED IN HEART, SIGNAL =   2; EXPRESSED IN FETAL LIVER, SIGNAL = 1.7; EXPRESSED IN BRAIN, SIGNAL = 1.7; EXPRESSED IN BONE MARROW, SIGNAL = 1.6; EXPRESSED IN ADULT LIVER, SIGNAL = 3.3; EXPRESSED IN HELA, SIGNAL = 2.8
aatttggaatccacaggaggcttttttaagtaacagatgtcagggttttaaaaataaatcatatctgaattttaggaataaaaacgaataaggcagagaagaaaagtgccagagggaataatgcgagcaaaacacagaggactgcacctctagtggctcgtaatgagaaagaagatggtctcaaacctgagaaagataatgtggagtggacctctgttgtctcagtattaacagtcccttctaggaagtaggtagcatttctgaaaatagagtgaagcaattgactgatggatttaatctttaaactgcttaggtaaccatcaatctgtaatgagcttaatactcttaactaggtgctatttttcatgtgtgctactttgccagtgataaaggattacgaaaaattctttaccagaggaaaaaaaaaattgaatgacctttcttggaaggtggtcccttgtttgtgatcaaactttgacaagaactggtaattaattcctctaagaaattaacgttctcatagtgtgttttaagagtgagaacctcgaacatctgagacagct

SEQ ID NO: 6718 - DNA, 599 bp, Homo sapiens
  MAP TO AL161756.1; EXPRESSED IN LUNG, SIGNAL = 1.5; EXPRESSED IN PLACENTA, SIGNAL = 1.8; EXPRESSED IN ADULT LIVER, SIGNAL = 1.3; EXPRESSED IN HEART, SIGNAL = 1.2; EXPRESSED IN FETAL LIVER, SIGNAL = 1.1; EXPRESSED IN BRAIN, SIGNAL = 1.2; EXPRESSED IN BONE MARROW, SIGNAL = 1.1
tcagctgatgaagatgtggccagaggcttgcaggaacctaaccctgtatttcccctatgagtgaggattcagtgttcacagtgactttacggaacataattaccgcaaacaatgaggattgattgtcctatgtgtcaggccattgtaggtgtgtggtgggacacagaggctgacaagacatcgtccttgcccttgagcctaaattatcagggggagctggatgcacgagccatggataaatgggctgggggaagagtgggtttaggggtggggtagactggctctgagcaaagagagccggggaaggcttcggggttcctgtggctgcctcggaggagggaatctcagcacctttttgtccccatagtaacaagggcatggaacatctgctcaacatgaagtgcaaaaatgtggtcccagtgtatgacctgctgctggagatgctgaatgcccacgtgcttcgcgggtgcaagtcctccatcacggggtccgagtgcagcccggcagaggacagtaaaagcaaagagggctcccagaacccacagtctcagtgacgcctggccctgaggtgaactggcccacagaggtcacaggctgaa

SEQ ID NO: 6719 - DNA, 528 bp, Homo sapiens
  MAP TO AL162458.1; EXPRESSED IN ADULT LIVER, SIGNAL =   2; EXPRESSED IN HELA, SIGNAL = 2.7; EXPRESSED IN HEART, SIGNAL = 1.8; EXPRESSED IN BRAIN, SIGNAL = 1.4; EXPRESSED IN PLACENTA, SIGNAL = 1.9; EXPRESSED IN FETAL LIVER, SIGNAL = 1.6; EXPRESSED IN BONE MARROW, SIGNAL = 6.1; EXPRESSED IN LUNG, SIGNAL =   2
cagcagtactcggctaaccctcttcctctcgacctgtttcttcagagcacggagacgggtatcccttcgacgggaaggacgggctcctggcacacgcctttcctcctggccccggcattcagggagacgcccatttcgacgatgacgagttgtggtccctgggcaagggcgtcggtgagattctgagtcctcctggcccctgattcccttcattctctcccactcatcacccgccgccctaactccggtcccccctcctcctgcagtggttccaactcggtttggaaacgcagatggcgcggcctgccacttccccttcatcttcgagggccgctcctactctgcctgcaccaccgacggtcgctccgacggcttgccctggtgcagtaccacggccaactacgacaccgacgaccggtttggcttctgccccagcgagagtgagtgagggggctcgccgagggctgggggcgcccaccacccttgatggtcctgggttctaattccagctctgccactagtgctgtg

SEQ ID NO: 6720 - DNA, 523 bp, Homo sapiens
  MAP TO AL121911.10; EXPRESSED IN HELA, SIGNAL = 3.2; EXPRESSED IN LUNG, SIGNAL = 3.2; EXPRESSED IN BONE MARROW, SIGNAL = 5.5; EXPRESSED IN PLACENTA, SIGNAL = 3.6; EXPRESSED IN ADULT LIVER, SIGNAL = 3.7; EXPRESSED IN HEART, SIGNAL = 4.9; EXPRESSED IN FETAL LIVER, SIGNAL = 4.6; EXPRESSED IN BRAIN, SIGNAL = 4.8
tgggttattgaaatctccagctgttactgttgaattgcctattttttccttcagttctgtcagtttttgctttatgtatttgggggccctgttgttagatgcataaatgtacgtaattgttatatcttcaagatgaattacccttgtatcattgtaatgtgtctgtattagtctgttttcatgctgctgataaagacatacccaagactgggaagaaaaagaggtttaattggacttacagttccacatggctgggaaggcctcagaattatggcgggaggcaaaaggcactttttacatggtggcagcaagagaaaatgaggcagatgcaaaagcagaaacccctgataaaaccatcagatctcgtgagacttattcactaccatgagaacagtatgggggaaaccgcccccatgattcaaattatttcccactgggtccctcccacagtacatgggaattatagaagtacaattcaagatgagatttgggtggagacacagccaaaccataccagtgtccc

SEQ ID NO: 6721 - DNA, 552 bp, Homo sapiens
  MAP TO AC012241.4; EXPRESSED IN PLACENTA, SIGNAL = 2.7; EXPRESSED IN FETAL LIVER, SIGNAL = 2.5; EXPRESSED IN BONE MARROW, SIGNAL = 3.4; EXPRESSED IN LUNG, SIGNAL = 2.7; EXPRESSED IN ADULT LIVER, SIGNAL = 5.9; EXPRESSED IN HELA, SIGNAL = 4.4; EXPRESSED IN HEART, SIGNAL = 2.4; EXPRESSED IN BRAIN, SIGNAL = 2.8
ctagtttcgccctgaccttgtgacctcgccctgacctcctgccttgcgatcttttgttgcccttaaagcatgtgatctctgtgacccacaccctattcctacactccctcccctttgaaaattgctaataaaaacttgctggctttaccgctcagggggcatcacggaacctgccgacatgtgatgtctcccccagctttaaaatttctctcttttgtactctttctctttatttctcagactggctgacacttagggaaaatataaaagaaactacgttgaattatcggggacaggttcccccgatatgtggaggccatgaaggggtagggggaagtggcaactacatagcacagacacaaagacacaaacacaccatatcaccatgtagaggaatgggggagctggacaatgaagtggaatatgtgatggcaatgggcaaatgctacctgagagagaaggccggtagaccaaggctcttgcaaggtgagcaactcccaaaaaacgacatcatcccacaacaaacctccagcacttcccccatcttcaaaa

SEQ ID NO: 6722 - DNA, 505 bp, Homo sapiens
  MAP TO AC013584.3; EXPRESSED IN ADULT LIVER, SIGNAL = 1.6; EXPRESSED IN HEART, SIGNAL = 1.3; EXPRESSED IN BONE MARROW, SIGNAL = 1.5; EXPRESSED IN LUNG, SIGNAL = 1.5; EXPRESSED IN PLACENTA, SIGNAL = 1.5; EXPRESSED IN FETAL LIVER, SIGNAL = 1.2; EXPRESSED IN BRAIN, SIGNAL = 1.3
ctcatatggcagaagggtggaaggtcaaaagggactctctcaagcccttttaaaagggcactaattccattcatgagggctctgcattcaccttctagaggccccacttcttaatactattgcattaaagagtaagtttcagcatgaattttagagggacatatattttcaaaccacagaaggctgccgtaacaaaatacaacagactaggtagcttaagcaacagacatttattttctcaccattctggaagcacaaagtccaagatcaaggtgctggatttggttccctccgagcctctctccttggcttgcagatggtcacccttttgctgcctcttcacattgtcattcctgagtgcacatatttcacatgtgtcacttggatgttctaatctcctcttcttataaggacacctgtcagattggattagaaccacctaactgcttcattttaacttaattatctctttaaatgttatatctccagatgcggtcacattcta

SEQ ID NO: 6723 - DNA, 526 bp, Homo sapiens
  MAP TO AC013823.3; EXPRESSED IN HELA, SIGNAL = 4.1; EXPRESSED IN LUNG, SIGNAL = 2.7; EXPRESSED IN PLACENTA, SIGNAL = 2.5; EXPRESSED IN ADULT LIVER, SIGNAL =   3; EXPRESSED IN FETAL LIVER, SIGNAL = 2.4; EXPRESSED IN HEART, SIGNAL = 2.3; EXPRESSED IN BRAIN, SIGNAL = 2.5; EXPRESSED IN BONE MARROW, SIGNAL = 2.5
ccttttcatcttggggtcttcttatgtcatgaaactacctcctttatacaggatggcactgtcagtgagatatttgcctttaacctgcctacactagattaggagtcatatagatgtagataacttgggaagacctgcagtgttttccagtgtttttctctctggactttaagcttcctgagagcagtagcatccgtggtgcctaatcacaatctggaaagggatgtgctgatttttttacctgaatggatagatagaaggatagtattcttccttgtcaaatatctcttcagaattatcaaccctaaaatccttaccattgaggaaaacaccaaaaaagtaaatgaccttgcaggaatgagaaaaagtatatcttctacagcaggagtgcctgaaccccaggtcatagaccagaagtggtctgcagtctgttagaaaatgggctgaatagcaggaggtgagcagcaggcaagagagcaaagcttcattggtatttacagctgccccccatcacttgcactaccac

SEQ ID NO: 6724 - DNA, 574 bp, Homo sapiens
  MAP TO AL121901.10; EXPRESSED IN HELA, SIGNAL =  12; EXPRESSED IN HEART, SIGNAL =  13; EXPRESSED IN BONE MARROW, SIGNAL =  11; EXPRESSED IN LUNG, SIGNAL =  11; EXPRESSED IN PLACENTA, SIGNAL = 9.9; EXPRESSED IN ADULT LIVER, SIGNAL =   9; EXPRESSED IN FETAL LIVER, SIGNAL =  11; EXPRESSED IN BRAIN, SIGNAL =  13
ggtcttgcaggaagcttgacaaatggtgagttttcaggggtgtatgtgtgcatgtgtgtgtgtgtgtgtgtgtgtgtgtgtgtgtgtgtgtgtgtgtgtgtgtgtccaaccctgcaaagtggggagggacagggctggatgggggagggggcctgaggatctggaattgtcagatctgacccccagagacccttacacccatttccagccctcagcaatggcctgctgtctgggggcctgttgggcattctggaaaaccttccgctcctggacatcctgaagcctggaggaggtacttctggtggcctccttgggggactgcttggaaaagtgacgtcagtgattcctggcctgaacaacatcattgagtgagttgtcctaaaatagagctttgatctccaccagggaaccccaggtgaagatctgccagccccaggcagtgaccctgaagcagcgaccctgaagcagcgagggagcggcctgaagatggagccaggactcagttctgagacccatctccagtttggcagggacacccgtcctccccaaaccagcaatgccctcagttctaggc

SEQ ID NO: 6725 - DNA, 545 bp, Homo sapiens
  MAP TO AL133395.14; EXPRESSED IN ADULT LIVER, SIGNAL = 4.4; EXPRESSED IN HELA, SIGNAL = 5.1; EXPRESSED IN LUNG, SIGNAL = 5.4; EXPRESSED IN PLACENTA, SIGNAL = 4.1; EXPRESSED IN HEART, SIGNAL = 4.2; EXPRESSED IN BRAIN, SIGNAL = 4.4; EXPRESSED IN BONE MARROW, SIGNAL = 4.5; EXPRESSED IN FETAL LIVER, SIGNAL = 4.7
agaaggtggtggtgaggatgggggatcctccttctaagcttatggagagttttcaataataatacaagtaacttagaatagatgataacacaagtagcttaggatagttttcaatgataatacaagcacttagaaacagacattgttgtgatgtattaataataaattaacaatatttattgagtacttatttttgcagagtaccatgctggtgctccatggagtacaaacaccagtgcaaagtggtcttcatcttcacaaaacttataacctggttgtggtgtggggaagttcggtgtagcaatggcagtggtactgtgggatgggaagaattggcagtggagagtagtcagtgagcaaactgcataaatgcttatagagagagagactacgtaacatatttaagcacttggatttttttttccagtcagaacattggtttcaatcttggctttgttactcactatggaatcctgggaaagacatttaacttctgtatgtctcagagatggtaatagcatctctgccagtgggattgtgtgaag

SEQ ID NO: 6726 - DNA, 543 bp, Homo sapiens
  MAP TO AL161752.1; EXPRESSED IN HELA, SIGNAL = 2.5; EXPRESSED IN LUNG, SIGNAL = 2.6; EXPRESSED IN PLACENTA, SIGNAL = 2.4; EXPRESSED IN FETAL LIVER, SIGNAL = 1.8; EXPRESSED IN BONE MARROW, SIGNAL = 1.9; EXPRESSED IN ADULT LIVER, SIGNAL = 2.4; EXPRESSED IN HEART, SIGNAL =   2; EXPRESSED IN BRAIN, SIGNAL = 1.9
attacatgcctggcttcaccttgtttgattttacctgatttaccctttgttccgagttggatggagaaagataaggaaaatcttcaaaggaaagctgatcagtcgagtctggaaggacagtagttcctggaaaaagaagatgaactcactccatttgtagagcataatgctttgggtccacagttaaatccacgcttaaatgacatttcatagaaatccaggtcatattatcatgtctcactcttttgtcattgtctgtctggggctcagacattccacctctggtgacccactttttatttcttctgggcctccactaagggaagagtctttctggggaattgaaaagagaagcatttgtcaatgggatgagtgagaaggagatacattctggagatgataaggatatataatccacaggaattactttgttttcagagtctcattcaggagttattaaagtagaatcatctgagtctgaagcaaaccatccagataaaatactggcacctggccaccaagtgaatgtatgagccaggccat

SEQ ID NO: 6727 - DNA, 598 bp, Homo sapiens
  MAP TO AC013641.4; EXPRESSED IN ADULT LIVER, SIGNAL = 2.5; EXPRESSED IN BRAIN, SIGNAL = 3.8; EXPRESSED IN LUNG, SIGNAL = 3.6; EXPRESSED IN HELA, SIGNAL = 3.3; EXPRESSED IN BONE MARROW, SIGNAL = 3.7; EXPRESSED IN PLACENTA, SIGNAL = 2.4; EXPRESSED IN HEART, SIGNAL = 3.6; EXPRESSED IN FETAL LIVER, SIGNAL = 3.7
agccacttgttagccacagccctctaaactcaaagccaggtatcccttcccttccctcagtacagtgcatgctacaacgtcaatagcttcaacaagccaaacctaaaactggatggtaggctgctttcccagggttctaataacaggtggtgcacgggttagactccaggcaagcacaaccccagtttcctcattctcattcttccgtcctagagtcataggagtggcttctgttctgctcatctgaaattcagaaacaaaatagggcactcctttgatagactttttatttgctaaatttactggaaatacagcatcagatacagtgtccaatcttcctagtcttccatttttcaattcttctcttttcggtgtacatatcaatgactttataaaatatgaataagtactatatacatttatataaatgtaaaacatttaacaaaatactcggtatctaactctctccctagaagccagtaatcattgatgggttactgagtccttggaattgaaaactatgacttctattctcttccctttgttacagttcttctcaagttttcttgagtaaaaatccctgctctcatgtgttcaa

SEQ ID NO: 6728 - DNA, 542 bp, Homo sapiens
  MAP TO AC011831.4; EXPRESSED IN LUNG, SIGNAL = 3.3; EXPRESSED IN PLACENTA, SIGNAL = 3.2; EXPRESSED IN HEART, SIGNAL = 3.2; EXPRESSED IN FETAL LIVER, SIGNAL = 2.8; EXPRESSED IN BRAIN, SIGNAL =   3; EXPRESSED IN ADULT LIVER, SIGNAL = 3.7; EXPRESSED IN HELA, SIGNAL =   5; EXPRESSED IN BONE MARROW, SIGNAL =   3
ctaacccctgaccctaaccctgcatttttgcatggaatttggtgccattttttcctaatataagctatattttctactgtgttgaaaacataggcctttgtacaattacacccctaccattgcccacttctgaatgaaatgcctctatttgcccttaaagcagcagtaggaaagtggcaacaaataaaaagtgtaaatataagagaaggctttctggaaagctgacttcttagttttgcactaactggaaatagagaaaggagaggaaagggtgttcaagagtggctttcttaaaaccatggattcaaacaaaacatggaggttgcaatgagccaagttcgcaccattgcactccagccctggcgacagagctagactctgtctcaaacaaacaaacaaacaaaacatggaaaagtccaaatgtgttgaatcaaaatttatgaggatggaaaatgtcatgggtaagaaagaaaaacaaagtgatgctccaaaggtaagcagaattcagatgataagaagtctgagcttgattcccggagtaa

SEQ ID NO: 6729 - DNA, 583 bp, Homo sapiens
  MAP TO AL136172.12; EXPRESSED IN LUNG, SIGNAL = 3.3; EXPRESSED IN HEART, SIGNAL = 3.4; EXPRESSED IN FETAL LIVER, SIGNAL = 6.3; EXPRESSED IN BONE MARROW, SIGNAL = 4.2; EXPRESSED IN PLACENTA, SIGNAL = 2.7; EXPRESSED IN ADULT LIVER, SIGNAL =   3; EXPRESSED IN HELA, SIGNAL = 4.5; EXPRESSED IN BRAIN, SIGNAL =   3
ctagatgcacccatgcacacacacccatacctgtgcttctgcagcagggccaccaggatgctctccaattccatttgcttttgttctgcccacatgctgtctacctgacgaccaagccgtgcccttgctcctcgctcttggttgctctctctgtgtggttagaaaaagagaactagttgctatttgggtaggatgtggaaaggcaggggtatatccctatgcctatttcaatatctggtgtggactcttctacccaactgaattagattcagccacacttagggaggcagtatatatagtaatgaagagcacagaagtacaagtgtacacagttgcaaaacgtctccccacagattattaatgatagagggaaaaataactttatagaggagaaacctagcagacaccatgttaaccaactgatcaaagttaccatctaccaataatccaccaataatggcacaaattgccatcctgtgcctcctgataccaggcactgagaaggacacaacactacttctgtgaatgcatcacctgattcctctaatcatcattagaggaacgcatcctctaatcatgggga

SEQ ID NO: 6730 - DNA, 556 bp, Homo sapiens
  MAP TO AC022423.2; EXPRESSED IN HEART, SIGNAL = 1.3; EXPRESSED IN BRAIN, SIGNAL = 1.3; EXPRESSED IN BONE MARROW, SIGNAL = 1.2; EXPRESSED IN LUNG, SIGNAL = 1.3; EXPRESSED IN PLACENTA, SIGNAL = 1.2; EXPRESSED IN ADULT LIVER, SIGNAL = 1.2; EXPRESSED IN FETAL LIVER, SIGNAL = 1.8
aaaggagaatggttcaccccgagcagagttacttggtgaacgccgccaccaccgcccacagaacctcattggtgttggccttcagacattccacttcagggtctaagtcgagaagctgccgcactctcttggtagccaaatcatactgctcgtccagaagaggagcaaaagcattctccaggacgtccgaggcatgagccaggtaaatgagggccagcaagcgcctgtccatgcggtgagggtcattcacccatttgtcaagaacggcttcctgtactttcttgatgaggcgctgcttaatgttgttattggtgaggggatgtgttgtcatgtcaaaaagtaggaagttctgtttctctgttgtcaatacacccttttccaccaggtttttagctaatcgttcccgtacatttcttaactgataatgcaattttaatggattccatgtctcacctaaacaaaagatttcagaagttagaaatgatgagtattatctgctaattttgcaaaaattttgtactattaaacagtaaaatctgattttgccccaagaaaa

SEQ ID NO: 6731 - DNA, 589 bp, Homo sapiens
  MAP TO AC015785.3; EXPRESSED IN PLACENTA, SIGNAL = 1.4; EXPRESSED IN HEART, SIGNAL = 1.3; EXPRESSED IN FETAL LIVER, SIGNAL = 1.4; EXPRESSED IN BONE MARROW, SIGNAL = 1.6; EXPRESSED IN LUNG, SIGNAL = 1.4; EXPRESSED IN ADULT LIVER, SIGNAL = 1.3; EXPRESSED IN BRAIN, SIGNAL = 1.3
atcaatgtgttgggctcctcctgcaaaaggctggatggagtcatggcagttgttgatgtatgtgtgtgtgtgggcatattatgtgccggggagtggaggagagcaggcaaacggaggaggtgaaatgcctttccattaattttttttctgctttatgctcccgaattcacagctattaagataaatttatgtgaatcaggtctttctctccaggatcttgtgactttcgcctgtgtctccatataaaatttaataaccttgtttgtgaatcaaatcattcccacaacaacagattcaatctgggttgccacctgtctggctttggacaggagcaaccgaattgggcagctgggttccagcctttcacgggggctggtggttggttggctgcctggcaggtccgtttgccctggggttttccaaaagcaggagtagatgcggctgacatctgaaggggaaagggaggacagccatccatattcctgagacccgccttttcttcgaatgaccaaattggtggcagccctatttaaaaaacacaagaattcatgagagtctaaagcaaatgggggaataggtcaccatccaa

SEQ ID NO: 6732 - DNA, 515 bp, Homo sapiens
  MAP TO AL135923.11; EXPRESSED IN PLACENTA, SIGNAL = 1.6; EXPRESSED IN LUNG, SIGNAL = 1.5; EXPRESSED IN HEART, SIGNAL = 1.8; EXPRESSED IN FETAL LIVER, SIGNAL =   2; EXPRESSED IN BONE MARROW, SIGNAL = 1.6; EXPRESSED IN ADULT LIVER, SIGNAL = 1.6; EXPRESSED IN BRAIN, SIGNAL = 1.9
aaaggggtcatatgctcgtgcgcctctctccaactgagaccaggcactgggactttagaatccaagatcagtctgggaggtctaatggtggcgctgatctgtgccttgcttcctaattgaatgttgaagaggcagccagccttggctttctcctctgggtcacatagaggagttgaggtgactagaaagtctcttagtcaacaggaagtaagcttatgaagttcctctgccctagacatggtataaggatgctcagaactttcaccacggacctgagaagcagtgtagctatagcccagagagcaggggcttacaagtcttttcagtgtgaatagaaaagtgtaatgaccatgtcttttattttctatgttttgatcctttgacacctaggcccttgctgaccctgaaggaactatcccaactagggctggccaattcctaaagatagtaaaaaccttgccagctcaactagcaggcttttaaaatgcaaaccaaccaatccagatcccacattc

SEQ ID NO: 6733 - DNA, 555 bp, Homo sapiens
  MAP TO AC016517.4; EXPRESSED IN LUNG, SIGNAL = 2.4; EXPRESSED IN FETAL LIVER, SIGNAL =   2; EXPRESSED IN BONE MARROW, SIGNAL = 2.1; EXPRESSED IN PLACENTA, SIGNAL = 2.1; EXPRESSED IN ADULT LIVER, SIGNAL = 2.3; EXPRESSED IN HEART, SIGNAL = 2.1; EXPRESSED IN BRAIN, SIGNAL = 2.4
gtattttgctatggcagcccaagccgactaacacaatattctatgtctgactcacctaacatagtgaaagaatgcactggattttttataaacaattacatcatatagttatttttagcaaagtactatcacataaaatcttcaaaccagtaccacacatattactactaagttgtgtttgctctattttgggtagatatttattagtttattttatatggagaacatcgtggttactgatttatcatgctgcattttgctatttctcctagcttcgtgttattcacaagctaatgagcatttatttgcttcttcatccaagtcactggtgaacatattcaataaacttgagaacagagctttccggcataccagtaaaaacttctcatcaggtaggacatcaattgatcagccaatttttaaatgataagtatcaggatgtttctcgtggtctataggccttagtaagtcttctctcgtttgccagtttgatagtgttttatcagtatatgtcatgatagagagatgctgctgctgctgctaccaatggtgatt

SEQ ID NO: 6734 - DNA, 570 bp, Homo sapiens
  MAP TO AC007458.13; EXPRESSED IN HELA, SIGNAL = 2.4; EXPRESSED IN HEART, SIGNAL = 1.4; EXPRESSED IN LUNG, SIGNAL = 1.5; EXPRESSED IN PLACENTA, SIGNAL = 1.5; EXPRESSED IN ADULT LIVER, SIGNAL = 1.7; EXPRESSED IN FETAL LIVER, SIGNAL = 1.3; EXPRESSED IN BRAIN, SIGNAL = 1.2; EXPRESSED IN BONE MARROW, SIGNAL = 1.2
aaccatcacactgaggggtccagggtagacaaagagctttgaggtccagaataggtaggaatatgagaagggagaatcacaagaggaagggagtgggcacaggatatgaacttccaactttgcaaatttatgcaagactctttctcacctagttttgaccttcctccgaggttctctgtggccagacctatgaagcccagcttgagactcatgatcatttttcctcttagaattacgctgatcactttcctactgctgtggttgctgcaacatctggccaggatgctttctctcatcacttcaggggcacttccaggaagctgtaggcttcaggagtgagggaaaggtgaggagggttgtgtggaggccacagtccagcagaatcaatgagctggctttgcctctgcccctgcccctgcagaccctccctgctacagctcctgtctggtctaaggacttctctgctacaccagagaaatccatctcctcttcctcacatgtattcccaagatttgctacacagatggaaccccccagcaggtgtcagaatcctccagttcctggctactg

SEQ ID NO: 6735 - DNA, 531 bp, Homo sapiens
  MAP TO AC007000.2; EXPRESSED IN ADULT LIVER, SIGNAL =  10; EXPRESSED IN BRAIN, SIGNAL =  12; EXPRESSED IN BONE MARROW, SIGNAL =  14; EXPRESSED IN LUNG, SIGNAL =  12; EXPRESSED IN PLACENTA, SIGNAL =  11; EXPRESSED IN HELA, SIGNAL =  13; EXPRESSED IN HEART, SIGNAL =  11; EXPRESSED IN FETAL LIVER, SIGNAL =  13
ctcactgaacacaccatgcctggtattctctcacagtgatgtcaccatttctacctgccacgtatcggcgaaggttgggactcgactggtgtttgatcacgatgggaaaatcatccagaaaaccccctacccccaccccagagggaccacagtcagcgtgaagcagttattttctacgctacctgtgcgccataaggaatttcaaaggaatattaagaaggtacagtaaattaatcctggttttcaagagtattggttaatgcacacgagcaaaagatttactaaagatgtttattcttcagttgattctcttcccataatttattgagaaatgctttatttgcatttctcattaaagacttaacttcaggatgatttacttttttctttttatcacataatgtttattaggactgggaaacatagtgagactctgtctctatgaaaaattaaaaaaaaaattgactgggcatggtggcatgcacctgtagttccagctacttgggaggctgaagtgggaggatcacctga

SEQ ID NO: 6736 - DNA, 501 bp, Homo sapiens
  MAP TO AL161747.1; EXPRESSED IN HELA, SIGNAL = 3.3; EXPRESSED IN HEART, SIGNAL = 3.9; EXPRESSED IN BONE MARROW, SIGNAL = 2.6; EXPRESSED IN LUNG, SIGNAL = 3.9; EXPRESSED IN PLACENTA, SIGNAL = 3.9; EXPRESSED IN ADULT LIVER, SIGNAL = 3.4; EXPRESSED IN FETAL LIVER, SIGNAL = 3.1; EXPRESSED IN BRAIN, SIGNAL = 3.8
tgaatacaaggacaaataatggtgtaatctctaaagagctttccccactgttttccaaatagtacctcttcaacattgcaggctgttttggctgaagtttccatgaatataagtccatgctccctagcaaaggcctctccttcttctctcttcacatccctgcgggactctaggtcactgcaagagattaattaaggagaaaatttaaaaaaaagatccaagtgaaagaggaaagtctatttctaaaagaattccgtcgtggtttcaactgccagttatttcataaagaatgtagatcctacatgatactcttatacagagttactgatttttgtagcatcttggaaaatattctttagttttgggacagctgctgcatagttgaagataatacctcactctattacagagaaaatggcttatcaagggttaggcaagcccccatagttacacaaagcttatgctctattgcttgtttttccaatgagatcaaggagagca

SEQ ID NO: 6737 - DNA, 569 bp, Homo sapiens
  MAP TO AC021237.3; EXPRESSED IN PLACENTA, SIGNAL = 1.3; EXPRESSED IN LUNG, SIGNAL = 1.2; EXPRESSED IN ADULT LIVER, SIGNAL =   1; EXPRESSED IN HEART, SIGNAL = 1.9; EXPRESSED IN FETAL LIVER, SIGNAL =   1; EXPRESSED IN BRAIN, SIGNAL = 0.88; EXPRESSED IN BONE MARROW, SIGNAL = 0.83
ttggacccttggaaagtcacactactattccaactacttaccagttcttcagaggtcaaatgcatcaaacgttcagctattgcagcacactgggctgaatctcttataagttccccttgtttatctccaattactagctctggccaggtcagtccttcattcttcttaatcaaggaaatctccaagctagaagtttaaatgggaaaagtaatgttacattaagcaattatacaaattatacaatcagtagcaaacattgtttgtttctatcttctatagaaagaaccctccggtgtccagaggatggtttaccaaaaatcttgctcatttaagttttgcatgtgatggaaaacctataatccaatggcaaatagtccagatttaataaagaaagaaagtaccactggaaatggtacatcaaatggcctgaagagaggattgcctggaaagagtcaagtcatccagaaagtactggtatgcagtatgttcctgaacttaatagaaatacaagaagcatggatctataagacatctggggaatggtcgggggtgtgggcatgtaagcaaag

SEQ ID NO: 6738 - DNA, 589 bp, Homo sapiens
  MAP TO AC016057.3; EXPRESSED IN ADULT LIVER, SIGNAL = 2.9; EXPRESSED IN BONE MARROW, SIGNAL = 2.7; EXPRESSED IN HELA, SIGNAL = 2.7; EXPRESSED IN HEART, SIGNAL = 2.8; EXPRESSED IN LUNG, SIGNAL = 2.7; EXPRESSED IN PLACENTA, SIGNAL = 2.7; EXPRESSED IN FETAL LIVER, SIGNAL = 2.5; EXPRESSED IN BRAIN, SIGNAL = 3.1
gcctgggacatagttcttgcttttatataatcccaatattttattacaatcccaaaactcatatagataaaaacatatagcaataggaggatctatttcttattaatgctacctatagaaatttaactcaattcataaagtcactctcatgcttctatatattcccactaggttcccattaaatgtttcgttagaactgaagctgtgtttttagtttccataaaaagatgcagctgatttcatttgcacttggcactgagttttatagtgtataggcactcaggaggtgttgaatacagtctaagcaaaatttaatccatattctggtttctttttctagtgctgcatgaaatggatgattatggaaatacccctctgcattgtgctgtagaaaaaaaccaaattgaaagcgttaagtttcttctcagcagaggagcaaacccaaatctccgaaacttcaacatgatggctcctctccacatagctgtgcagggcatgaataatgaggtgatgaaggtaaggctactggccggctccaaagggcctgaccggcggtgcaggtgctgggacccagatccagctctctctg

SEQ ID NO: 6739 - DNA, 572 bp, Homo sapiens
  MAP TO AL133395.14; EXPRESSED IN PLACENTA, SIGNAL = 1.4; EXPRESSED IN LUNG, SIGNAL = 4.5; EXPRESSED IN BONE MARROW, SIGNAL = 7.6; EXPRESSED IN BRAIN, SIGNAL = 4.4; EXPRESSED IN FETAL LIVER, SIGNAL =   7; EXPRESSED IN HEART, SIGNAL = 3.7; EXPRESSED IN HELA, SIGNAL = 6.1; EXPRESSED IN ADULT LIVER, SIGNAL = 3.3
tttgaactggtgcttgttggctttaacatccacaatgaacacaagtgtgttgttgtcttctatcttcttcgtggtagacttagtggtcagtggaaacttggtgatagcacagtggtcaagcttgtttttcctgggggcagtcttttgaagacacttggggggcttcgggagtcatagtgtcttgggccgccggaaggtgggtgacttgcagatctttttttttcttgtggctgtggacatcttttagcactgccttcttggccttcaaagccttcactttggctttggctttaggaggggcaggagcttccttctttgccttcagcaccaccttgtaaaaaaaaggtcaaatgcccttactacatgtatccactgtattttttttattgtggtaggaagtacacaacataagatttaccatcttagccatttttaagtatacagtactgtagcattaaccaaatgcacgtcattgtgcaacagatcattactagatcatatggtaattctatttttacttttctcagcagtctccatactcttttccatagtggctgaacacatctgcattg

SEQ ID NO: 6740 - DNA, 537 bp, Homo sapiens
  MAP TO AC016890.4; EXPRESSED IN BRAIN, SIGNAL = 1.4; EXPRESSED IN LUNG, SIGNAL = 1.7; EXPRESSED IN PLACENTA, SIGNAL = 1.4; EXPRESSED IN ADULT LIVER, SIGNAL = 1.6; EXPRESSED IN FETAL LIVER, SIGNAL = 1.5; EXPRESSED IN BONE MARROW, SIGNAL = 1.7; EXPRESSED IN HEART, SIGNAL = 1.4
agagagagaaggcccagaggctggggaaagttaataaaggtgtagaatgtatagaatgagccattcatgctcagagccaaacaatggatttaaactgctcaagaatcattatttactaggtatctttataatttccttcctttaaaatggtctactgattttataaaatttcttatccctacaaaaaaacaaaagacaaaacttaatcatagactgccttgagttttttggcaaaaataattttaaaggcataacaaaaatatctaactattccagaaaaatcatgaaagctcaccacacaacagaaaatttgcctgtgaaaacaatgttcttctctcctcttgttacgcagagtcctgcagtcagcttcccagctgtaattctccccgacaccggggatattaagaatgtgaagaaaatgcttgagtagattataaataatagtgtgagacacagtgaattatattttctaataattggcattacattataagactgagggggaaaaaggatgaaagcaaagagaacgtgaatgca

SEQ ID NO: 6741 - DNA, 573 bp, Homo sapiens
  MAP TO AL133229.19; EXPRESSED IN PLACENTA, SIGNAL = 1.4; EXPRESSED IN FETAL LIVER, SIGNAL = 4.7; EXPRESSED IN LUNG, SIGNAL = 1.6; EXPRESSED IN ADULT LIVER, SIGNAL = 1.7; EXPRESSED IN HEART, SIGNAL =   2; EXPRESSED IN BONE MARROW, SIGNAL = 1.3; EXPRESSED IN BRAIN, SIGNAL = 1.5
taattctcgccacaatgctgcaaggcaggcaatctgattctcagactatggatgggcgaactggagcaagacgtggctgtcatgccacataggaaaggattgggtttgtttattgcacatctccagtggccagacagcacgatcttaatagatgtttttcccttgagtgaatgaataaatgagagtgaaggatttgcccaaggttgcccagtggggtctagaaggttggtagcctttctctgtgcacagaacttgtatttagctctgagaaaacagcatcatctctgcaacttcttccagaatgggagccacagcacctgcagttgctttgggtgtgatcaggggtggggtgggacctgccattcaaagcagccttgaggccgaatctcacaggttgatactgttgaatagttcaactgaaaaccgagggaacagaagcctggctgtgctcagatggactctggtcagaacatggcgagggggctttattattctgaaccccagaataggtgagtgatggccagtcaggactgaaacccaagctcctaactcccagctcagaccttggtctcc

SEQ ID NO: 6742 - DNA, 585 bp, Homo sapiens
  MAP TO AC019221.3; EXPRESSED IN ADULT LIVER, SIGNAL = 1.4; EXPRESSED IN PLACENTA, SIGNAL = 1.3; EXPRESSED IN HELA, SIGNAL = 3.9; EXPRESSED IN FETAL LIVER, SIGNAL = 2.1; EXPRESSED IN BRAIN, SIGNAL = 2.5; EXPRESSED IN BONE MARROW, SIGNAL = 1.9; EXPRESSED IN LUNG, SIGNAL = 1.5; EXPRESSED IN HEART, SIGNAL = 1.4
acccttctgtcatctccgtgttcaggggacgctgggcatgcccagtgctggcctgaggaaagcccctcctcatcacaaggccagttacctttttctgtgtgttctatgatctgacgaattgctttcttcaggctgttggctctcagcatgagctgttctcgaggccggaatatctgcggccgggccgggcaagctgatgccaccaagcggtctccggtggaaccgcagatgctgcccgacccatctccatcttcagcctcctcggcaatggtggggggcgggttgggcagagaggacgaggcctgggactcatcgtccaaggtcttgagaagggaatccagcttctctttcaggacagagcactgaacaaggaaaggaaatggcatgcagagctgaggcaggagaacagggtctgcaggcagggaacctcaggccatttcacccagacttcctagaactcgatcaaaaggaaaatcctaactctccacgcctaagtaacaaaaagaccagaggctactccctttgcaaatccccacctttcccgccctggcaggtgggaaattggggaaattggctgtccacaac

SEQ ID NO: 6743 - DNA, 593 bp, Homo sapiens
  MAP TO AP001421.1; EXPRESSED IN LUNG, SIGNAL = 2.9; EXPRESSED IN PLACENTA, SIGNAL = 1.8; EXPRESSED IN ADULT LIVER, SIGNAL =   2; EXPRESSED IN FETAL LIVER, SIGNAL = 2.2; EXPRESSED IN HEART, SIGNAL = 1.7; EXPRESSED IN BRAIN, SIGNAL = 3.3; EXPRESSED IN BONE MARROW, SIGNAL = 2.9
tgttctttcaggtgcgtcagcaatttcctgctcctcttggttggtcaggcactgaagctcctacacaggtcactgttgaaactcatcctgttcaagaaacaacctttcatgtagcccctcaacagaatgcattgcatcatcaccatggtaacagttcccatcaccatcaccaccaccaccaccatcaccaccaccatggacaacaagccttgggtaaccggaccaggccaagggtctacaattctccaacgaatagctcctctacccaagattctatggaggttggccacagtcaccactccatgacatccctgtcttcctcaacgacttcttcctcgacatcttcctcctctactggtaaccaaggcaatcaggcctaccagaatcgcccagtggctgctaataccttggactttggacagaatggagctatggacgttaatttgaccgtctactccaatccccgccaagagactggcatagctggacatccaacataccaattttctgctaatacaggtcctgcacattacatgactgaaggacatctgacaatgaggcaaggggctgatagagaagagtcccccatgaca

SEQ ID NO: 6744 - DNA, 505 bp, Homo sapiens
  MAP TO AL133259.21; EXPRESSED IN LUNG, SIGNAL =  11; EXPRESSED IN ADULT LIVER, SIGNAL =  11; EXPRESSED IN FETAL LIVER, SIGNAL =  13; EXPRESSED IN BRAIN, SIGNAL =  14; EXPRESSED IN HELA, SIGNAL =   7; EXPRESSED IN PLACENTA, SIGNAL =  12; EXPRESSED IN HEART, SIGNAL =  13; EXPRESSED IN BONE MARROW, SIGNAL =  12
tccactttcagccacagatgtgatccaaagctctagagctacactccaaaagagaggaacgattttaggacctaaaggaagtacacatgcattgttcaagaagaaaacaagtgcagcaggtcacctcacctgtcactctcaagatcaccttgccacttaggtttctctgcccatccgggtcctgcagagtgcacctgtatgtccccgagttgcagctggtagtgtttcggatcttcagggaatagggcctttcattgggggcgtcgaaagaaccattttgccccttctgatgatagtgctgtcccctgaggtggtcttcctggggtgtctccatcctctcttcaccaccctccaataactgtgaagaaggaatcagagcgcatcacggtccactgcaagcactccaactcgacaccaatgtttccattttgttttcagaagatccagcctcaacttatgtttgtaaaacaagacgtgatgcttttgtgtgtgtgtgacctctggg

SEQ ID NO: 6745 - DNA, 564 bp, Homo sapiens
  MAP TO AC010781.3; EXPRESSED IN LUNG, SIGNAL =   2; EXPRESSED IN ADULT LIVER, SIGNAL =   2; EXPRESSED IN HEART, SIGNAL =   2; EXPRESSED IN FETAL LIVER, SIGNAL = 2.2; EXPRESSED IN BRAIN, SIGNAL =   2; EXPRESSED IN BONE MARROW, SIGNAL = 2.4; EXPRESSED IN PLACENTA, SIGNAL = 1.5; EXPRESSED IN HELA, SIGNAL = 2.9
ttcaaaatagctgtgctgaggaaattaaaaagaaattcaaaattgttagagaagaaatccagaattctatcagatagattcaacaaagagatcaaaataattaagaaaaatgaagcagaaattctagagttgggaaatcaactgacatactgaataatgcatccatttttttaatagtagaattgatcaagcaaaagaatcttgaagaaaggcttgaagaaaggctatttgaaaatacacagtcagaagagatatttaaaaaaacaataaaaaacaaggaagcacgcattcaggatctagaaaatagcctccaaagggcaaatctaagaggtattggccttaaagaagaggtagagaaagagatgggagtagaaagtttcttaaaagggataataacagagtactttccaaacctcgagaaagaagactacttcaagaaagaagactacttcaaggcatttgttaatcaaaatcccaaaggtcaagcataaagaaagtatcctaaaagcaacaagagaaaagaaacaaataacatataaggaagctccgatacatctggcaaca

SEQ ID NO: 6746 - DNA, 566 bp, Homo sapiens
  MAP TO AC018469.3; EXPRESSED IN LUNG, SIGNAL = 5.4; EXPRESSED IN PLACENTA, SIGNAL = 4.4; EXPRESSED IN HEART, SIGNAL = 6.7; EXPRESSED IN BONE MARROW, SIGNAL = 8.7; EXPRESSED IN ADULT LIVER, SIGNAL = 5.7; EXPRESSED IN BRAIN, SIGNAL = 8.4; EXPRESSED IN HELA, SIGNAL = 8.2; EXPRESSED IN FETAL LIVER, SIGNAL =   8
tggaactgtttggagggttcagaagacaataggaagatgtgggaaagtttggaactccctagaggcatgttgaatggttttgaccaaaatgctgatagtgatatagacaatgaagttctggctgaagttgtctcagatggaaataataaatttattgagaaccggagtaaaggtcattcttgctatgctttagcaaaaaggtcagtgacattttgccctttctctagatatctatggaactttcaacttgagagagatggtctgaaattggaacttatgtttcaaagggaagcaggtcataaaagtttggaaattttgcagcctgaccatgtgatagaaaagaaaaacccattttctggggagaaattcaagccaggtgcagaaatttgcataagtaatgaggatccaaatgttaatcaccaggacaattgggaaaatagctccaaggcatgtcagagaccttaatggcagcccctcccatcagaggcccagagtcctaggagggaaaatggttttgtgggccaggccaggggcatgtcgctctgtgcagcctcaggacttgattc

SEQ ID NO: 6747 - DNA, 575 bp, Homo sapiens
  MAP TO AL161744.1; EXPRESSED IN LUNG, SIGNAL =  14; EXPRESSED IN ADULT LIVER, SIGNAL =  13; EXPRESSED IN HEART, SIGNAL =  14; EXPRESSED IN FETAL LIVER, SIGNAL =  11; EXPRESSED IN BRAIN, SIGNAL =  16; EXPRESSED IN BONE MARROW, SIGNAL =  10; EXPRESSED IN HELA, SIGNAL =  12; EXPRESSED IN PLACENTA, SIGNAL =  14
tttcaccactccagaaagccaaggaaagaactggagagggatgaaataaaaggaactatgtatatgcatggaatattttatagtttctaaaatatttccattttggtttattgtaaactgaaattcacacacacacacacacacacacacacacacacacacacaagcaagaagttaaaattatttgttttcttccccaggaatttatacatttggactgtttgctacagatatctttgtaaatgctggacaagtagtcacaggaaatctggccccacatttccttgccctgtgtaagcccaattatacagcacttggatgtcagcagtatacacaattcatcagtggggaagaggcctgtactggcaacccagatctcatcatgagagcccgaaaaacctttccatccaaagaagcagctctcagtgtctatgcagctatgtatctgaccgtaagtaaggattataaatttgttgtcttagtctgtattattgttaatttttccaatgtagaaattctttttctctgccataatgaaagtcacttaaagcacattcatatctttctgtaggcca

SEQ ID NO: 6748 - DNA, 594 bp, Homo sapiens
  MAP TO AL121747.19; EXPRESSED IN LUNG, SIGNAL = 1.7; EXPRESSED IN PLACENTA, SIGNAL = 1.8; EXPRESSED IN ADULT LIVER, SIGNAL = 1.5; EXPRESSED IN BRAIN, SIGNAL = 1.9; EXPRESSED IN FETAL LIVER, SIGNAL = 1.8; EXPRESSED IN HEART, SIGNAL = 1.7; EXPRESSED IN BONE MARROW, SIGNAL = 1.6
gatcagcagagcaggagacctttttgttcagtttcccccatccgaacttgctcgggaggccgctgcccaacagcaagctgagaggtgagcaaggctgggacactggttgaatgggggtggctgtaaatgagcagaagcgagggaaggtttgtgtctggtgggatagggttggggcatgtttccagagatctgagcttaggccagtggaatccccactgtagacatatgggtctttatcataaagagctttcccagcaatgaaaggctctgcccgcagcctatgtggtgtagttttgctttcctcctcctctttcataccacttccttccttccgtctctttcccctgcaggacggcagcctctactttcaaagactttgagctggcatcagcccagcagaggcctgatatggtgctgcggcagcggtttcggggacttctgcggcctgaagatcgaacaaaagatgtcctgaccaagccaaggaccaaccgctttgtgaaattggcagtgatggggctgacagtggcacttggagcggctgcactggctgtggtgaaaagtgccctggaatgggcccctaagtttcagctgcag

SEQ ID NO: 6749 - DNA, 553 bp, Homo sapiens
  MAP TO AF241728.1; EXPRESSED IN ADULT LIVER, SIGNAL = 1.5; EXPRESSED IN HEART, SIGNAL = 1.3; EXPRESSED IN BONE MARROW, SIGNAL = 1.2; EXPRESSED IN LUNG, SIGNAL = 1.4; EXPRESSED IN PLACENTA, SIGNAL = 1.4; EXPRESSED IN FETAL LIVER, SIGNAL = 1.1; EXPRESSED IN BRAIN, SIGNAL = 1.2
ccttttcaaaggagggaagcatattagatattgtctcagtgaacataaggatcataataagagaagtggtgtttgctagttgtcaattaaatatgagggccagggaaggcagaaaaaagaaatccttgaggaaagagcttcttttctttcacctgatttgttctttaaggctttataagacactgcaactaatttctggattgttctgactggttatttaatctgtagattttccaggcctttctttctcctcttttttctaccttcatttacttcactgcttgttagtatatgcactgatgaaaactcacactaaaagctttacattcttgttgataacactcataaagacttgtaaagaccataaactcaaactcaaagcaatcattcctgaactaggccctgcaggaattgggaaggaggctaaaggaactggactggctcccatccccctcccctccccactgcgattctgggaggcagagtaaacaggaagtggggtatgagggggaggagtagctgggagagacactccagaacagtctgcacatgc

SEQ ID NO: 6750 - DNA, 529 bp, Homo sapiens
  MAP TO AC013550.4; EXPRESSED IN PLACENTA, SIGNAL = 2.2; EXPRESSED IN HEART, SIGNAL =   7; EXPRESSED IN FETAL LIVER, SIGNAL = 2.1; EXPRESSED IN BONE MARROW, SIGNAL = 2.1; EXPRESSED IN LUNG, SIGNAL = 2.2; EXPRESSED IN ADULT LIVER, SIGNAL = 2.1; EXPRESSED IN BRAIN, SIGNAL = 2.3
gtggcatgaggctttagaggcaacaacaggccagctcaagttttattttatatttttagcttccataatctaatactccagggtttcacattctcaaaaatttaataactaggattgatatttccctacaatttgcaggtattcttcctcacaaggattcatgcattattgacttgcgatttcttttcttcctgtagcaattcctctgaaatcggaattagcttatgagatttttgataaggggcgggttcgcttctggctccaggctgagcacttatcaccagatgccagctaccgatttattattaacgacagagaagtctctgacagcgaggtgagttcctgtgtgagtgatctctggctttgcagggagtccacttttgttgtggtaggtcagttactgaatatcaacattctctgtctgtttccatccttttctgagccttaaagattggggcatggaaggttgacaagatgaatggagatggttgattcttacaatgttcaaaggtttggtctgggttacagg

SEQ ID NO: 6751 - DNA, 553 bp, Homo sapiens
  MAP TO AL133227.7; EXPRESSED IN PLACENTA, SIGNAL =   2; EXPRESSED IN ADULT LIVER, SIGNAL = 1.8; EXPRESSED IN HELA, SIGNAL = 2.3; EXPRESSED IN HEART, SIGNAL = 1.9; EXPRESSED IN BRAIN, SIGNAL = 2.2; EXPRESSED IN LUNG, SIGNAL =   2; EXPRESSED IN FETAL LIVER, SIGNAL = 2.3; EXPRESSED IN BONE MARROW, SIGNAL = 1.9
aaccgttctggaacacaagggaagccaaacaggtgagcaacgacagtactgggaaaggcctgggcacaaaaggggccatccaggcaggctcttcccggcaccaaggattgccccgtctcctctcaccttgccttcggcggttcccaatctttcggaagctgctgccctcacagagccggttcaggcgctgctgcttgatcagctcaaggatctcgggctggatcttctccctcagctccctggggtggacacacactggagtgagcggaaggtcatggggacagtggagctctggaaggaaagcagagctggcagccacctcccccgccagcctcccctgagatggaacttacacaattggcggggactggaagtcatcctgactcatcctctcagactggcgcagtcgtagaatctcagagtaactcaggctacgcaatttgctcttgaactgatccaaagagttgggtttggagggcaaagctcgagtgatttgctctcggacgacttgcataacctaagaggagaagaacccagccaactcacaccacta

SEQ ID NO: 6752 - DNA, 571 bp, Homo sapiens
  MAP TO AC009416.2; EXPRESSED IN ADULT LIVER, SIGNAL = 1.7; EXPRESSED IN HELA, SIGNAL = 2.4; EXPRESSED IN HEART, SIGNAL = 1.4; EXPRESSED IN FETAL LIVER, SIGNAL = 1.3; EXPRESSED IN LUNG, SIGNAL = 1.4; EXPRESSED IN PLACENTA, SIGNAL = 1.5; EXPRESSED IN BRAIN, SIGNAL = 1.5; EXPRESSED IN BONE MARROW, SIGNAL = 1.4
actgatctcatgggtggctctttttgaatagaagctttcaattcttcagctacaagggaaagaaaattccttacagtataaatatgcccttgagatattttccttggtagcatccagcatgaattgaatgcttactatgaaatattctgaccaatttacattctttaactcccacaatagctctatgaggtcgacattactcaaatcctcattttataagggaggacactgacacacacagacatgcagtaacttggtcaagttcacactggtgaacttgaaagtgatggagctgctagttgaacccgtgtagattgactgtagaacactgtaataacttgagagcaaaactggtccaattttctgttccttcctctatctgtgcttagaaccctgtcaccaatatgagaactacctcaggctagcctgctggaagataagaaacaacatggaccagagccaagtcatcctagccaaggctatcctagaccaaccaacacagccacattctcagctgatcacagatgcatgagcaagcccagccaagatctgcagaaccacccagagaaac

SEQ ID NO: 6753 - DNA, 592 bp, Homo sapiens
  MAP TO AL137143.6; EXPRESSED IN LUNG, SIGNAL = 1.4; EXPRESSED IN PLACENTA, SIGNAL = 1.4; EXPRESSED IN ADULT LIVER, SIGNAL = 1.4; EXPRESSED IN HEART, SIGNAL = 1.4; EXPRESSED IN FETAL LIVER, SIGNAL = 1.2; EXPRESSED IN BRAIN, SIGNAL = 1.5; EXPRESSED IN BONE MARROW, SIGNAL = 1.4
ttccaaagaataaggccaggttataatattaagtgtgactttcttgatatgattcatatcctgatatttatggtttaacacagtccatctgaatatttatgacattattatcagccagtaagaatgcccattctgtttttcagcttctcccgttggcaacggttacatcaagcctccggttccacctgcttctggcacgcacagggagaaagggccgccaaccatgctacccatcaatgtggacccagacagtaaaccaggagaatatgtcctcaaaagtttatttgtcaacttcaccactcaggctgaacgcaagattcgtatcattatggcagagcccctggtgagtacatgccgtggaaactgcctctttgaaaattcatctgtatgctgaatatactagatttaaacactataacaaaagatggattgcttttcctctggtttgtaaaggttctttaatatcataggtaatgttttaaagataatagttaggttccctgatctaagagaaacaatttgagtgttgaggattttaaaacgatcttcagcaaatactattcagtagcatgcttcactgctgcattttgga

SEQ ID NO: 6754 - DNA, 592 bp, Homo sapiens
  MAP TO AC011666.18; EXPRESSED IN HELA, SIGNAL = 2.2; EXPRESSED IN HEART, SIGNAL = 1.5; EXPRESSED IN BRAIN, SIGNAL = 1.4; EXPRESSED IN BONE MARROW, SIGNAL = 1.1e+02; EXPRESSED IN FETAL LIVER, SIGNAL =  14; EXPRESSED IN ADULT LIVER, SIGNAL = 1.8; EXPRESSED IN PLACENTA, SIGNAL = 2.2; EXPRESSED IN LUNG, SIGNAL = 5.2
cacagacccatgttttgctgcttctcattttgttaatactgaatgagggggctgagtcacagataaggacagggctgtctaatgcccagagccctgggaaggcagggttggagaagaggtggaagaagcacacagagcactgacttggaggaagagactttatttggccccagcccctagccccacagccaagacagtttgacataacaggccccggggccctggttgggtagaggcagggtggcctggcctcctgattagtggctgtggccgtggccaccatgactgtggccgtggccgtggccactgtgatcttggccactgtggtcttagggggtgccctccccgaggcctggcttatggtggtggccagggccctcgtcaccctcgtgcatcttctcgtgggaggcccaggttagcctcgccatcagcatgatgaactcctcgaagctcagctgcttgtctgcatttgtgtccaggtcctccatgatgtgttctatgaccttttcattcttattctccttctgcgggtggggagagaaggctgtgagagctgggtgtggccagaggtggggactgggagcacagtaaa

SEQ ID NO: 6755 - DNA, 577 bp, Homo sapiens
  MAP TO AC022470.3; EXPRESSED IN BONE MARROW, SIGNAL = 1.1; EXPRESSED IN ADULT LIVER, SIGNAL = 1.4; EXPRESSED IN HEART, SIGNAL = 1.3; EXPRESSED IN LUNG, SIGNAL = 1.5; EXPRESSED IN PLACENTA, SIGNAL = 5.4; EXPRESSED IN FETAL LIVER, SIGNAL = 1.5; EXPRESSED IN BRAIN, SIGNAL = 0.96
gaagcatctgtccacccaaccccaatccctgtgtgatctcagttctcacctgctttggcaaagtcttcccggttataactgaaatccttgaggaaggtgatactctcactcccagggttgtacctccgagatgtctccagaagcatcacctgcacacaagcagcaaacctcaaacggggactaggagggctggtcttggagcatggcctcttccagggaggccgattctcctcatccctgcttcccagcagatttggctctcccagctcgatgtctggaggcccctcccacagataatcccactctgcttctcccttcatcccttgcccttctccagccacctcgatcgcagaggtcttcagcagggcaatctggtcctcccggctgagctgcaggaagccgggtagctgtttagcaaagtcaactatctcctgcacagagacgatggccagctcagtgaagtgggcaaagcgctgctgacgggcctcccggctatggggatctggtgccatgggccaaggctacccaggagggaaaaggcaaagcgctttgagtcggacatcaagaagcccactgg

SEQ ID NO: 6756 - DNA, 535 bp, Homo sapiens
  MAP TO AL136984.7; EXPRESSED IN HELA, SIGNAL = 2.6; EXPRESSED IN LUNG, SIGNAL = 2.2; EXPRESSED IN PLACENTA, SIGNAL = 2.2; EXPRESSED IN HEART, SIGNAL = 2.1; EXPRESSED IN BONE MARROW, SIGNAL = 2.2; EXPRESSED IN ADULT LIVER, SIGNAL =   2; EXPRESSED IN FETAL LIVER, SIGNAL = 2.1; EXPRESSED IN BRAIN, SIGNAL = 2.2
catgtctccccctacccaccacccatccccccaatatatatatatttactaccatggatatttctgctgcccttattggcattctttctgctaggatggttgacaatattaccactatgtttggatttctgtttctgagacagaagaggtttactattcctatccttaaactcagctctatgtctccagttctgtttgtttataagttctggggataaaaggaagaaagtttcttagaaattactgaacgtttaatatttatcttgtaaatggcctctcattttattggtataatctagggtaaaaagaaaagaaacaaatgaaatatttataaattctctgaagttaaatcacagggttctataatttcacagtttaataaccttgggcatgtcatacacatctgagtttgtttctgctacacgtaaaataagatggaaacagtaaaccagtggttcttatctgtggacttgggaaacagatgcctaggcctcacccatagctactgaataaaactgtccaaggatgcgtgttt

SEQ ID NO: 6757 - DNA, 580 bp, Homo sapiens
  MAP TO AC017086.3; EXPRESSED IN PLACENTA, SIGNAL = 5.2; EXPRESSED IN FETAL LIVER, SIGNAL = 4.5; EXPRESSED IN BONE MARROW, SIGNAL = 5.7; EXPRESSED IN LUNG, SIGNAL = 5.7; EXPRESSED IN ADULT LIVER, SIGNAL = 6.4; EXPRESSED IN HELA, SIGNAL = 4.9; EXPRESSED IN HEART, SIGNAL = 4.5; EXPRESSED IN BRAIN, SIGNAL = 5.2
aaggcccataaatctgggagctcatagattcttatgagtttaagaactcccggagctgggctgcaagatataacaggcaggcatgtgagtcttttcttgggaggtttgctgactttctttagatcagaaaagatggccaaccccctcacccacctacctgataaagcttgaatgtgtttccatccaaatctcatgttgaaatgtaatccccaatgttggaggtggggcctggtgggaggtgactggatcatgggggaggatttctcttgaataatttagcacgatcctcttggtgctgtcctcacaatagtgagttttcatgagatctggtcttttaaaagtgtgtggcacctcctcgcctctctcttgctcctgcttttgccatgtgatgcgcaagttccctcttcgccttccaccatcattggaagcttccagaggcctagccagaagaagatgtcattatgctttctgtgcagcctgcagaaccatgagccaattaaacctctgttctttataagttacccagtctcagatatttctttatagcaagaaagaatggcctaacacaccaaccctgcct

SEQ ID NO: 6758 - DNA, 557 bp, Homo sapiens
  MAP TO AC011957.2; EXPRESSED IN PLACENTA, SIGNAL = 3.4; EXPRESSED IN LUNG, SIGNAL = 2.8; EXPRESSED IN ADULT LIVER, SIGNAL = 2.1; EXPRESSED IN HEART, SIGNAL =   4; EXPRESSED IN FETAL LIVER, SIGNAL = 1.6; EXPRESSED IN BRAIN, SIGNAL = 1.9; EXPRESSED IN BONE MARROW, SIGNAL = 1.5; EXPRESSED IN HELA, SIGNAL = 2.8
aggtggacatcagaggatggtaattgtgtcaccaggcatctagaggaagatgattgtgacggtgaggagggcctcaggaccagcgggggaaatgacatcaaggatggtgagggtgatgtcagggacagaaagggcaatgacggcgataaacttcatgcacagaggggatcagggccacctctattgagttaatggcactgaactctccacttaaaaagggttaaaatggtaaagttgatgtgcattttaccacaataaaaacaaaactgtaacaataaaaaccaacttggttatgtaaaaaactggaactgtgaagaagagcccatttttgaactacgcctgtcacaaccctttcaaaacaatctggttccctgattgagtgtgtggtttgggtaagatataaatttctcttctctaccttaccctcctgtaatttggttggtaaataatacttaaccacagcaccgcaaaccggctcctggaatcactagaaaacccagaggagagaccaaagagtttctcatactggaataatgtgctcatccagccttcatcat

SEQ ID NO: 6759 - DNA, 533 bp, Homo sapiens
  MAP TO AL161642.2; EXPRESSED IN ADULT LIVER, SIGNAL = 2.9; EXPRESSED IN HELA, SIGNAL = 2.3; EXPRESSED IN LUNG, SIGNAL = 2.4; EXPRESSED IN PLACENTA, SIGNAL = 1.5; EXPRESSED IN FETAL LIVER, SIGNAL = 2.1; EXPRESSED IN BRAIN, SIGNAL = 2.5; EXPRESSED IN BONE MARROW, SIGNAL = 3.7; EXPRESSED IN HEART, SIGNAL = 1.2
tcaaagcctgaagcatgttggggtctcttcatctctgtacatgcccatttcagagtccaggctggtgggagaggaaacagagtgggaaagaaaactagggtaagcagaaacgatgaaaccttataagagtgagattatcatgtacaagagtgagattatcacgtacaagagtgagattatcatgtacaagagtgagattatcatgtacaagagtgagattatcatgtacaagagtgagattatcatgtacaagagtgagattatcatgtacaagagtgagattatcatgtacaagagatcccaggaatactgacttgatgaaaaagtcacatcagagcactcagtttggcagagcttttctgccgaatgtttactcacattcactgtccgagattctatactgggggtacacacgtcctctgccctaaggcaattttgagtccaagagacattttgaggcctaaagatcataggaaactgcccctgagctcacacatatttccaatggtgtccccaatttcagggaatccatg

SEQ ID NO: 6760 - DNA, 565 bp, Homo sapiens
  MAP TO AC008521.5; EXPRESSED IN PLACENTA, SIGNAL = 1.4; EXPRESSED IN ADULT LIVER, SIGNAL = 2.8; EXPRESSED IN HEART, SIGNAL = 1.2; EXPRESSED IN FETAL LIVER, SIGNAL = 1.2; EXPRESSED IN BRAIN, SIGNAL = 1.5; EXPRESSED IN BONE MARROW, SIGNAL = 1.1; EXPRESSED IN HELA, SIGNAL = 2.3
tgcctttttgtccaacactgcaggtatttcccaacaaatgggctcatcccttccagtctagcacctcactcaaccccaaacctgatggttctctcacttccgaaagtgggggctgccacaccccagtctagaacgctatctgacctctttgtgcagcaccctggatgtacgaaggatctctggctcagaggcttttggaaggtgtgctgctcccacttactctgtgttctgatagacgcccaccgagatgttcagcccctccagctcttccttgagcatctgcaggtctgagttgacgaagctcagctccagccgcacttgctcccgcacctttgagtttgtggccactctgttcaaagagaagagggagagaagtgccctcagccaggtatcctggcttctaggtgagcagacccaatccccagtccctgcagggaggatcagggcacagcttgcagaggagggccaggagtgtcggttaaggtatcccagggacacagggcacctacccagcttgcagcacacctgccagtacgtggagctggggacacaggcaatgacactg

SEQ ID NO: 6761 - DNA, 569 bp, Homo sapiens
  MAP TO AC008510.4; EXPRESSED IN PLACENTA, SIGNAL = 4.3; EXPRESSED IN ADULT LIVER, SIGNAL = 5.3; EXPRESSED IN FETAL LIVER, SIGNAL = 3.5; EXPRESSED IN BRAIN, SIGNAL =   4; EXPRESSED IN BONE MARROW, SIGNAL = 4.7; EXPRESSED IN LUNG, SIGNAL = 3.9; EXPRESSED IN HELA, SIGNAL = 3.9; EXPRESSED IN HEART, SIGNAL = 3.1
aaatcagcaggaagtgggtggggccagataagagaataaaaagcaggctgccagagccagcagtggcaacctgcttggggacccttctacactgtggaagctttgttctttcactgtttgcaataaataatgctggtgctcactctctttgtgtccacactgcctttatgagctgcaacactcaaggtgaagctctgcagcttcactcctgaagtgaccgagaccacgagtccactgggaggaatggaaaactccagatgcactgccttaagagctgtaacactcactgtgaaggtctgcagcttcactcctgagctagcgagtctacaaaaccacaagaaggaagaaactcagaacacatctgaacatcagaaaaaacaaacaccagactcgccacctttaagaactgtaacactcaccataagggtacggggcttcattcttgaagtcagtgagaccaagaacccaccaattctggacacaacatcaaaaagatgtttctcagaatgcttctgtctagtttttatgtgaagatatctcctatttccccataggcctcaaagggatca

SEQ ID NO: 6762 - DNA, 575 bp, Homo sapiens
  MAP TO AL133173.13; EXPRESSED IN LUNG, SIGNAL = 4.4; EXPRESSED IN ADULT LIVER, SIGNAL = 3.7; EXPRESSED IN FETAL LIVER, SIGNAL = 6.4; EXPRESSED IN BRAIN, SIGNAL = 2.3; EXPRESSED IN BONE MARROW, SIGNAL = 5.9; EXPRESSED IN HELA, SIGNAL = 4.6; EXPRESSED IN PLACENTA, SIGNAL = 2.4; EXPRESSED IN HEART, SIGNAL = 2.1
ccaagccactcctagctcactacatttagtagtaagagaccagcttcttcacagcttccacgagtcatgtcaacacagctgttgtaacacatcgacacagacaataggagcacatcctgcagttgccgctactgctactacagatactcctgctgtttgtaccatttcacagtataaatatgctatggaagctcacaatcctcaatgatattttcatgcacagccccaggttaccatgcagcagcctgctgttcatgtagaaggtcaagaacctttgacttccatgatggcatcttctcctcctcaaaagcaaaaggaaacgagtgaatggctgtttcctcttcttcaagccacgccctagtcgtgctggtaaaatcattggcatgttggtggagattggtaatttagaactccttcatatgcttgaatctccagatcctctctatactaaggttgacaaaggtatagctgtactacaagagcaccaagctaaagaggctgcccagaaagcagttaatggtgccactggtgttccaattgtttaaaactgatcagggaccacagaaagaaacttg

SEQ ID NO: 6763 - DNA, 578 bp, Homo sapiens
  MAP TO AC022262.3; EXPRESSED IN HEART, SIGNAL = 2.7; EXPRESSED IN BRAIN, SIGNAL = 3.4; EXPRESSED IN LUNG, SIGNAL =   3; EXPRESSED IN PLACENTA, SIGNAL =   3; EXPRESSED IN ADULT LIVER, SIGNAL = 3.2; EXPRESSED IN FETAL LIVER, SIGNAL = 2.9; EXPRESSED IN BONE MARROW, SIGNAL = 2.6
cagctgccaaatccttcttccggaaatcaaagcagctttcaagaaatagacttggagctgtagcaagtcttcagcataaagcccacatttcaaacacataattgtctccccattctcctcctaccagattgcttccgtgatcaactcagccttggacctgtacttcccagagggctgtggcgtggacatctttgctgagctggggcgctactacgtgacctcggccttcactgtggcagtcagcatcattgccaagaaggaggttctgctagaccagcctggcagggagggtaggtgccaggtgggcagtggagccctgttctcccctgaagcttcagatagtggttggctgagcaggatctggttttagacccagtggcagaggatgggggaatctggagaatgaatgggttcttgctttagggaaactttcagtcaagtcgccccaccccaagacatttatttagcatcttttttcctaggcatgttcatattttgtgaagattgagagcaaaacaaccttagagagaatagatactctgttgaccccattttacagatgaggaaaccgagaacca

SEQ ID NO: 6764 - DNA, 600 bp, Homo sapiens
  MAP TO AC015897.3; EXPRESSED IN PLACENTA, SIGNAL = 2.7; EXPRESSED IN FETAL LIVER, SIGNAL = 2.3; EXPRESSED IN HEART, SIGNAL = 2.2; EXPRESSED IN BONE MARROW, SIGNAL = 2.6; EXPRESSED IN LUNG, SIGNAL = 3.1; EXPRESSED IN ADULT LIVER, SIGNAL = 2.7; EXPRESSED IN BRAIN, SIGNAL = 3.4; EXPRESSED IN HELA, SIGNAL = 2.9
tttcagctgctcctgtctcctgcctcccatcgccactcccagtggctgcctcctggccctctgacccttcctcttgctcctgtcctagccctgaggtcttccgctccagggctcctggagtgcccaccccagcctctgttgtatatgtcactgtcatctcctctgctgctggcacttcctccccactccgtgctaattcctctaccaccaccttccctgcagctgctgtttttcctactaactcatcctgttggtgccaggtttcttcctcagcaacatctgaaaaggaggaggctttatttgctattgttttctcctcggctgtctccgaacctgccaacacctccctctcctctgcggctgtttctgccgtttcaccacctccgtgtagaacttccacagccacaacccttcctcctcccatgccctcattcttttgtgtgtttccttctccttccatgtccccgtccccttccgagttcctgtcctgcatcgcttctgtctccagagtgcactctttgtcctcttcctcctctgggtcctcatccaccgcttcctccctgaacttttctgccattatgggatcttcctcagcaacag

SEQ ID NO: 6765 - DNA, 554 bp, Homo sapiens
  MAP TO AL139352.8; EXPRESSED IN ADULT LIVER, SIGNAL = 1.4; EXPRESSED IN PLACENTA, SIGNAL = 1.2; EXPRESSED IN FETAL LIVER, SIGNAL = 1.2; EXPRESSED IN BONE MARROW, SIGNAL = 1.3; EXPRESSED IN LUNG, SIGNAL = 1.4; EXPRESSED IN HEART, SIGNAL = 1.2; EXPRESSED IN BRAIN, SIGNAL = 1.3
ggcagaaataggtggctctgagctcagagggcagaggtggccttgcactagaaatccacctgccaaacttccaaatgggctacagcgactaaggggcctcacctgctgggcaaatcccccagctggagggtgtgctccagatcctccaggggtccccagggggttgagaagatgaggggcacacccagcagcccctaagggaggaagcgtggccatactggctaagggggcgcactcttcttgcaggccgcctgatcagatgcctgtaaaataagacagctttacaaagagggtgtcggaatgtgaggaggcagagggacaggcatgagtagaaagaccttcctcaggacctgaagtccaatgatcctggtcctgcgtcccactagctaggtgatattgaacaagtcacataacctctttgaacctcaatttcctcatttgtaaactttgcacaaatcatttctttgactgctaaacaagtatgttttgaggaccaacgacatgccaggtacggtgctgggcactgggaaaacagcagcaagcaacacagacat

SEQ ID NO: 6766 - DNA, 588 bp, Homo sapiens
  MAP TO AC007956.5; EXPRESSED IN LUNG, SIGNAL = 1.1; EXPRESSED IN PLACENTA, SIGNAL = 1.8; EXPRESSED IN ADULT LIVER, SIGNAL = 3.6; EXPRESSED IN FETAL LIVER, SIGNAL = 1.9; EXPRESSED IN BRAIN, SIGNAL = 1.7; EXPRESSED IN HELA, SIGNAL = 3.4; EXPRESSED IN HEART, SIGNAL = 1.6; EXPRESSED IN BONE MARROW, SIGNAL = 1.9
ttgacacagcacaagaagccaacagtaatttttatgctagcaagaaatttttaacagttgaaagtggctttctatacaactagttaacaatcttgccctgattctcagactgttactttgtggtttctgctaccaaataccaattacacacaggttcaagcagggggattttatgtcgagaatggaaggtccaacctttggtgacacatagcagtacaccttcttcggtttcttcaccttctcaggggtgtggcactcagagggcgagtcttcatcttcctcgtcaacagcagtggatggccggcgctgggaagaggtcatgtgcatgggtggcaggtgccatggagtgctgctacagttggtagcattataaagataagcctcaaagtaaatgctcacgcctgaagtggacacattgcgttcgacgatattcttctcatcctctgaagtataataaggaataaggtttaaagtagaagtcagagaagaaaaaaattacctatcacaggcttttagtccacaggacaagccaaatgtggcccaaatatcaaatgtttgtgaggtcagacaaaagagtgcaaacaggca

SEQ ID NO: 6767 - DNA, 553 bp, Homo sapiens
  MAP TO AL158176.5; EXPRESSED IN ADULT LIVER, SIGNAL = 1.8; EXPRESSED IN HELA, SIGNAL = 2.6; EXPRESSED IN FETAL LIVER, SIGNAL = 1.5; EXPRESSED IN LUNG, SIGNAL = 1.6; EXPRESSED IN PLACENTA, SIGNAL = 1.6; EXPRESSED IN HEART, SIGNAL = 1.7; EXPRESSED IN BRAIN, SIGNAL = 1.5; EXPRESSED IN BONE MARROW, SIGNAL = 1.6
ggcacttacggaacttaactggatgttctatgtgtctagtaatcagctgatagtagatattattctactcctatattgggatgcaaaatagcagaaatcatacagtctatgctggtactttcagcaaagactttacaacagtaatcagttcatgaaactctgtgttctgaaagtggccacagtcagtgaatttgtgcaatttggtttccaacctatcggccacttcttgttgttccttccagggaaggaacgggtcgtcagtagagccaaactgcacaatgtaagggcagttggccttgatcttctcccactgccaggggcgggtgaagtatcctatggggaaaaaaaaatgatctttcagtacccatggataatctcccttctagatattctaaaatacctactggcgacccacatagagacgcaaaggagcagagcctccgtgtgagttagaagcacttcttttgttttcaaatctgtagggcttgataccacagttactcgtgaagaggtggtatatggttcaactaaaaccaggcctctagggttcagt

SEQ ID NO: 6768 - DNA, 598 bp, Homo sapiens
  MAP TO AC022209.3; EXPRESSED IN LUNG, SIGNAL = 3.2; EXPRESSED IN PLACENTA, SIGNAL = 2.4; EXPRESSED IN ADULT LIVER, SIGNAL = 2.6; EXPRESSED IN FETAL LIVER, SIGNAL =   2; EXPRESSED IN BRAIN, SIGNAL = 2.2; EXPRESSED IN HEART, SIGNAL = 2.2; EXPRESSED IN BONE MARROW, SIGNAL = 2.1
agttggggcaaagaagacaggtgtcaaataaataagcataaataaataagcatacaactttttgtggcattaagaacgcttattgaaattgttcaaaaacttcaaaatgctttcctgtttttctcctaagaacgtcagtcataatcaataggacgatctcttctgtggtataatactttattggttttcaataagtatctgcccatcactttgctcttcccttgtgctatgctgcctacatgaacatgtttgctgttggtgattctgggtttgttgtcgttgtttttctatttggtgcttttattatttttagttttagttttcgttttcatttattaattgacataataattgtacatagtaatgttgtgacacatataacatatagtgatcagatcagggttattagcatatccatcatctcaaacatttatcatttctttgtgttgggaaaattcaatgtctttctagctatttggagctatatatttttgttagctatagtcattctacagtgttatagaacaccagaacttattcctcctatctatctgtaatattgtatcattcaacaaattcctccctatatcctccaccc

SEQ ID NO: 6769 - DNA, 548 bp, Homo sapiens
  MAP TO AL136089.8; EXPRESSED IN PLACENTA, SIGNAL = 1.6; EXPRESSED IN HEART, SIGNAL = 1.4; EXPRESSED IN LUNG, SIGNAL = 1.5; EXPRESSED IN ADULT LIVER, SIGNAL = 1.8; EXPRESSED IN FETAL LIVER, SIGNAL = 1.6; EXPRESSED IN BRAIN, SIGNAL = 1.3; EXPRESSED IN BONE MARROW, SIGNAL = 1.3
acatttggcaaagatgaggggtgagaaataagtgctttgacttactgatagcccagacaccaagaggaagtgaccaggcccctggctcagcaatggccatgccctccccagctatgtgcaggccctgggagggacacccaccccatccacatccgctcacctttcctgcggacaatgaactcaaacttggcaggcaccagggtgtccaggctgatgttgatggcactgagaccagccttctgaagctggggcagtagccgggccaggttgatgccattggtggtaacacctatggttctcagcccttccagccgctggagctgggctgtaaggacaacagaaagggggtcagactgcttgcttgttcttggtgaggccgggaaaagggctggaaggcaaaactctttgtccagacaagatggatggaaaagaggctctctgcagacctatattaaccaggcctaacttaaaaagaaagctaagaatcaaaactgacaaaaacaaccaaaagattaagcattgagtgctctgtgctaggtgctctgctg

SEQ ID NO: 6770 - DNA, 520 bp, Homo sapiens
  MAP TO AC010876.2; EXPRESSED IN BONE MARROW, SIGNAL =   2; EXPRESSED IN ADULT LIVER, SIGNAL = 2.1; EXPRESSED IN HELA, SIGNAL = 2.7; EXPRESSED IN BRAIN, SIGNAL =   2; EXPRESSED IN LUNG, SIGNAL = 1.8; EXPRESSED IN HEART, SIGNAL =   2; EXPRESSED IN PLACENTA, SIGNAL = 2.1; EXPRESSED IN FETAL LIVER, SIGNAL = 1.9
acataaaaatcagcgtgggcttgtttaaaatgcagattacagggcccatttccagaaattctatttgagtagaaacagagatagggacagaaatctgccttttccacagcaccccaagtgattctgattaggtgacccctggaaacacactgtgagagacactcttggttggatggtatccacacttacttgtgaggaagggctgaaacttcggtcagttttgatggatgcttccggttgactggttctcatcagctggatgatgggtctctgatattctgatcctgctgttaccatactgtaggctggggggaccacagtggtttgtttctgcagcaactgtaagatggtctggatgtcagtggtcatttgggattcaagcctacagaacagacagaagtaggaaaagacagtctaaaatagtccagaatttcaggagcatttaaaaaaatttcagcactaccaagaaacagaattatggccttgctttaaacaagaaggacaggagagggagcacaga

SEQ ID NO: 6771 - DNA, 553 bp, Homo sapiens
  MAP TO AC008468.4; EXPRESSED IN PLACENTA, SIGNAL = 0.96; EXPRESSED IN FETAL LIVER, SIGNAL = 0.89; EXPRESSED IN ADULT LIVER, SIGNAL =   1; EXPRESSED IN BONE MARROW, SIGNAL =   1; EXPRESSED IN HEART, SIGNAL = 1.2; EXPRESSED IN BRAIN, SIGNAL = 1.2; EXPRESSED IN LUNG, SIGNAL = 1.1
tggtgtcgctcttcactgagcacgtttccgcgaagaaagccgccgtttctttcttcctgcagaaaatatagcagaaagcggaatacctcttgcgaatccttccgcactaggaagccataaaaattgggccttgagagacagtttgaggtaaggcgttgtatatattgcagatagctctgaggtttttggagtgtaccatgctgtcttcctggcaaggaggcccaagaccgcggcaactactgctctggcttctgatcctcgcagcctgggagacgggtagtggccagctccactactccgtccccgaggaagcaaaacacggcaccttcgtgggccgcatcgctcaggacctggggctggagctggcggagctggtgccgcgcctgttccgggtggcgtccaaaagacacggggaccttctggaggtaaatctgcagaatggcattttgtttgtgaattctcggatcgaccgcgaggagctgtgtgggcggagcgcggagtgcagcatccacctggaggtgatcgtggacaggcctctgcaggttttccatgt

SEQ ID NO: 6772 - DNA, 515 bp, Homo sapiens
  MAP TO AC015807.3; EXPRESSED IN PLACENTA, SIGNAL = 3.1; EXPRESSED IN ADULT LIVER, SIGNAL = 3.5; EXPRESSED IN HEART, SIGNAL = 4.2; EXPRESSED IN FETAL LIVER, SIGNAL = 2.9; EXPRESSED IN BRAIN, SIGNAL = 2.9; EXPRESSED IN BONE MARROW, SIGNAL = 3.1; EXPRESSED IN LUNG, SIGNAL = 3.2; EXPRESSED IN HELA, SIGNAL = 4.3
cctgcctacttgacacctccatttggatgtttggtaggcatctcaaattcatcatggccaaaatcacctcctaatctcatctcttccaaatctgcttttgccataatctttgacaccacagtacatggcaattccacccttccatttctcaggaaaaaatcttgatattatcctttgcatttctctttcttctcaacccatatccaatctgtcagcaaatcttaactattttaccttcagaatatctccagaacctgagcagttgttaatatttaccactgtcacgactctcatggctctcctggctaactgcagtacctcctaacagttttttgtttttcctgatttcatccttgctctttatattctattctttacacaacatactgagtgatcctttcaaaatttaagtcagattatgtcactcctccactcaaagctcccaggggcttctcattttacaggggccaggaggacctgggggatctggcccctgctgactccctgagcttgtc

SEQ ID NO: 6773 - DNA, 564 bp, Homo sapiens
  MAP TO AC015873.2; EXPRESSED IN LUNG, SIGNAL = 3.3; EXPRESSED IN ADULT LIVER, SIGNAL =   3; EXPRESSED IN FETAL LIVER, SIGNAL = 3.2; EXPRESSED IN BRAIN, SIGNAL = 3.1; EXPRESSED IN BONE MARROW, SIGNAL = 3.4; EXPRESSED IN PLACENTA, SIGNAL = 2.7; EXPRESSED IN HEART, SIGNAL = 3.2
tgcctcacagagcatgtttcccgctccaggggacgtcaaaaagggagtcccacgttccctcaccaccttcctgtcccacccccagaatgtccagcttcgtggagccacctgacaccatgaagaaactgttctgggtggaatggccagatgcattgctggccaagcccaaggtgaccaagtcctgcctgatctgcgttgaaggacagctacaccgacttccacgtcgattgtgggggcgcctctgcctggtaccacatgctcaaggtgagccacaccccttggggcacctcggctttgccgtggccatgacccatctgcaagatggtctgcagtccccgggagccctgactgtggacaagatgccactccccagcgggccccggaccatccatccttgggacaggaggccatggagacattgctgggtggaggggcaggggtgcatgtgtgggtggaggggcaggggtgcatgtgggatcagagaactgcacgagtgtctcctttttctaatgggattcaggctcaataacaattgggtgaggctgctgggtgactgtgcactta

SEQ ID NO: 6774 - DNA, 592 bp, Homo sapiens
  MAP TO AC016224.6; EXPRESSED IN PLACENTA, SIGNAL =   2; EXPRESSED IN HELA, SIGNAL = 2.3; EXPRESSED IN HEART, SIGNAL =   2; EXPRESSED IN FETAL LIVER, SIGNAL = 1.9; EXPRESSED IN BRAIN, SIGNAL = 2.1; EXPRESSED IN BONE MARROW, SIGNAL = 1.9; EXPRESSED IN LUNG, SIGNAL = 1.2
atgaggttcacactccctgccctgcctaactcataaagtagctgcaggattcaagagatgaagggaaaaggcttcattgacagtaaaatgtcatctgcctctgaactgctattatctttcccttgtgatattttatagctcagtaccacttcttctcccgaagactgcctctcattccatggtggggcgcttgcaggctcatcagtataaatcagcttacaaataaatctatgaatgcactcacccacatcactccttcactctccatagtaacaaacagtgtatcatattttctggctgagaagcatggagcagtgtgtttgctttttctccttctcccagtgatatctgctggcccacccctaccagagatggtaaaattcaaaaagtcacatgacatcaaacagaagtgggaagggaagatcacctttagaggagctctagatgaagacattttttcagtttatgaatataggagtaatggcattttgtgtttaaaaaggatgcccacaacagaataattaaagtaagatgtttcaggagagtcatttttcaggaagaggagttgctcagggcttctctggctgtgtag

SEQ ID NO: 6775 - DNA, 595 bp, Homo sapiens
  MAP TO AL121883.13; EXPRESSED IN ADULT LIVER, SIGNAL = 1.3; EXPRESSED IN HEART, SIGNAL = 1.2; EXPRESSED IN FETAL LIVER, SIGNAL = 1.5; EXPRESSED IN BONE MARROW, SIGNAL = 1.3; EXPRESSED IN LUNG, SIGNAL = 1.2; EXPRESSED IN PLACENTA, SIGNAL = 1.3; EXPRESSED IN BRAIN, SIGNAL = 1.2
aggtccagaacacaactgccatttttacaattttgagcactccaagtatttttatgttcataggggaatggccgctgttttattgggtgtgctcggttggccttgcctccccctgagggcctgtcctcagtgccacctggggccccaggttcagtccaatccccatcctcagtccagggccgagccatagtttcaaaatcaaaccaaatatcaggctcctcctcatccagctcctggtcatcgtcccactcctcttccccctcctcctccagcttctcactgtcatctcttcctatggtcagtttgtaaacgcagtagcaggcaccagccccaatcatcagtcctgccgccatccaacccacttcccgagcccggcccatgctcaagtctgtgccagccttggggcaggacaggagagggccttgctccacctgattgaagaggtctctcaggtccagggtgagtaaggatggagggtagcagtcttcagcttcttccaggctcttgtagctctcttgtgatgaatctgtgggtgaaacagagtattagggctcgggactatgtttggctttgtgcctcacagacagggtggatt

SEQ ID NO: 6776 - DNA, 554 bp, Homo sapiens
  MAP TO AL158046.1; EXPRESSED IN PLACENTA, SIGNAL = 0.72; EXPRESSED IN HEART, SIGNAL = 1.2; EXPRESSED IN BONE MARROW, SIGNAL = 0.49; EXPRESSED IN ADULT LIVER, SIGNAL = 0.58; EXPRESSED IN FETAL LIVER, SIGNAL = 0.55; EXPRESSED IN BRAIN, SIGNAL = 0.61
ctgccagtctttccttcctgtgacacaagttcgtctgtggcctacaagttgttggaggtgtaacctattatttgttggccagttgttggaggtgttgggtgtgtggttttggacacagtgggcatgggtggtcccagtctcctggagtggacagccagacgaataccgtagacacaggaacacaaacatgttggagcgttcgtcgtatttctgggggttgcagctttgtctcagtttgctgtggctgaaccaaggaaaaaggcagatgcagacttctacaagaattataattctatggaagattttgaggagatgaggaaggctagcatctttcaggatgcaatgtaattttggaatataaggaatttatttgggttgaattacctagaagtttgtcactgacctgtgtttctgaaccatgaagcatagatatgtgggctaacaaatagtttctcttgataaataaactgttaacaagtatatataaaaaagagtctatagagaaatgtatacaggggatgtgaatagggagttcccagaagggaaacctgaat

SEQ ID NO: 6777 - DNA, 567 bp, Homo sapiens
  MAP TO AL138914.5; EXPRESSED IN LUNG, SIGNAL = 1.8; EXPRESSED IN PLACENTA, SIGNAL = 1.6; EXPRESSED IN HEART, SIGNAL = 1.6; EXPRESSED IN FETAL LIVER, SIGNAL = 1.6; EXPRESSED IN BRAIN, SIGNAL = 1.7; EXPRESSED IN BONE MARROW, SIGNAL = 1.6; EXPRESSED IN ADULT LIVER, SIGNAL = 1.6
gtcctgctgtctgaggttcccaggggaaggaggcaggtgacatcagggtggaattagatagaaatctctctctcattttaccttccctctgctcttactccacactgtgtaccttccctccatcccatctccacgcccatgcaccttccaacctccagtcccatccctggatcctgccacatcacatgtgacctcagttccctcgatgaatgctgttggctgcgtggccattcttctcctcccctatcccatcagcaatgattttaattttgctctacaatctgactcatgtactttgggagaagctgcccccgtcctcaaatcctgatgatggtcaagttcaagggtactcataggaccaaaatggtacaatcaggtaaatctccgaactactgctggggagtctggaagagtgggcttctctctctatttttatggacagcatgatgtgcaggacctgctgagagtgttttatcatctgggggtaggcagcctgtgaatgaaaccaacacatattgaagtcacactgagaaaatggcagaagatacagagaacaggggcagtagc

SEQ ID NO: 6778 - DNA, 504 bp, Homo sapiens
  MAP TO AL158049.2; EXPRESSED IN PLACENTA, SIGNAL = 2.3; EXPRESSED IN ADULT LIVER, SIGNAL = 2.5; EXPRESSED IN HELA, SIGNAL = 3.9; EXPRESSED IN HEART, SIGNAL = 2.4; EXPRESSED IN BONE MARROW, SIGNAL = 2.3; EXPRESSED IN LUNG, SIGNAL = 2.3; EXPRESSED IN BRAIN, SIGNAL = 1.9; EXPRESSED IN FETAL LIVER, SIGNAL = 2.2
caggaggcgctacagtcttcggcaaagaggtggcgagggtgccaattcctcccctcccagacagaaacccaggagccagccacaggcctcaacacccagggccgattgttggggctggggagaaccttgagcttgtcccatgagctcttttatttcacagactcgtttatttgggtgatcaataaatgaacccctactaggtctgaggcactgttccaggcactggggacagggtagtgaacagacaaaatctctgcccttgtggaactcacactccataggaaagaagaaacaagatcctaggacgactgaaacagaccacaaacaaggtaaagacaggaagcaaactcagcagtgtggcaggcaatgacatgtgctatggagggaaacagagccgcaaggagacgcggtgggttatggatctcagtgggcgacagcaggtgtcctaggagacggtagcagcacaaagaccagaagagagcaaggcatgaaccacaaggattt

SEQ ID NO: 6779 - DNA, 556 bp, Homo sapiens
  MAP TO AL132654.12; EXPRESSED IN LUNG, SIGNAL = 2.5; EXPRESSED IN HEART, SIGNAL = 2.2; EXPRESSED IN BONE MARROW, SIGNAL = 2.2; EXPRESSED IN ADULT LIVER, SIGNAL = 2.8; EXPRESSED IN BRAIN, SIGNAL = 2.3; EXPRESSED IN PLACENTA, SIGNAL = 2.2; EXPRESSED IN FETAL LIVER, SIGNAL = 2.3
acaggacaggacatcttggggaccagcagggcccacaaggcaggctgccagggcaggtgcctggagtgctgagacctctctattggcccgcagttctgggaaaggctcatcccctggggctgtgttctaggatcagggcccacctactggcctgcagccggaggggaggccctctccatcctggtccacccaggcctcaggactctgtgcaccgtccagctgagtccactgcctggccgttctcttcaagtcccctccctgcaaaggttggaacatcagagtcccacagttgggctgggcaggctaaagccagagaaacagatgggggctggctggtctctgatggctctatgccaccctgtcccccactctcagaaatgggtacaagttcctgtactgctcggcgcgggccattggcatggcggacctcaccaaggggtacctgcagtgggtgagcgaggggggctgtagcctccccaagggccccatccttctgtctcccagcagcctcttctctgccctccacaggtaaccacccctacacatacaagcccgt

SEQ ID NO: 6780 - DNA, 568 bp, Homo sapiens
  MAP TO AC019184.2; EXPRESSED IN HEART, SIGNAL = 2.6; EXPRESSED IN BRAIN, SIGNAL = 2.6; EXPRESSED IN BONE MARROW, SIGNAL = 2.9; EXPRESSED IN LUNG, SIGNAL = 2.9; EXPRESSED IN HELA, SIGNAL = 2.7; EXPRESSED IN PLACENTA, SIGNAL = 2.8; EXPRESSED IN ADULT LIVER, SIGNAL = 3.3; EXPRESSED IN FETAL LIVER, SIGNAL = 2.3
aggagctgaacaaagcttgctctgaaagtgaagcacagcctttttaacagctcatttccaggaagtaaattgggtacttgatttcttctctgaacacttacaattgagctaacatcttagactagttccccatttcccaatgggagtgttttctagttgtctattaccacttggttttcatcaggggcatccaccagaagaaaggcctaacccgacagcacaagatgataagcctaaaaccccagtatctcaacaatagaatgtgagaggagcctagaaaaaaatttctgcaaaacaatcctattgtgggaaactgaagcttcatattgcactgggaatacctaggttcttatcacagatttttcattttttccatcagaagagatatgagttaggcctgtgacacagcaagatttagaaagtctattgcactaatgaaaatgtcactgatgttacctctacagtaaaaaagggaaaaataaagaccagggaaagaagaaagcaacaaaggaactaaccagttagcactataataaatggcagcttctggaggccattttatcccatt

SEQ ID NO: 6781 - DNA, 529 bp, Homo sapiens
  MAP TO AC022997.3; EXPRESSED IN PLACENTA, SIGNAL = 3.3; EXPRESSED IN HEART, SIGNAL = 4.5; EXPRESSED IN FETAL LIVER, SIGNAL = 6.9; EXPRESSED IN BONE MARROW, SIGNAL = 6.7; EXPRESSED IN LUNG, SIGNAL = 4.8; EXPRESSED IN ADULT LIVER, SIGNAL = 6.1; EXPRESSED IN HELA, SIGNAL =   4; EXPRESSED IN BRAIN, SIGNAL = 5.7
gtgcacacacgcacatacagtcacatgccgcataatgatgttttagtcaaggatgaacagcatacacaacagtggtcctacaagatgagaatggagctgaaaaattcctatcccttattgacttcatagtcataacatcatagcacagtgcattgctaacatgtttgtggtgatgctggtgtaaacaaacttactgtgctgcttgttgtataaagctatagcacagacaattaagtatagtacataatacctgataataaatgactatgttactggctgatgtatttactatattttattattattttagagtatacttttatttatttgttttaaaaagtgaactgtatacagcctcagacaggtccttcaggaggtattccagaagaaagcattgttatcataggagatgtcagctccatgcatgttattgcccctgaagaccttccagtgggacaagatgtggaggtggaagacagtgatattgatgatcctgaccctgtgtaggcttaggctaatgtgtgtgttt

SEQ ID NO: 6782 - DNA, 507 bp, Homo sapiens
  MAP TO AC013800.3; EXPRESSED IN LUNG, SIGNAL = 3.4; EXPRESSED IN PLACENTA, SIGNAL = 2.8; EXPRESSED IN ADULT LIVER, SIGNAL = 2.1; EXPRESSED IN HEART, SIGNAL = 2.8; EXPRESSED IN BRAIN, SIGNAL = 2.7; EXPRESSED IN FETAL LIVER, SIGNAL = 2.5; EXPRESSED IN BONE MARROW, SIGNAL = 2.3
acccacctgtcttccctaccagagtgagctcagcacagacatttgaacaggtgctaaccatgtaccaggcacatagcagatgttcaataactatctttacatggactgagggatgaaggaaagtgagggccagaggaaggtgggtgccatgtgtcaggacatgtggagtggggctggcagagggcacgcacagacctgaaaattgaatggcaaagccctgcttgctggtgaagaagtcagtgctgaactgcaggacgaccgagttgaaggtgctatgcaggtccttgggcagggccgggccactcagctccttcagcagaaccccgctctccacaggcccatcccagatgcgcagcacgtcgtgaacctcctctgtgtcaaacaccaggaagtgtagcctgcacggagagaagaggcagtggtcatctggactcagcccttctttccaggggcttctggtcagaaggtcctaaacctacgaagactggccctaaacctacaaagccc

SEQ ID NO: 6783 - DNA, 582 bp, Homo sapiens
  MAP TO AC025226.2; EXPRESSED IN ADULT LIVER, SIGNAL = 1.6; EXPRESSED IN BONE MARROW, SIGNAL = 1.2; EXPRESSED IN LUNG, SIGNAL = 1.2; EXPRESSED IN PLACENTA, SIGNAL = 1.1; EXPRESSED IN HEART, SIGNAL = 2.7; EXPRESSED IN FETAL LIVER, SIGNAL = 1.3; EXPRESSED IN BRAIN, SIGNAL = 1.5
ttcccttattgtgcaaacccacaagtctgattggtctctggctaccatgcctacttctctcccccgcagtctcagccagtgccatcaactgcagcccttgcctcagcatctgagccaatctagcattgccagctcaatgtcccatagcaccactgcctctgatcaaaggctcttggccagcattacaccctcaccttcaggccaatccatcatccgaacccaacctggagcaggggtccacccaaaggctgatggtgctctgaagggagaagctgagcaatctgcagggcaccctagtgagcacctcttcatctgtgaggaatgtgggcgctgcaagtgcgtcccctgcacagcagctcgccctctcccctcctgctggctgtgcaaccagcgctgcctttgctctgctgagagcctcctcgattatggcacttgtctctgctgtgtcaagggcctcttctaccactgctccactgatgatgaagacaactgtgctgatgagccctgctcttgtgggcctagttcttgctttgtccgctgggcagccatgagcctcatctccctcttcctaccctgcctgtg

SEQ ID NO: 6784 - DNA, 512 bp, Homo sapiens
  MAP TO AL121908.7; EXPRESSED IN ADULT LIVER, SIGNAL = 6.1; EXPRESSED IN HELA, SIGNAL = 7.7; EXPRESSED IN FETAL LIVER, SIGNAL =   6; EXPRESSED IN BRAIN, SIGNAL = 6.1; EXPRESSED IN LUNG, SIGNAL = 5.4; EXPRESSED IN PLACENTA, SIGNAL = 5.5; EXPRESSED IN HEART, SIGNAL = 5.2; EXPRESSED IN BONE MARROW, SIGNAL =   6
tcactcccaacagcagtgtcggaggtacccgtttctctcgccagcacttgatacattcacattctgaaattttgccaatcctccagagaagtgaaaattacattgttcaatttgcattgccttgattgcttgagagtttttcttatgtgacttggccatttggatttcactctctgagcgttgcctcttcatttactttttgccctctttttccaggggggtcgttcgtgtgtttccgagtggtttgtgagcgccgtcgatctgatctggaacccgatcctccgctggctgcaaatattcgtgtcctgtctgttgtgtgtcttttcactttgtttatggtgtccttggttgatagaagcttttagttctgatgtggtaaaatgtatccagctttttttttgtttttgctttttgtgtcttaagaaaccctcttctgcctcgagtttagagtgaacagtttttctcagtgtggcagggagggtcctggttttagctctgaaagtcctgcatcc

SEQ ID NO: 6785 - DNA, 502 bp, Homo sapiens
  MAP TO AL133544.5; EXPRESSED IN LUNG, SIGNAL = 5.3; EXPRESSED IN HEART, SIGNAL = 3.7; EXPRESSED IN BONE MARROW, SIGNAL = 6.6; EXPRESSED IN BRAIN, SIGNAL = 6.6; EXPRESSED IN FETAL LIVER, SIGNAL = 5.1; EXPRESSED IN HELA, SIGNAL = 4.4; EXPRESSED IN ADULT LIVER, SIGNAL = 7.3; EXPRESSED IN PLACENTA, SIGNAL = 3.7
acagacaatggggaaaatgcctccaattcatttcagagacctccacagcagcccttcctatcacaggcctggaagcctaggaggaaaaaatggtttcatgggccaggcccagggcctcactgctctgtgcagccttgagacatggggccctgtgtcccagctgctctggctccagctgtggctaaaaggggccaagatacagctcaggctattaattcagagggtgaaagcctcaagtcttggcagcttccatgtggtattgagcctgtgggtgtgcagaaggcaagaggtgaggtttagaaacctctgcctagattacagaggatgtatagaaatgcttggatgtccaggtagaagtccactgcaggggtggaaccctcatggagaacctctactagggcagtgcagaagagaaatgaggggttacagcccccacacagtctccactggggcactgcctaggggcactgcctagtagatctgtgagaagagggccactgtc

SEQ ID NO: 6786 - DNA, 587 bp, Homo sapiens
  MAP TO AL133319.21; EXPRESSED IN PLACENTA, SIGNAL = 1.1; EXPRESSED IN ADULT LIVER, SIGNAL = 1.2; EXPRESSED IN FETAL LIVER, SIGNAL = 0.95; EXPRESSED IN LUNG, SIGNAL = 0.99; EXPRESSED IN HEART, SIGNAL = 1.2; EXPRESSED IN BRAIN, SIGNAL = 1.1; EXPRESSED IN BONE MARROW, SIGNAL = 0.97
tcacaggcttctgtggaaacacataggagggactttgaatgtagcattaaggagtcagatataccttcctggtggaactgatacttgaaataagtccgaatttttagtttaagagtaggtatagagtattctaaattactggagaagcaaataagtacaatgcaaaaagaagtatgagaatctgaaacgtagttgaagtttatggtaatggtggaacttaggaggagggtccctgttaaaagagagggtgagaaagaaagagtgcaaagtataaatatcatgcatgtcgtgctactgtttaaaatttatcctgaaggctatgaacattgtcacactgtgggattattggaaactttcagcagggaagtgacacactaaaatttacattttcgaatgatccttctggaagcatgggagatgaagaacaaggattcaagagtgaggacagggcttgcagccatggagttaaagggcctggatttaccctcatgtcttgatcaactctaacattacatgaagaagacttctcctcagacattggacaataggcagcacaagaaggactgtgaatctcgggggaagagaag

SEQ ID NO: 6787 - DNA, 600 bp, Homo sapiens
  MAP TO AC020906.3; EXPRESSED IN PLACENTA, SIGNAL = 3.8; EXPRESSED IN FETAL LIVER, SIGNAL = 3.4; EXPRESSED IN ADULT LIVER, SIGNAL = 4.4; EXPRESSED IN BONE MARROW, SIGNAL = 3.6; EXPRESSED IN HEART, SIGNAL = 4.2; EXPRESSED IN BRAIN, SIGNAL = 3.9; EXPRESSED IN LUNG, SIGNAL = 4.3
gttggctgtgcctttctctccaatgcctccccagtacctgttcccagcacagtagatgcttaatacattaagtcatatgaatgcatgaattttcccaaccggaccctgagcctaggaatagaagcaatttgctcaaagccacacagctaatttgagggtcctcgaatcagatgtggctccagccaagtccagaggccaaaccttaacccacagccacagccaccccttcctccccaggctgagtcactcaccctcttctcgtggttggggacaatgcagcggacaaaactggggttggtgttgctgagtgtggccatgaggcggctcagggactccttgtagagctgtcccactgtccggaacataccccgacgggggcggccacctggtgggccgtcgcccaggctgctcacctgttccagccccacgatgccctccactgtcagatggagatgcagagagagagagaaggaggtcagggtcagttttagggacctgggccaaaggtcaagggtcttatcatttatcacaactggcactttacatatgaaggacctcacacagcctgtaaggtagatatcagcttcattggacagatgg

SEQ ID NO: 6788 - DNA, 533 bp, Homo sapiens
  MAP TO AL158059.2; EXPRESSED IN ADULT LIVER, SIGNAL = 2.2; EXPRESSED IN HELA, SIGNAL = 3.2; EXPRESSED IN HEART, SIGNAL = 2.3; EXPRESSED IN FETAL LIVER, SIGNAL = 2.2; EXPRESSED IN BRAIN, SIGNAL = 1.9; EXPRESSED IN LUNG, SIGNAL = 1.9; EXPRESSED IN PLACENTA, SIGNAL = 1.9; EXPRESSED IN BONE MARROW, SIGNAL =   2
ctccgtctgttctctcctgccacttaatgctcttggactctaagctgctcaaacttgtacctggaattataatacatagacataaaataaagcccacgctgggaaaggtggttctgagatacttcagttctctacttacccttcctttcctccctctcgttctgtttcacttgctgctcaaactcatcatgcacacatagctccacagggagggaattgggctgaagcaaacaaggacttgggctatgtccatccctgtctgcctctagagctgtctgtctgtcttcctgatgctctcaggatcacttcctctccacatgtagcttcagcgctgctccccagtggcaggacttaggtctgggagatctgagcagctgctgccttatgttttggatttggcattgtctgcctgcctctcctagagccgctgtgggcttctgttctgttcctcagctcccttctggcttggaaccagtatcctggacccttctgggatggagcctgctttactctcgcagccccaaagattataa

SEQ ID NO: 6789 - DNA, 554 bp, Homo sapiens
  MAP TO AC008164.3; EXPRESSED IN BONE MARROW, SIGNAL = 1.8; EXPRESSED IN ADULT LIVER, SIGNAL = 1.4; EXPRESSED IN BRAIN, SIGNAL = 1.6; EXPRESSED IN LUNG, SIGNAL = 1.3; EXPRESSED IN PLACENTA, SIGNAL = 1.1; EXPRESSED IN HEART, SIGNAL = 1.2; EXPRESSED IN FETAL LIVER, SIGNAL = 1.6
tggaatggccttttgaagtcacaatttcaatgccaactaggtgacaatactttgcagggctgaggcaaagttctccagaaggctatgtacgctctgaatgagcatccaatatatggtactgtttctcccatagccaggatttccaggaatcaagaagtggaagtggaagtagcacccctcaccctcacccctagcaatccactagcaaaatttttccttcctgttcctgtgacattgcattctgctggcctagaggtattagttccagagggaggaacactgccaccaggagacacaacaacaattccattaaactggaagttaagattgccacctggacactttgggctcctccaatctttaagtcaacaggctaagaagggagttacagtgttggctggggtgattaacctgaactatcaagatgaaatcagtctactacaccacaaaggaggtaaggaagagtatgtgtggaatacaggagatctattagggcatctcttagtattaccatgccctttgattaaggtcagtgggaaactacaacagcccaa

SEQ ID NO: 6790 - DNA, 504 bp, Homo sapiens
  MAP TO AC024196.2; EXPRESSED IN LUNG, SIGNAL = 2.5; EXPRESSED IN PLACENTA, SIGNAL = 2.7; EXPRESSED IN ADULT LIVER, SIGNAL =   2; EXPRESSED IN HEART, SIGNAL = 2.3; EXPRESSED IN FETAL LIVER, SIGNAL = 1.9; EXPRESSED IN BONE MARROW, SIGNAL = 1.7; EXPRESSED IN BRAIN, SIGNAL = 1.7
agatccaggtgagcatgtccctcggctgaatccaccccgggataagccttgttttctcctacccccagtcccccaggatggctgcctctggtttttggggccctttccccactcttgagaggcaacaacatggggactctgggcgatgactgcctttgggttccaggtgcggttcctggagcagcagaatcaggtgctagagaccaagtggaacctcctacagcagctggacttgaacaactgcaggaagaacctggagcccatttatgagggctacatcagcaacctgcagaagcagctggagatgctgtctggggacggggtgaggctggattcggagctgaggaacatgcaggatttggtggaggactacaagaagaggtgagtgagtggcagggaatatggccctggaggatctgatttcaaatgaggttttcgtttggagatggcatttttgcttctgagatccttgctgataccgggggagggaggaacatccagaca

SEQ ID NO: 6791 - DNA, 533 bp, Homo sapiens
  MAP TO AL136363.4; EXPRESSED IN ADULT LIVER, SIGNAL = 0.86; EXPRESSED IN HEART, SIGNAL = 1.3; EXPRESSED IN BONE MARROW, SIGNAL =   1; EXPRESSED IN LUNG, SIGNAL = 1.1; EXPRESSED IN BRAIN, SIGNAL = 0.86; EXPRESSED IN PLACENTA, SIGNAL = 0.99; EXPRESSED IN FETAL LIVER, SIGNAL = 0.89
aggctctgagtttgtgctggggaatgtctgcaacgggtcctgtgatgtgatctatcttcaggtctcccaactgtggataccagcacctgctttcatggaggtgacaggggagtgaagtagattctgtgagaatccgtgattgtagatattcttagtgtgctggctttcctgaatggtggttattgtagcagtgaagtggtcacttggacagactcaggaactctgggtagccaggatgttgcagtcagttgtattagctgttcatttgttctttctgaaagtagggttattctgtcatgagctgctgtaatggcctgagttcattggcctccagcgaagaggtggcactttcaagagagtacgagctgcagtagtattagggggatataaatttgccctatgttggccaaggtaggtattctgctttatcaggtaatgggtggggccataaagctcccaaaagtttatgtcttttgtgttaaactaccagggtgggtagacaaatagcatcaagtggggtaggttaggctggt

SEQ ID NO: 6792 - DNA, 536 bp, Homo sapiens
  MAP TO AC015599.3; EXPRESSED IN LUNG, SIGNAL = 3.6; EXPRESSED IN PLACENTA, SIGNAL = 3.5; EXPRESSED IN HELA, SIGNAL =   5; EXPRESSED IN FETAL LIVER, SIGNAL = 3.6; EXPRESSED IN BONE MARROW, SIGNAL = 3.7; EXPRESSED IN HEART, SIGNAL = 3.7; EXPRESSED IN ADULT LIVER, SIGNAL = 3.7; EXPRESSED IN BRAIN, SIGNAL = 3.3
gccagtctcaccttctggaggtcagggacagaggagtgatctgagctatttgtcaaacagcagagagggttattctgtttcagaagcaaaagcgtctaaagtaagaaggaagggtcagcatgaagtcacactgaagaatctccaaaatgcacagatttcaaaaactgtggatttcagacctgaattccctttttgtggacttgcacattcacacaccaaattttgacatgctttccataaaccaggaaaagctcttggtgcacttggagcttcacagaggaatgagccaaagggcaaacttcctccagtgctggggccttgtggcatgtcctgtgcgatgcaaaaaatgggtgagaggtagtgatgaggaaagaatggtggggcaagggcagggcaaggcccttctgcaggagaatcacactttttgaaagcatacgcagcaggtccagcagtgaagggcagggccactgaggagagagacattcactgttagaaggaggctgtttattaagaactctgggtgggagacatacctg

SEQ ID NO: 6793 - DNA, 503 bp, Homo sapiens
  MAP TO AC020704.3; EXPRESSED IN LUNG, SIGNAL = 2.6; EXPRESSED IN PLACENTA, SIGNAL = 1.9; EXPRESSED IN FETAL LIVER, SIGNAL = 2.6; EXPRESSED IN ADULT LIVER, SIGNAL = 2.3; EXPRESSED IN HEART, SIGNAL = 2.7; EXPRESSED IN BRAIN, SIGNAL = 2.5; EXPRESSED IN BONE MARROW, SIGNAL = 3.4
catccaggctttgttgttccatttagcataattcttatgagccctgggattttccgaatggtaaatgagcagtggcttcaacctaaagtcactagctgcattagtgactgactttccctaacaagagagtcagcctgtcctttgaagctttgaagccccgcatcgacttctcctctctcaatagcaaagttctagattgtaccttcttccaatagaaggctgctttgtctatattgaaaatctactgtttagtgtagccaccttcatcgatgatcttagctggatcttctggataacttgctgcagcatctccatcagcacttgctgcttcaccttgcattttcatattatggagatggtttctttccttaaacttcattaaccaacctctactagcttccaccttttcttttgcagcttcttcagctctctcagtcttcgcagaattaaagagagttagggcctcactctgggttaggtttcggcttatggaatgttgtggc

SEQ ID NO: 6794 - DNA, 577 bp, Homo sapiens
  MAP TO AC013591.3; EXPRESSED IN HEART, SIGNAL =   2; EXPRESSED IN LUNG, SIGNAL = 2.6; EXPRESSED IN PLACENTA, SIGNAL =   2; EXPRESSED IN ADULT LIVER, SIGNAL = 1.9; EXPRESSED IN BRAIN, SIGNAL = 3.3; EXPRESSED IN FETAL LIVER, SIGNAL = 2.3; EXPRESSED IN BONE MARROW, SIGNAL = 2.1
gtggcccaagacaattcttcttcttccagtgtggcccagggaagccaaaagagtggacaccccttcaacgggtactcttttctttgctcagtctgtatcgcccggccgtgcaggtctgtgcctttacagcagtcaccgttcctaccctgcctctcttcagaggttcaagccaacagggcagtataccagatgtgtgaagcggagctctaagtcccggaaagccctgtctactgcaatgacagcctgttggggcattatgaacatacagaaggaaggaaagtagataggaaaatcttcagtactcagcatagattataggtcaagaacccagtggtgccagaacaggcttccggagcctcctctgtaaagccccagcaccgcccatgctggagaggctactacaccagcgacacttgccatagctggtgacaatgcccgagtgcttcccgaaatatgtggccccgttcatgaaaccaaagttggttccaccatggaacatatatacattgaaggagatctcatatttgatgaattcagacacagcatgttcaacctctgcaaaggggaacatgagaac

SEQ ID NO: 6795 - DNA, 502 bp, Homo sapiens
  MAP TO AC019214.2; EXPRESSED IN LUNG, SIGNAL = 3.7; EXPRESSED IN BONE MARROW, SIGNAL = 3.2; EXPRESSED IN BRAIN, SIGNAL = 3.3; EXPRESSED IN FETAL LIVER, SIGNAL = 5.9; EXPRESSED IN HEART, SIGNAL = 3.1; EXPRESSED IN HELA, SIGNAL = 3.4; EXPRESSED IN ADULT LIVER, SIGNAL = 3.9; EXPRESSED IN PLACENTA, SIGNAL = 3.6
aagtcctgccaacagtgaccttgggcatggacgttacagatgagggaagtcaggcccaggttggggcaggactcaggggcggccctcagggcatccagagtgggctgggcctgaacttggggattctgattccaagtctggctctcccaacctgggtcctgacgggaaagtcatgcttgctgtccactccctaccccgccatcagcattggccgcagttgttgtgctcaccattgcagaggaacccggaagtgcggggacactggaagttgtcatactcgcagaactgaccctcgtagcggccttcgccgtagcacacacagtgcccgcactggcactccccacggccggagcacggcttgtcctcgccctcccgcaggcagggctgaatgtcactcagagagccggtggagcagttgcaggtctggccactcctgaaggaggaactggtcattccccgaaacagcccaggaggaaagctggggcttttgctgtcccattta

SEQ ID NO: 6796 - DNA, 534 bp, Homo sapiens
  MAP TO AC022997.3; EXPRESSED IN LUNG, SIGNAL = 2.2; EXPRESSED IN PLACENTA, SIGNAL = 1.2; EXPRESSED IN HEART, SIGNAL = 1.8; EXPRESSED IN FETAL LIVER, SIGNAL = 2.7; EXPRESSED IN BONE MARROW, SIGNAL = 1.9; EXPRESSED IN ADULT LIVER, SIGNAL = 2.2; EXPRESSED IN HELA, SIGNAL = 2.7; EXPRESSED IN BRAIN, SIGNAL = 1.3
ttctgttacctggggtcctggttaccccagaaaggggctctttcctattcattttcatgaagccaacacacaaaaccaaaagtgagtgtcaagcgctgcaggctttagtcaatggctatggaattggacaagtgggaatgtagctcacaaatcaacttcttggttgctaagaactgggaagttacagatgtagggcatccttaatgaaggggctgggcgttaaggacaatgggaggcatattcatgctttttcttagaaagggataaagattttctaggaatcaaagagtttcctttattttatcctctcttggtctcatgcagtcattgtcatggtaattgtcaactgtcttggcactggtgggagtgtcattcagtatggaaattggattataatgaagctagaggttcttcagaggttgagtaagctgcctaagaaggaacttctgaccacagacatcctgtttcctaaaaataagcagggttaaagctcagtaggaatttagctatgttgcataaacattgcattgggca

SEQ ID NO: 6797 - DNA, 580 bp, Homo sapiens
  MAP TO AC016201.5; EXPRESSED IN ADULT LIVER, SIGNAL = 3.7; EXPRESSED IN HELA, SIGNAL = 2.4; EXPRESSED IN BRAIN, SIGNAL = 3.2; EXPRESSED IN BONE MARROW, SIGNAL = 2.9; EXPRESSED IN LUNG, SIGNAL = 3.7; EXPRESSED IN PLACENTA, SIGNAL = 4.8; EXPRESSED IN HEART, SIGNAL = 2.9; EXPRESSED IN FETAL LIVER, SIGNAL = 2.2
tttgtacctcacacatgcccaacaagattgaatgattttaattgaattgaatattggtaaatttgctagaaacagaaaaataagaagttaaatttttttattgatggtgtgaaatatgatgacttttatttcagttatgtgatctagaggtagcaatcactcatccaaataagtagcagttggcaatgtgaaattgaatataggagaaatgagagacaacagttatatagatttgaagaagagtgttagataaaatgcactttggtaaattcttgaaagatatattatagaagatcataaatacttcatatcccaaatagtggattaatccagacatggaaatttttgtcaagatgctatacttatctgctttgtaatagcatcacactgctagctgattagtttgagatactctttttcaaacttgagcgagattcagtatgttaccatgaggaacgctgactcagccttgaaatacagtggtaactactggcaggaatgtcagaggcgtttgagtaagagcaactctatcttgaataggggctgggtaaagtgaggctgaaacctactgggctgcatt

SEQ ID NO: 6798 - DNA, 503 bp, Homo sapiens
  MAP TO AL136320.7; EXPRESSED IN PLACENTA, SIGNAL = 2.4; EXPRESSED IN FETAL LIVER, SIGNAL =   2; EXPRESSED IN HELA, SIGNAL = 2.9; EXPRESSED IN HEART, SIGNAL = 2.4; EXPRESSED IN BONE MARROW, SIGNAL = 2.4; EXPRESSED IN LUNG, SIGNAL = 1.5; EXPRESSED IN BRAIN, SIGNAL = 1.9
ccattgtctctctcttgcccagatgttcctatgagcagcattttttaccagcctatatttgatactatacattttgttaacttctgttcactgtgcctgattactaatttggcgaaaatagtttgcagaagcccgtggggctgcagaagaagggaggcctgatgagggaagtttttttgagcacgtgctatgtatctcagaccctgtgtcaggagctttacatgtgtcctcattttgtccttaccaaaatccagaaggtaggtggtggtagtcacattttacagatgaggaaactgaggcttataagaagttaagaaacatagccccgtttgcccagctgttaagtgacagagtggagattcggacatggtccatctgtcttcatggactacaccattttgcgtcttcatgagatgagatggcagagtagccctggtgtgctgtgtttcagggcctgggtcaggggcagtctcctttacttaagtgttccccaagtgaaagga

SEQ ID NO: 6799 - DNA, 531 bp, Homo sapiens
  MAP TO AC016535.3; EXPRESSED IN HELA, SIGNAL = 3.5; EXPRESSED IN LUNG, SIGNAL = 2.8; EXPRESSED IN PLACENTA, SIGNAL = 3.5; EXPRESSED IN HEART, SIGNAL = 2.7; EXPRESSED IN FETAL LIVER, SIGNAL = 2.8; EXPRESSED IN ADULT LIVER, SIGNAL = 2.3; EXPRESSED IN BRAIN, SIGNAL = 2.8; EXPRESSED IN BONE MARROW, SIGNAL = 2.6
tactatccctcccccagacccccaccccgacaggccccggtgtgtgatgttcccctcccatggtaatcaaattttataattaaacctagtgagggtaacagacacttctcaaataagggatgtgttggtaacagtgctcccttactctaaggtattcacaaggagagttttttttttttaattcatccttcttctcttcttcatctgactcttccaacgttttctaaacgttggaagtttccaactttagcgggactgtccctctgtagcatcaaactttcctttagacttatagtcagcaacatccttcttatacttcagcttcactgccttagtgatgtcaggctgcttttcacggtcacctaagttattctgcatctcacccaacttttttgtttgtttgttttgccacatctccagtggaggtgtcagggtttctggatttgatcttggggcagaattctgaacagaacaggaaaacttcagacagtggccttttgggggcatcagggtccttcttcttgcctccct

SEQ ID NO: 6800 - DNA, 528 bp, Homo sapiens
  MAP TO AC019221.3; EXPRESSED IN ADULT LIVER, SIGNAL =  10; EXPRESSED IN HELA, SIGNAL =  14; EXPRESSED IN BRAIN, SIGNAL = 8.2; EXPRESSED IN BONE MARROW, SIGNAL = 8.6; EXPRESSED IN LUNG, SIGNAL = 9.7; EXPRESSED IN PLACENTA, SIGNAL = 9.4; EXPRESSED IN HEART, SIGNAL = 9.7; EXPRESSED IN FETAL LIVER, SIGNAL = 8.6
agaagtttgcaagtgggtgctttttcaaagctttccaaaatcttagggtacaaccactttgggacccccttcttgagggtactttgtgtcactcatgtgatgctacattagcacaagctccctagtaatgtgtacttggccacaccttgagctcaaggccatggagtgtcttggcagcttagggtccccagtgctctgccctttggggtgactatgtgtatgaatatgagctggaagaagcaggttctgttgcttctttttgttagcacaacagagagaatgttgactcaccccttccttggcaagccccgctgaagaggtgctcactattgtggacccctctgtgggccaggctcccccttttacaatttcccagctcatgtccggccggcagcttggggacaaggttagcccctgtgctctgtgtgtgcgcttttagcgagtttgccagctggaaaacttgtttatcccagagaatggaggagtcatttgacaagtaaggcattaccctggccacctaatttcaaa

SEQ ID NO: 6801 - DNA, 537 bp, Homo sapiens
  MAP TO AC026437.1; EXPRESSED IN ADULT LIVER, SIGNAL = 1.7; EXPRESSED IN HELA, SIGNAL = 2.7; EXPRESSED IN HEART, SIGNAL = 1.9; EXPRESSED IN BRAIN, SIGNAL = 1.8; EXPRESSED IN BONE MARROW, SIGNAL = 1.6; EXPRESSED IN LUNG, SIGNAL = 1.7; EXPRESSED IN PLACENTA, SIGNAL = 1.6; EXPRESSED IN FETAL LIVER, SIGNAL = 1.9
tcctccagtgaatcccaaacatctgcacatgaattacatgagagcgacattgggtcatcatccaatttttggttctgtttgcataaaagtcaagatctttgctcagaggtctgtctcaggttcaagagcgtgcccctgtgcttctgtcagtcggttcccgcttctcccctctgacctgttcccgttctcccttctctcaggttgtttttgtagccattttgcttcacagtcacctggaatgccgggagcccctgctcatcccgatcctctccttgtacatgggcgcacttgtgcgctgcaccaccctgtgcctgggctactacaagaacattcacgacatcatccctgacagaagtggcccggagctgggggtacgtctaccaacccaacagcagtctgtctgagactcagagtagaataaaactgtattccacctctatgtaaaatgagaaatcagtgacatcaaaacatgaagttggccaggatgtcatacccagaggccaagtgctagatgtctgcagggaaagacagttggag

SEQ ID NO: 6802 - DNA, 587 bp, Homo sapiens
  MAP TO AL117381.9; EXPRESSED IN ADULT LIVER, SIGNAL = 1.9; EXPRESSED IN HEART, SIGNAL = 1.6; EXPRESSED IN LUNG, SIGNAL = 2.2; EXPRESSED IN PLACENTA, SIGNAL = 1.5; EXPRESSED IN FETAL LIVER, SIGNAL = 4.1; EXPRESSED IN BRAIN, SIGNAL =   2; EXPRESSED IN BONE MARROW, SIGNAL = 5.5
cctttctggggaagaggttctgaaaactttcaagctccctggcagaaaaacattttcagggaggctaaggggtaagggttgcaccaatcaggtagggccctcctgcccccagccacaaacccttccatacctgccagcctcctttggacagattttgtggaaattttgtgaattctgaggccaagggaactgaggtgtgggggtctcacagaagtgtgataaattctagaaaactagctgcaagggaccagatctgggcccaaccctgtgatgggcaggtgggcatgggctgcatgtagtggttctcctggtggcaatggcggctggacggaggatgtggtggagcagagaagggggtgggagggtagagtggatggtcagtgtctggtcatttccgactgaagagtgagcccagcagaaccacgccggccacagtcatgcccgtcaggaaccagcggttgaagcgttcctggccctttcggctctcggctgctgcattgttcccatagagttccacaaaagtatcctgcagggagagagaaggaaggtgcagttttagtcctcagagagtgatgtaggtgggtggg

SEQ ID NO: 6803 - DNA, 599 bp, Homo sapiens
  MAP TO AL133419.11; EXPRESSED IN LUNG, SIGNAL = 1.1; EXPRESSED IN ADULT LIVER, SIGNAL = 1.4; EXPRESSED IN FETAL LIVER, SIGNAL = 1.2; EXPRESSED IN BRAIN, SIGNAL = 1.2; EXPRESSED IN PLACENTA, SIGNAL = 1.3; EXPRESSED IN HEART, SIGNAL = 1.2; EXPRESSED IN BONE MARROW, SIGNAL = 1.1
atgcaggaagttgaacctggcagctgcagccaatcagagctgaagaacagtcaagtcaaggtcaggacccctcttccagcctttgagcgttggcttctgcttccctccctcagtcctgatattccttactacttccactttcaaataactgaattacagccccagaccatcttgttctcccttgggccacagcaatgcaatccaccttcttcttaatcctcctgcagctccagcctgcagtttcaagacaggtgcacaaagttccttaacagtttcctctcattcagacacaacttcaatgaagtgaagttagggaacaaaatccactctatctactgcctcctatctttggtccactcatctcttattgtctcaagtagggattccctattctcattcttagctctgtagaactctgctgcctggaattcctggccctgtcagatgaaacgcgaggggaaaatttagacagatacaaacttagccatcatagttttgggtaaattttatattcacagttgtctgatttggtactgttcaaagctttttatgacaagatcataatgacaaaacttttaggtctcttggcagggaaatca

SEQ ID NO: 6804 - DNA, 562 bp, Homo sapiens
  MAP TO AC022392.3; EXPRESSED IN PLACENTA, SIGNAL = 1.5; EXPRESSED IN FETAL LIVER, SIGNAL = 1.3; EXPRESSED IN ADULT LIVER, SIGNAL = 1.8; EXPRESSED IN BRAIN, SIGNAL = 1.4; EXPRESSED IN BONE MARROW, SIGNAL = 1.4; EXPRESSED IN LUNG, SIGNAL = 1.7; EXPRESSED IN HEART, SIGNAL = 1.4
ctgggcatagtaagacccccatcctaaaagtcagacttaaaatctgatactttttcctacaacaaattcctctttcaagagattaacttactattaaaaaaaaagagagagaaataattaacatgttctttacaataagaactcaaagaaaaggaatcaaaatgaatcaaacttttgaggatgcttttaggtacctcttgattgaaacaaagaagcattccagaaatatacctgttggagccatctttcatatggactttggcgtaaagaacatccaccatgccaggatcatcattcatgtattctatccctgccatctccacttctaggggtttacccccagaaatatcactgcaaaggaaaaagcattaagatatctataactgtttaagctaagagggctattttattttgaaacatggttaatacacatagtcaaatatgtatgttacttacatgtgtacaaaaacatggtagttgtgttttttcctaacattatctaattgcccttctaatttcaaaattaataaattttcaatgcacacaaattggaaaacaccgg

SEQ ID NO: 6805 - DNA, 549 bp, Homo sapiens
  MAP TO AC022882.3; EXPRESSED IN HELA, SIGNAL =  12; EXPRESSED IN LUNG, SIGNAL = 9.7; EXPRESSED IN PLACENTA, SIGNAL = 2.7; EXPRESSED IN ADULT LIVER, SIGNAL = 9.5; EXPRESSED IN FETAL LIVER, SIGNAL =  19; EXPRESSED IN BRAIN, SIGNAL = 8.1; EXPRESSED IN BONE MARROW, SIGNAL =  13; EXPRESSED IN HEART, SIGNAL = 5.7
acattctgggatggttctgcctcttcttcataacttctgtcttgggcttcttttcataaactggattttctcctatagcagcatgagctttcttatacgtctcctccatcatgtctggagttatgctgttctttatatattgagagaactgtttcttgtaagcatcttcatcttcttccattaagtagcgctagcaactaagctgcaacattctggcccatgatgtccttccggtgtacttctgcattaaatcccttgctttcagaatcataatcagggaattgtttggtactgtgagggatagacaagcctccaaccgcagcttccttcagggtgccaaaaactttattgccagtggtagttctggcaaggcctgcacccaaatagcaggtaaaggcacctggctgaccatcaatgctttccacattgtattcatcactagtcgcctccacttggccttcatagatcttgtccatgccaaacctattgagaagcctgcaggccagcagcaggcaagtacaataggctgcagcataatttgtcaggcca

SEQ ID NO: 6806 - DNA, 526 bp, Homo sapiens
  MAP TO AC022860.3; EXPRESSED IN BONE MARROW, SIGNAL = 5.2; EXPRESSED IN ADULT LIVER, SIGNAL = 4.9; EXPRESSED IN HELA, SIGNAL = 6.9; EXPRESSED IN BRAIN, SIGNAL = 3.2; EXPRESSED IN LUNG, SIGNAL = 5.3; EXPRESSED IN PLACENTA, SIGNAL = 2.2; EXPRESSED IN HEART, SIGNAL = 3.5; EXPRESSED IN FETAL LIVER, SIGNAL = 6.8
agctttctgtggggttgttgagttctgctgagacccattttcagttgcctgcctagggtcatctgactcacccacagaggtcccagagcctgagcagggcctgcagaagcaattcgcatttggcagcaggaacaccatggaactgatggggtaacctgcccagagatgatcccacgggacccactgtctgagtcaagattggctcagggcttgtgttgtggaccacatcctggttgggctccagcatttgcaggtgctgaaaatcttccccaaagatgctggggccaacagctgctgcaatcagctcacacagcacatgctgtgccccttgagtgtgtaagcaggtaagcacctgctggggccatgccaggctggaaggaggagggggctgcttagcttcctgagtggcggaggggaccatatgtggcctgggggtcttggtgtgtgtggctgcttcaccctttgccccaagggccttgatggtgtcagtagagaggagggcacccccaggaggtgctgtctgaat

SEQ ID NO: 6807 - DNA, 571 bp, Homo sapiens
  MAP TO AL078591.18; EXPRESSED IN LUNG, SIGNAL = 1.9; EXPRESSED IN PLACENTA, SIGNAL = 2.3; EXPRESSED IN FETAL LIVER, SIGNAL = 2.4; EXPRESSED IN BRAIN, SIGNAL = 2.5; EXPRESSED IN BONE MARROW, SIGNAL =   2; EXPRESSED IN ADULT LIVER, SIGNAL =   2; EXPRESSED IN HELA, SIGNAL = 2.5; EXPRESSED IN HEART, SIGNAL =   2
ttgcttctaatgcaactttgatgctttaaaaattactcttattcgaaatttttaaaaagtaattaagtaaatagtttttatagtttcaactactttataatatattggcgtttactaaatgtttcatacttacatgctaagtgttcctttttacagggcagatgatctgaatgccttgcaactaataagtagccgaacattgaagctgcactttagcccccatagaggccttcatcatcatgttaatgttatgtttgattacttccacctttctgttgtgtctgttacagttcatgcatcattggttgcactacaccagccactaataaggtaaatttgactaatatttttgtattaagccattcttacactgcaataaagaaatacctgagactggtcaatttataaataaaagaggtttaattgggtcatggttcttcaggctgtacaggaagcatgatgctggcatctgcttaacttctggggaggcctcaggaaacttataatcatggcagaaatcaaagggggagcaggcatctcacatggccagagcaggagcaaaagagtcagg

SEQ ID NO: 6808 - DNA, 528 bp, Homo sapiens
  MAP TO AC017086.3; EXPRESSED IN LUNG, SIGNAL = 3.3; EXPRESSED IN PLACENTA, SIGNAL = 3.1; EXPRESSED IN ADULT LIVER, SIGNAL = 3.4; EXPRESSED IN FETAL LIVER, SIGNAL = 3.8; EXPRESSED IN BRAIN, SIGNAL = 3.3; EXPRESSED IN HEART, SIGNAL = 4.8; EXPRESSED IN HELA, SIGNAL = 4.7; EXPRESSED IN BONE MARROW, SIGNAL = 3.1
gcaatagtccaggcaagaggtattattgccttaacagagggaattaagatgaaaggaaatagataagactattagagatatatgttggagctcaagttatagggcttagtcattatatgcggcatataggcgtaagaaaagagaaagaatcaaggataatgcccactaaatgcagaatattctttcccaagtaattgaaactcctactaatttaaatgagctttacctgttgtgaaatcttcatgcttagaactctttgtcattccctattataaagcgtacgctacttagcttggcacagggatggcctcaataagtcttttgcctgaacagccagcctcatctcttcacctacgtctatcacactgagctgctcattcttctgggaacatggcatgatgacaaaacacatccccttccctctacctggaatatctttccagcttacctccatgaagtcttccacattggcaaggtgtttcatcacttctcctactttgttctcatagcatcctgctgacccctttt

SEQ ID NO: 6809 - DNA, 589 bp, Homo sapiens
  MAP TO AL121673.27; EXPRESSED IN PLACENTA, SIGNAL = 3.7; EXPRESSED IN ADULT LIVER, SIGNAL = 4.3; EXPRESSED IN FETAL LIVER, SIGNAL = 3.3; EXPRESSED IN BRAIN, SIGNAL = 3.7; EXPRESSED IN LUNG, SIGNAL = 3.6; EXPRESSED IN HEART, SIGNAL = 3.5; EXPRESSED IN BONE MARROW, SIGNAL = 3.5; EXPRESSED IN HELA, SIGNAL = 4.3
ggagaacaggcactacccagggctggatgcgtaacgggccccccggccacaccccaccgcccatcagagccgcagctcctgagaacgcatccggaggcaaggccaaagtcagccatggcacaaacatttgtgcatcaaggtcctgttgctctgcaacaactcaccacaaacagaggggtggaaacctccatgtcatcggacggcccagcggtcagaagtccaacgccatctccctgggctgatgtctgtgcaagcagggctgatgccgtagcttttccggcttctggaagctgccacagcccctggctcatggcaccatcctcacatcctctgaatccacattctcctctgaatctcccgcctccctctttccactgtaaggaccctgtgatgacactgcaccctcagaccctggtaacccagggtcatctttccacctcagggcgtctgacttaagcctgcctggagggtccctgtggtcacattcatgggttccagggttcagacacggccactttgtgggatcattactctgcctaccacaccatgtggccctgtgtgtgttttcagggggcatttgcgcttatat

SEQ ID NO: 6810 - DNA, 518 bp, Homo sapiens
  MAP TO AL133174.9; EXPRESSED IN LUNG, SIGNAL = 2.2; EXPRESSED IN PLACENTA, SIGNAL = 2.2; EXPRESSED IN HEART, SIGNAL = 2.2; EXPRESSED IN BONE MARROW, SIGNAL = 2.6; EXPRESSED IN ADULT LIVER, SIGNAL = 2.9; EXPRESSED IN FETAL LIVER, SIGNAL = 3.1; EXPRESSED IN BRAIN, SIGNAL = 2.6
tacccttccatcactgctccccagcccatccctggacagaacttgatttaagaaaaaagtacaaagttcaaagttcattttctgagagaagccaaaagatgactgtcctgaggcacagccatcacagctcaggccagacagttacctggaatccctggactctggaaagatagtccagttgctcagagggtctcgtgagaggtccatggggtacgtggcctgaagagatgttattctttaaaatggtctcggctgtgggcgaggtgcccccatacaacaactctcgggctatcatggcagttaccgtggccttggcaggattcggagctgccctggtaaaatctttggtgtgatgtccttgactaactcctacagcctgggcgacctcgggcaccatgggaagaattccagcaggcagctgctgatgacttagataaggcatcctgaactcatcctctttattacctgggagggacatacacggtaaacacgaatccacatccacagcctggaaaaac

SEQ ID NO: 6811 - DNA, 594 bp, Homo sapiens
  MAP TO AL135998.2; EXPRESSED IN ADULT LIVER, SIGNAL = 1.3; EXPRESSED IN BRAIN, SIGNAL = 1.2; EXPRESSED IN LUNG, SIGNAL = 1.7; EXPRESSED IN PLACENTA, SIGNAL =   2; EXPRESSED IN HEART, SIGNAL = 1.4; EXPRESSED IN FETAL LIVER, SIGNAL = 1.3; EXPRESSED IN BONE MARROW, SIGNAL = 1.2
acatcggtctggaaaagtgggcaataaggatgctttgaagtctttgactggaaagccagtcagtgggtgagaggggggaccagatgtaaatagctcaaacaggactcctgcttttgtcagaagttagatcagaaggtctctgtggtcccttctagcccggagattttggaaggagggaggggaaccacccctacaaatgactgttggctttttccagagtaagtcccagggatacttggctcaccattcagatcctcattcctgacagtccaaggctcggcagagtcaaagtgggtgtctcctccaatgttggggcctgggaagtaggcatgggccaggaagccgccctcaccatcgaagggcgtgctgtcgccatggaagccctcggcaaagaagatcatgatgtcggcctgcttctcatggccctcacggatgtaggcatagggcacctcgcggaagcgcagtggtgtggcactctcccacacgcggaacgccttgcgaatggcctcgtatgtggcatactcgcccaccttgggggtgtaattctggatgctgaggtccagccacgtggggagaggatggggtgtgttagga

SEQ ID NO: 6812 - DNA, 510 bp, Homo sapiens
  MAP TO AC019042.3; EXPRESSED IN HELA, SIGNAL = 3.9; EXPRESSED IN BONE MARROW, SIGNAL = 3.2; EXPRESSED IN BRAIN, SIGNAL = 3.7; EXPRESSED IN FETAL LIVER, SIGNAL = 2.6; EXPRESSED IN HEART, SIGNAL = 3.4; EXPRESSED IN ADULT LIVER, SIGNAL = 1.4; EXPRESSED IN PLACENTA, SIGNAL = 2.3; EXPRESSED IN LUNG, SIGNAL = 2.3
tgtgctgctggaaagacatccaaaaatgtggaagtgactttggaactggataacaagcagagtttggaacagtttggagggctcggaagaagacaggacaatgtgggaaagtttggaacttcttagaaactgggaaggctcagaatacagaaagatgtgggaaagtatggaacttcttagagacttgtagctttgaccaaaacgctgacagtgatatggacaatgaagtccaggctgcggtggtctcagatggagatgagaaacttgttgggaacgggagcaaaggtgactcttgctatgctttatcaaagagactggtggcattttacccctgccctagagatctgtggaactttgaacttgagagagatgatatatggtatctggtggaagaatttgcaaagcagcaaagcattcaaggggaagcagagcataagagtttggaaaattttcagcctggcaattaagtaaaaagaaaaagtcattttctggtgagaaattcaagccagc

SEQ ID NO: 6813 - DNA, 587 bp, Homo sapiens
  MAP TO AC009503.3; EXPRESSED IN LUNG, SIGNAL = 1.3; EXPRESSED IN PLACENTA, SIGNAL = 1.1; EXPRESSED IN FETAL LIVER, SIGNAL = 1.2; EXPRESSED IN BONE MARROW, SIGNAL = 1.1; EXPRESSED IN ADULT LIVER, SIGNAL =   1; EXPRESSED IN HEART, SIGNAL = 1.2; EXPRESSED IN BRAIN, SIGNAL = 1.2
cccctaacacctgctacctggacagtaggaggtgctcagtgaatgtttgttgaatgaatgaataaatgtatgtaccacagatagttcagggaggtgggagagttgaaagtttcatccactcttagaaaccagaataggccttctgaagcaggggattggctttatctttattgtcttgtttttttcttaactttcattaatcttgcaattatattaaagatatctcatggagtccaaatgtctaaaaatctaattacctctatagagctgtgccatccaatgtagttgccaatagccattaagcatttgaaatgtggctagtttgaattgagatttgctataagtatggaatacacactcaatttcaaaaactacaaaaagggaatataaaatatttcagtaatttaaaaaatattgattatatgttggaaggataatgttttggatatattgagttaaacatcttattaaaactagtttctctattacttttttttccaatttggctactggaaaatgtacaattacacaggtggctcacatttgtggtttgcattgttttctattggagagcattgccatagagc

SEQ ID NO: 6814 - DNA, 567 bp, Homo sapiens
  MAP TO AC024196.2; EXPRESSED IN HELA, SIGNAL = 5.6; EXPRESSED IN LUNG, SIGNAL = 6.7; EXPRESSED IN ADULT LIVER, SIGNAL =   6; EXPRESSED IN BRAIN, SIGNAL = 6.2; EXPRESSED IN BONE MARROW, SIGNAL = 7.4; EXPRESSED IN PLACENTA, SIGNAL = 7.3; EXPRESSED IN HEART, SIGNAL =   7; EXPRESSED IN FETAL LIVER, SIGNAL = 6.6
gagcccagatacagccagagcaggaaggttgggcagggggcccttgccctgcctatacccaggatccctgcactcaggcagtgggcagtgaagggtaaatggaggaggtgggctgaggacttgccatccgcatagtacaggagtccccagcctccctggggacgagatcttggcagtgtgggaaggctgggggacagagagcttggcctcctgggggctgtttaagggaagacacctggcgggacaccaagagagtgaatctgcctggaaggaaggaggggagccagtaaggaagcacaaaatgcgagcacccgtcctgctgccagtctctaatgctgctggaaggcatggcagggcgcctgcacagcgttttacagctccacacccttgggatttgatctcttattcaccagccaccctcctctagtttccacctctgcttctcttcttccctagaccagcagccaggagatcaagctcagctgggtcccaggagccctccgcatcttccgaacccttgctcttgcaggagctttctagactccctcacccacctaacagccttgt

SEQ ID NO: 6815 - DNA, 595 bp, Homo sapiens
  MAP TO AL139423.2; EXPRESSED IN LUNG, SIGNAL = 2.5; EXPRESSED IN ADULT LIVER, SIGNAL = 4.5; EXPRESSED IN HEART, SIGNAL = 3.4; EXPRESSED IN FETAL LIVER, SIGNAL = 2.1; EXPRESSED IN BRAIN, SIGNAL = 2.3; EXPRESSED IN PLACENTA, SIGNAL = 3.3; EXPRESSED IN BONE MARROW, SIGNAL = 2.2
ctttgctgttccctctccacagtgatgtcttccttgacaccttgggtctaccttatggctgactgatcttcaaagccagttcaagtcctgccccttctagaaagccttgcctaagactagcgttctgggaatttcctttgttctcaaattctgaaagctctcaacattctcaccatgcaaggtgacgtgggatggtcttccctgtctttctccaagcaatggagggcttccctctacgatgaacagcagctcctgaaggtgggtcccatcccctacttcttccatagcttgcccagagcagtctgcaccagctgggctcacagaccgtatcaccgaccgaccaccagggcagctcgtccacatgatagcccttccattctcaagcacatttccacccctgttaatccattccacaagcatttctagaacacctgctcagtcagagcctcaggccactagatttttttaagcctcagaactcacagtttaataggggagacactggaataaatgtttaagtgcagtggggcggggtggggagtctaggggcctgaggggagcttccctccaagtcagaatggaggcactggaaaga

SEQ ID NO: 6816 - DNA, 577 bp, Homo sapiens
  MAP TO AC021677.3; EXPRESSED IN LUNG, SIGNAL =  11; EXPRESSED IN PLACENTA, SIGNAL =  16; EXPRESSED IN ADULT LIVER, SIGNAL = 8.1; EXPRESSED IN HEART, SIGNAL =  13; EXPRESSED IN FETAL LIVER, SIGNAL =  14; EXPRESSED IN BRAIN, SIGNAL =  11; EXPRESSED IN BONE MARROW, SIGNAL =  14; EXPRESSED IN HELA, SIGNAL =  21
tgtagctggtatgccaatcggcaaacctgctaatactacagtgcccagaaaagtgggtgctcaaaaaatatttgttcatttaagaaagttattagctaaggcatcaattaaatgcgactttaaaaaatctccctagaaggagtgtctccagattctttggaaatctacccacatagctagcttgagttttttagggatcggtggcatatgttcttcttttaatgacagtcaacagtttaatgatagtctctaaacttaatgccaagtgtaggctatgcatcaggtttacatggtggattcaaacctggtctgtgattcagagggagatggctgtgcacagggaagtcatataccacattgtgataagtacccatatgccctgggcttcctggaatttcagaatcctgatcatacctatgtctgtcgagataagtgagtaccccatctcatcagatgcaaggctgctaatgatcagagaggccaggtaggcattagtcagactgtgaaggatttaaacttcacctgtgttgaatgaggactaggaaaaagcagttgggcctgggcatcagagatcact

SEQ ID NO: 6817 - DNA, 544 bp, Homo sapiens
  MAP TO AC024196.2; EXPRESSED IN LUNG, SIGNAL = 1.5; EXPRESSED IN PLACENTA, SIGNAL = 1.5; EXPRESSED IN ADULT LIVER, SIGNAL = 1.4; EXPRESSED IN HEART, SIGNAL = 1.3; EXPRESSED IN FETAL LIVER, SIGNAL = 1.4; EXPRESSED IN BRAIN, SIGNAL = 1.1; EXPRESSED IN BONE MARROW, SIGNAL = 1.3
ctgagtcctccctcctttccctgcagctgttgtcacaagcagtgtttcctctggatatggcagtggcagtggctatggcggtggcctcggtggaggtcttggcggcggcctcggtggaggtcttgccggaggtagcagtggaagctactactccagcagcagtgggggtgtcggcctaggtggtgggctcagtgtggggggctctggcttcagtgcaagcagtggccgagggctgggggtgggctttggcagtggcgggggtagcagctccagcgtcaaatttgtctccaccacctcctcctcccggaagagcttcaagagctaagaacctgctgcaagtcactgccttccaagtgcagcaacccagcccatggagattgcctcttctaggcagttgctcaagccatgttttatccttttctggagagtagtctagaccaagccaattgcagaaccacattctttggttcccaggagagccccattcccagcccctggtctcccgtgccgcagttctatattctgcttcaaatcagccttcagg

SEQ ID NO: 6818 - DNA, 533 bp, Homo sapiens
  MAP TO AC013746.4; EXPRESSED IN LUNG, SIGNAL = 3.5; EXPRESSED IN PLACENTA, SIGNAL = 3.2; EXPRESSED IN ADULT LIVER, SIGNAL = 2.1; EXPRESSED IN FETAL LIVER, SIGNAL = 4.1; EXPRESSED IN BRAIN, SIGNAL = 1.9; EXPRESSED IN HELA, SIGNAL = 5.3; EXPRESSED IN HEART, SIGNAL = 2.7; EXPRESSED IN BONE MARROW, SIGNAL = 3.9
ctgatttcccttcttggcaggaaacactttcatttactttagctgattttagaatttacctccatatctctaaattccatgattttcttgctgtttctgactttgagctgaggtattccatctgcctctgcagatgtgagagactgaattctatttcctcctattgtcaccataaccgtgcactctttccatgtcttcatccttgcaacattgtcctatagttttgattacatcagaattcagtgtttatattaccataacatgacaattgtatatgctattcaaagctgagccattgtattaagtaagtcttccttttcccaatctgtatgttttgttttctctgaagaaaataattgccttctttctgtttttatcagtaattcaacttcaaggccagtctaaatttcatggtatggggaaattaataatgtgaacatctagaggagtcagtgacacaagggacagcaagaggcatgaatcacagtctgaagaccttctgatggatcagatcttctcccgtttgcatcttc

SEQ ID NO: 6819 - DNA, 550 bp, Homo sapiens
  MAP TO AP001254.2; EXPRESSED IN LUNG, SIGNAL = 1.3; EXPRESSED IN ADULT LIVER, SIGNAL = 1.3; EXPRESSED IN FETAL LIVER, SIGNAL = 0.97; EXPRESSED IN BRAIN, SIGNAL = 1.2; EXPRESSED IN PLACENTA, SIGNAL = 1.2; EXPRESSED IN HEART, SIGNAL = 1.2; EXPRESSED IN BONE MARROW, SIGNAL = 1.2
agacctggtttgagtgtggcaaatcattttggctttctgaattcagcttctcatatgtaaaaaaagggtatgaacttttatcttataacctaatgcagctgacccgtgagtaacatgggggttggggcgccaactcgcatgcaggaaaaaatctgcatataacttttgactccaaagtcttaactactaatagctcactgtacactggaagccttaccgatagcataaaagtcaattaacacatatgttgtaggtgatatgtattatatactatattcttacaacgaagtaagtgagagaaaagaaaatgttattaagagcattataaggaagcaaaaatattcttactgttcattaagtggaaacagatcatcataaaggtcttcatcttcgtgtcttcaccttgaggaggctgaggactaggaggaagaagaaaggtttctcttgctgtctcacaggtggcagatgctagaaaggcggacaaggtagaagggtagacgtgtataagtagacttgtgcatttcaaacttgtgttgttcaagggccaact

SEQ ID NO: 6820 - DNA, 540 bp, Homo sapiens
  MAP TO AC025119.2; EXPRESSED IN LUNG, SIGNAL = 1.3; EXPRESSED IN ADULT LIVER, SIGNAL = 1.1; EXPRESSED IN HEART, SIGNAL = 1.2; EXPRESSED IN BRAIN, SIGNAL = 0.99; EXPRESSED IN BONE MARROW, SIGNAL = 1.1; EXPRESSED IN PLACENTA, SIGNAL = 1.4; EXPRESSED IN FETAL LIVER, SIGNAL = 1.3
cagcaaaggctgtgaacaaggcttaaagggggctgttggcacagcaggcatcaaggagaaagatattctcttccgtatccccccagcctactccctggctttggcacagagcaggtgttgacagaccattgttgacagtgtccatggaggagacaaatggggaaatggcagaagtgttgaggcccagtgcacctgtgatggaagcagtgctcagcagggtaactacaggaagcagaaaacctggtatgagcattcaacactgagtgcctactggcttcactgtgtgctgggtcctatgcatggtgggaaatatataagatgtggctactgtccccgaggaagacatggcatgtataggtggaaaatttgtaagtgttctactttttaattactttaaaaataaatataggtactggtaactccccctgacacaggtattgactggtcagtggtcattttctcttgcccattgagcatgttccctagctgctcacttattttaaggctacctcttctagtccatcacactcaccctcagga

SEQ ID NO: 6821 - DNA, 519 bp, Homo sapiens
  MAP TO AP001441.1; EXPRESSED IN LUNG, SIGNAL = 2.7; EXPRESSED IN PLACENTA, SIGNAL = 2.4; EXPRESSED IN ADULT LIVER, SIGNAL = 2.8; EXPRESSED IN HEART, SIGNAL = 2.2; EXPRESSED IN BRAIN, SIGNAL = 3.6; EXPRESSED IN HELA, SIGNAL = 2.4; EXPRESSED IN FETAL LIVER, SIGNAL = 1.7; EXPRESSED IN BONE MARROW, SIGNAL =   2
acaaaggccaccttacctcccatctgcatagtctgtgtctgctccgccccaccagacatccgagtcatcctcctccgcatcagcagaatccacattgtcactttcttcagccagtgggcaacacacaaactctacccctcggaacttgtcaattccgcagggcagcaacatgccgtagtcatgcaagttggtactcttctcactgcatgtctacaaagtgtaaggagaaaacagtgagtggtagagtagatgtgtttcattgtaagaaaactccacataaaataatcaacatgcagacccaatatattaggaaccaatttcacaaaggaaaagattatttgctttttgagtgaatttacaacaggattttttttagcatgggttacactttggtactctttttattcttgtttattatttatttaataagaccacgatgttatataatagaggtttatacgaacaactggaatggaaactaattgggaaataagatgtagcagtctccactggtgaaca

SEQ ID NO: 6822 - DNA, 531 bp, Homo sapiens
  MAP TO AC015638.4; EXPRESSED IN ADULT LIVER, SIGNAL = 5.7; EXPRESSED IN HELA, SIGNAL = 7.2; EXPRESSED IN BRAIN, SIGNAL =   5; EXPRESSED IN LUNG, SIGNAL = 6.6; EXPRESSED IN PLACENTA, SIGNAL =   6; EXPRESSED IN FETAL LIVER, SIGNAL = 5.4; EXPRESSED IN HEART, SIGNAL = 6.1; EXPRESSED IN BONE MARROW, SIGNAL = 5.4
catatgcacttccccacctcccttttctttttatctcagtgtttttgtacatgttcattcatcccctccccattcttttctgtcttataaagaacctcgcttcttctccaagtcttacttctccacctgagccacagatctctttatttccatcaaagctttctcagcatcttctatatactgtgctgtgccttgtgaagaagccagagccgagcataccaacatgatcttttgcttgaactgtagtaggagagacaagacagatgtgcgggtccccatgatataaggtaattgttaaatctgccatagaaaggtggagtggtgatcagaggaggcttttggggtggtgatgccatgtgaattaagcattaaagaaggaatacttggatttaaattgtcatagatggggaagtagcagacagaatgatgcctggaataataaaaggaaaattatcaaggagagcgtcagttgactctattcaatgaattcccaagtcttctgaataggtgtgcaaaggcaagactggagac

SEQ ID NO: 6823 - DNA, 583 bp, Homo sapiens
  MAP TO AL138796.2; EXPRESSED IN BRAIN, SIGNAL = 0.77; EXPRESSED IN BONE MARROW, SIGNAL = 0.43; EXPRESSED IN PLACENTA, SIGNAL = 0.59; EXPRESSED IN HEART, SIGNAL =   3
aagtggcatgaagggttttgcaaagagagagaggcaccatgctccaggctctgggggatgttgagccagcatgctcttcccaccaacatagggccttccttccctgctccttagctctgtctgtcagggtggatgtgcttggggtcatcttccagctgagctctggccccatgataataaatcaatcctgtgttcctctcaccagagcactcccaggaaacagaaagcctgagggaggctctgctgtcctctcgatcccaccttcaagagctggaaaaggagctggagcaccagaaggtggaaaggcagcagcttttggaagacttgagggagaagcagcaagaggtcttgcatttcagggaggaacgtctttccctccaggaaaacgactccaggtaagaggggacccattgacagagaaggtagcattcttcattcttacattcattcttacattacaagaggaagggatattggcaagacaattgatgtcctcttttggaaacctaaatgttccctctgctattcctgatttttgtgtgtcagtggggtggggggaggggcgctttgagcagaagaaagg

SEQ ID NO: 6824 - DNA, 578 bp, Homo sapiens
  MAP TO AC009334.3; EXPRESSED IN PLACENTA, SIGNAL = 1.7; EXPRESSED IN ADULT LIVER, SIGNAL = 1.9; EXPRESSED IN HELA, SIGNAL = 2.4; EXPRESSED IN FETAL LIVER, SIGNAL = 1.6; EXPRESSED IN BRAIN, SIGNAL = 1.6; EXPRESSED IN LUNG, SIGNAL = 1.9; EXPRESSED IN HEART, SIGNAL = 1.4; EXPRESSED IN BONE MARROW, SIGNAL = 1.9
ctctggaggacaacctggacttgaatctcagttctctacccattaatgttactgagaaaaaaatctttttttggaggacatgagatttgtaacatgtctataatgtcatgggttctttggagaaaagtgccaataagactaaaaataatatctgggtttttttcttctccttcccttttaggttcgtgatgatgtataccacaatatactcacaaataacctccctaatcttctggaatatggtaacatcaccgctctgacaaatttatggtatactgggcaaattactaattttgaatatttgactcacttaaacaaacatgctggccgatccttcaatgatctcatgcagtatcctgtgttcccatttatacttgctgactacgttagtgagacacttgacctcaatgatctgttgatatacaggtaagttaaaagaatcatcacctttagggttcatccatccatatgttgtatttctttattaaagttttcattatgaaaaatttcaaacatgcacaaaatagaagaattatataagaccccacatacctatcaccctggttcaacaattgtga

SEQ ID NO: 6825 - DNA, 570 bp, Homo sapiens
  MAP TO AL133377.4; EXPRESSED IN LUNG, SIGNAL = 5.4; EXPRESSED IN ADULT LIVER, SIGNAL = 5.2; EXPRESSED IN HELA, SIGNAL = 4.8; EXPRESSED IN HEART, SIGNAL = 4.7; EXPRESSED IN FETAL LIVER, SIGNAL = 4.6; EXPRESSED IN BRAIN, SIGNAL = 5.1; EXPRESSED IN BONE MARROW, SIGNAL =   5; EXPRESSED IN PLACENTA, SIGNAL = 4.9
tgatttctcaagccccaaacctatatcgcatgcactactgtagcaaacttacagtactcagaagaagaacgaaagacttcagccacttaaatttccaaagctgggccaaggtgttaaggatatagtctccatcacgccactgggggagatgcttaccgcagcgacacgatcccaattcctgctgcaccagctccagtttggtttggcactggaagcaccgacgtcgactcttctgtttagatcgactggtttcctcggaccgttccgtattctcaagtagtcgtggccgttttactggtgaagcctcattctcagactgtgaatctgaccaaaacaacatatttggggatcaggattagtgcctggcctggcaagcacagttgattaatgtatttccaggcattctcctgaccaggctactgcccttgtccaggaatcagacaggtgagagccagttctgacttgcttggtttatactgcacaaactatgacaaacgtgtacctttagtgctgacttctaacaagctaggcctgagctggagaggagggtgtgggtggctcaacaaaaac

SEQ ID NO: 6826 - DNA, 565 bp, Homo sapiens
  MAP TO AC027343.1; EXPRESSED IN LUNG, SIGNAL = 0.93; EXPRESSED IN PLACENTA, SIGNAL = 0.94; EXPRESSED IN ADULT LIVER, SIGNAL = 1.1; EXPRESSED IN FETAL LIVER, SIGNAL = 1.1; EXPRESSED IN BRAIN, SIGNAL = 1.1; EXPRESSED IN HEART, SIGNAL = 1.2; EXPRESSED IN BONE MARROW, SIGNAL = 1.1
aatcacaagctgaaatgccccagcagaacagatttccaaaggaaaactctgatgtttcttttcttcctggcaagtaaaaaataataagtagatgactttagagatcctgcttgcccatgagactgagcagaagtctctccccaagtcctttttgttcctaaaagtagtaaagagagataaaaatgccattccagagagcatagaaggctggttacatgtggagagagtgagggtttctccggactcctatctagactacagggatcaaaagttactctctgctctaggtttgatagtacaagagccagtgtgtgatctgtgacttcatggcctcctacattctatttctattcttacctcattgaactcaatcagtagacagctaccattgagtggtgtgggggaatttttttattttttaaaaacatgatggtaacaattcttcccatgcataacatttgaacaccatctggctccggacatcctaaacaaattgccaaataccaaggacagctattttatgcatggtgaaatataagcaaaatccacttctttggtggtggac

SEQ ID NO: 6827 - DNA, 600 bp, Homo sapiens
  MAP TO AC018501.5; EXPRESSED IN LUNG, SIGNAL = 1.4; EXPRESSED IN ADULT LIVER, SIGNAL = 4.5; EXPRESSED IN HEART, SIGNAL = 3.2; EXPRESSED IN BRAIN, SIGNAL = 3.2; EXPRESSED IN HELA, SIGNAL = 5.2; EXPRESSED IN PLACENTA, SIGNAL = 3.1; EXPRESSED IN FETAL LIVER, SIGNAL = 3.2; EXPRESSED IN BONE MARROW, SIGNAL = 3.3
aaccgcgattacttttgcaccaactttaatatttcacttctctactcagtcagaggcctgaattcaatgttccctttatacttctgactttgggaaccttcaagaaagctccaggaagcagatcctctgctctgtcccaaatatcgtcgcaatgctccttggtgctaccatcagatccgtcacccgactcaccagttccttgggcctcatgttataaagtatcctctctgcgttttcactgtcgtgcctgctttccatgatggccaggagcaacttcgaggcattgttctagttggagaaacaaagggagaggaaatgtagaggggctgcttgggggcccggcctgaatgcaggtgccaactggcacatgggaggcatcccggctaaacagacgaacatttcaccccatgaggaagctctgggttaaggacatcaaaatccatctgcaccaggcagagagcatcccccttcagaccccagatacgtgtgcagaatctgatttcggacaaagaggcacatatttgtcagggcatgtgtgttatgccctaatgttagctggtacaagtcctagaagaaattgggaatttacacgtgggtgct

SEQ ID NO: 6828 - DNA, 501 bp, Homo sapiens
  MAP TO AC025752.2; EXPRESSED IN PLACENTA, SIGNAL = 1.8; EXPRESSED IN FETAL LIVER, SIGNAL = 2.1; EXPRESSED IN BONE MARROW, SIGNAL = 1.1; EXPRESSED IN HEART, SIGNAL = 1.2; EXPRESSED IN HELA, SIGNAL = 2.2; EXPRESSED IN LUNG, SIGNAL = 1.5; EXPRESSED IN ADULT LIVER, SIGNAL = 1.7; EXPRESSED IN BRAIN, SIGNAL = 1.3
ttttgattctgaatgggatgggtatgctgacctggaaaacaaagtcaccagaggtaagaactgtatctttccacttggtcataaattctgttgtgatgttagtacagaccctattgtactgacatctctattgcaatcatcaggaacaatgagagacattagactgtggactttgaaactgacctatcttaacattggcaaaatggtggagaacttcaaactccagttcctgaagacatcaagctcagtcttcatagacaaaatggaaaatgtgacagcattgttactgtctggctcatgaacccaataagggtttctgtcatcataatagatgctattatctgaaaaacttaacatcactaaaaataaatttcttatttattgcaattttcttctgctgcatgataataaaccatcagatcatgttaactgaacatcaacatcaaggaagtgttagtatggaagaatttgttgtaaacctggtgatctggagagtctgcc

SEQ ID NO: 6829 - DNA, 543 bp, Homo sapiens
  MAP TO AL135936.10; EXPRESSED IN ADULT LIVER, SIGNAL = 1.6; EXPRESSED IN BRAIN, SIGNAL = 1.3; EXPRESSED IN BONE MARROW, SIGNAL = 1.5; EXPRESSED IN LUNG, SIGNAL = 1.6; EXPRESSED IN PLACENTA, SIGNAL = 1.3; EXPRESSED IN HEART, SIGNAL = 1.4; EXPRESSED IN FETAL LIVER, SIGNAL = 4.1
tgtaacgttgaaatttggtgcattttacattcagcacatctcaactgggattagtccatttcaagtgtgcagctgtcccgcacttgaagtgtggcatccatattggatggcaagcactgggattttatggaagccggaagggggcatgcagccaagtccatgtgtcaggggacatcaagggcaaggtgccacctgagctggacctaggaacacaaatgccacaccaccaggtgcaaacaccagggggcacccatctctatccagtagtgccaggggcagccctaggggttagccaggcagaggagggaggtgagctagtgcaggaagacagactccttcagcactatcacctgttgagagaactgcaagcatttgccatgaggatgacgtggtgaggttagacagaggaggggagagcaaggttatggcaggcctcccgtgccacctaagggggctgagtttcattctgctgctgatgctgcgttgtgacatcatcatagggtgctcttcagcagaggacttagagcagggagacaggaaaga

SEQ ID NO: 6830 - DNA, 512 bp, Homo sapiens
  MAP TO AC022429.2; EXPRESSED IN HELA, SIGNAL = 4.1; EXPRESSED IN LUNG, SIGNAL = 4.1; EXPRESSED IN PLACENTA, SIGNAL =   8; EXPRESSED IN ADULT LIVER, SIGNAL = 4.2; EXPRESSED IN FETAL LIVER, SIGNAL =  13; EXPRESSED IN BRAIN, SIGNAL = 4.6; EXPRESSED IN BONE MARROW, SIGNAL = 2.8; EXPRESSED IN HEART, SIGNAL = 3.5
tatgcacacatgcacacagggggtatgcacacacatgggcacacatgcacacacacgtatgcacacacacaacacaacaacacacacacgaggctcctcaagaggcagatgtctcaggcatcaccttccctgctatttctccagacttgaacacaagtaggggtggctgcaggatgccagtgagaagtacgatccacagaagaaaaggagaccagaagaggctcttggcaaaggcccagctggagaagaagctgtggccctccttgacccccacggggcttctctctgctctgttagtacagctctccgtgctgtcggcaatggcactgacattgttgtgcagtggagaatagtatgacttggtgccctgcgaagccccgtggctaacagctgagccagctctgcaagggaaaaagccaggggccaggaacggtgtacattgatcgtgctacactagtgcggctcaaaagtcaatatctgcttgacatgctgcagagagtcctcaagcccac

SEQ ID NO: 6831 - DNA, 570 bp, Homo sapiens
  MAP TO AC007923.2; EXPRESSED IN ADULT LIVER, SIGNAL = 5.6; EXPRESSED IN BRAIN, SIGNAL = 4.5; EXPRESSED IN PLACENTA, SIGNAL = 4.7; EXPRESSED IN HELA, SIGNAL = 6.4; EXPRESSED IN FETAL LIVER, SIGNAL = 5.6; EXPRESSED IN BONE MARROW, SIGNAL = 5.4; EXPRESSED IN LUNG, SIGNAL = 5.7; EXPRESSED IN HEART, SIGNAL = 5.4
tagacaagccaaggacagccaggaaaactgtgaaaaaggaaaacaatgagaaagtaatattcttactggctattttaatataattcaaagccttaataattgaaacaatatgggactggcatatgaacagatagacaaacttagagaacaaactaggaagtccaaaaggagagaattaattcattggataatttagtacagtatataagcattgcaaatcgagggggtgggtgggaagacagactttgcaataaatagtatttggacaatgaatagccatctggaaaaaaataagttgggtattaacttgtgctattcccgttctcttctctccagcttcatggtaaccttgggaacgaacaggctataatcatggtgaaagtgagcagtcttccagctactgaaggggttacaacagggaatggcactctatcaaagccccattcccagaaaattgtcctacttgaactgtctctcagtgccctggaaaaccccacttgcaaggctctctttatttgacctgatgtagaacttgctcagtacaaaaagcctttttcctgagggcatttg

SEQ ID NO: 6832 - DNA, 584 bp, Homo sapiens
  MAP TO AC019281.4; EXPRESSED IN ADULT LIVER, SIGNAL = 1.1; EXPRESSED IN FETAL LIVER, SIGNAL = 1.5; EXPRESSED IN BRAIN, SIGNAL = 1.3; EXPRESSED IN HEART, SIGNAL = 2.5; EXPRESSED IN BONE MARROW, SIGNAL = 0.91
gtcatgaatttgaggtcccgttttgattgacttcttcattagagcatttaaaatattactttctttctagggtccaaattccaagcctgtagtgtccttcattgctggtttaactgctcctcctgggagaagaatgggtcatgccggggcaattattgctggaggaaaaggtggagctaaagagaagatctctgcccttcagagtgcaggagttgtggtcagtatgtctcctgcacagctgggaaccacgatctacaaggtgagctccaacagtggcccaggtgctctgaggttgcaggctttctctgtgtgtggccacactggatacctggaaatcatggcctttgcttctgggacttaattggttttctgatgtgcagcttaatagtttgtatcaactctattgatgtcctagtgccctaattaggcatgaccaggaataatgttcttattttaaagctttcttctttaaacattgggatttttatttttgtaagtggcaagatacaacatacacaaaaagcatcttgaagatcgtaagtgtcatgatttccattttgagagtttggaaggtagctgtgcag

SEQ ID NO: 6833 - DNA, 592 bp, Homo sapiens
  MAP TO AC009155.3; EXPRESSED IN LUNG, SIGNAL =  12; EXPRESSED IN PLACENTA, SIGNAL =  11; EXPRESSED IN HELA, SIGNAL = 5.2; EXPRESSED IN HEART, SIGNAL = 9.9; EXPRESSED IN FETAL LIVER, SIGNAL =  10; EXPRESSED IN ADULT LIVER, SIGNAL =  12; EXPRESSED IN BRAIN, SIGNAL =  13; EXPRESSED IN BONE MARROW, SIGNAL =  13
ggtatgaaaccaggcacaggtccccaccgcctccccacggctttcctgggccccttacatctgcaccatatctgcccctcccaagtttatcctttgaggcccctttcaaggtcgtttaccctgtgatgctttctccttaaggcctagtacccacctaagctgggcttaagcccaccagcccccaggacttcctggcatccacccaaggggctctggtcatttcctgggtacctcactcctgtggaggtgcaggatgccactgccgcgacatagatgctgagtcaaagcaggtgtgagactaagaagggggctgcgactagccctggctgaatgaaccaggatgactccccacccagcacccttccctcccctttgatggggacgaattgggggagtgtgcatcagagagtggtcatcttccattttatctgcaggctgctgctcctgctgccctgcggagtgtgagaagtgtgccaaggactgtgtgtgcaaaggcggagaggcagctgaggcagaagcagagaagtgcagctgctgccagtgagaaggcacccctccgtgtggagcacgtggagatagtgccaggtggctc

SEQ ID NO: 6834 - DNA, 569 bp, Homo sapiens
  MAP TO AC021468.2; EXPRESSED IN PLACENTA, SIGNAL = 1.8; EXPRESSED IN FETAL LIVER, SIGNAL = 1.8; EXPRESSED IN ADULT LIVER, SIGNAL = 0.72; EXPRESSED IN BRAIN, SIGNAL = 2.2; EXPRESSED IN BONE MARROW, SIGNAL = 1.9; EXPRESSED IN HEART, SIGNAL = 2.2; EXPRESSED IN LUNG, SIGNAL = 1.8
aagcaatgcaggtcaagtccacagcacagggcccagccatggaaggcccttagtgaactctccggctttctccccttctctactggccagtgtggagacagtgaatgatgggcagtttcacagtgtggagctggtgacgctaaaccagaccctgaacctagtagtggacaaaggaactccaaagagcctggggaagctccagaagcagccagcagtgggcatcaacagccccctctaccttggaggtaatgccctctttccctaccacctctacctccctctggccctctgtgctccagtacagaaacccaggccactgccaaagccaatcagggaaggcttcctggaggaagggacaacgaagctgatctctaaaaggtgaataagcactagccaggccatggaggaaagagaatgtgggacaggtgcttggaaaggaaagagaacaggactcctggaaactacacgttgtgacgggcaagggtgagaagggggaggcaggagatggaagcagggtctaggctctgctgaagtctgccagcttcaggtcatattccctctgctctgcc

SEQ ID NO: 6835 - DNA, 590 bp, Homo sapiens
  MAP TO AL133227.7; EXPRESSED IN ADULT LIVER, SIGNAL = 1.6; EXPRESSED IN BRAIN, SIGNAL = 1.8; EXPRESSED IN LUNG, SIGNAL = 1.8; EXPRESSED IN PLACENTA, SIGNAL = 1.1; EXPRESSED IN FETAL LIVER, SIGNAL = 2.7; EXPRESSED IN BONE MARROW, SIGNAL = 4.4; EXPRESSED IN HEART, SIGNAL = 2.1
ggcctgcctaggagagaaacatgggcactgtcacaccaccacaggggactgctgctgtctgaggtcagcaggccagttcacacgccacgcaaggtggctactgagccaagtcataaaaatcttccagatcatcatggaacaagtcccactcattttcaaagtctgtcagttcatcgtccccatctgccaaaagcataagcaacatctcacccagctcaaaggtgacaacctcttcttcattgttgtcaaaggggtcattgttctctctttcctcaatgagctccgagaagtggttccttcactgggcccagtatctgtttgcctgtctctgtgtatcctttctatggccatcagggaatacctgcttgtaaaaacacatcccccaagatgggcagctcccctgtccttcatcaaaatccctgcatgcctggctgctcattgcctccttgactttctggatgagtttctgcttctcttctttctcccgcctggtactcactgggaatgacaaagttagatgtgatccggcattctgggtaggacactatgatcttgctctcaaatagcttagtgcccttccacttgtgaat

SEQ ID NO: 6836 - DNA, 563 bp, Homo sapiens
  MAP TO AC012200.5; EXPRESSED IN PLACENTA, SIGNAL = 3.2; EXPRESSED IN HELA, SIGNAL =   7; EXPRESSED IN LUNG, SIGNAL =   6; EXPRESSED IN ADULT LIVER, SIGNAL = 7.7; EXPRESSED IN HEART, SIGNAL = 7.5; EXPRESSED IN FETAL LIVER, SIGNAL = 9.6; EXPRESSED IN BRAIN, SIGNAL = 5.6; EXPRESSED IN BONE MARROW, SIGNAL = 9.3
aaaccccaggaaaaacaaccttggctactatgccaacatcaagttcccctgaccactgagtcagccatgaagaagaaagaagacaacaacacacttgtgttcattgtagatgttaaagccagtgagcaccaggtcaaacagggtatgaagaaggtgtatgacattgatgtggccaaggtcaacaccctgatcagcctcatggagagaagaaagtatattttcaactgtcaactggttcctgattatgatgcttttgatgtcaccataagatataaaacagacattaacaaatgttgatgaaggtgtagagaaaatggatcccttagacattgctggtggaaatgtaaaatggtgcagccatttggagaacagtttgggagcttcttataaagttaaacataaaactaccataaaacccagaaatttcactcctaggtgtctacccaagagaaatgaaaacatatgttcacacaaagacacccacatgaatgtttacaacagggttattcattatagctgaaaactatagactctatctgggttcctgtccttgtaccatggct

SEQ ID NO: 6837 - DNA, 600 bp, Homo sapiens
  MAP TO AC009466.2; EXPRESSED IN PLACENTA, SIGNAL = 1.3; EXPRESSED IN FETAL LIVER, SIGNAL = 1.1; EXPRESSED IN BONE MARROW, SIGNAL =   1; EXPRESSED IN HEART, SIGNAL = 1.7; EXPRESSED IN ADULT LIVER, SIGNAL = 0.87; EXPRESSED IN BRAIN, SIGNAL = 2.3
gaggccagagaatgcagaagaagaaggaggctcttacgaaagatcttcacgttgacggtggcctctgactcactgccatcctcgcctgtaaccacacacttgtaaatgccggcgtcgtcgatgttggcgttatagatggtgagggtggaggaggaatcatcattccacaccactgagatccgctgctggtttggggtgagcttttctccattgggggagaaccaggagatgtctttatctttggcatctcctgccactaaagaggaagagattatttttaagctactgaagtcgaaaagactaataagtcccctccagactgacagtggctgatcagtaagagttactgaacaacagatcagtcaaggcttgaacatcagggaggggtgagtatggctgctggaatgacatgcagcccttctttggcctctgcatttaactattatatacttaacacctcttacaatatttggaaagaactcaacaaccacttgtactagttgttatcatggtcctatccctaatgatggaagagaagagatacttgttgagaacatactgtgtgctgggcactaagctaggaacacacatgcctcacac

SEQ ID NO: 6838 - DNA, 585 bp, Homo sapiens
  MAP TO AC010905.3; EXPRESSED IN PLACENTA, SIGNAL = 3.3; EXPRESSED IN ADULT LIVER, SIGNAL = 3.5; EXPRESSED IN HELA, SIGNAL = 3.4; EXPRESSED IN FETAL LIVER, SIGNAL = 3.2; EXPRESSED IN BRAIN, SIGNAL = 3.1; EXPRESSED IN LUNG, SIGNAL = 3.7; EXPRESSED IN HEART, SIGNAL = 3.6; EXPRESSED IN BONE MARROW, SIGNAL = 3.4
tttcatccaattcagcctggttaaaaagaccagtgtattagtcagggtttgttagagtgatagaattaataggatagatttatatataaaggggagtttatatcacagggcatggtaataagaagaggcactctaatgaatctcctgtattccatgcataatctttcttacctctgttgcagagtagtagactgatagaatcttgatagtctgagtcaatcatcccagccaacactgtacctcccttcttaggctgttggtgtaaaggtaggagaagtgcaaagtgtccaggtggcaatcttaatttccagtttaattgaatcattgctatgtttcctggtggcagcattcctccctctgaaactaagacctctaggccagcagaacataatgtcacagaaacaggaagcaaatatgttgttagtgggtcactaggggtgatggtgagtgttgccacttccaattccaccccttgattcctggacccatgattcctggctatgggagaaacagtaccatatattggatgctgattcagagcaaacacagccttctggagaaccttgtcccagccatgcaaagtat

SEQ ID NO: 6839 - DNA, 530 bp, Homo sapiens
  MAP TO AL121747.19; EXPRESSED IN BONE MARROW, SIGNAL = 2.5; EXPRESSED IN FETAL LIVER, SIGNAL = 2.2; EXPRESSED IN LUNG, SIGNAL =   2; EXPRESSED IN PLACENTA, SIGNAL = 2.5; EXPRESSED IN ADULT LIVER, SIGNAL = 2.5; EXPRESSED IN HELA, SIGNAL = 3.5; EXPRESSED IN HEART, SIGNAL = 2.6; EXPRESSED IN BRAIN, SIGNAL = 2.1
ttcacctaatgggaggttcgtgttctctctgttgtcacttgttaacactattgaaataaaatgcgcttaactattgcaagtctccttattctgctttgcgttggggattccttccattttgcaccctaggccagaactgaatccctaaggttacaataggacatcccagcatggccgcattcagagagattcctctgggggcggagtcggaagctgtctcgccccgcctcctggtaggagggggtttccgcttccggcagcagcggctgcagcctcgctctggtccctgcggctggcggccgagccgtgtgtctcctcctccatcgccgccatattgtctgtgtgagcagaggggagagcggccgccgccgctgccgcttccaccacaggtacctagggagcagccaggcgaggtcgttggcgggtggggtgggcccaggatagggcagcggagcgcggccgaccctcacgcttccagcagactcctgagcggcccgtcgccttcccctgcccccaccttcacacataaa

SEQ ID NO: 6840 - DNA, 557 bp, Homo sapiens
  MAP TO AC026882.2; EXPRESSED IN PLACENTA, SIGNAL = 2.4; EXPRESSED IN HELA, SIGNAL = 2.3; EXPRESSED IN LUNG, SIGNAL = 2.2; EXPRESSED IN HEART, SIGNAL = 2.3; EXPRESSED IN FETAL LIVER, SIGNAL = 2.2; EXPRESSED IN BONE MARROW, SIGNAL = 2.3; EXPRESSED IN ADULT LIVER, SIGNAL = 2.7; EXPRESSED IN BRAIN, SIGNAL = 1.9
ttatggagttgccatgttgggtatggataaaatattgtattgtaacttcctcacccccaaaggataaataaatgctttgaaaaatgtctacaatgcaaagttaaattgctccactgttaatataattttgtagactaggaaaaccgtatttgaggcagaaccgaaaacaaaaataaaacattttaccctcttttcatcaaacccaacatagacagacttctgtgttttgtgtttacgttttgttttttcctagcattgaaataggtcactgtttttaaactcagcactatatgtggatgacttttgacctgtatttagggacaacatggtatatatatatttttttatttaaactcaagaatcacactgagaattgcaagatattcacacaaaagaggcagatggcaacttggagaagggaatctcacatctcatctcagcctcactttggcaagaagcatcaccagcagaacgtaagatagaaatatatgtacattctattgtctctttctcccactttttctctctttgcatttcccccaattccttgttccttt

SEQ ID NO: 6841 - DNA, 560 bp, Homo sapiens
  MAP TO AC007940.2; EXPRESSED IN HELA, SIGNAL = 6.3; EXPRESSED IN BONE MARROW, SIGNAL = 4.4; EXPRESSED IN LUNG, SIGNAL = 3.8; EXPRESSED IN ADULT LIVER, SIGNAL = 4.4; EXPRESSED IN FETAL LIVER, SIGNAL = 3.9; EXPRESSED IN BRAIN, SIGNAL = 3.9; EXPRESSED IN PLACENTA, SIGNAL = 3.6; EXPRESSED IN HEART, SIGNAL = 3.7
ctcctagggctcccatatcctagaagtgaaaatactaggttaaaggctctacctctttttcattttttaacacattgcacaattgaagaagataggttctagggcaatttttgaatcagtgtttgaagtaccacactccaatctggagtagataggaaatggttgggagaagttaccatttgtttgttgacatttactacctcaaaggtctaactcttgatctggacttctttaatcatggctgtctcatcctacctttcaggaaggcccacctgattctacggcgactggagagggtgagtagccactgctccagcctcctgcggagtgcctacatccagagccgcgtggaaacagtgccctatcttttctgccgcagcgaggaggtccggcctgcaggcatggtgtggtatagcatcctcaaggacaccaaaatcacgtgtgaggagaagatggtgtcaatggcccgaaacacgtacggggagtccaagggccggtgagggagggtattgccctccgtgagcacagagactctccatgggagggggagcagtattctc

SEQ ID NO: 6842 - DNA, 582 bp, Homo sapiens
  MAP TO AL136089.8; EXPRESSED IN PLACENTA, SIGNAL =   2; EXPRESSED IN FETAL LIVER, SIGNAL =   2; EXPRESSED IN HEART, SIGNAL = 2.4; EXPRESSED IN LUNG, SIGNAL = 2.6; EXPRESSED IN ADULT LIVER, SIGNAL = 2.4; EXPRESSED IN BRAIN, SIGNAL =   2; EXPRESSED IN BONE MARROW, SIGNAL = 2.1
tggacttcgggaactacagggaaacaggaggaaggacccctgaagaatgagaggtccaggatccaatcttaattctaaatccaactgcatttatgttttcaaatctaattccaagtaggacacagcttctataatcatacaactcagccttgacccctatcttgcccctgaagcccacctggcctggtaagcaaggggtagcaggtgaagaagttagaaagcagaactggaggacacaggaggatttccaggcacagggaaatttcaagggctgcttcagcagatggacaccagcccagagagggcccaggaaggtgactcacatctgaggttgcacttctctgtgagggagatccgcaggtagctgtgctgccggccgaagctgtctgtgaggaaggcggagaagggggccgcatgctcccgcaggaactgcctccgcctggacacctcctgcgaggacagaccagggaggaagcatgggcccctgctaccgggctgggaagaggcacaaggagaaccgcctgccccctcccttactctgacatctgtgcggagcttccaactcttccacatgtttgggct

SEQ ID NO: 6843 - DNA, 564 bp, Homo sapiens
  MAP TO AC012480.3; EXPRESSED IN LUNG, SIGNAL =  11; EXPRESSED IN ADULT LIVER, SIGNAL =  19; EXPRESSED IN FETAL LIVER, SIGNAL =  13; EXPRESSED IN BRAIN, SIGNAL =  10; EXPRESSED IN BONE MARROW, SIGNAL =  13; EXPRESSED IN PLACENTA, SIGNAL =  15; EXPRESSED IN HELA, SIGNAL =  22; EXPRESSED IN HEART, SIGNAL =  13
gtggaaatgggctcagaaaggctgagtgattaaccttaaatcacatgccttctctttggcaggagactaaacctaggcatcctaacttccagtcttatactgttttttctttaaattacttcagtggagctgataacatctgttatggccatctttataatgaatgtcaatgaccagcctaattggtcagtcatcattattaaggtgagcaaaaaaattatagaggtgaatacttccatctcattcacttctgatgaatgaacttcaaccttgtcacaactgttctggtttttaggcttgattgtgttagcataagtccatcaatctttccagttttctctttcaatcctaggagaaaagacttaatagatattagcctgggcaacatagcaaaatcccatctttagaaaaaaatttaaaaattagcttggcatggtggcatgcacctgtagtcccagctacttaggaggctgaggcagaaggattgcttgagcccaggaggtcaaggctgcagtgagttgtgtttgtgttactgcactccagccggggtgacaaaatgagact

SEQ ID NO: 6844 - DNA, 589 bp, Homo sapiens
  MAP TO AL161450.2; EXPRESSED IN LUNG, SIGNAL =   5; EXPRESSED IN ADULT LIVER, SIGNAL = 5.8; EXPRESSED IN HEART, SIGNAL = 5.4; EXPRESSED IN FETAL LIVER, SIGNAL = 5.5; EXPRESSED IN BRAIN, SIGNAL = 4.9; EXPRESSED IN PLACENTA, SIGNAL =   5; EXPRESSED IN HELA, SIGNAL = 8.7; EXPRESSED IN BONE MARROW, SIGNAL = 5.7
catataccaacgcctgagccctttctattactcttactgccacctccttaactgctggctatagtacccgtgttattttctttgctctgcggactggccatgcaggagtggtaagggcccggtccacgcgcgacgcctgggggccctgctgcatcgcccgtttgttcggggaaggtgggggggacgcttcatgccgccgcgcccagcagggtttccatgtctgagatgcccgctctggccccaagagaatgaaccagccgcagaggatggcatccgtggacacggacaaggagctcagtaacctggacttcagcatgatgttcccgctgcccgttgccaacgggaagggccggcccgcctccctggccggggcgcaattcagaggttcaggtcttgagaactggcccagctcaggctcctggggcagcggcgaccagaacagctcctcctttgaccccagctggacgttcagcgaaggcgctcaacttgctgagtcgcacggcagccactctccattcacattcctgggaccgggactcggaggcaagagcagctagcgcgggcctattcctcctttggtagagacgca

SEQ ID NO: 6845 - DNA, 569 bp, Homo sapiens
  MAP TO AL133354.8; EXPRESSED IN ADULT LIVER, SIGNAL = 1.6; EXPRESSED IN BRAIN, SIGNAL = 1.4; EXPRESSED IN BONE MARROW, SIGNAL = 1.6; EXPRESSED IN LUNG, SIGNAL = 1.7; EXPRESSED IN PLACENTA, SIGNAL = 1.2; EXPRESSED IN HEART, SIGNAL = 1.4; EXPRESSED IN FETAL LIVER, SIGNAL = 1.1
tgatgggcttgctgtatgagtctactagggattgccttatatggccagtaaacaaattctaaacctaactgcctattaaaagaggaactagattttcttaagagacagataaacccaattcctccaaggagtttgaggcatggtggtattgttgaggggtgaggagtgggaggaagttgcttttcacaacacctatggaatagttcacttataaatcagtctcctgacgtatatggcggcatctcctaaggtgcctttggacccctgcattaaccactacttaatgtgagaaaggcctctcagggctgctcctgggtgtgtgtggttgcagagaaacagaagctgaaggccaccgattacccgctgattgcccgaatcctccagggcccatgtgagcagatctccaaagtgttcctaatggagaaggaccaggtggaggaagtcacctacgacgtgagttccctttgggtcaggcgatctgtcctcaggagggtggggatttggttggaccacctgtaactggggtatagaatgacttttttgaccaacgaccatgcccccttttactt

SEQ ID NO: 6846 - DNA, 582 bp, Homo sapiens
  MAP TO AL158049.2; EXPRESSED IN HELA, SIGNAL = 6.8; EXPRESSED IN BONE MARROW, SIGNAL = 3.2; EXPRESSED IN LUNG, SIGNAL = 3.6; EXPRESSED IN FETAL LIVER, SIGNAL = 3.2; EXPRESSED IN PLACENTA, SIGNAL =   4; EXPRESSED IN ADULT LIVER, SIGNAL = 3.5; EXPRESSED IN HEART, SIGNAL = 3.2; EXPRESSED IN BRAIN, SIGNAL = 2.8
gactcgtagccctacctccccgccagactccttctgcaggcctccaccccggcgtgtcctgagtccacgctttcctaacccaaactcagggcttctgcttgcaattcttgctctgtggagccaggttgggtccactctgccatctgatggcccccaggccagaggccctcatttccttctgctaggggctgggtccccaatatcacagccctggccccaacctgagtcctatcttgccccagtgaatgtggggaccaccgggcccagcctccctgcctcatcccctgcaggagtctctcttcccagcccgagtggtctatgacctcctgttcttcttcatcgtcatcatcattgtgctgaacctcatctttggggtaatcatcgacaccttcgctgacctgcgtagtgagaagcagaagaaggaggagattcttaagacgacatgcttcatctgtggtgagggctgcttcctgctctgtggaggccgcagcggggctggaacgtcatctgatgccagtggcagtagcggtttggcccttcctgccctggggaaccctggcccggagctgatgacttgatgca

SEQ ID NO: 6847 - DNA, 553 bp, Homo sapiens
  MAP TO AL136059.2; EXPRESSED IN LUNG, SIGNAL = 2.2; EXPRESSED IN PLACENTA, SIGNAL = 1.7; EXPRESSED IN FETAL LIVER, SIGNAL = 1.6; EXPRESSED IN HEART, SIGNAL = 1.3; EXPRESSED IN ADULT LIVER, SIGNAL = 1.6; EXPRESSED IN BRAIN, SIGNAL = 1.6; EXPRESSED IN BONE MARROW, SIGNAL = 2.2
atgtctctgccttcaaagcgctcacagtctgtagttagctaataaaagatggctgggggctgatgtaaaatagaagctttattacatgggtaagcaagacagatacatacaggttaccaccaaactcaagaccacagagcatatcagttactggctaacaactcacaggtgcctgaaatccgcagttctgagttcaggggatagagtactacttttcctctttctttcttttagctttatctgagaggtgttttccagaagctgaaggttgatgctgaactgctgaagctggaggagccagatgacaaagagcatggtgaggaggagtatcaggctatgacacacgttattttggaaaaacttttcatatgattatttatttttctaatccaccatttttggaatgagctgagattagcccaactaatattaacatcagttctaggcttgaatccaaacagacttttcaagatctctaaattccttcagagatgcttagagggatagaatgcagctgaatcacagtctcccaaccagatcttccttacccgtg

SEQ ID NO: 6848 - DNA, 570 bp, Homo sapiens
  MAP TO AL132874.14; EXPRESSED IN LUNG, SIGNAL = 1.8; EXPRESSED IN ADULT LIVER, SIGNAL = 2.3; EXPRESSED IN HEART, SIGNAL = 2.3; EXPRESSED IN FETAL LIVER, SIGNAL = 1.9; EXPRESSED IN BRAIN, SIGNAL = 2.1; EXPRESSED IN PLACENTA, SIGNAL =   2; EXPRESSED IN HELA, SIGNAL = 3.3; EXPRESSED IN BONE MARROW, SIGNAL = 1.9
ctgtcctttttgctgcttcccaccactagggggcaggaagtatctgataaaggaactaaaaaggctggaaacgcgtgcattgacaagcaaaagccggaggcttgcctgcttgcaattcttatgatgaaaacatttcttcagaaatcagcctcatttgagcacttctggcagacgcagaggccagctgaggagtgggccaggagaaggggagggcgcctcaggaggcgtgtcctttgatcattttggaaaaaccgctctatcttctgaagactttgaaaatgcatacctagagagcaaggctgcgacagggctttgaaaccccctgagccatgaggtcaaggtccattttatagaaacctgtaatctgaaagaatatacatttaataatgtgattcttttgggaggtggggagcaggcactcagattccaaatccacaggtccctcaaagggatattggtcatcagaagctttgtttaaaaaaaatcccagaatcccacaccagtgatagactgcacagagcgatgcacagtttagcatccatactagtgtgaggatggagagagcactgg

SEQ ID NO: 6849 - DNA, 543 bp, Homo sapiens
  MAP TO AC021824.2; EXPRESSED IN LUNG, SIGNAL =  11; EXPRESSED IN PLACENTA, SIGNAL =  10; EXPRESSED IN ADULT LIVER, SIGNAL =  10; EXPRESSED IN HELA, SIGNAL = 5.5; EXPRESSED IN BRAIN, SIGNAL = 8.1; EXPRESSED IN BONE MARROW, SIGNAL = 9.4; EXPRESSED IN FETAL LIVER, SIGNAL = 8.4; EXPRESSED IN HEART, SIGNAL =   9
cacccaaaagctctggtaggagatatacaaagagattaatgttttcagggctactaatacaacattcattctgtaacctatggatcaaagaataatttttattttcaagtcttattatttaggaaatacattttgtaaggctatagctgacatagtgattcctctgataaatctggacaaactattttgaaaaccttctgaaaaggatttactattctagatgccgttaagaacatttgcaattcatgggaggaggccaaaatatcaacattaacaggagtctgcaagacgttcattccaaccattatggatgattttgaggagtttaagagctcagtgagggaagtaactgcagatgtggtagaaaaagcaagagaattagaatcaaaagtggtgcctgaaaatacaattgagttgctgcaatcttaggatcaaactttaatgagaagttgcttcttacgtatgagcaaagaaggtgatttcttgagatttagaatattccataaacttagttgataaagcagtggcagagtttgcagattg

SEQ ID NO: 6850 - DNA, 593 bp, Homo sapiens
  MAP TO AL121845.12; EXPRESSED IN ADULT LIVER, SIGNAL =   4; EXPRESSED IN HELA, SIGNAL = 2.8; EXPRESSED IN BRAIN, SIGNAL = 2.4; EXPRESSED IN LUNG, SIGNAL = 3.1; EXPRESSED IN BONE MARROW, SIGNAL = 2.8; EXPRESSED IN PLACENTA, SIGNAL = 2.3; EXPRESSED IN FETAL LIVER, SIGNAL = 2.9; EXPRESSED IN HEART, SIGNAL = 2.4
tctccgtgctcctcagattcccggggtcccgtggccacagcactgccatccccgtgctcctcagattcccggggtcccgcagccacagcactgccatccccgtgcctccgcaggtttgggccgacacgcggaaggccgggtggagcccatccatgctgtggtgttgcctcgagggaagtcgctggaccagtgtgtggagaccctgcagaagcagaccagggttggcaaggctggcaccaacaagccccccaggtgccggggaagaggggccaggcctgggggccgcccagctcctcggaatgtgtttgacttcctcaatgaaaagctgcaaggtcaggctcctggggccctagaagccggggcggccccagcggggaggaggagcaaggacatgtaccatgccagcaagagtgccaagcgggccctgagcctgcggctcttccagactgaggagaagatcgagcgaacccagcgggacatcaggagcatccaggaggctctcgcccgcaacgctggccggtacgtgtggggcccagctcagggcaaagggcgacccagggtggccctgcccccgggatacatgctggaggtca

SEQ ID NO: 6851 - DNA, 571 bp, Homo sapiens
  MAP TO AL139819.2; EXPRESSED IN BONE MARROW, SIGNAL = 3.7; EXPRESSED IN PLACENTA, SIGNAL = 3.6; EXPRESSED IN HELA, SIGNAL = 5.1; EXPRESSED IN FETAL LIVER, SIGNAL = 4.4; EXPRESSED IN LUNG, SIGNAL = 3.9; EXPRESSED IN ADULT LIVER, SIGNAL = 6.1; EXPRESSED IN HEART, SIGNAL = 3.9; EXPRESSED IN BRAIN, SIGNAL = 4.5
gtgatttctagggttggggcagaaggaagacagtgttaagaatcatcagggctgtggcccagttggcctgcggaggtgcaggcagggtggcccctcaggggcagctggaggagcatggactgccccgctggcagggagctgatgttcccagagtataagagctggaatgtgatgtcctccacagcttccagcttgcgcagctctatcaggctgttccctgcggtggccagtgagttggcgatcagctctgctgccttggaatcgccctcagcagagatgatggctgcctttttctgctgctcagccttttctgccacaaatctggtgctctctgcttcccgctgagccacctgtttggcttccactgcttctgtgaactccttcccgaaggtcagatgtgtcaaggacacgtcatccaggatgagcccaaaggtggctgcttgctctgtaaggtcgttgctcatctgcctggagaccagctctctttaggtgattagttctccagcatcaaagtgagccaccactgacttgaggatctcagtagtgatggacagcagcacacgcttatcat

SEQ ID NO: 6852 - DNA, 596 bp, Homo sapiens
  MAP TO AC007981.43; EXPRESSED IN ADULT LIVER, SIGNAL = 3.2; EXPRESSED IN HELA, SIGNAL = 2.7; EXPRESSED IN LUNG, SIGNAL =   3; EXPRESSED IN PLACENTA, SIGNAL =   3; EXPRESSED IN FETAL LIVER, SIGNAL =   3; EXPRESSED IN BRAIN, SIGNAL =   3; EXPRESSED IN HEART, SIGNAL =   3; EXPRESSED IN BONE MARROW, SIGNAL = 2.9
aactcagcaccacccaaaagggagcacagctgcttcctcaaaatttggccataatttttccctggggaattcaggttttaaaaaaacacttcccctatacttattcctatcacaatcccaggatcagggtggctcttcacattgaaaccaggcaaggatgccacacctttcttggcatccagattgttttctcggtaagtgattccagaatacttactagattcacgcctcagaggggccacctgcaccacctgcaatacagaaacaaagctttttgaggggtatgtcatgttgtggattgtttgcacaaggctgtgtttctctcaatgaatattgaaaacttgatcagaaagtgtagtcaacttcaaggcctccaaaacaagggtaggatacacactggaaaagacatcagcttctggatggtggatctctcaggtccacgtaggttggcaagtgcaaaatactgaatccaaggagaagacattgcttccaaggacaaggaccccaaggatacagtctacaacctgaagccatcatagctaaatgccattttggattacatatcagttgctaagagtcacttcttcctccccctc

SEQ ID NO: 6853 - DNA, 591 bp, Homo sapiens
  MAP TO AL157376.1; EXPRESSED IN ADULT LIVER, SIGNAL = 3.2; EXPRESSED IN HELA, SIGNAL = 2.7; EXPRESSED IN BRAIN, SIGNAL = 2.9; EXPRESSED IN LUNG, SIGNAL = 2.7; EXPRESSED IN BONE MARROW, SIGNAL = 2.8; EXPRESSED IN PLACENTA, SIGNAL = 2.5; EXPRESSED IN HEART, SIGNAL = 2.6; EXPRESSED IN FETAL LIVER, SIGNAL = 2.7
gcaaaacagctattgggtcctaattaattttttccacaatttatgaagattttaggcccataaaatgaacctaactacatgctatgtgtaaaaaacatttcatattcagtgacataggtaggttgaaagcaaaaagatgaaaaaagatatatcgtgccagtattaatggaaaaggaaggaatggtttaatatctcataaagtagacttcagagcaataaaaattactggagaaaaagatggacattacatgatatcataacaaacttaactgtgtacacacagaaaaacatatatgaagggaaaagaaacatgaagcaaaaattgatagagctgaaaaagaaagtagacaaatccaaaattatagttatcaagtatatagaagacctgaacaatatgatccaccaacagatgtaattgacatacagaacacttcaccctataatactggaatgtatttttaaagcctccatagaagactaaccaagatagactatatcctgggccatgaaatcatatagtgtgtactctctgaccatggtacaatcaaattagaaattaacagtgtaaagacaaaaggaacctctccaagc

SEQ ID NO: 6854 - DNA, 523 bp, Homo sapiens
  MAP TO AC011815.2; EXPRESSED IN PLACENTA, SIGNAL = 5.4; EXPRESSED IN ADULT LIVER, SIGNAL = 4.1; EXPRESSED IN HEART, SIGNAL = 2.5; EXPRESSED IN BRAIN, SIGNAL = 4.9; EXPRESSED IN BONE MARROW, SIGNAL = 4.1; EXPRESSED IN LUNG, SIGNAL = 4.2; EXPRESSED IN HELA, SIGNAL = 4.4; EXPRESSED IN FETAL LIVER, SIGNAL = 3.8
gttcctccagaacctcctcccccaggagcttgctacaagtgctggaaatctgtccactgggccaaggaatgcccacagcccgggattcctcctaagccatgtcccatctgtgcagtaccccgctgaaaattggactgttcaactcacctggcagccacttccagagcccctggaactctggcctaaggctctctgattgactccttcccagatcttctcggctcagcagatgaagactgacacttcccgattgcctcggaagcctacaggaccatcacagatgctctgggtaattatcacagtggagggtaagtccatccccttcttaatcaatatggaggctacccactccacattaccttcttttcaagggcccgtttcccttgcctccataactgttgtgggtattgacggccaggcttctaaatctcttaaaactccccaactctggtgccaacttagacaatactcttttaagcactcctttttagttatccccacctgcccagttcccttattaggc

SEQ ID NO: 6855 - DNA, 510 bp, Homo sapiens
  MAP TO AC019083.5; EXPRESSED IN PLACENTA, SIGNAL = 1.3; EXPRESSED IN ADULT LIVER, SIGNAL = 1.5; EXPRESSED IN BRAIN, SIGNAL =   1; EXPRESSED IN BONE MARROW, SIGNAL =   1; EXPRESSED IN LUNG, SIGNAL = 1.6; EXPRESSED IN HEART, SIGNAL = 1.2; EXPRESSED IN FETAL LIVER, SIGNAL = 1.1
agatggggataaatggagggatgcgggatgtgtgaagcaagaggcttgttcatggtcagaaccggcatctgaacccagctctcatgacaagtctgctgctctttttggtacacaaaacccgtttctttctctgtgtgagaatgaacaaggtgcctgcacatttttctgtcccagtgcagtgtttgaggatgctaagttacaccccaacagctgtgcaaaatctgtttctctcttgtgtagtgatggaggctatacattgtgttgtgaaaggtgtcactcatttgggaaattagaacaaaacatagtcattgcctttaacagcacacagcctaatagaggcaataggaatgtaaacagggtcccaagccaaaacttaacatgagcaagttatagaatcatatacaattcttagggtcataattctagggctacatgttttgactgtttgaccacactatatgcagcagtatcgttaatggtcctggatctaggcagcattttccgaagtag

SEQ ID NO: 6856 - DNA, 559 bp, Homo sapiens
  MAP TO AL161756.1; EXPRESSED IN LUNG, SIGNAL = 1.7; EXPRESSED IN PLACENTA, SIGNAL = 1.3; EXPRESSED IN FETAL LIVER, SIGNAL = 1.2; EXPRESSED IN HEART, SIGNAL = 1.5; EXPRESSED IN ADULT LIVER, SIGNAL = 2.2; EXPRESSED IN BRAIN, SIGNAL = 1.2; EXPRESSED IN BONE MARROW, SIGNAL = 1.3
aaccacagaagtcagggtcggccacaagatggactcttggtcattgagagctggccgtgttgctaaggggctaaaaacatagccaaacgggtcactttccagggtgctgggaacccagctgttacctgacagtgcgctgtagtatgggccctcctcgtcctcttcgtgagaggaggagccccccacgtcgcctgtgtggtcccactccagggggatggagtccacgctgacaggggtctcgcagccagaccgctcgtgccctggggccactagatgacacagggactgaggagatgacggttcctcgctctctccccgtttacgccaagaatcagtctggatttctctggggtcttccatgtctgtttcattctcagaggcctccttttcatcttccaagccctaaaccacagtatccagttgttagaattaatcaactcataggcttctgcaattagaagagcatgagaagtctgcctatctagcagtttccaaaaataactgccaatagtatttctaaggcagctttaaaaagatcaggttcccaggtcctgtttct

SEQ ID NO: 6857 - DNA, 561 bp, Homo sapiens
  MAP TO AC013627.3; EXPRESSED IN LUNG, SIGNAL = 7.6; EXPRESSED IN PLACENTA, SIGNAL = 9.8; EXPRESSED IN HELA, SIGNAL = 5.6; EXPRESSED IN HEART, SIGNAL = 6.4; EXPRESSED IN FETAL LIVER, SIGNAL = 7.6; EXPRESSED IN BRAIN, SIGNAL = 8.4; EXPRESSED IN BONE MARROW, SIGNAL =  11; EXPRESSED IN ADULT LIVER, SIGNAL =  11
ttgctttgaccaaaatgctgacagtaatatgggcaatgaagtccaggctgagatgatctcagatggagatgaggaacttgttgggaactggagcaaagatgactcttgttatgctatagcaaagagactggtggctttttgcccctgccctagagatctgtggaactttgaacctaagagagatgatttggggtatcaggcagaagaaatttctaagtggcaaagcattccacaggaagcagaggacaaaagtttgtcaaatttgcaccctgatgatgtgacagaaaagaaaaatctattttctgaggaaaaaattcaagccagctgcagaaatctgcataagaaacaaggagtgaaatgttaatcactaagacaatggggaaaatgcctccagggcacttcagaggtcttcaggaagggccctcccatcataggcccagaggcccaggaggaaaaaatggtttcctgggccaggcccagggccttgctgctttgtgcagtctcaggacttggtgccctgcatcccagccatggctaaaaggagccaaggtacagctcagg

SEQ ID NO: 6858 - DNA, 595 bp, Homo sapiens
  MAP TO AC022206.2; EXPRESSED IN LUNG, SIGNAL = 4.6; EXPRESSED IN HEART, SIGNAL = 4.5; EXPRESSED IN BRAIN, SIGNAL = 4.5; EXPRESSED IN BONE MARROW, SIGNAL = 4.7; EXPRESSED IN PLACENTA, SIGNAL = 4.2; EXPRESSED IN ADULT LIVER, SIGNAL = 4.3; EXPRESSED IN HELA, SIGNAL = 4.6; EXPRESSED IN FETAL LIVER, SIGNAL = 4.6
tgccttttcctgtcaagtccttagagaccctcttctttccttacacaagatttggtgtgcttgtttatgagtttatgaggataacattccttcagtggcactgtatgtgatgtgacttgcttctggctgcctctctctctctccctctctctccccctccctccctccctctctccctccttctctctctctcttttcccttcctaactcttgcccttcttctcttttctgtcaagcctgcttaggtaacaaattcttggtttggctgtttaatgagcaaatccagacactttaggcggccagccacagtggcgaaaacaaaaactgatgatactagcaatattcataatactagcgatggtgttgatcatcaacagacaggcactacaccatttcctgatggcgggtgggagattcacggaagccccactggtggaatttacaggaaggcggccgatcctcttgaggcaagcccatctgcacagagccggtgactctgggaggccagcatctgagaatttttttaaactcaaagtaaagctccagccgcagagaaaagaacatgtgcagcaacccggcttcccctttatctctt

SEQ ID NO: 6859 - DNA, 555 bp, Homo sapiens
  MAP TO AC007492.2; EXPRESSED IN LUNG, SIGNAL = 1.6; EXPRESSED IN ADULT LIVER, SIGNAL = 1.7; EXPRESSED IN BRAIN, SIGNAL = 1.5; EXPRESSED IN BONE MARROW, SIGNAL = 1.3; EXPRESSED IN PLACENTA, SIGNAL = 1.4; EXPRESSED IN FETAL LIVER, SIGNAL = 1.5; EXPRESSED IN HEART, SIGNAL = 1.4
tagggatgtgaaggagacggaaagttgtccaaaaaattgcacaagctatgtctctaaaatgagtttgggattcaaagcagcaatagtgacctgacaaccttgtcaccccttacggtgagcttccgctatccctaatctggtgatgcggttggacgtatgactcctgctgtgtgcttctttccaatggctctccctctgtttctgacttccagctactgccccttcacttctgctgcccttccccagttgccacccctagaggccttactaaaggtttatcgtgagctgctgattcgtagtgatgagggagtgatcaagaaaccacccaccatctatctggttgtaagtggcctttttaaaggtcattggtctgtcctatatcctgcctgctacaatcagcagtgtggacaaggtagcaaggccacacacaacactaaccacaactttgtgaaaggaaccacctcagaaggatgacaggttctggattattcttcaaaatacttgaaaataaattaaaagcaccaccagctcattagcaacccagttaaggaacca

SEQ ID NO: 6860 - DNA, 551 bp, Homo sapiens
  MAP TO AL161752.1; EXPRESSED IN ADULT LIVER, SIGNAL = 1.8; EXPRESSED IN BRAIN, SIGNAL = 1.6; EXPRESSED IN LUNG, SIGNAL = 1.7; EXPRESSED IN HEART, SIGNAL = 1.6; EXPRESSED IN BONE MARROW, SIGNAL = 1.5; EXPRESSED IN PLACENTA, SIGNAL = 1.3; EXPRESSED IN FETAL LIVER, SIGNAL = 1.7
ccctctcttttctgctgtggttgagtaaaatagacaatagcaaaaccatttttttttccttgctttaaaacttgcttacctgggttaatatactaacatcaatcaagctgatgttcaggaggcaataaatagctataaactgtcctacatgtttaatcctttctgcagcatggaaaatgtgaacttgattcctgtgttttaaaaagagttatgactttatataaaattaatttaaaaatttgtgggtgaaggcatttgtatattcacatccctctatcttctctggttataatgcagttagtcactcttcaataccattttatcgccatgttttttaaagtggggttcatgaacaactggtgtccttgaattatcaaaaatgcaagtaccagccaatatcttaagttcccagtcaaaatgggcagagaaggaactagaagtggggcaggggtcaatttttatctcattgcagtcagttgatcaccttcattacctggaccttatatcactttttccacatgacatagacttcccttcatctcccttttcca

SEQ ID NO: 6861 - DNA, 545 bp, Homo sapiens
  MAP TO AL117333.23; EXPRESSED IN BONE MARROW, SIGNAL = 2.3; EXPRESSED IN PLACENTA, SIGNAL = 2.6; EXPRESSED IN HELA, SIGNAL = 3.4; EXPRESSED IN HEART, SIGNAL = 2.7; EXPRESSED IN FETAL LIVER, SIGNAL = 2.1; EXPRESSED IN LUNG, SIGNAL = 2.6; EXPRESSED IN ADULT LIVER, SIGNAL = 2.7; EXPRESSED IN BRAIN, SIGNAL =   2
ctgtatgacaactggttcctgcttgttagagagaagtagtatgaatagtgttgaagaaggagaagaaaatttcatttttgaaaatcaaacttgactttatattcttgaaacagagcctacctactttttgccaaagcagctgacatgggaaacttgaaagctatggagaaaatggctgacgctttgctatttggaaattttggcgtgcaaaatataacagcagctatccaattatatgagtccttggctaaagaaggatcatgtaaagcccaaaacgtgagttttgaaggaaaatgaaaccttaaatagctccatcctgaaataactatagacagcatgtgaaaggagttgagcaatagtattccagctctgctgcatgaacccagtctagggaggttaccataatgcactgaaacagtggtgtcagggcaggagtacagcagaagcctccgaacccccaacagctaaattttatataaaatgtattcacctatatgaagaaatatgaaactgtctattatcttagggtgacatgtttgcatgat

SEQ ID NO: 6862 - DNA, 597 bp, Homo sapiens
  MAP TO AC021973.2; EXPRESSED IN ADULT LIVER, SIGNAL =   2; EXPRESSED IN HELA, SIGNAL =   3; EXPRESSED IN FETAL LIVER, SIGNAL = 1.5; EXPRESSED IN BONE MARROW, SIGNAL = 1.6; EXPRESSED IN LUNG, SIGNAL = 1.8; EXPRESSED IN PLACENTA, SIGNAL = 2.3; EXPRESSED IN HEART, SIGNAL = 1.8; EXPRESSED IN BRAIN, SIGNAL = 1.5
acattccattggctttccaccccactcagaataaaatgcagaaccaaactcctcaatgccgtgtgtaatagctcacttccaaatgcactgcttaccatgtactttaccacctgccccttgtctccctttctctggccgcactcaccacagttgttttgtttgttccttttcagacctgccaagcctcccttcatctcagagtcctggtgcttgctccgccaggcgtctgtcttttgcaaatcactcgatgatgattccctccctgcctccaggtctctacttagaaagagatcctccctgaccaacttgtctaaaataagtcatttgcaccattactctctaccagtcctggtgtacttttcctcacagctcttacccaggtcagcccccaacaggcactagacccagagcaaggctgcaaaggaggacccctgtgtctaagtatttacaaattacaagtcaagttacaagttacttgcccaagttgttagtaagatgttttctattctcctacactgacaaatatgcagtcatagccacctaccaagctccatttgaatttagaattttcaggttcctcggctgcctatcagaaag

SEQ ID NO: 6863 - DNA, 512 bp, Homo sapiens
  MAP TO AC009234.3; EXPRESSED IN PLACENTA, SIGNAL = 1.5; EXPRESSED IN HEART, SIGNAL = 1.6; EXPRESSED IN FETAL LIVER, SIGNAL = 1.3; EXPRESSED IN BONE MARROW, SIGNAL = 1.7; EXPRESSED IN LUNG, SIGNAL = 1.1; EXPRESSED IN BRAIN, SIGNAL = 1.5
taatgcagattgccaggttgggtttctgttctagttggaacaacatctgtgtttgtaatggccataatgtagctaactgtgaatttttaccatgattttcagtaacagaataaacattctcttgacatttctacacgacaagactatgaaggctatttttaaagtattttgataagatttggcatttgaaaatacgaactcaatttaatatgaaatggacgaatttcacttacaattatagttttaatctgagctgctataacaaaagtagctcaaactgggtgacttaaaccacaaacatttacttctcacagtacaggatgctgaagggtccaaggtcaaggtgccagcagatttcacatctggtgaaggcccacttccaggttcacaggtggcactctttttactgtgccattgcatggcagcagtgacaagggagacctctggggtctcttttgtaagagacccttttgtaaagggactcttttgtaagggaatcacattcatgaggg

SEQ ID NO: 6864 - DNA, 567 bp, Homo sapiens
  MAP TO AL158049.2; EXPRESSED IN ADULT LIVER, SIGNAL = 1.4; EXPRESSED IN HEART, SIGNAL = 2.4; EXPRESSED IN BRAIN, SIGNAL = 1.3; EXPRESSED IN LUNG, SIGNAL = 1.1; EXPRESSED IN PLACENTA, SIGNAL = 1.1; EXPRESSED IN FETAL LIVER, SIGNAL = 1.5; EXPRESSED IN BONE MARROW, SIGNAL = 1.4
gctatttttggcttcctcccaggagctcctacaacaaaagggagcctgagtatcttgccaggagacaccagacccgtgccagaggggcgggggctcccgtggcaatgcaggaagcaccttgtgccgaggccccattaccctcatcaggcccagagggaaacctgcatttcctctccccaggagatttccctaccctgagcagcagtcacagcagatagctcaatcaccatcccttctcaggctgaaactttctttagagcagcaagggcttcctttctgggaaagctagaggagattcccaaaccgtaaggtcaaggggaaactggggcagttttattgacgatggcaatgtacaagactccacacctaggtatgtgcacgaggtaaggcctgagctcaggccttatgatcctcctcaggacccttgggggcaaacttctcctgcagtttcttccacatgcctttatctatttccttaagctcttccaaggtgtctgcaaaaggggaagacaaaaagagagagggactgaagtctaaaacttgatgacatagattggacccactggg

SEQ ID NO: 6865 - DNA, 589 bp, Homo sapiens
  MAP TO AL132654.12; EXPRESSED IN LUNG, SIGNAL = 5.1; EXPRESSED IN HEART, SIGNAL = 4.5; EXPRESSED IN FETAL LIVER, SIGNAL = 4.5; EXPRESSED IN BONE MARROW, SIGNAL = 4.7; EXPRESSED IN ADULT LIVER, SIGNAL = 4.8; EXPRESSED IN PLACENTA, SIGNAL = 4.6; EXPRESSED IN HELA, SIGNAL = 2.4; EXPRESSED IN BRAIN, SIGNAL = 4.6
tggacagggacaaataagggaataaaagctagccaccccagccagtagcagcaacccactcgtgttcccttccaggttgtggaagctttgttttttcgctcttcacaataaatcttgctgctactcactctttaggtccatgccatctttaagagctgtaacactcaccacaaaggtccgcagctcctttcttgaagtcagcaagaccacagacctaccagaaggaatgaactccggacacactatgaattttagtgaagtgcaagcaataaatgcacatgtgctgagatagaggacaatggggaggaagctactatagaagtggtgatcagggaaggcccctctgaggaggagatgttttagctgagactggacgtttaaggatctttctatgagacaagtggaggtcttgaagagcctgtacagaagaggagaatacggcatgtttgaggaactgaaggtgttcaatctgacaagcatggcaaacaaggaggggagcctggagagggagcacgtcaaagtaagtgtggatgcgagtccaagtgcagtggaagccaccaagcaggggggtggcatgcttgggtttact

SEQ ID NO: 6866 - DNA, 564 bp, Homo sapiens
  MAP TO AC024196.2; EXPRESSED IN PLACENTA, SIGNAL = 1.3; EXPRESSED IN HEART, SIGNAL = 1.5; EXPRESSED IN LUNG, SIGNAL = 0.92; EXPRESSED IN BRAIN, SIGNAL =   1; EXPRESSED IN ADULT LIVER, SIGNAL = 1.1; EXPRESSED IN FETAL LIVER, SIGNAL =   1; EXPRESSED IN BONE MARROW, SIGNAL = 1.1
accacaaattagggcagtggctccctcctgagtccttaaaaggggagcccaagatcagctttctccagaaagacccaccttgtcaatgaaggaggcgaacttgttgttcagcaccttgatctgctcccgctcctgggcacgcactttctggatttcagggtccagctccacgttcaggggtgccaggaggctcttgttgatggtgacctgatggatacccccgggcgggcacaacgacagacacacggaccccaaggccacactgccaaacatgctgccagcaaagccactggcccggccccggccaaatccatagcctcctgcccacccactgccactggccacattgaaagagatgctccgggcaccccccaggctgtaaaggctccgactgctgaagcctccactgagccctttgccccctgctcggtaggaggatgagctgccccctgagagcacagcggagcagccgctgaagccccccttggcagcagctcccgacttgtaggtgaattggcggctcatggtggggaggccagaaagtggggataagatgctgaccct

SEQ ID NO: 6867 - DNA, 530 bp, Homo sapiens
  MAP TO AL133293.14; EXPRESSED IN HEART, SIGNAL = 1.4; EXPRESSED IN FETAL LIVER, SIGNAL = 1.6; EXPRESSED IN BONE MARROW, SIGNAL = 1.6; EXPRESSED IN LUNG, SIGNAL = 1.5; EXPRESSED IN PLACENTA, SIGNAL = 1.4; EXPRESSED IN ADULT LIVER, SIGNAL = 1.5; EXPRESSED IN BRAIN, SIGNAL = 2.6
gtcccgacaacagctactggttcttgagcatttaatcctagtaacagtgccatgaggagcaccctgtcattgtacccattgtacagatggggagactgaggctcagaaagggcccaggctttgactgggtttgtcacatggctgtggaggccacagctgacactggcgcccaggtgggcagatcctggatccctgtgtggtaggagttggggggctccactgagtcagcctgcatccctcctcaacagggacctggaacggtaccaccagggtggccatcaaaaccctgaagcctggcacgatgtctccagaggccttcctgcaggaggcccaggtcatgaagaagctgaggcatgagaagctggtgcagttgtatgctgtggtttcagaggagcccatttacatcgtcacggagtacatgagcaagggtgagtcctgggcggccggggcagggggcaggggcactccggacagggcagggagcatgagcctcatttcctctcatgtctagaatgggcatcttcaaaggt

SEQ ID NO: 6868 - DNA, 585 bp, Homo sapiens
  MAP TO AC015525.3; EXPRESSED IN ADULT LIVER, SIGNAL = 1.6; EXPRESSED IN LUNG, SIGNAL = 1.9; EXPRESSED IN PLACENTA, SIGNAL = 1.4; EXPRESSED IN HEART, SIGNAL = 1.5; EXPRESSED IN FETAL LIVER, SIGNAL = 1.5; EXPRESSED IN BRAIN, SIGNAL = 1.6; EXPRESSED IN BONE MARROW, SIGNAL = 1.6
tccttcaagaaacccaccactgccactgcctgacctgctgaactgaatctttatgtcttcagttccgcttgtgctctctccgtccaccgtgttgctgttcccctgagacaccgccgtctctgattcatcgtgttcccttagctgaagaacgctgttctcaaactggtccctggaatcctcacttacgctcgtcaacactgttgtggtgacggggctgtgcacgctctcgattagctctgttcgtaccatccccttttcctgctggtcctcgagcagcttgggagaagggtggttccccatagctgtgagctcatcttgtagtccattgaaggttttgctttcactgaagggtaagtgtggagaagaggagcagctcaggtgctcctgaaagttggccatcgtgccatgagtataaccaaagtcctgagatgacactcagaagatttttgggacagagttctgacttaagagagggctccaaaacctgagaaaaacaggagggagataagagatcatcctttctttagtatgcacactacgacacttctgtttgcattaaaaaaaactgaaacaatggggattggt

SEQ ID NO: 6869 - DNA, 590 bp, Homo sapiens
  MAP TO AL132716.4; EXPRESSED IN LUNG, SIGNAL = 1.5; EXPRESSED IN HEART, SIGNAL = 1.2; EXPRESSED IN PLACENTA, SIGNAL = 1.2; EXPRESSED IN FETAL LIVER, SIGNAL = 1.2; EXPRESSED IN ADULT LIVER, SIGNAL = 1.2; EXPRESSED IN BRAIN, SIGNAL = 1.9; EXPRESSED IN BONE MARROW, SIGNAL = 1.3
ggacatgctaaccttgctggcgttgcagcctttccagcagttttatctggcttcacaggcaatgacctggtggccatcacctctgcacttaatacattagccagctatggatataatctcaacactttaggtttaggtctcagtcaagcagcagcaacaggggctttggctgcagcagctgccagtgccaacccagcagcagcagcagccaatttattggccacctatgccagtgaagcctcagccagtggcagcacagctggtggtacggcggggacatttgcattaggtagcctggctgctgctactgctgcaaccaatggatattttggagctgcttctcccctagctgccagtgccattctaggaacagaaaagtccacagatggatccaaggatgtagttgaaatagcagtgccagaaaacttagttggtgcaatacttggcaaaggagggaaaacattagtggaataccaggagttgactggtgcaaggatacagatctccaaaaaaggagaattcgtacctggcacaaggaatcggaaggtaaccattactggaacaccagctgcaacacaggctgctcaata

SEQ ID NO: 6870 - DNA, 577 bp, Homo sapiens
  MAP TO AC021308.3; EXPRESSED IN ADULT LIVER, SIGNAL = 7.8; EXPRESSED IN HEART, SIGNAL = 4.7; EXPRESSED IN LUNG, SIGNAL = 5.3; EXPRESSED IN PLACENTA, SIGNAL = 8.1; EXPRESSED IN HELA, SIGNAL = 2.4; EXPRESSED IN FETAL LIVER, SIGNAL = 5.1; EXPRESSED IN BRAIN, SIGNAL = 6.2; EXPRESSED IN BONE MARROW, SIGNAL = 6.6
ttccaaatgggagaaattggccaaaacaaaggggctacagattccatgcaagtctgaaatccagtggggcagtcaaatcttaaagctccaaaatgatctcctttgactccatgtctcactcccaggtcacactgatgcaagagatgggctcctacagccttgggcagctccgcctatgtggatttgcagggtacagcccccttcctggctgctttctcaggctggcgttgagtgcctgtggcttctccaggcccatggtggaagctgtgagtggatctaccattctggggcctggaggacggtggccctcttctcacagctccactaggtagtgccccagtggggactctgtgtggggtctctgatcccatctttccctttttcactgccctagcagaggttctccatgaggtccctgcccctgcagcaagcttttgcctgaacatccaggcatttccatacaccctctgaaatctatgtggaagtttccaaacctgagttcttgacttctgtgcacctgcaggctcaacaccactggaagctgccaagacttggggcctgtaccttccatagccca

SEQ ID NO: 6871 - DNA, 529 bp, Homo sapiens
  MAP TO AC027273.2; EXPRESSED IN HELA, SIGNAL = 9.1; EXPRESSED IN LUNG, SIGNAL = 8.9; EXPRESSED IN PLACENTA, SIGNAL =   7; EXPRESSED IN ADULT LIVER, SIGNAL =  12; EXPRESSED IN FETAL LIVER, SIGNAL = 3.2; EXPRESSED IN HEART, SIGNAL = 6.5; EXPRESSED IN BRAIN, SIGNAL = 7.8; EXPRESSED IN BONE MARROW, SIGNAL = 7.4
tcatgttagaggtgggctcccatcaccttgggcagctccaaccctgtggctttacagggtacagcccccctcactgctactttcactgttggtgttgattgtctgaagctttttcaggtgcacagtgcaagctgtcagcggatctaccattctggggtctggaggatgatggccctcttctcacagctctactaggcaaagccccagtggtgactctgcgtgggggctccaacccctcattttccttctgcactgccttatcagaggctctccatgagggcttcacccctgaagcacacctagatttcagagaatgtatggacctccaaacatttccatacatcctctaaaatctaagcagaggttcccaaacctccattctcatcttctgagcacctgcaggaccaacaccacgtggatgttgtcagagcttggggcttgcaccctctgaagccatggcctgagctgtactttggccccttttagccatggctggagcatctgggacacagagcaccaagtccctagg

SEQ ID NO: 6872 - DNA, 502 bp, Homo sapiens
  MAP TO AC018525.4; EXPRESSED IN PLACENTA, SIGNAL =  15; EXPRESSED IN HELA, SIGNAL =  14; EXPRESSED IN HEART, SIGNAL =  13; EXPRESSED IN FETAL LIVER, SIGNAL =  11; EXPRESSED IN BRAIN, SIGNAL =  14; EXPRESSED IN BONE MARROW, SIGNAL =  16; EXPRESSED IN LUNG, SIGNAL =  16; EXPRESSED IN ADULT LIVER, SIGNAL =  15
ttttcttcctcccttcctccctccctcctccctccctcccttcctcctttccttccttctttccctccctccctcctttcttccttccttcctcccatctttccttctttctccctcactccctcactctctcatcccttccttcctccctttcttcctttctttccttccttcctcccttcctacctttccttccttccttcctctcttcctccttttcttccttcctctcttccttccttccttcctcccttcctttcttccttctttcctcctttctcttcctcttcctctgtttttgtctgtcttcccaattaaaaggtaagttctataaaaggagaatttttctgagggaaagcttaaaaagcttaagcttataaagattaataggagttaattaaagagaaggagaagaatatctagacaaaggaacagctgagcattgtccctggtacatacagcagctcagtgaaaatacatgtggctgaaaccaggagaacaa

SEQ ID NO: 6873 - DNA, 598 bp, Homo sapiens
  MAP TO AC013698.3; EXPRESSED IN PLACENTA, SIGNAL = 1.2; EXPRESSED IN LUNG, SIGNAL = 2.4; EXPRESSED IN HEART, SIGNAL = 1.4; EXPRESSED IN FETAL LIVER, SIGNAL = 1.1; EXPRESSED IN BRAIN, SIGNAL = 1.3; EXPRESSED IN BONE MARROW, SIGNAL = 1.2; EXPRESSED IN ADULT LIVER, SIGNAL =   2
accacccattgtaccttcccatgcactattttgtgttgttattccaacaatacaaaatgcaaacatctgaaaaagtaccttttcagaatctacaaagtgtgtagcaattcctgctctgtacacatctcttccttttagtctgaatcctgttaatgcaaggaagtaaccaagttttccttggagtcgtggcaagaaataacctccacccacatcagggaacagtcctgtaattaaatgtaacaaaaagagataatggtgattcaaatgaaaaagataaatataacctttttgccgtagatcacacaaaccacttctctctggagcttgaatatacattacaaacattattaaactaagtactatacactgcaatcaatatcacaaaagacttgctataaactgtgctaacttgggtatttttcaaaaccttcatgtctcatttctatagaagtcagtaaagtatttgatgacacaatgttttgtatattagaagtactcaatgttacctaaattttcttaccactgatctacttttgaagaatctccaaaataggtaaaaatttcaaaaaaatttatttccaaatcagcacaggaaaaa

SEQ ID NO: 6874 - DNA, 571 bp, Homo sapiens
  MAP TO AC024196.2; EXPRESSED IN ADULT LIVER, SIGNAL = 2.3; EXPRESSED IN HELA, SIGNAL = 2.7; EXPRESSED IN HEART, SIGNAL =   2; EXPRESSED IN FETAL LIVER, SIGNAL = 1.4; EXPRESSED IN BONE MARROW, SIGNAL = 1.3; EXPRESSED IN LUNG, SIGNAL = 1.6; EXPRESSED IN PLACENTA, SIGNAL = 1.6; EXPRESSED IN BRAIN, SIGNAL = 1.4
tgatatttcaggccaggagggagagggcaggggccatgtgcccaggccgccctctttctccgtgccttcccctcctccctcccaggtgaaggttttctactttcagatgcagaggcatgagccagggtgaaccatgcctggagttaggggaaggacagactcacctctagggatggccaaagttggataaaccaggaggatctccaagcagttgccatcagtcaggacaaaacaaggggaggttgtccaagcaagatctcagaactgggctctgactcttaagtgctggatctgtttgcccctcagtgtgccgatctggagacggccatcgccgacgctgaacagcggggggactgcgccctgaaagatgcccgggccaagctggatgagctggagggcgccctgcaccaggccaaggaggagctggcacggatgctgcgtgagtaccaggagctcgtgagcctgaagctggccctggatatggagatcgccacctaccgcaagctgctggagagcgaggagtgcaggtgaggggccggatacccttgtgtcgggaccagttttctctctg

SEQ ID NO: 6875 - DNA, 505 bp, Homo sapiens
  MAP TO AL133260.7; EXPRESSED IN ADULT LIVER, SIGNAL =  15; EXPRESSED IN BRAIN, SIGNAL =  14; EXPRESSED IN LUNG, SIGNAL =  16; EXPRESSED IN PLACENTA, SIGNAL =  15; EXPRESSED IN HELA, SIGNAL =  22; EXPRESSED IN HEART, SIGNAL =  14; EXPRESSED IN FETAL LIVER, SIGNAL =  17; EXPRESSED IN BONE MARROW, SIGNAL =  17
tgtagcctcaaactcctgggctcaagcaatccttctgcctcagcctcccaagtagctaggactataggagcatgctaccatgcccagctaattttttaatttttggtaaagacagggccttgccatgttgcccaagctgagcttgtgcgatccccccaccttggcctcccaaattgctgggatcacaggcctaagccactgctcctggccccttacatacctttctaatctcgtctcccaccacgttaccagaaaccaaatattcttccattcatctgttaggatccacctaagactcttgtttataacttattgcatcatggacatccctacagaaggcagctttctgtatgggaaggttgtattttccaaagaaggtcttacctatagatgtatccccatctatgtgctcttcttagggtgtgattgatgttcatcccacaaagatgtgggttgatgttccttccctttaaaactgagtagaggcttgtgatcagcttggtca

SEQ ID NO: 6876 - DNA, 553 bp, Homo sapiens
  MAP TO AL135784.4; EXPRESSED IN LUNG, SIGNAL = 2.1; EXPRESSED IN FETAL LIVER, SIGNAL = 2.6; EXPRESSED IN BONE MARROW, SIGNAL = 2.3; EXPRESSED IN HEART, SIGNAL = 2.3; EXPRESSED IN ADULT LIVER, SIGNAL = 1.9; EXPRESSED IN PLACENTA, SIGNAL = 1.4; EXPRESSED IN BRAIN, SIGNAL = 1.6
tgaaccgattcgtcagaatgtaattttattgtcatgaactctcttagctggaaattgggaaacttcatgaattatatatcaaaacatatatacaaaatacactgtattcattgaaaagaaattgtactatttctactacccaccttcaagtcatatgcaatcacatttctgccacaacatgcataaatgtatccgactggaaatcatagaattgtcaaatatcagagcaggaagggaatgtagagataatttagcctaaccctctgattttacagaggatgaggtgaataaccagagagaggactttacaaaggtcactcaggtagttgagaacagaagtgagactaaaaccatgggcatgtttatgagtctctgtgtcaaaacaaacatgtattcaaccaaaaactcaagaactaccaaatgaggaagcaccaatcttttcaaagcaacaatgatctcattcatcatgtttgaatgtcccttttcctttctgaactgttttgctgcttgttgtcaattcccaggacacttcccttcccctgcttctgaacag

SEQ ID NO: 6877 - DNA, 531 bp, Homo sapiens
  MAP TO AL133405.9; EXPRESSED IN LUNG, SIGNAL = 4.3; EXPRESSED IN PLACENTA, SIGNAL = 3.1; EXPRESSED IN ADULT LIVER, SIGNAL = 3.8; EXPRESSED IN HELA, SIGNAL = 4.7; EXPRESSED IN FETAL LIVER, SIGNAL = 3.8; EXPRESSED IN BRAIN, SIGNAL =   3; EXPRESSED IN HEART, SIGNAL = 4.7; EXPRESSED IN BONE MARROW, SIGNAL = 4.1
tgaagaggctggtcatctcctcccccaagaatagggagctgctgtgaaggtcacctctgcgttcagctagctcttcctgtgtgtcgatggctgaatacaacagccacttctgcgtcaccagctggttacccatcacttgaaggaccagagacttcagaaggagccagttatgaaacaaggggaagagcatagttggaaataaaagctatgcatctgatttcatttctgtcaaaaaccacgttgaggacactgcaaaacccctcattgctttcggtgcctcagtgtccccatttgtgaaaatgatgttgacgatgcctatgactctggaaacagaaatggaatgcatgtcaactggccaccaagtcaaacagattttcgatgcaaatagaaacaaaaagctgggggaagtatgaagaggtttaagtataaaagaaaaacaagaatgaaaaagataatccttttaagaagttgatttttttttcttagtcattcccaaagtaagacggctagggtgatgctgccaatgcttaa

SEQ ID NO: 6878 - DNA, 558 bp, Homo sapiens
  MAP TO AL133324.7; EXPRESSED IN PLACENTA, SIGNAL = 1.5; EXPRESSED IN ADULT LIVER, SIGNAL = 1.2; EXPRESSED IN FETAL LIVER, SIGNAL = 1.1; EXPRESSED IN BONE MARROW, SIGNAL = 1.7; EXPRESSED IN LUNG, SIGNAL = 1.9; EXPRESSED IN HEART, SIGNAL =  19; EXPRESSED IN BRAIN, SIGNAL = 0.92
accagaccctggacacaaagctgccccggcagttcttcatcggggttctggacatcgctgggtttgagatctttgaggtgaggacaggccctcaccttggcctctgttctctccaaggtagaggacatgggcctgtgggggggcagaagccctggccttctgcctggaagttgggggtgaactcatgcccctccccgggcctccctttccccatctgcgagaggtctgctgagccaggcccctccctcttgtagttcaacagcttcgaacagctgtgcatcaacttcaccaatgagaaattgcagcagttcttcaaccagcacatgtttgtgctggagcaggaggagtacaagcgggagggcatcgactgggtcttcatcgacttcggccttgacctgcagccttgcatcgacctcatcgagaaggtgggtgccgcggcaaggtcactttgaggaagggagggtgtgtgtggtgagcaagcagggatggatgaccatggcttgcatggaagcctgcaagtgtgcatggaagcgtgtgactgtgcgttgcagtaagcat

SEQ ID NO: 6879 - DNA, 595 bp, Homo sapiens
  MAP TO AC011930.3; EXPRESSED IN PLACENTA, SIGNAL = 1.2; EXPRESSED IN HEART, SIGNAL = 1.3; EXPRESSED IN BRAIN, SIGNAL = 1.5; EXPRESSED IN BONE MARROW, SIGNAL = 1.6; EXPRESSED IN LUNG, SIGNAL = 1.5; EXPRESSED IN ADULT LIVER, SIGNAL = 1.9; EXPRESSED IN FETAL LIVER, SIGNAL = 1.3
cattggctccctgactgatagggggagggctactatggtgggaaaggcccaatggaagccatttgactccctacctaggaaaacagtaaataaaaaacaatatcgcatccctggagggattgtggagattagtgccaccatcaaggacttgaaacatgcaggggtggtgattcccaccacatacccattcaactcttccatttggcctgtgcagaagaaagacggatcttggagaatgacagtgaattatcgtaaggttaaccaagtggggactccaattgcagctgctgtgctggatgtggtttcattgcttgagcaaattaacacatctcgtggtacctggtatgcagccattgacttggcaaatgcctttttctccattcctgtccaccagaagcaatttgccctcagctggcaaggccagcaatatacctttactgtcctacctcaggggtatgccaactctctggctttgtgtcataatctcattcagagagacgttgatcactttttgcttccacaagatatcacattggtccattacattgatgacattatgctgactggatccagtgagcaagaagtagcaaacaca

SEQ ID NO: 6880 - DNA, 574 bp, Homo sapiens
  MAP TO AL109824.21; EXPRESSED IN LUNG, SIGNAL = 6.5; EXPRESSED IN PLACENTA, SIGNAL = 6.5; EXPRESSED IN ADULT LIVER, SIGNAL =   7; EXPRESSED IN HELA, SIGNAL = 9.8; EXPRESSED IN BRAIN, SIGNAL =  12; EXPRESSED IN HEART, SIGNAL = 8.1; EXPRESSED IN FETAL LIVER, SIGNAL =  12; EXPRESSED IN BONE MARROW, SIGNAL = 8.5
ctcagaactcagcccactccatacagaaagtagcacatttaatttcttctcgaaacatgcttttagaaaagtattttccctaggtaatttttcttgtatctttttactgctttaaaatgtcaattgtgcacccatcatgagtattctctaagtagggagcagcagtctttgtcagtcagataaagatttacatagaagagtagctgcttgtggcaacagctctacagtgcttgcttccttctttgttcctaatagcactccttctttcctcctaggatctgggagtgaaggactggtcgtacctcaatgcactgctcaccctggcagaaatgacggccttctgctcctggcacaaagctcttaagtctcagaatgaaagaaaaaaaaactttctagatacaaaaactacttctcagtaacttgcaaatgtcagtgtctttaaggaaaaccagcaataaactcttaaattacatttaatgtaaacaatgactgcttgccagagtagtcacttcaacaaactgagataaaaatctaaggatgttagggcaccaaggcacatacccaaacccctgtc

SEQ ID NO: 6881 - DNA, 539 bp, Homo sapiens
  MAP TO AC007923.2; EXPRESSED IN ADULT LIVER, SIGNAL = 3.1; EXPRESSED IN BRAIN, SIGNAL = 3.3; EXPRESSED IN LUNG, SIGNAL = 3.5; EXPRESSED IN PLACENTA, SIGNAL = 3.3; EXPRESSED IN HELA, SIGNAL = 3.8; EXPRESSED IN FETAL LIVER, SIGNAL = 3.2; EXPRESSED IN HEART, SIGNAL = 3.6; EXPRESSED IN BONE MARROW, SIGNAL = 3.4
cgttgttatcaaattggcccaaggcttccaagacgaagaagcatttaatcctggggctgcttctataaatgtaacaattatcccaagtcatgtaagtgtcttggagaagtaatagtaataatgatgatgatgatgatgatgatgatgatgatgatgatgatgatgataagagccaatattcattgagtgtgccggtctcacagtgttttacttgtttcaactcctttgatcctcctaactgcctggagaggcaagaattattatcgccctcattttaccaagattgaaagagaagcatcaagagatttagtaatttcccaaggtacacacaatagtaggcagaagagccaggatatgaagctacacagtttcagggtttgaagtcttacggaattcaagttcaaatccgggtctgccacttcacatacgcatgatctaaagaaaatgatttcatgtctttgagcttcagtttctccctaaagaaaaaaaaaagaaaaaaatctcagtttatcctaaaatgggggtggcaatacctactt

SEQ ID NO: 6882 - DNA, 564 bp, Homo sapiens
  MAP TO AL121747.19; EXPRESSED IN LUNG, SIGNAL =   4; EXPRESSED IN PLACENTA, SIGNAL = 3.9; EXPRESSED IN HEART, SIGNAL = 4.3; EXPRESSED IN FETAL LIVER, SIGNAL = 3.7; EXPRESSED IN ADULT LIVER, SIGNAL = 3.8; EXPRESSED IN BRAIN, SIGNAL = 3.6; EXPRESSED IN HELA, SIGNAL =   5; EXPRESSED IN BONE MARROW, SIGNAL = 3.9
gagtgacagccagaagggaggtcagagcctccagggatgtgtgagcacagcccttactgggaagcccccagcccccacctggatcccagaacttaaaatccctaggcctcggccctgtcccagcctcaccttcagcatctctgtcgtctgccgggcagccacatcgttctgagcccgcagggccaggtcctcctgatactccttgcagttcatctgctcatggatggcctgtagcgggtgagggactcaaggtaagaaggttcctcagggggttaagaagctgggagaggtgaggtgcagggcaggagtccacaaaggcacttaatgcctctaggtgtagtcactggcaggacctcactttgtaatgcataagccattttacagaagaggatattggcgccagggaggtgaagtcaaggtcatcacatatgctaacagcaaaatatacctcagcctcctgagtagctgggaccactgacatgtgctgccacacccagcttatttaagttctgatgggcacagaaatcccttatacccctagggtgagaccctgcatccctaaca

SEQ ID NO: 6883 - DNA, 550 bp, Homo sapiens
  MAP TO AL078646.29; EXPRESSED IN LUNG, SIGNAL = 1.5; EXPRESSED IN PLACENTA, SIGNAL = 1.5; EXPRESSED IN ADULT LIVER, SIGNAL = 1.4; EXPRESSED IN FETAL LIVER, SIGNAL = 1.3; EXPRESSED IN BRAIN, SIGNAL = 1.2; EXPRESSED IN HEART, SIGNAL = 1.2; EXPRESSED IN BONE MARROW, SIGNAL = 1.2
acgttggtccactccttgtccaggctgctttgggctgtagtggacctgcttctggtgttccttgaggttctgctttcttgtgagggttcttttttctctctgcttcttattaatctgtagctgcttatgttttttggcttggctaaaaataagcacttttccttcttcctcctgggttaggagtgaaaaagacagtctttgtatttctgctgtttggagttggatgtgagaaattgataagctaaaagactgtagttatttttcccctcccttttcatgtatctcgttagggagccctggaggaggaagctttgggaggagtcccgcgccttctctcccgcaccaggtctgagaacttgttcgcagctattcatgtcttatgtgtgcctggtcacccctcttcctctttcagttttgtttttttgttaatagctaaatcacatttctggttatttccttaatatggacagtattttcatttcctctggaggtgttgatcggaggccactgcctgcctcccttcctgacccggttggagtgaagcaggtgt

SEQ ID NO: 6884 - DNA, 517 bp, Homo sapiens
  MAP TO AL121829.12; EXPRESSED IN HELA, SIGNAL = 7.6; EXPRESSED IN HEART, SIGNAL = 7.8; EXPRESSED IN BONE MARROW, SIGNAL =   7; EXPRESSED IN LUNG, SIGNAL = 7.8; EXPRESSED IN PLACENTA, SIGNAL =   7; EXPRESSED IN ADULT LIVER, SIGNAL = 7.9; EXPRESSED IN FETAL LIVER, SIGNAL = 6.1; EXPRESSED IN BRAIN, SIGNAL = 6.6
agctcctcacctgacagcagacccggccaccctcggtgccctgagctgggcctgataaagccaaagcccaaagctggtcggctacagggagtgcagaatcagaggactggagcacatccagggggtgaccgcctgcccggtgtagacttgggccgggcgtcaggtgaggtgggggcaggccaggctcgggcttacctgttggtgtgtgtgcagatgagcaccttggtttcaggcctccggatgacctccagggaggccatggccagcgtgtaggtcttgccggtgccaaaggggccatagatgagtagcggggggacacgcctcccatccccagggccccagcccgcgatgagcgccacggccagctcctgcttgcggttgccacgccgcaagggtgggacagaccaaggtctgggcagggcgcaggtgggcaagtcgggcaccaccagctgctcctcaggcagtgtgtccactgcctggtgccagaggcggaaggtcatcgggtcaatctggaact

SEQ ID NO: 6885 - DNA, 515 bp, Homo sapiens
  MAP TO AC011930.3; EXPRESSED IN ADULT LIVER, SIGNAL = 5.7; EXPRESSED IN HEART, SIGNAL = 3.7; EXPRESSED IN BRAIN, SIGNAL = 4.1; EXPRESSED IN BONE MARROW, SIGNAL = 4.9; EXPRESSED IN LUNG, SIGNAL = 4.4; EXPRESSED IN PLACENTA, SIGNAL = 5.7; EXPRESSED IN HELA, SIGNAL =   3; EXPRESSED IN FETAL LIVER, SIGNAL = 4.3
tgtgaacaccactcagcctctttctccagccacccctgtcattgcccaataggcccatgaacaaagtggccatggtgtcagggatggagattacacatgggatcagcaacatggacttccactcaccaagggtgacctggctatggccacttctgagtgcccagtttgccagcagcagagaccaacaccaaggccttgatatggcacaattccttggggtgatcggccagctacttggtggcagattgattatattggacctcttccatcatggaaaagccagaggttggtcctcactggaatagacacttactccacatatgggtttgtctatcttgcacacaatgcttctgtcaagactaccatccatgtactcacagaatgctttatccactgtcatcgtattccacacagcattgtctcttgaccaaggtactcactttacggctaaagaagtgcagcatggactcatgctcatggaattcactggtcttaccatgttccccataatcctg

SEQ ID NO: 6886 - DNA, 537 bp, Homo sapiens
  MAP TO AL121890.13; EXPRESSED IN ADULT LIVER, SIGNAL = 5.2; EXPRESSED IN PLACENTA, SIGNAL =   5; EXPRESSED IN HEART, SIGNAL = 4.1; EXPRESSED IN FETAL LIVER, SIGNAL = 3.8; EXPRESSED IN BRAIN, SIGNAL = 4.4; EXPRESSED IN BONE MARROW, SIGNAL = 4.2; EXPRESSED IN LUNG, SIGNAL = 4.5; EXPRESSED IN HELA, SIGNAL = 3.4
gaagggaagggaagttccagggtcaagaccccctgagcttttaagtctatcccctccccatcgttattccatgaactgtggaatcttcagtgtctccctctccctctctaggcatttaccatttttctctatcctgaaaaaccttccatagtcccagtctgcccagccgtcctgcctgccttcctctgcccaacctcccctgccatcacccctcaggcactgtccctccctgttttatcagatgtcatctgtgaccttctaattgccaaaaccaattacaggtttacagtccttttcttctttgatggctctgtaacagtccactgacttctcactcgaaattctattcttgtgataataccactgtttcttgctaactatccatacaccccccttccctctcagtgatgtgagtttctcagactccagtctagaaatgttagtttcccctcatatctcctttctcccctgccctctccttctctaaccccctctgaaggtcagccatctcctcgtggttcccaaacctctctccct

SEQ ID NO: 6887 - DNA, 537 bp, Homo sapiens
  MAP TO AC022995.2; EXPRESSED IN PLACENTA, SIGNAL = 1.5; EXPRESSED IN LUNG, SIGNAL = 1.5; EXPRESSED IN HEART, SIGNAL = 1.4; EXPRESSED IN FETAL LIVER, SIGNAL = 1.5; EXPRESSED IN BRAIN, SIGNAL = 1.5; EXPRESSED IN BONE MARROW, SIGNAL = 1.4; EXPRESSED IN ADULT LIVER, SIGNAL = 1.7
tcatgcaaacagaatggaggagaaaagctatatgttcatttcaattgatgctgaaaaagcattttgataacattcaatagcctttcatgattaaaaaaaaccataaaaaatctgggtataaagaaacatacctcaacataataaaagccatatacaacagatacacggctagtatcatactgaatgggggaaaaagtaaaggacttttctctaagatctgaaacacaacaagattgccaactttcaccactgttatccaacatagtactggaagtcctagctagagcaatcagtcaagagaaagaaataaaaggcattcaaattggaaagtcagactatctttgtttccagatgatatgctcttatatttggaaaaacctaaagaattcatcaaataactattagaactgataaacaaattcagtaaagttgcaggatacaaaatcaacatacaaaaattgatagcatttatatatgtcaatagtgaacaatctgaaaaagaaataaaagtgtaattccattcacaatagccacaaa

SEQ ID NO: 6888 - DNA, 504 bp, Homo sapiens
  MAP TO AC026443.1; EXPRESSED IN ADULT LIVER, SIGNAL = 1.3; EXPRESSED IN HELA, SIGNAL =   3; EXPRESSED IN HEART, SIGNAL = 1.3; EXPRESSED IN FETAL LIVER, SIGNAL = 1.4; EXPRESSED IN BRAIN, SIGNAL = 1.4; EXPRESSED IN BONE MARROW, SIGNAL = 1.4; EXPRESSED IN LUNG, SIGNAL = 1.2; EXPRESSED IN PLACENTA, SIGNAL = 1.1
cctacctgcagcctgagttcagagagaatgaatgaactaagctattcggaaggtctattttaataggaaaatgttttttagttggaacgttttggaaataagataacgcaatgtcttctatagttactcatttacactgaaacgtgatgggtaacttttagggcgtttgcttccagtcactttcccctgactccttgatgtgataattccttccataagatacaaccattctcccaagtgatgcgatgacgagtatgtgcgtgactctggagggaaagggtctacatctgtctctgcttgtgcctcggatgggttttacagtagacgtaccaccgaccccgcctcttcaccaggtaacagtccttgcagcgcttcttaaggacagtcttgtttttgaaccccagcgcaggcagcagatggggcaggaggccgggtgagagaagtgagcgcactgctgccccgggttccacagccacgggggctgcacctcgaatggatccaaat

SEQ ID NO: 6889 - DNA, 573 bp, Homo sapiens
  MAP TO AL117333.23; EXPRESSED IN PLACENTA, SIGNAL = 3.7; EXPRESSED IN HEART, SIGNAL = 2.9; EXPRESSED IN FETAL LIVER, SIGNAL =   3; EXPRESSED IN BRAIN, SIGNAL = 3.4; EXPRESSED IN LUNG, SIGNAL = 3.5; EXPRESSED IN ADULT LIVER, SIGNAL = 3.7; EXPRESSED IN BONE MARROW, SIGNAL = 4.1
caaccaatcagcaggatgtgggtggggccaaataagagaataaaagcaggctgccacgccagcagtggcaacccgctcaggtccccttccacactgtggaagctttgttctttcgctctttgcaataaatcttgctgctgctctctctttgggtccacactgcctttataagctgtaacactcaccgcgaaggtctgcagctccactcctgaagccagcgagaccacgaacccaccaggaggaacaaacaactccacacgcaccgccttaagagctgtaacactcaccgcgaaagtctgcagcttcactcctgagccagtgagaccacgaacccaccagaaggaaaaaactctgaacacatgcgaacatcagaaggaacaaactctggacacactgcctttaagaactgtaacactcaccgcgagggtctgtggcttcattcttgaagtcagtgagaccaagaacccaccaattcaggacacagtgtctttctcgtggaaagtaaatttaattttctaggctccctttcactgaagccttatcgtgaagaatcctggctttatgcaggtgtga

SEQ ID NO: 6890 - DNA, 526 bp, Homo sapiens
  MAP TO AL139389.3; EXPRESSED IN LUNG, SIGNAL = 1.2; EXPRESSED IN ADULT LIVER, SIGNAL = 1.7; EXPRESSED IN HEART, SIGNAL = 1.4; EXPRESSED IN FETAL LIVER, SIGNAL = 1.2; EXPRESSED IN BRAIN, SIGNAL = 2.3; EXPRESSED IN BONE MARROW, SIGNAL = 1.2; EXPRESSED IN PLACENTA, SIGNAL = 1.5; EXPRESSED IN HELA, SIGNAL = 2.2
ctcagagaatcctggttccgaattccctccagttgccttccagctgacggatgcttactgagaaacttaacatgaaattttggtctctaccacccatctgttttatgaaaataattatttccacagggtattttagatgtcaactctggatgctatctctggagaaaagtggataataaatttaaaatataccaatgatgaatgggccattgtgggcgatgtgccaagtggagacgtagaatgcacagtaagcaacacaaataccttagggagggcagctgcagtcttaaagatgctgaagtgcctaccatggcccatgacaatgtcaccaataaaatcaaacatgagccggcagcttaggggagttaacgtatgggggcaaagcaactcactcacatcctctaccatcaaaattgtccctcagacaaaaggaacatctaaggcaactttatcagttgaatccaaaacacagcaagagtcattgctactcttatgagtagcagagacaaggaaggaggtttccaaa

SEQ ID NO: 6891 - DNA, 511 bp, Homo sapiens
  MAP TO AC011929.3; EXPRESSED IN LUNG, SIGNAL = 2.5; EXPRESSED IN ADULT LIVER, SIGNAL = 2.2; EXPRESSED IN HEART, SIGNAL = 2.3; EXPRESSED IN FETAL LIVER, SIGNAL = 1.8; EXPRESSED IN BONE MARROW, SIGNAL = 2.3; EXPRESSED IN PLACENTA, SIGNAL = 2.2; EXPRESSED IN HELA, SIGNAL = 2.5; EXPRESSED IN BRAIN, SIGNAL =   2
tgttttccaaaaggctgaggttaagagaggtaggattcaatgaagatctaggatcttttaatctgaaaatattttatttctatacagtgactgagacaaagatattaacaatttatattaaactaaaacatggcaacatcatcttcctgtctctcttcccactgtactattgctttactcaattgttgctttattctcctttctaacatttgcgtgtcataggacctgttagagaccttgataagacataaaaataaccatcttgctggtgagaaccatgtctcaaagcctaatgccaacaaagtgatggtgaggaaaggtgacattggaaaatgccatgataaataattttgagtctctggacagactgattattgaatttctttcttaaaaatagctgaccctcctaatcaccctcacttaaaggaatgactcaaggctggtttggtgaggctatttgctcctgttgattttagggcaattgtgtagctctaacagcccctgagcagtc

SEQ ID NO: 6892 - DNA, 533 bp, Homo sapiens
  MAP TO AL109614.27; EXPRESSED IN LUNG, SIGNAL = 6.5; EXPRESSED IN PLACENTA, SIGNAL = 3.4; EXPRESSED IN HELA, SIGNAL =  15; EXPRESSED IN HEART, SIGNAL = 3.8; EXPRESSED IN FETAL LIVER, SIGNAL =  16; EXPRESSED IN ADULT LIVER, SIGNAL = 6.9; EXPRESSED IN BRAIN, SIGNAL =  17; EXPRESSED IN BONE MARROW, SIGNAL =  13
atgctggttttccaaagtggctgtaccaatttgctctgccgtcagcactgcaagaatttgttgctccacagcctctcaacattcagctctctttttctttttttgttagtttttatttcataatcataaactctgcaatccacctgggcatggaagggaacaaggaaaacatgaaacccaaagggaactgcagcgagagcacaaagattctaggatactgggagcaaatggggtggaagggtgctctcctgagctacagaaggaatggtctggtggtgaagataaaacacaagtcaaacttattggagttgtctacagtcagcaatggtgatcttcttgctggtcttgccattcctggacccaaagcgctccatggcctccacgatcttcatgccttctttcttctttcaccttgccaaagactacatgcttgccatccaaccactcagtcttggcagtgcagatgacaaactgggaaccgtttgtgttgggtccagcatttaccacggacaagatgccaggacctgtatgct

SEQ ID NO: 6893 - DNA, 522 bp, Homo sapiens
  MAP TO AL136171.3; EXPRESSED IN HEART, SIGNAL = 9.7; EXPRESSED IN FETAL LIVER, SIGNAL =   9; EXPRESSED IN LUNG, SIGNAL =  11; EXPRESSED IN HELA, SIGNAL =   5; EXPRESSED IN PLACENTA, SIGNAL =  11; EXPRESSED IN ADULT LIVER, SIGNAL =  11; EXPRESSED IN BRAIN, SIGNAL =  10; EXPRESSED IN BONE MARROW, SIGNAL =  11
gagcaccagaccctctgaacaagcaacctgtgcaaagactgcaaggccgcagggggttgctggcttcaagggatggagaaaagaccagtgaggtcagcagagatggggagctgagaggggtagccctgggttcaagacacaggcaggaaccagactaagcaggttcttgaagcaagtgaaggactttcatctttatataaagggcaatggaaagttgtcaatgtcattgtcattttttttaaatgccttttttactggagtgtaatatgcatgcaagaaagcacccataggggtgagctgggtgaatttcattgtgaacacatcaagcaaccagtaccaaatcaacaagcagaacattattaaccccccaaaagtcacccttagcccttccaagtcctcagcatgttccaaaggcaaccctatcctgactggtaacaacactaggttaattttgaccatttagaaactttatataaagggagtcataccatatttattctctgtgcctggcttctttcactc

SEQ ID NO: 6894 - DNA, 550 bp, Homo sapiens
  MAP TO AL080312.14; EXPRESSED IN ADULT LIVER, SIGNAL = 1.2; EXPRESSED IN BRAIN, SIGNAL = 1.4; EXPRESSED IN PLACENTA, SIGNAL = 1.6; EXPRESSED IN LUNG, SIGNAL = 1.4; EXPRESSED IN HEART, SIGNAL = 1.8; EXPRESSED IN FETAL LIVER, SIGNAL = 1.4; EXPRESSED IN BONE MARROW, SIGNAL = 1.5
tatcccacctccacacttccctcctgccgcactacacccacctgcactaggccctcatgctgtgctcctcctccacttggcctgtgcctctgctgttccctccaactggaactgtccctttttcacctggctaaatccaatgcactcagatctcagcccacagaacaaattctcattcggccatgtgcctgtccctagtacgatctgtcatttgtctgtgtgacattaatgtctgcactctgatggtctctacactgatggccaggcccccaggaacaaggatcagggaactccagggttcctccctccccatgcccacctcctcaccatcattgatcctcccagccaaggactctgcactgaagccagcaaagatgactgtgtggacagctccgatcctggcacaggccagcattgctgccacagccaatggggacacgggcatgtagatggcaacacggtccccacggtggactccatgcctcttcagcgtgttggccaggcggcacgtggtctccagtagttccctgcagcacagggaagagaaagc

SEQ ID NO: 6895 - DNA, 578 bp, Homo sapiens
  MAP TO AL133412.4; EXPRESSED IN PLACENTA, SIGNAL =  14; EXPRESSED IN HELA, SIGNAL =  20; EXPRESSED IN HEART, SIGNAL =  12; EXPRESSED IN FETAL LIVER, SIGNAL =  12; EXPRESSED IN BONE MARROW, SIGNAL =  13; EXPRESSED IN LUNG, SIGNAL =  12; EXPRESSED IN ADULT LIVER, SIGNAL =  16; EXPRESSED IN BRAIN, SIGNAL =  12
atctacgaagctgggtgtggctgtgcttattcacttgtccagcctcatccagcaccacctgccctttgtccctatatgtaggtccctcctctgtatgttccttgaacatacaaagttctttccatcctggggggccttcatacatattctttctttcttctaaaacccacttcctcccattaatcatctggtccacaatttccgacatttcaggcttcaacttaaaagccacatcctcaaaaagacccttttggatatacatcagtcagggcctcggcaggaaacaggtgtcatattccaaacggggtaaaatgttcacaaagaagccatatacaaagttatggacagggtttagggacaccaacaagagatagtgtggtaccctatggctaccatcagctggggaggccggaagcaggagggaagggaatgtaccagaacctggagagtgtaagtgtaagggccaccttaaagaattgagaattgatggccttcagtggagagtttcaatcaaatagagatatgacgtggagagagccaggaaagtaaataacccagcctcattcttcacccaccat

SEQ ID NO: 6896 - DNA, 501 bp, Homo sapiens
  MAP TO AC007325.51; EXPRESSED IN ADULT LIVER, SIGNAL = 4.6; EXPRESSED IN FETAL LIVER, SIGNAL = 5.3; EXPRESSED IN LUNG, SIGNAL = 4.5; EXPRESSED IN BONE MARROW, SIGNAL = 5.2; EXPRESSED IN BRAIN, SIGNAL =   5; EXPRESSED IN HEART, SIGNAL = 5.4; EXPRESSED IN HELA, SIGNAL = 6.7; EXPRESSED IN PLACENTA, SIGNAL = 4.6
tgagttcccaaaaccacctccgaccactgcccaccatgccccgtgtgaccccacggtgcccaccccctcacaagccacaggagtggggaaggggaaggctgccccacctgcagcaccgccacctccagcttggtgtccatggcagccaggcccgcctgcccttgctccacagccatttggtgaaagaagcacctccacttggccagcacctctgagaactgcagctgcaaacgcaggcctgaatgccatctgcacacgcccctgcccaccccagtcccccacacagcccctgtggccagctcaggcctctaaggcatgggcacctgtgtttttggtggatgcccacagctgccctgagatctcgcacagcaccagactctgcaggtggaaggttctagcacttaccagaaactggggtctccccagtgctgtgagcttaatggctatgaagccgtcatcgctgactctacctgtcagaagccacaggaaaagccatgacag

SEQ ID NO: 6897 - DNA, 546 bp, Homo sapiens
  MAP TO AL157756.2; EXPRESSED IN ADULT LIVER, SIGNAL =   3; EXPRESSED IN HELA, SIGNAL = 4.3; EXPRESSED IN BRAIN, SIGNAL = 3.5; EXPRESSED IN LUNG, SIGNAL = 3.1; EXPRESSED IN PLACENTA, SIGNAL = 2.9; EXPRESSED IN BONE MARROW, SIGNAL = 3.9; EXPRESSED IN HEART, SIGNAL = 3.1; EXPRESSED IN FETAL LIVER, SIGNAL =   4
gagcttcaagtcatcctgccgctggtacaaacacggcagaggcctctttgtaaagaagtggtaggtagaattcaggttagcaccagaatctgaaaactccagctcctttgactgggaccaggctggtaatataaatgttagatcaggctgggtctgacacaatggggatcagtagagcatacttgtcacatttgaaggcattcagaaaaataataaccttaaaacattctaaacatgttgcaatcaaagaggataccccttgaccactgcacgaattggagttcaaagatcatctctcttttgcctaggctgtagactagttatttaacctctctcagacttggtttcctcttctggaacagggtatatcaactaccttgcagaaataaatgacatcctgtacacaatgcacctaccacgttgcctgacccaataatgtgtacatacataagaaaatgttcatgccctttgctcactttaaaatttttttttcttgtatatttgtttaagttcttcgtagactctggaatggagctggaagctgtc

SEQ ID NO: 6898 - DNA, 590 bp, Homo sapiens
  MAP TO AL136528.9; EXPRESSED IN PLACENTA, SIGNAL = 1.9; EXPRESSED IN ADULT LIVER, SIGNAL =   2; EXPRESSED IN FETAL LIVER, SIGNAL = 2.8; EXPRESSED IN BRAIN, SIGNAL = 2.3; EXPRESSED IN BONE MARROW, SIGNAL = 2.5; EXPRESSED IN LUNG, SIGNAL =   2; EXPRESSED IN HELA, SIGNAL = 2.7; EXPRESSED IN HEART, SIGNAL = 2.4
ttctcctgtgggacaaccagggaccgcagctccccgctccccaggtgtgggggctccgacacgaacgcctctgctcgcagggcggtgagcgcagatcccacgggtccctcggtcgggggtcgaggctgcttccgtttccatcccggacccgacaatgggcgggaaaaagaaggctttacacgactacgcggcggagttcaccgacctggtggtgaagcacctgattgagcacagtgactctggggacacgtctgtggtggagaccctttactgcagggcctgcgagctgcccgtgcgcgtgcggagggaccgcatcctggaacacctgtcctcgggcaggcagcacggcctgcggacgcccattctcatgtaaatgtcagtgccaacgctggtgtttcaggagtcatcccagcgggctgcgggctattttaggattctctgccctgcaaacgtttccaaagtacgtggacaggccgcctgatgacactacgtttacgggatctgctagtggcttgcctacttagggagtaaaccctgtgaagtctcgcagttttgttaaagtgtgcgtggccacctgaatgctgccttat

SEQ ID NO: 6899 - DNA, 564 bp, Homo sapiens
  MAP TO AL133284.7; EXPRESSED IN PLACENTA, SIGNAL = 2.1; EXPRESSED IN HELA, SIGNAL = 3.3; EXPRESSED IN HEART, SIGNAL =   2; EXPRESSED IN LUNG, SIGNAL = 1.8; EXPRESSED IN ADULT LIVER, SIGNAL = 2.1; EXPRESSED IN FETAL LIVER, SIGNAL = 1.9; EXPRESSED IN BRAIN, SIGNAL = 1.8; EXPRESSED IN BONE MARROW, SIGNAL =   2
ctaagggaagggaagttggcttgggagcagaagaaactgataatttctcatcccctatggggtggaatatcttctcagatggtagctgtagatcttgatgcaatgatcccaacagtccaagaccagcagctgccccttaggagttagggctatgcccaccggacaggtaagtccctctcgaataaggacactatagcccccacccttaggaaaatggagaatttccttgcgactactgtcagccacgatgagatcaccacgagcatccacacacatgccagcaatgcagcggaaatcctcattctccgagaagaagtggctaatctggcgacccagctgcccatcagggcctacagagccaatggaaaagccaccctccaggtggtgctcattctgccgattctccagattgaggcctaagccctgggtgaagtagacggtgccctcagcatcacaggtgacaaatttgggccgcacagcactacataggcagctgtatttgaccacccctgatcctcgatcaactgtgaaacaccaaagctttccaccttccacatcggttac

SEQ ID NO: 6900 - DNA, 516 bp, Homo sapiens
  MAP TO AC015473.3; EXPRESSED IN PLACENTA, SIGNAL = 1.7; EXPRESSED IN ADULT LIVER, SIGNAL = 2.4; EXPRESSED IN HEART, SIGNAL =   2; EXPRESSED IN FETAL LIVER, SIGNAL = 1.9; EXPRESSED IN BRAIN, SIGNAL = 2.1; EXPRESSED IN LUNG, SIGNAL = 2.3; EXPRESSED IN BONE MARROW, SIGNAL = 1.9
aaacccactcgtttgacctgctttatgatactggagctgggtcctgccaacatttctcctgtgtcagatggcatacttaagctttatccgtgaaggttataaagacactgcaggaggaagcagcttctcttctctgtcccagtgtgctttttccttcctgcttctgtggcatgtggctactagcaagcagcatttgggacacccagtgaagcacctcttccagtaggagttggaacaaccagtggcacttactttgccgggattttcaccaacaatcctacaggtggtttcccagaaagtttcaccagcaccacaaagggtggtttcctagtgagtttcagcagcgccttaggaggagcttccccaggagtctgacacataccccagaagacagtttcccacttgccagccccagcacacagcatctcagcaaactctaggccattccagggtcacactatatcaaacactatatcatctgcagttgagatctgagcctcagccatgtaaggagga

SEQ ID NO: 6901 - DNA, 565 bp, Homo sapiens
  MAP TO AL162261.1; EXPRESSED IN LUNG, SIGNAL = 1.8; EXPRESSED IN PLACENTA, SIGNAL = 3.1; EXPRESSED IN ADULT LIVER, SIGNAL = 2.2; EXPRESSED IN BRAIN, SIGNAL = 1.8; EXPRESSED IN BONE MARROW, SIGNAL = 1.6; EXPRESSED IN HEART, SIGNAL = 3.5; EXPRESSED IN FETAL LIVER, SIGNAL = 1.4
ggcagccattggttttattgccccatgccaatgcctagtgtgttatctgaaaaattaagtacccaagaaatattcatgttgtaaaaggctttctaaaggctgaatgtaggcagaatattattcctgttgtttgtggtacaaagagacctttctcttggtacctcttgattcacatgggagaacgttttaaagtaaacactgtcatctcgagcccttctccagtggtttttcattccatctaagcctacattgacttggtgggcatccactgtgaaggtagccccaaggtcaaggctctggggtctggggcaaggcctcacagtcacattcccctcctcttggtgttggtgcttcccaggagaaccaaccagttctgtgtttattctgtcgatggtgctggtcagatgcacaaggagctctggagtaagtttactattcccttctttgctactcagcacaagttgttcttgaggaggttgatgatattgtgggcattcttcagttttccctggagctttctgaactcagcctgaagactactctcactcagaccctctttggcaac

SEQ ID NO: 6902 - DNA, 526 bp, Homo sapiens
  MAP TO AL118502.29; EXPRESSED IN LUNG, SIGNAL = 3.7; EXPRESSED IN PLACENTA, SIGNAL = 2.8; EXPRESSED IN ADULT LIVER, SIGNAL = 2.4; EXPRESSED IN FETAL LIVER, SIGNAL = 3.4; EXPRESSED IN BRAIN, SIGNAL = 3.1; EXPRESSED IN BONE MARROW, SIGNAL = 3.4; EXPRESSED IN HEART, SIGNAL = 2.7
tggctagaaaaatggttcggtaaatggaaaggaataatagcctcaattcttacctccctcgtagctgtaataggtgtacttattcttgtcgggtgctgtgtcataccatgcatccgtgggttggtgcagaggctcgtagaaacggcacttgctaaaacctcccttaactatcctccaccttatccagagaagcttcttcttttggaaaatcaagcagaacaactaagtcaagacatgttaaataagtttgaagagaaagccgtaagaaaaatgcaagaggaggaagttgttaaatatgaattctaaatttctcttcaaagaattagtatgtctgtatgttcaattctttgccttctacttttaaacttaatttcctcataaagcaacctttttcgattacctgctccaccctgactcactccgattacctgctccaccctgactcactccgattacctgctccaccctgactcactccgattacctgctccaccctgactcattccgattacctgctccaccctga

SEQ ID NO: 6903 - DNA, 526 bp, Homo sapiens
  MAP TO AC011272.3; EXPRESSED IN LUNG, SIGNAL = 4.9; EXPRESSED IN ADULT LIVER, SIGNAL = 6.9; EXPRESSED IN HEART, SIGNAL = 4.1; EXPRESSED IN BRAIN, SIGNAL = 4.3; EXPRESSED IN PLACENTA, SIGNAL = 3.1; EXPRESSED IN HELA, SIGNAL = 7.2; EXPRESSED IN FETAL LIVER, SIGNAL =  14; EXPRESSED IN BONE MARROW, SIGNAL =  12
acgttctgcttttacagggcaaagatactaactcttgcttctttttctttttctttttttctccaggtttattgaaaatgttacaacatttcagaaagattcaaacagctccatgtggtggatagtccaatctgcaggtcactcagcctacagttgggatgaatttcccaaagtccaaaccttcagcatttctccagtatcaagatctacttcagtgatctcctgatccaagcctgagacctcaggagcataattatctctcctttctctcttcttctcctgcaacctgatggaaatacctcttactgggcccctgtgaatctgcttcttcagatgcgtgactcagcctgctatcttgttgcagagcttcttgctggggataatgacagtcttcacccacttgcttgttcatgtggaaatcattaccggggtgcatgtaatacttttctatgatgacccaggctaccttcttcactgttttggtgtgaaggctgcccatcttggcaggtccttggtaaaagaggcc

SEQ ID NO: 6904 - DNA, 566 bp, Homo sapiens
  MAP TO AC021557.3; EXPRESSED IN PLACENTA, SIGNAL = 3.8; EXPRESSED IN FETAL LIVER, SIGNAL = 4.2; EXPRESSED IN LUNG, SIGNAL = 4.5; EXPRESSED IN BONE MARROW, SIGNAL =   4; EXPRESSED IN BRAIN, SIGNAL = 3.3; EXPRESSED IN HEART, SIGNAL = 3.9; EXPRESSED IN HELA, SIGNAL = 3.9; EXPRESSED IN ADULT LIVER, SIGNAL = 4.3
ctgaagcttgcacaacatgggggccgtgttttaatgagaacaatagtacaaaattaaaaatgcaaaactaggtacaggcattggaaggggccagtatttagtgaggatcagcttcattacgcttcatggtagatctgtctctgctgattacatatgtgaaaactgagaatgggtatttgaaagcttcatttggaccaggcttattcaatttgtgttggtagatattcatggctgggaggacagcactggttctatttttagaaattttaacaagtgctactttcccagcactgatggtacaaatcacagagctgggggcgaggttgcaaaatctggatgactcagtttccaaaattacagtttttctacttatattgatagtacttacaccagaaggtgctagctctttgatcaaatactgaattgtgaggaaatcagattcaagtgtcatgttaaagttaaagtcatgaagggaagagaaaccagagctgactcgactggtaagaaatcttaataaaaatggggacatttgtaacaataattaaggcagggaaatgctgattagc

SEQ ID NO: 6905 - DNA, 576 bp, Homo sapiens
  MAP TO AC013627.3; EXPRESSED IN LUNG, SIGNAL = 5.1; EXPRESSED IN ADULT LIVER, SIGNAL = 5.2; EXPRESSED IN HEART, SIGNAL = 4.6; EXPRESSED IN BRAIN, SIGNAL = 4.6; EXPRESSED IN BONE MARROW, SIGNAL = 4.5; EXPRESSED IN PLACENTA, SIGNAL = 4.9; EXPRESSED IN HELA, SIGNAL = 3.7; EXPRESSED IN FETAL LIVER, SIGNAL =   5
aggacagtcacactccaccccacatttagaaggatagatttttctctcttggaggagaccctcctttgctttctgtgaccacaccctttgtgtcctatcaaatcacctgagatactatggtgttgaatctgtcttggtctaaccttctgtcgttctatcctacctggctcatcagaaagctgcaggattctgaagagaagggagtcctgcaggacttgccagagaaatgtgttttgtctcattctagacaccatgacaagtccaactcttaccggcatcgtgaagtctctttcttggcattggatgaacagaaagtttgctccgctcaggatgttgccagggattactccaatcccaaatgggatgaaacctcacttggcttcctcggtaggctccctattgtttgtaccccagatttgtccatagtgacggatgtcataccttcaggaagactctatgcttatatactggttagaaccaggctctaggattgagtttgaaggaaggcatcctataagtcagagttgtgctccattctagtccaaaaccacacattgtctttcatcattgccccat

SEQ ID NO: 6906 - DNA, 568 bp, Homo sapiens
  MAP TO AL161788.2; EXPRESSED IN LUNG, SIGNAL = 2.9; EXPRESSED IN PLACENTA, SIGNAL = 2.9; EXPRESSED IN HEART, SIGNAL =   3; EXPRESSED IN FETAL LIVER, SIGNAL = 2.6; EXPRESSED IN BONE MARROW, SIGNAL = 2.9; EXPRESSED IN ADULT LIVER, SIGNAL =   3; EXPRESSED IN BRAIN, SIGNAL = 2.9
tgacacaaacacacacgttagcctaagcctacaaagggtcaggatcatcagtatcactgtcttccacgtccacatcttgtcccactagaagctcttcaggtgcaaaaccatgcatggagctctcaccttctattataataatgccttctgctggaatgtctcctgaaggacctgcctgacgttgttttacagtcaactttttaaaaaaataaacagatggaatacagtccaaaatcacaataaaaagtatagtatggtaaagacgtaagccagaaacatagtcatttaccaacgttatcaagtattgtctactgtgtataactatatgcactatatttttatatgactggaagcacagtacatgtttttacactagcatcaccacaaacacatgagtatatgactgcaatgactatgacattattaggcaataggaatttttcagcgccgttataaatcttatgggaccaccatcttttatatgtggtccatcattgaccagaacatcattatgtggcacatgactgtaacccgcattttaagacattgccaagtgtctttcccaaaa

SEQ ID NO: 6907 - DNA, 544 bp, Homo sapiens
  MAP TO AC007989.2; EXPRESSED IN PLACENTA, SIGNAL = 2.1; EXPRESSED IN ADULT LIVER, SIGNAL =   2; EXPRESSED IN FETAL LIVER, SIGNAL = 1.7; EXPRESSED IN BRAIN, SIGNAL = 2.1; EXPRESSED IN BONE MARROW, SIGNAL = 2.1; EXPRESSED IN LUNG, SIGNAL = 2.1; EXPRESSED IN HEART, SIGNAL = 1.9
gttctgaagtgacttggggctcctctgccccatcccattctacattttattcattttatccatcatgttggggtttcacatatgtttttacttgcagaaagggctctgaaaaacaagttgcaaatcattaggccagatggtgtaaggtctgtcttcaacaaaagttttgattctctgagtgaaagacatgctcttgacaatggacagtgggatgaagtggtctcagaggaggtggccatataccagggggagcttcttggaagaagtgagttggaaagttaaaatctgggtgtttctagcagttggtgaacctggaagagaagttgtaattcccaaagagaggtgagtgtggaacatagatatagaaccaaaactatgcagggcgaaaaagtttcaaagacccaaatccctgcagtaagggaaagagagcgagtagacaagggcttcaagataattgtctcaagttgaagtttgactaaagtttgaagcaatgaacaaggtgagaaaagatgattggctctattgaggaaagcagcacctcatc

SEQ ID NO: 6908 - DNA, 510 bp, Homo sapiens
  MAP TO AC008750.4; EXPRESSED IN PLACENTA, SIGNAL =   5; EXPRESSED IN ADULT LIVER, SIGNAL =   4; EXPRESSED IN HELA, SIGNAL = 4.9; EXPRESSED IN HEART, SIGNAL = 3.6; EXPRESSED IN FETAL LIVER, SIGNAL =   5; EXPRESSED IN LUNG, SIGNAL = 3.6; EXPRESSED IN BRAIN, SIGNAL = 3.9; EXPRESSED IN BONE MARROW, SIGNAL = 3.5
taaccttcaaaccagcaccccgtgaaactgcagctagaaaacaaccctgtagtcccagttctgccccctccatgctgagtgaccttgggttgctccctttccctctttgagccgcagagttctccatctggaatacaggtgtccttgggccccgaggtccgccctgctctttccccaggcgcggcctggaccctggccggggggctcaccgatgctgtctgtctgcaggtagcacttgttgcccaggcagtaccgccacaggccctggtgggcgaaggaccctgacagccggtactgcatccagtggtctgttgccatggccaccaccaggaggatggtccccacccaggcacagaacaggccaccacccatgaagctgtacatggtgatctgtggggaaggggagagatgggattgggagctgaattcccgggacttgaagggaggaactggggggagagagggctcaggagtgggatgccaagtgcttgggagaaggagatggagacc

SEQ ID NO: 6909 - DNA, 528 bp, Homo sapiens
  MAP TO AC022609.2; EXPRESSED IN PLACENTA, SIGNAL = 3.1; EXPRESSED IN ADULT LIVER, SIGNAL = 3.2; EXPRESSED IN HELA, SIGNAL = 3.1; EXPRESSED IN HEART, SIGNAL = 2.8; EXPRESSED IN FETAL LIVER, SIGNAL = 2.7; EXPRESSED IN BRAIN, SIGNAL = 2.7; EXPRESSED IN LUNG, SIGNAL =   3; EXPRESSED IN BONE MARROW, SIGNAL = 2.6
tgacaagcaggcacctacagacacatattgtttctgggttaaaaacaaagggaaaaaggaagcattggtgggagggaggaagatacaaataccgctctagttaggatgtaaagaactgattctaggagatatgtaaactcagggagaatattaagaagatactgaaatgaaagtaattggtctaagatgttaagtaaagatggggaggagggacagattgaggaaattgtttataaaatttggattcattttggatatacaaatagagatagtgagatgtgcaggtataaaatatggagtcaggatcagaaccgatttgggagccactggcatatcaatgccatttataagcaaggactgcatgagatcatgtgagagcttatacagatagataaagagccccaggacagatcaggggtgacctgagaagcaacagctaaaaagggagatagaaaacaagctcctgggagaagattgtaaagccaagaaaataagatgcctcataaatccttccttccaatgcaaaaa

SEQ ID NO: 6910 - DNA, 595 bp, Homo sapiens
  MAP TO AL157392.2; EXPRESSED IN ADULT LIVER, SIGNAL = 2.4; EXPRESSED IN BRAIN, SIGNAL = 2.2; EXPRESSED IN BONE MARROW, SIGNAL = 2.4; EXPRESSED IN LUNG, SIGNAL =   3; EXPRESSED IN PLACENTA, SIGNAL = 2.5; EXPRESSED IN HEART, SIGNAL = 2.4; EXPRESSED IN FETAL LIVER, SIGNAL = 2.7
acatagtgcatttcccagccaggtcaactgctttcttaagatttgcactaatgcggttctgctctttctctgacaaagcacattagagaggtttggatgtttccaacatttgtgtttcaggagagcgctcgccgcccagataggccctctttttatcactacccttgccttctgtcaaaacgatcaaatgacatcagtcaaatgacatcaaaaagatcaaatgacatcagaaagatcagtgacatcacagacaacaccaatttcaacgggatgagctaggaaaggcttacagcttctcggagacacagcttcttcagttcctccagcctctgacgcagggtttcctccagagcttcctgcctggacttcaaggcagccagcatgtccttcttggccgactgcgagctatctgattcctgagaacctgtcgataaacagtggggttacttggccagctgacaggggacacacatctggaccactaatgaatttaactggagcccatgctgcggagatgggatttaccccaggaatcaagggagtgtgaaataaaacaggtgctcagcactctaactgtgagaagcacattccagca

SEQ ID NO: 6911 - DNA, 565 bp, Homo sapiens
  MAP TO AC011159.3; EXPRESSED IN PLACENTA, SIGNAL = 1.1; EXPRESSED IN ADULT LIVER, SIGNAL = 1.2; EXPRESSED IN HEART, SIGNAL = 1.2; EXPRESSED IN FETAL LIVER, SIGNAL = 1.1; EXPRESSED IN BRAIN, SIGNAL = 1.1; EXPRESSED IN BONE MARROW, SIGNAL =   1; EXPRESSED IN LUNG, SIGNAL = 1.3
tctaggggcacagaaaggtggaaaggagtgattattatacaaagaataatcaccagagatggttgctttacatggaagtaagcagcagagctggaattcaaatgcagttttgttttctccaaaagcaacactcttaactccatatacatttaaaggctcattggattagagatttagagtagacggtgatctaagaagaaattagaaataaccagagaagagaaaaccagactaattgttccttctactttctctttcaagaagtgaggggcatttatgatgtttaaaactcctttcctcttaaaaagctacagtaaatacgatgatgatgatgatgatcatgatgatcatgatgacgacgatgatgattagaataataactcctggcattcagaattttgtaaataacatcactgtattatacctcatgcagactaaatttagattccttaaattaaaaagaaaacatctcagctgcatgtgacttatagcaaagagcttttgattcacacttgctgggtaaaacagctgatgccctatagctccctgtggttcatgagggaag

SEQ ID NO: 6912 - DNA, 520 bp, Homo sapiens
  MAP TO AC018395.4; EXPRESSED IN BONE MARROW, SIGNAL = 1.7; EXPRESSED IN LUNG, SIGNAL =   2; EXPRESSED IN ADULT LIVER, SIGNAL = 1.6; EXPRESSED IN FETAL LIVER, SIGNAL = 1.8; EXPRESSED IN PLACENTA, SIGNAL = 1.9; EXPRESSED IN HEART, SIGNAL = 1.9; EXPRESSED IN BRAIN, SIGNAL = 1.6
ggatcttagccaggcacttgttaataaacacagacaactccaaagtggttttattcttctctagataggcccaacttcaaccccaaccatgcccctgtcatcaggtagaagttggagtggtcatcagccttctactagctttatagtttacactttgaagtatgctcaagccaaagaggggttaaagaggggtgactgaagctgcatttgcaaagaatatgtcaacagagaagtttagcatggtagacttcataatgcttctatccccacaggctggctatcttcatttattcctgggtgtatgccaagttaaccatggaaaaaaatttcctttgtagtttaactttgaaacaaggataataataattgccccctaaaaatgatcccctccttgttcagggaccaaagctgtctttgtaagattaatgtaagaccacagattatgattatgagaagggcctggactctgctaaaaggtaggcatagtttaatgataagcagccattgtttcctagcttgc

SEQ ID NO: 6913 - DNA, 584 bp, Homo sapiens
  MAP TO AC015525.3; EXPRESSED IN ADULT LIVER, SIGNAL = 2.1; EXPRESSED IN FETAL LIVER, SIGNAL = 2.3; EXPRESSED IN BRAIN, SIGNAL = 2.2; EXPRESSED IN PLACENTA, SIGNAL = 2.1; EXPRESSED IN HELA, SIGNAL = 3.2; EXPRESSED IN BONE MARROW, SIGNAL = 2.6; EXPRESSED IN LUNG, SIGNAL = 2.2; EXPRESSED IN HEART, SIGNAL = 2.4
ggtattagggcctcaacatggaatttcatgggggataaaattcagtccattgccttaatgttaaaagttaaatagtttctacctatcttgatttcttaggcctccttgatggcagggaaaaaactagattatctctaccactactatgagtgacagataaggaaagaaaagcagttgttcctctgactaagttctcctggttcttcttggttctaggccccatcgctgtatcagcagctgccagtcatattcaacctttagctctgagaatttctctgtgtctgatggagaagagggaaataccagtgaccactcaaacagtcctgatgagttagctgataaacttgaagaccgcttggcagagaagctagacgacctgctgtcccagacgccagagattcccattgacatatcctcacactcggatgggctctctgacaaggagtgtgccgtgcgccgtgtgaagactcagatgtctctgggcaagctgtgtgtggaggaacgtggctatgaggtgggggcttctcccttctcctcccatcactgttcccttttttgctctttggggttcaagtctctagggc

SEQ ID NO: 6914 - DNA, 513 bp, Homo sapiens
  MAP TO AC009467.3; EXPRESSED IN PLACENTA, SIGNAL =   8; EXPRESSED IN ADULT LIVER, SIGNAL =  12; EXPRESSED IN FETAL LIVER, SIGNAL = 7.6; EXPRESSED IN BRAIN, SIGNAL =  10; EXPRESSED IN BONE MARROW, SIGNAL = 8.3; EXPRESSED IN LUNG, SIGNAL = 7.6; EXPRESSED IN HELA, SIGNAL =  11; EXPRESSED IN HEART, SIGNAL = 7.1
agatgactgaatcatgggggcaggtctttcctgtgctgttctcgtgatagtgaatggatctcatgagatctgacagtttttaaaacgggaatttctccacacaagctctctctttccctgctgccatccacgtaagatgtgacttgctcctccttgccttcagccatgactgtgaggcctccccagccatgtggaactgtaagtccaattaaacctctttcttttgtaaattgcccagtctcgggtatgtctttatcagcagcatgaaaacagacaaatacaagaatcactttatgttggttcaacctaaataaaaacttgggactttatttcatttatctttatttcatttttctatgattattttttattgtattttataaaactattaatccatcatggtctgtaaaattttaaaatatatataaacaaccctgatcctacaccatagtctaaatagtgaaataaaggtaaagcattttcacacagtatacaaagccttcaaattctggc

SEQ ID NO: 6915 - DNA, 501 bp, Homo sapiens
  MAP TO AC022997.3; EXPRESSED IN LUNG, SIGNAL = 0.9; EXPRESSED IN ADULT LIVER, SIGNAL = 0.57; EXPRESSED IN BRAIN, SIGNAL = 0.73; EXPRESSED IN HEART, SIGNAL = 1.2; EXPRESSED IN PLACENTA, SIGNAL = 1.3; EXPRESSED IN HELA, SIGNAL = 9.5; EXPRESSED IN FETAL LIVER, SIGNAL = 0.75; EXPRESSED IN BONE MARROW, SIGNAL = 1.5
tttttctaaacaaacaaacaaacaaacaaaaaactgttgtttagtgtaactaccttcatcaatgatcttagctagatcttctggatcacttgctgcagcttcttcatcagcacctcctgcttcaccttgcacttttatgttatgggcatggcttctttccttcatcctcatgaacccacctctgctagtttcaaagtcttcttctgcagcttcctcacctctctcagcctttacagaattgaagagagctagggccttgctctggattaggctttggtttaagggaatgctgtggttagtttggtcttctatccagaccactcacactttttctgtattagcaataaggctgttttgttttcttatcattcatgagttcactggagtagcacttttaatttccttcaagaacttctcccttgtattctcaacttggctgtttggcacaagaggccgagctttcagcctgtctccgcttttgacacgccttcctcagtaaga

SEQ ID NO: 6916 - DNA, 530 bp, Homo sapiens
  MAP TO AL139819.2; EXPRESSED IN ADULT LIVER, SIGNAL = 5.1; EXPRESSED IN HELA, SIGNAL =   5; EXPRESSED IN BRAIN, SIGNAL = 4.1; EXPRESSED IN LUNG, SIGNAL = 5.1; EXPRESSED IN PLACENTA, SIGNAL = 4.2; EXPRESSED IN BONE MARROW, SIGNAL = 4.5; EXPRESSED IN FETAL LIVER, SIGNAL = 3.9; EXPRESSED IN HEART, SIGNAL = 4.2
aaacccagcgatttgttctggtctccctcagctcagtgtgtttgaagccaaaagcctgcttgtgtgcctctcccaattcatttgctcctagttcatttgctacttgcatagaaattttcatgccgaatctcactcttcagcggatacctgagaacattgttgctacaatctctaaaatcagattttttcaagaaagaatttttattaataacctcaagtacttttcgcctacaccctcaggctcactttttgtataggtttttctccctggagaatcctacatgctgtattgatgtctcaattctgtgtgctgcttcttcagtgctaccttgccctggccaaaggaggcttatctgatgaccatgtcctcatcctgcctattggacactaccagtcagtggtggagctttcagcagaggtggtagaagaggtggagaagtataaggccactctgagacggttctttaagagtcgagggaaatggtgtgttgtatttgagagaaattataagagccatcacctccagctac

SEQ ID NO: 6917 - DNA, 535 bp, Homo sapiens
  MAP TO AC012619.3; EXPRESSED IN LUNG, SIGNAL = 1.8; EXPRESSED IN PLACENTA, SIGNAL = 2.3; EXPRESSED IN HEART, SIGNAL = 3.1; EXPRESSED IN ADULT LIVER, SIGNAL = 2.2; EXPRESSED IN FETAL LIVER, SIGNAL = 2.5; EXPRESSED IN BRAIN, SIGNAL = 2.8; EXPRESSED IN BONE MARROW, SIGNAL = 2.3
acaaaaaggaggcattggtggtgaatgtgtatgtcgatatatacatatacaccattaaaaatatatcaaaaaatactccaaacaagaaatttggcttattcagtattcagagtaattatctgttaggaatgtaaaattctcacatcaattcttattatgccgaaagaagaatggtgtggcccagtaaacttgttctcatgttgcagaaatgccatgcatatcttaatagaaacaggtttctaaaactgtctgaagtttcccgtcattatcaataccaaagcttagtgaactgaacctgtcagttctgccaaatctagagctacctggaatccaattcctcaggagcctttttgtgttgtcactgtctcccttgctttatcatcatcatcatcatcatcatcatcatcatggtgagtgtccagaaatgagccatccagtgtgcctgccaggaaatcctaaggggtcagcactataccatctgaccccaaaatacctctgtttggggtagctaccagcatcccctggagtcagagaa

SEQ ID NO: 6918 - DNA, 504 bp, Homo sapiens
  MAP TO AC025747.3; EXPRESSED IN FETAL LIVER, SIGNAL = 2.3; EXPRESSED IN HELA, SIGNAL = 3.8; EXPRESSED IN HEART, SIGNAL = 2.6; EXPRESSED IN BONE MARROW, SIGNAL = 2.4; EXPRESSED IN BRAIN, SIGNAL = 2.2; EXPRESSED IN ADULT LIVER, SIGNAL = 3.6; EXPRESSED IN PLACENTA, SIGNAL = 2.6; EXPRESSED IN LUNG, SIGNAL = 2.7
agccctttgaaatgaactgcccaatgaatagaggcagactacagataatttctattaagattttactgcaagatagaaaaatccccaaggtgactactaacttgagcccctcattttatgctcctggccttggcttctgttttctttcctcagctgtatccaaatccaaaaaggcttctctaccccatgctcaaaaatgcgacctcaagtaagtccctaaggtcctcagcacagactgatgtgaataagcccgtgggcaaccagaaccgccagggaaatcaggaacacaagcatagagcacggcatcacttgtttaaatgatagttttaaccatcgaatgagctctgaagccacatgcttttcctaaacaaacagaaacactgtcttcatatctttctattcttcttgcaataatgttaagtaagccatccaagtaaaaaaaaaaaattaacagaaacaatcaaaaatgaaaaatcaggctgggcaaggtggctcaatgctgta

SEQ ID NO: 6919 - DNA, 568 bp, Homo sapiens
  MAP TO AL132857.3; EXPRESSED IN LUNG, SIGNAL =   2; EXPRESSED IN PLACENTA, SIGNAL = 1.9; EXPRESSED IN ADULT LIVER, SIGNAL = 1.8; EXPRESSED IN HEART, SIGNAL = 1.8; EXPRESSED IN FETAL LIVER, SIGNAL = 1.8; EXPRESSED IN BRAIN, SIGNAL = 1.8; EXPRESSED IN BONE MARROW, SIGNAL = 1.7
ctccagcctcaacaaaatggaagacgttgactgaacaggcatcaaattgataagtcttttaatagaactttcactgagttctgtgaccaagcatggcagattctgcagcaaacacttaatagtatcatggtaactaggaatcaaataccatagcaaccaacctgtgagatacaatcatatatgaagagaatataattggaggagtgtctggcttctatgaatttctttctcttgtttaagatatgttgggaaatattaactagctagtaatatatagatacagacagatcgctgtggagttactaatggttatatccgttatactgaaaacaaaattcttagttggactttcaagacaaaaagtagatctagacaaactgatgaaagaagcatttcatgaatttcaaaaatatgagattcaactaaaggaagctgaaaaacaaggtgagatgacttactttaacaacagtgtccccactcccccagaaaaaagagaaatctatacagcatatttaacaaaggtgttgattaattttctgctggaaggagaagccaagccaagcaataa

SEQ ID NO: 6920 - DNA, 598 bp, Homo sapiens
  MAP TO AL139340.3; EXPRESSED IN BONE MARROW, SIGNAL = 1.5; EXPRESSED IN PLACENTA, SIGNAL = 1.8; EXPRESSED IN ADULT LIVER, SIGNAL = 1.9; EXPRESSED IN BRAIN, SIGNAL = 1.4; EXPRESSED IN LUNG, SIGNAL = 1.6; EXPRESSED IN HEART, SIGNAL = 1.5; EXPRESSED IN FETAL LIVER, SIGNAL = 1.3
agctctttaatgcccagacacaaatgaacattcataagctcaagactattcaggaaaacatgacctcacaaaacaaactaaatgaggcattagtgaccaatcctggagagacagagatatgtgacctttcagatagagaattaaaaagagctgttttgagaaaactcaatgaaattaaagatagcgcagaaaagaaattcaaacttctatcagatatatttaacaaagatattgaaatttttttaaatcaagcagaaattctagagctgaaaaatgcaattgacatactgaagaatgcaccagactctctttacagtacagttgatcaagcagaagaaatagttaatgagcttgaagacaggctatttgaaaattcagtcagagaagacaaaagaataagaaagaataaagcacatccacgagatgtagaaaatagccccaaaatggcaaatctaagagttattggctttaaagaggaggtagagagagagaaagattgggatggaaagtttatttaaatggataagaacagagaattttccaaacctacagaaagatatcaatatccaagtacaagaaggtaataaaatgccaagca

SEQ ID NO: 6921 - DNA, 596 bp, Homo sapiens
  MAP TO AC010503.3; EXPRESSED IN PLACENTA, SIGNAL = 1.7; EXPRESSED IN ADULT LIVER, SIGNAL = 2.2; EXPRESSED IN HELA, SIGNAL = 2.8; EXPRESSED IN HEART, SIGNAL = 1.8; EXPRESSED IN FETAL LIVER, SIGNAL = 1.8; EXPRESSED IN BONE MARROW, SIGNAL = 1.5; EXPRESSED IN LUNG, SIGNAL = 1.2; EXPRESSED IN BRAIN, SIGNAL = 1.4
attcaggtggaggtggacaggctacccaggctcaggtgattcacacctgtcccctctctgcagcgtccagaagccatcactgctatcatcgtggtcttctccctcttggctgccttgctcctggctgtggggctggcactgttggtgcggaagcttcgggagaagcggcagacggagggcacctaccggcccagtagcgaggagcaggtgggtgcccgcgtgccaccgacccccaacctcaagttgccgccggaagagcggctcatctgaacgctggggcctgctgcagccaccaacactgcccaggactgcgggttgctggcttgtacaccgcagctgccaccgagacaccagcctctgatggctcaggaggacttgtggggagaggctgggggcacccatgtggtgggctctgtgcagcatgttgcctctgcttggctgtgcctgcagctcagggtgctggggctcgggacccacccccctgcttgcggaaccaacttttctctgtgtgtccagcaggccccacaaccccctctcctttctttcagttctcccatgcagccgaggcccgggcccctcaggactccaaggagacg

SEQ ID NO: 6922 - DNA, 528 bp, Homo sapiens
  MAP TO AL137853.3; EXPRESSED IN ADULT LIVER, SIGNAL = 1.2; EXPRESSED IN BRAIN, SIGNAL = 1.2; EXPRESSED IN LUNG, SIGNAL = 1.5; EXPRESSED IN PLACENTA, SIGNAL = 1.3; EXPRESSED IN BONE MARROW, SIGNAL = 1.1; EXPRESSED IN HEART, SIGNAL = 1.3; EXPRESSED IN FETAL LIVER, SIGNAL = 1.1
actgaaaggttaattttgctgtgtttttcttatactattttactgctttttaaacttttatcttttaaaaattatagaaataaaatatatgtatgataggaaaattagaaaatttcagataagtatgaagaagaaaataaaaatcacttgtaatctttactgatattttaaaataatttagttatgtattcttttagactttttaatgtatatatacctactttttttcttaagagtttataatagtaatacttatcctttttttttttttttttgctcacataggaaaagacagagtctctaatacagcaatatgaagccattagcctactcaattcagagcgttatgcccgcctagagcgggcccaggtcttagtaaaccagttttgggaaacttatgaagagctcagcccctggattgaggaaactcgggcactaatagcacagttaccctctccagccattgatcatgagcagctcaggcagcaacaagaggaaatgagggtaaggagcatgccaagtttcatt

SEQ ID NO: 6923 - DNA, 600 bp, Homo sapiens
  MAP TO AC022038.2; EXPRESSED IN BRAIN, SIGNAL = 1.1; EXPRESSED IN PLACENTA, SIGNAL = 1.3; EXPRESSED IN ADULT LIVER, SIGNAL = 1.4; EXPRESSED IN HEART, SIGNAL = 1.2; EXPRESSED IN FETAL LIVER, SIGNAL = 1.1; EXPRESSED IN BONE MARROW, SIGNAL = 1.2; EXPRESSED IN LUNG, SIGNAL = 1.3
tcagccccttaaaacaatgcctaacacataataggtaatctttacatgtttgttgcagatggaagatgaacaagtggatatagtgctagccaaagaatcagaaaattatgcaccaaccccacctgggaagttcagctgcataaactgcatgaaatgactctggtaatacttctggatttttgtgttttttaatctggatctggaagagtcatctatctgttgcctatctgacaaaaggtatgtgtaaaagtcctttcaaaactacaaagcattacaagagtattattttggtcatccatgtaagaaattgcatagagccccaaattaagttgaaaataaaacaacagcaatttagaaaacattaccacctatataatctactatcaggtagaatattcagaaagagtattgaaagatattataaatgtaatcaccatttaattttcaatgttaagacatgatcaaaagataatagttcaggaggcggaaatgatatctgctacttatattgtcataacataatatttactctataattgcatgatcaatatttactcggtgattatatagcttttcacatggttgcttggacccaataaa

SEQ ID NO: 6924 - DNA, 551 bp, Homo sapiens
  MAP TO AC025011.2; EXPRESSED IN HELA, SIGNAL =  11; EXPRESSED IN BONE MARROW, SIGNAL = 6.8; EXPRESSED IN LUNG, SIGNAL = 4.9; EXPRESSED IN ADULT LIVER, SIGNAL = 5.3; EXPRESSED IN FETAL LIVER, SIGNAL = 9.3; EXPRESSED IN PLACENTA, SIGNAL = 7.2; EXPRESSED IN HEART, SIGNAL = 6.3; EXPRESSED IN BRAIN, SIGNAL =  10
acacaagctgaatgctgcacttggtcttgatggtggcaatggcagcattgacatccttgggtacatctctgtggtacaacaggcagtaggccatacacttgccataccagtaagccatattccctaaagtgccataccatcacactttgccatctggctggcaggctgaaagcaggcattggcgatccctgccaaaaacagctgttgtggtacaccttctctgcagatgactggcacatagatggccggggggatgtagatgcgagtgctggccaccaggttgatctgaaactctgtcagatccatgttgagggccttgtcaaagtgcagagaagctgtagtggaggagattactttgctaatgaggaagttgaggttggtgtaggttggggactcaatgtccaggttgtggcagcaattgtcatagatggctttgtcgtccaccatgaaggcacaagctgagtgctctagggtggtgtgagtgagtggtcaggatgaagttgtagggctcaactatggctgtggacacctgcagggctgagtagttggag

SEQ ID NO: 6925 - DNA, 536 bp, Homo sapiens
  MAP TO AC013626.3; EXPRESSED IN FETAL LIVER, SIGNAL = 1.1; EXPRESSED IN LUNG, SIGNAL =   1; EXPRESSED IN PLACENTA, SIGNAL =   1; EXPRESSED IN ADULT LIVER, SIGNAL = 1.1; EXPRESSED IN BRAIN, SIGNAL =   1; EXPRESSED IN BONE MARROW, SIGNAL = 1.3; EXPRESSED IN HEART, SIGNAL = 1.4
tagcaggcatcactagcagctgtgatccggtacaccagggtgtggtaacacaggtgagagacagggagaaaggaaatggaacaaggggcacatcgcatctgttttgcgaacaaaagcaagtatctcattctgaatcatccttccacccggctgcccaaatgcaaatgctgtgtaatcaccttgcaactacagacttggtactttctaggtcttctgagcagggtcacatacctggtaaccatggatgcatttatcagaaactgggcctatttgtttcctaagacagaaacaagagttaagtggtgtctttttaaatctgtgcatttgttcaatgcttgtgtactttgcgtgctcttccacagtttgctggcagctggcttgtctactgtggataacagggcagtgagttaattctggtttagacatgagccccagcatctcagccaaaggaatgttccccctataatagtgctcctcaaactgtggcccgggttccagcagcatgggcatcacctgggagcttgacagaaatgcaa

SEQ ID NO: 6926 - DNA, 546 bp, Homo sapiens
  MAP TO AC019276.3; EXPRESSED IN ADULT LIVER, SIGNAL = 0.87; EXPRESSED IN LUNG, SIGNAL = 1.1; EXPRESSED IN PLACENTA, SIGNAL = 1.2; EXPRESSED IN HEART, SIGNAL = 1.4; EXPRESSED IN FETAL LIVER, SIGNAL = 1.6; EXPRESSED IN BRAIN, SIGNAL = 1.2; EXPRESSED IN BONE MARROW, SIGNAL = 1.2
gcttcctctttcctggttccagacaggttaaccccttcttctccctcctgctgactactgccaggacaaaacaaggactgacttccagccccagacagcatccctgaaagccacaaggcctctgggcaaaatactcgggagcaagccaaaaggcaggcccaagcccatggaccgcagggccagtctgcacgcacacgcggcaggggtggaaaagcccggggacccagtgccggccccagcccccaccttacaggcctgctccaccccggcttccgcgtctgtaacagggcagaagatcactggttctcaagcctttccagtggttttaaagcagcagaacctcccaccccagcccaggggaatcctgcctgggaccccggaagagatgagagcttctctggctgaattaggggaggtccaggggccccaccttgatctccccagttcccctgagggagcagagcagaactggtgctcaggggcccacggcctgaggagcctgaagcagctgctcttgcagccctgtggcactgagctgattcaaca

SEQ ID NO: 6927 - DNA, 581 bp, Homo sapiens
  MAP TO AC013691.3; EXPRESSED IN PLACENTA, SIGNAL = 2.2; EXPRESSED IN ADULT LIVER, SIGNAL = 2.4; EXPRESSED IN FETAL LIVER, SIGNAL = 2.2; EXPRESSED IN BRAIN, SIGNAL = 2.2; EXPRESSED IN BONE MARROW, SIGNAL = 1.7; EXPRESSED IN LUNG, SIGNAL = 2.3; EXPRESSED IN HELA, SIGNAL = 2.9; EXPRESSED IN HEART, SIGNAL = 2.6
cacccttatctgagcttggcatggaggtagtgggatgatccctcaggggaccacgatggcctggcagagggccctgctgcagctggcaggaccaagtttccatgcggtgctgctggtggctgggaggagtgatggccgcaagggttccttggacacaggtgctggctcactggctgggaaggttgaactaagtccctttcccactgtgtgggggacaattcagggggtctctccccaagagagataagattggagatctgagcaaattttaattttaatttagaaaaaaaaaataaagcacaatggccctaaagaattaagtcagctacatttgaccacatatcaattaagaactttttttgtaataagagacagaatagtgttaagacgtaaatgacaaatcaagagaaatatttgccccgtgtataagaagagatcaatgtctgggcaatagaaacagctcctgtaaatcaataagaaaagacagacaaaatagaaaactgggcaaagtgtttgaataggaaagtcgaaaaggaaataaaaaggatgtatacatgcaaagatgccctccttactggtca

SEQ ID NO: 6928 - DNA, 570 bp, Homo sapiens
  MAP TO AL137225.7; EXPRESSED IN LUNG, SIGNAL = 1.3; EXPRESSED IN FETAL LIVER, SIGNAL = 1.1; EXPRESSED IN HEART, SIGNAL = 1.3; EXPRESSED IN PLACENTA, SIGNAL = 1.3; EXPRESSED IN ADULT LIVER, SIGNAL = 1.2; EXPRESSED IN BRAIN, SIGNAL = 1.3; EXPRESSED IN BONE MARROW, SIGNAL = 1.2
actcattgaccctgtcccagactgaccaagacaaccagataatccagccccagtttgaccattatcactagataacctatccccagtctgaccactcattgaccctgccccagattgaccaagactaccagataacccaaccccagactgaccatttagtgaccctgccccagtttgaccataagcactagataacctatatccagttggatcattcactcaccctgctccagatcgacccaaagaaccagatgatccagacccagactgactatacgctcctaatgaccctgtcccaaactgaccatggctaccagatggtttagccccaggctgactgttcattgactctgctccaagttgacccataccattagatggtctagacccagattgaacatttattgaccctgcctcagactgaccataccttccaaatgaccctgtcccaaactgatcgtagccaccagattgcccagcctcagtttgaccataaccactaggaaacctattgccggtctgagaattcattgaacctaccccagattgacccaaacccctaaatgatcc

SEQ ID NO: 6929 - DNA, 538 bp, Homo sapiens
  MAP TO AC021288.3; EXPRESSED IN ADULT LIVER, SIGNAL = 1.7; EXPRESSED IN HEART, SIGNAL = 1.3; EXPRESSED IN BONE MARROW, SIGNAL = 1.5; EXPRESSED IN LUNG, SIGNAL = 1.6; EXPRESSED IN PLACENTA, SIGNAL = 1.2; EXPRESSED IN FETAL LIVER, SIGNAL = 1.4; EXPRESSED IN BRAIN, SIGNAL = 1.4
cctttggccacagtcaaatctggaatagagccttacataaattaatgataattatcataatttattaagtgcttactgtaagtcaggtactaagctatattaacccccaaacaatctttgaagtgaattctgttatcatcaccattttccacattagaaaagttgggcttagaaatccaaggtttcatagcatatgtgtggtagaacaagacgttgaaccaggtcaaaaggtttagtgttaacattttgacttctagaagaaaaagagagacctaggttcaaatcctggtttactactttctagatctgtgacattaggtgaatttcttaatgtctacatgcctcggttttcttttctgtaaaatgaggctattaatagtgcttacttcctagggtttttctgaagattaaatgagataatccatgataaactacttggcatgtttgaaaggctctgtaaatgctattcattaatacttatttattatgtctataaaacttgtacacttaaatctcatgcacaatgccatgttggtac

SEQ ID NO: 6930 - DNA, 600 bp, Homo sapiens
  MAP TO AL136419.2; EXPRESSED IN HEART, SIGNAL = 1.4; EXPRESSED IN BONE MARROW, SIGNAL = 1.3; EXPRESSED IN ADULT LIVER, SIGNAL = 2.2; EXPRESSED IN BRAIN, SIGNAL = 1.3; EXPRESSED IN LUNG, SIGNAL = 1.5; EXPRESSED IN PLACENTA, SIGNAL = 1.2; EXPRESSED IN FETAL LIVER, SIGNAL = 1.4
accctcaaatcacggaagtggctgctgctgcaaacccagctcatttctcacctctcagtcccaagaggggatgaagcctgtcacccatggtgggaactgtagaaagtgatgtcagttcttgggaactgaggctgtggtccaggtcataataaaaacaagtaaaggaatgccaaaaatggccatgccattaagcctgttttacacatagtaggcacacgtaggggttatatagagaaagagccagaattcaaacccgggcagtcttaacttcagagctcatactgtcgacctcttcccctgcacaggccttagcagtctttgtctctttctgctcacaggatcggcttcgccatcgcccggcgtttggcccaggacggggcccatgtggtcgtcagcagccggaagcagcagaatgtggaccaggcggtggccacgctgcagggggaggggctgagcgtgacgggcaccgtgtgccatgtggggaaggcggaggaccgggagcggctggtggccacggtgagctgcagggaaatgggcacagagccaggaggtggaaaacggagccagcctgagcctccttccctgctttcctagacagca

SEQ ID NO: 6931 - DNA, 563 bp, Homo sapiens
  MAP TO AC024193.2; EXPRESSED IN LUNG, SIGNAL = 1.2; EXPRESSED IN PLACENTA, SIGNAL = 1.2; EXPRESSED IN HEART, SIGNAL = 1.2; EXPRESSED IN BONE MARROW, SIGNAL = 1.2; EXPRESSED IN ADULT LIVER, SIGNAL = 1.7; EXPRESSED IN FETAL LIVER, SIGNAL = 1.2; EXPRESSED IN BRAIN, SIGNAL = 1.1
aaatgggctcacacaagtccaaaatctgtagggtgggctggcaggctagacagggaagagtcgatattatagctcaagttcaaaggcagtctgctagccaaattccttcttccttgggggagatcagtcattttttctattaaggccttcaatttattggatgcagcccactcacattatgaaggagttttcctcaaagcctactgatttggatgttaatctcaccttaaaaaatacctttacagcagcatccaggctagtgtttgaccaaatatctgggtaccgtggcctagccaagttgaaatgtaaaattaaccatcacacctctcatcagccccatgaggtgaacattattattcctatgttgcagatgaggaagctgaggctcagagagggtaagtgatggatctggtactcataagcggcagagttgagactgaaaccagtgctgtttcaatatcctcatggtcacctctccctggttctcatccatttgtagatcaagaaggatttgtgatgtccatctatgactgtacctcgttagacctaaagaccctcctggg

SEQ ID NO: 6932 - DNA, 593 bp, Homo sapiens
  MAP TO AP000475.3; EXPRESSED IN LUNG, SIGNAL = 1.1; EXPRESSED IN PLACENTA, SIGNAL = 1.2; EXPRESSED IN FETAL LIVER, SIGNAL = 1.2; EXPRESSED IN BRAIN, SIGNAL = 1.2; EXPRESSED IN BONE MARROW, SIGNAL = 1.1; EXPRESSED IN ADULT LIVER, SIGNAL = 1.2; EXPRESSED IN HEART, SIGNAL = 1.6
caacatgcagaaaatgcttgaataatgtcatttaattcagtatagtttcattacaatattgatgaggataaaagttggtttccttatatatagtttatgttaaagacacactcacttttcaagaacatatcaatgagattaggtgaggatttactgtactttcctttctaccttctaggtctttatgaaaatgttgttatacatttgacatatacagttgatccttgaaaaacacagagattaggagtgtcaatccccatgcagttaaaaatctccttataacttttgattttctaaaaacttaactactaataccctactgttgacaggaagcctgaccaataacatagtcaattaccacatattgtgtatgttatatgttatatgttactgtagtcttacaataaagtaaactagagaaagaaaagcattatgaagaaaattagaagaaaaagagaatgcatttactattcattaagtggaagtggatcatcataaagatcttcattctttttgtcttcaatttgaaggctaaagaggaggaaaaagaggagttgttcttactgtttcaggggtggaagagccagaagaaa

SEQ ID NO: 6933 - DNA, 567 bp, Homo sapiens
  MAP TO AC013751.3; EXPRESSED IN HEART, SIGNAL = 1.8; EXPRESSED IN BRAIN, SIGNAL = 1.9; EXPRESSED IN BONE MARROW, SIGNAL = 1.8; EXPRESSED IN LUNG, SIGNAL = 2.2; EXPRESSED IN HELA, SIGNAL = 2.5; EXPRESSED IN PLACENTA, SIGNAL = 1.9; EXPRESSED IN ADULT LIVER, SIGNAL = 1.9; EXPRESSED IN FETAL LIVER, SIGNAL = 1.8
ctgaaggagcaaagggtgagctgtcaggctgtcagtgtctggctcacctggtggcctcagtccagaaggagccagaggcagcagccctagtcccagggactggaggcgattctgtgtgtggggaggcccacccggccctgcagggggccatggagaagctgcagagccactttatggagctcatgcaggagaaggtggacctgaaggagcagatggaaaaactggaacgtcgctgcatccagctgtctggagagacagacgtcatcagtgagggggaggccagggcatggcagggggagctgcacggtggtcagaggggtcccagcgtctgaaccctgtcctcccgcaggaaagtacatcacactgtaccagagctagaggtcagtgctgaagacgtggcaccagaaggaatacatcagcagcctggcccaggacaaggaggagatgaaggtgaagctgctggagctgctggagctgcaggagctgcaggagctggtgttgcggcttgtgggcaaccacaacaagtggcatggcaaattcctggcagctgccaagaaccctgttgat

SEQ ID NO: 6934 - DNA, 577 bp, Homo sapiens
  MAP TO AL139115.2; EXPRESSED IN LUNG, SIGNAL =   4; EXPRESSED IN PLACENTA, SIGNAL = 3.9; EXPRESSED IN HEART, SIGNAL = 3.9; EXPRESSED IN FETAL LIVER, SIGNAL = 3.6; EXPRESSED IN ADULT LIVER, SIGNAL = 4.7; EXPRESSED IN BRAIN, SIGNAL = 4.1; EXPRESSED IN BONE MARROW, SIGNAL = 4.2
ttcagatactgcctccccactagcttgtctgtaaaaattcctgtatttcactacaggatggcaaccctttttctgggacccctttctgcagcagagagctgttctttttctttctcctattaaatttctgctctaaacttcacccttggtgtatccatgtccttgatttccttggctatgagaccaagaattctgagcgtcaccccagaaaacaaggccacttcaatacaatcaccctcataagcatttatctcagaggaatgtggaagacttatgttcacacaaaaacctgtgatcatagcagctttatttatgagtataaacccagaaccaaccccggtgtccttcaaaaactaaacaattatacaaactggtccatccataccatacactactactcaacaataaacatgcaataatttgagtaaatctccaagaaactgcactgagaaaagatgttttaagccaatccctaaggattgtatactgtataattctgcttttctaatgccactaaaatgacaaaattacagaaatggagaacatttctgtggttgccagaggctagggaagatga

SEQ ID NO: 6935 - DNA, 572 bp, Homo sapiens
  MAP TO AC023032.2; EXPRESSED IN LUNG, SIGNAL = 2.9; EXPRESSED IN BRAIN, SIGNAL = 2.7; EXPRESSED IN PLACENTA, SIGNAL =   3; EXPRESSED IN ADULT LIVER, SIGNAL = 3.2; EXPRESSED IN HELA, SIGNAL = 2.9; EXPRESSED IN FETAL LIVER, SIGNAL = 2.2; EXPRESSED IN HEART, SIGNAL = 2.3; EXPRESSED IN BONE MARROW, SIGNAL = 2.9
catttgtgtgccagaggatgggaaataaatctgactaaaatccagggacctcctacttaagtaaaatttctaggggtccaatggtgtgcagcctgttgagatattccttctaacatgaaggataagttgctgcatttggcccctcctaccaccaagaaagaggcacaatggggctagtggggctatttggatttcagaggcaacacactgctcatttgggtgtgttactctggtccaattatcgagtgacccaaaaggctgccagttttgagtggtgtccagaacaggagaaggctctgcaccaggtccaggctgctgtgcaagctgctctgacatttggggcatatgacccggcagattcactggtgcttaaggtgtcagtggcagatagggatgttgtttggatcctttggcaggtaggtgaatcacagcataagcctctaagattttggagcaaggctgtgccatcttctccagataactgacctcctttttagagacagctcttggcctgttactgagctttggtggaaactgaacatgtgactattggtcatcaagtcaccaagcga

SEQ ID NO: 6936 - DNA, 580 bp, Homo sapiens
  MAP TO AC022045.2; EXPRESSED IN ADULT LIVER, SIGNAL = 1.6; EXPRESSED IN FETAL LIVER, SIGNAL = 1.3; EXPRESSED IN BRAIN, SIGNAL = 1.2; EXPRESSED IN BONE MARROW, SIGNAL = 1.2; EXPRESSED IN LUNG, SIGNAL = 1.3; EXPRESSED IN PLACENTA, SIGNAL = 1.3; EXPRESSED IN HEART, SIGNAL = 1.3
cattcctcctcctttcctcctgcttgctgatcaagatgtttcctccgccagcctggctccactccagccccctccccaccttgggcaggcagcagccatcctctccggcctggggcttctgtgggctgtggcttcccagggtgcacccttaatgccctcttcaccagtggagggtctgtaggcaaatccttcaggatgggggcacctcacctcttctcttcctcctctgttgaagcccaaatctcctgggagaagaggctgcaggaccactccagggctgcctcctgctctgggggggactttggtctcatccctgtccccgatggggcttcggtttcctggggagttcacagccaactgggcctcttgacacagaggtacatagcatgcttcgtatttgtttggtaggagttttgtgctgctttgccaagcatctttactccaggcctggaagcactgggtgggggctaccctccaccccaccacctaggcaagtggcctggaatgtagaatttgagtacttctaatttttcaaaccccaaggggtccccctggggacccttacggtccctttccctgt

SEQ ID NO: 6937 - DNA, 505 bp, Homo sapiens
  MAP TO AC015502.3; EXPRESSED IN PLACENTA, SIGNAL = 1.2; EXPRESSED IN FETAL LIVER, SIGNAL = 1.3; EXPRESSED IN ADULT LIVER, SIGNAL = 1.6; EXPRESSED IN BONE MARROW, SIGNAL = 1.3; EXPRESSED IN HEART, SIGNAL = 1.3; EXPRESSED IN BRAIN, SIGNAL = 1.3; EXPRESSED IN LUNG, SIGNAL = 2.6; EXPRESSED IN HELA, SIGNAL = 2.4
acatctaacacggtgccaggctcaatacatttcaggcaagtaaagaaataaccttactgtcatttcaatatacagaattatggttacttaaaagaaataactcatatttatttatcaaaaatgttcttttcacatttctaaaagtctcacttaaaaagtttgctgggttagcaatttatttgctcagaaatattgtctatagaacattcagtagtttgtgtcttcaaaaatcatcccaaatgattcaaaagcaatatttaaattcaaaatgcaatgtttaatataaaatgaaaagaaaaaaatgatctcaaaaatttacctttcaggtgtcttattatccacatttgcacggaatatgacaagggataaaagagcagagacttgcaatgccttggaaaacaaactcctcctcttgcctgaaaagcaaagtgactaatgtccaaagaaaattgatgctgatagacagtttcaagaaaaggaagagtcaatcttagttgcaatggga

SEQ ID NO: 6938 - DNA, 514 bp, Homo sapiens
  MAP TO AC011930.3; EXPRESSED IN LUNG, SIGNAL = 2.6; EXPRESSED IN BRAIN, SIGNAL = 2.4; EXPRESSED IN PLACENTA, SIGNAL = 2.2; EXPRESSED IN ADULT LIVER, SIGNAL = 2.1; EXPRESSED IN HEART, SIGNAL = 2.1; EXPRESSED IN FETAL LIVER, SIGNAL = 2.5; EXPRESSED IN BONE MARROW, SIGNAL = 2.5
taccttgttgtttgctccccaggtgtaacaatgatttttaaaactgaccttctgataattgtaaatcagagcccaaagggcagctgctccaatcctctgagcattttgattctcactttccagacaggcagcaagcacagtaatgactttttctaaaaatgaacatatattttttaaaagttcagtcccagacactgcattgtattcttatcttggactagtcagacacccccctcttttcccattagaatgcatacataaagttggtatcactagactatggcaaaaccaatcttttatgccatgtggtatatgggaggacaacctcaaaacattgttttcatgtcaggcatagaagggtcaaagacactgaagctgcttcattttttggccagaattcaagaaaaggcacattcatttaaagaccacaagtgtgtaaaaataagtatacaattaggtacattaatgagttactcaattacagctaacattctggcaggcagaaaaacagatc

SEQ ID NO: 6939 - DNA, 600 bp, Homo sapiens
  MAP TO AC025119.2; EXPRESSED IN BONE MARROW, SIGNAL = 1.5; EXPRESSED IN ADULT LIVER, SIGNAL = 1.9; EXPRESSED IN HELA, SIGNAL = 2.4; EXPRESSED IN FETAL LIVER, SIGNAL = 1.6; EXPRESSED IN LUNG, SIGNAL = 1.6; EXPRESSED IN PLACENTA, SIGNAL = 1.7; EXPRESSED IN HEART, SIGNAL = 1.7; EXPRESSED IN BRAIN, SIGNAL = 1.6
cactagggggagacaacgagtttgcccaggggccatcaggatggtggtccctatacaggccagaatatccctgcccaacagaggagtttggctttcaggcataattagaaaagcatgggtgaacaaaatgtctccccagctacaactaaggggttggggataatatcgggttaaagtcctccctgagacacacttcatgattgtgctaagagagcagaagggcccaggactggaggggagaactcaagagaccagccctggtgtccaaaaatttcctcccttcaatttccagaattacctggggctcctggatggtaatgatggtctggaccactggagccagggaaaggagacccaggacccatcagtcctgctgctggatcatgtagattggttctgaacctggtgaccagcatccccagggacagtccaccctccaatggtccccattgcagattggacagggttgaggtggcttcctcgtgctgcctgggtaatccttcttgaaatgccctggcttgccacatctgtagcagttaacaggtgcaccctgggaattctggggtttgtgggcttgcatggtggctattgaagcctctg

SEQ ID NO: 6940 - DNA, 585 bp, Homo sapiens
  MAP TO AC023134.3; EXPRESSED IN FETAL LIVER, SIGNAL = 1.3; EXPRESSED IN LUNG, SIGNAL = 1.5; EXPRESSED IN PLACENTA, SIGNAL = 1.5; EXPRESSED IN ADULT LIVER, SIGNAL = 1.6; EXPRESSED IN BRAIN, SIGNAL = 1.5; EXPRESSED IN BONE MARROW, SIGNAL = 1.3; EXPRESSED IN HEART, SIGNAL = 1.6
actttccctcactgggtgtgataggctgaataaccactccctccatctcccccaaccgccgcatgcgcatgtcctaatttgtggaacatgcgaatgttatcatatggcaaagactttgtgggtgtgatcaagttaatgattttgattatcctaggattatcctggattaccaaagtaagcccaaatacaattacatagatctttataagagggaggcatagagagatttggcacagacagagaagaaggcaaagtgacattggaggcagagattggagagatgtggctcccagccaaggaatgctacaaccacaaaaagctggaagaggaaggaacagattctcacctaatggccttggaggcaatgcagccctgatgataccttgattttattctggtgttactgatttcagacttctggactccagaactataagagaataaatgtgtgttgttttaaacaaccaagtttgggtaatttgtcacagcagtcataggaaataaatgcactgaggaactcaaagtttaatgaaagagacaaacacaaaaaataattgttatagtacagcaagagccctattcgaa

SEQ ID NO: 6941 - DNA, 523 bp, Homo sapiens
  MAP TO AC010767.3; EXPRESSED IN LUNG, SIGNAL = 4.8; EXPRESSED IN PLACENTA, SIGNAL = 4.5; EXPRESSED IN ADULT LIVER, SIGNAL = 4.8; EXPRESSED IN HELA, SIGNAL = 7.9; EXPRESSED IN HEART, SIGNAL = 4.7; EXPRESSED IN FETAL LIVER, SIGNAL = 5.5; EXPRESSED IN BONE MARROW, SIGNAL = 5.6; EXPRESSED IN BRAIN, SIGNAL = 4.4
acccaagagctctgatggagatgtgcaaagagattaatgttgtgttcttacttgctaacacaaaatatatttggcagcccatggatcaaggagtaattttgaccttcaagtctaatttaagaaatacatttcataaagctatagcagtcttagtaatttctctgatggatattggcaaagtaaattgaaaaccttctggaaagcattcaccattctagatgccattaagaacatttgtgcctcattgggaggaggtcaaaatgtcaacattaacagaagtttggaagaagtttattccaaccctcatggatgactttgaggaattcaagacatcggtggaggaagtaacagcagatgtagcagaaatagtgagacaactagaattagaaggagagcctgaagatgtgactgaattgctgcaatctcacgataaaccttgaatggagaaggagttgcttcttacggaagaggaaagaaagtggtttcttaagatggaatctcctcttggcaaaaatgctgtgaa

SEQ ID NO: 6942 - DNA, 582 bp, Homo sapiens
  MAP TO AL136976.3; EXPRESSED IN LUNG, SIGNAL = 1.5; EXPRESSED IN PLACENTA, SIGNAL = 1.1; EXPRESSED IN HEART, SIGNAL = 1.3; EXPRESSED IN FETAL LIVER, SIGNAL = 1.5; EXPRESSED IN ADULT LIVER, SIGNAL = 1.1; EXPRESSED IN BRAIN, SIGNAL = 1.5; EXPRESSED IN BONE MARROW, SIGNAL = 1.2
tccagggaaaatgacatcaagacatattgtagccaaactgtcaaaaatcaaaacaagagattattgaaagcagcagcagcagcagcaacaacaacaacaacaacaacaacaacaacaacaacaacaacaacagaaacaaaaaacaactaagatcctaacataccagagaatgttcataagacaatggatttctcaacagaaactaggccaagaaggagtggaatgatatattcaatgtgcagaaagaaaaagaaaagcttctagccaaaaataatttactcatcaaagctttccttcagaagtgaaggcaaaaagaaactttcatagagaagcaaatgctaaaggagctcatcaccactagacctaccttacaagaaatgttgaggtgagtcttcaagctgacacaaaaggagataattaacattatgaagacatataaaatgacaacataagactcaattgtgtgttgcctataagagactcactgcaatatagctattatgtacccataataactgaaaattttttaaaaagtaaaaataaaaacatgttgtaaaagatacccacttccacattgacgat

SEQ ID NO: 6943 - DNA, 508 bp, Homo sapiens
  MAP TO AC022943.4; EXPRESSED IN ADULT LIVER, SIGNAL =   2; EXPRESSED IN HEART, SIGNAL = 1.8; EXPRESSED IN BONE MARROW, SIGNAL = 1.8; EXPRESSED IN LUNG, SIGNAL =   2; EXPRESSED IN PLACENTA, SIGNAL = 1.4; EXPRESSED IN FETAL LIVER, SIGNAL = 1.9; EXPRESSED IN BRAIN, SIGNAL = 1.5
tgtatcagagggggattattttgttatttgtatttgttataaatttttagttgtaatgccataaagtataataaattctcagttaagtggttaacaacaaaggttctgaaattagattttggcgatttgaatccgaactatatcttttactagctattttatgttgagcaactaatctaacattatttatggtttttcatctattaagatatggaaaataacattatctatagaaagtcactgttttgaggattaaagtaatcctttcaaaatccttagcatacagcaaatgcttaataagctttagctatgtctctttccttatccttttcgtctcctttgtcaactactaccactgctacaatgatgacttctttgaggtcaactgctattaccagacctaaaactttattctaataaacagcaagagtcaaatttgagggtcagacaaatttggataaaatctttgctaggcttttactaactatgcggattgggaaaataacct

SEQ ID NO: 6944 - DNA, 507 bp, Homo sapiens
  MAP TO AC026442.1; EXPRESSED IN LUNG, SIGNAL = 1.2; EXPRESSED IN FETAL LIVER, SIGNAL = 1.2; EXPRESSED IN BRAIN, SIGNAL = 1.3; EXPRESSED IN PLACENTA, SIGNAL = 1.3; EXPRESSED IN HEART, SIGNAL = 1.5; EXPRESSED IN ADULT LIVER, SIGNAL = 1.5; EXPRESSED IN BONE MARROW, SIGNAL = 1.3
atacagggcgagagaggatgattttactcccaatagcgcagggggtgtacatcccccgtgatattcttcctaataaccagaaggaaagaagatgaaattgctctcaatattgcagggtgtgaacacctcttctttgatattgttcctagtatccagggagggacaggataatattactaccaatatcgaaggtggtgtgcacccccctgtgatattgtttggtacatccaggggaaagaggatgatattactcccaatatcgcagagggtgtacatcccctttgtgatattgttcctaataccacgggggtagaggatgatattactcccaatattgcaggaagtgtacacattccctctgatactgttcctaatttcgaggggaaagagagttatattactcccaaaatcaaaggatgtgtacacccacccatgatattgtttctcatatccaggtggggatatattaaaattactacaaatattgcaaaggctggaaacccatta

SEQ ID NO: 6945 - DNA, 545 bp, Homo sapiens
  MAP TO AC007326.28; EXPRESSED IN PLACENTA, SIGNAL = 1.7; EXPRESSED IN FETAL LIVER, SIGNAL = 1.7; EXPRESSED IN BONE MARROW, SIGNAL = 1.2; EXPRESSED IN HEART, SIGNAL = 1.4; EXPRESSED IN BRAIN, SIGNAL = 2.2
cacattcgaggagagttcccaaaagtttccagtggctgtcccaggcaggtatcaggttcggcccacacctgagtgcccatactctgggcagggctgggaggcacctgacctcacctccagcagctctgcaagtgtggggtgaaaaaaggtgaatctgtgtgaggatggggttggctgcagctgtggtgatggcctgggcgggggcggggggtgctggaggctaagggtgtgctggcgggtgctaggcagggcgatggaagaggttgccagttcggagccgcctcaagagctccagccacagcagctgccgctcccgatgggtgcccttcatgaggctgctgttctccagggcacggcgggacaagtagggcagcacctccatcacggggccatagggcacgtacttgtacacggggtagccggcctggcctgcatgggggcagatacaccatgaggcccaggcccagcaccgtaccccatcgcaccagggagggccccactcacccagcgggaagctgatctggtcacacatgcctagcagctgt

SEQ ID NO: 6946 - DNA, 579 bp, Homo sapiens
  MAP TO AL136112.9; EXPRESSED IN HELA, SIGNAL = 2.3; EXPRESSED IN LUNG, SIGNAL = 3.6; EXPRESSED IN PLACENTA, SIGNAL = 1.5; EXPRESSED IN ADULT LIVER, SIGNAL = 2.8; EXPRESSED IN BRAIN, SIGNAL = 3.7; EXPRESSED IN BONE MARROW, SIGNAL = 2.7; EXPRESSED IN FETAL LIVER, SIGNAL = 4.5; EXPRESSED IN HEART, SIGNAL = 1.3
tccattgcagctttcacatctatctttaggactgatctgctccccatggccctggcactccacgcacacagactgaatttgctgaacctttccaggtcctatctgatgaattcttatttgcattccagtacctcggcaattgggacagtactctactcctcctttcttacctcctctatcttcacatttgtcacaaattgcattcttttgcagagccagttttcttgttgcactattatataagtcttctagggttactgagagctgatgtacaacatttttacctctcctttctctgtgcatccttcctcctcctccaaaaaaacatatcaaagatgtccatgggggagccaaaaccgccacctgctccatcctctttaattgtctgttctcctcctttgtcatataattaattcccttttctttgcatcagagagaacttcatatgcttgagaaatctgtttaacttctccccttcatttggattcttatcaggatggtacctcaaggccagtttcctataagcctttttcaattcttcctgagtagcattgattgggtttgacccccaaaacatca

SEQ ID NO: 6947 - DNA, 574 bp, Homo sapiens
  MAP TO AC011859.4; EXPRESSED IN LUNG, SIGNAL =  10; EXPRESSED IN ADULT LIVER, SIGNAL = 9.3; EXPRESSED IN HEART, SIGNAL =  11; EXPRESSED IN BONE MARROW, SIGNAL = 9.1; EXPRESSED IN BRAIN, SIGNAL =  12; EXPRESSED IN FETAL LIVER, SIGNAL = 9.5; EXPRESSED IN HELA, SIGNAL =  11; EXPRESSED IN PLACENTA, SIGNAL = 8.8
tctcgctctcacatcactgcacttcaaaggtttttgggcattgttctggttaagctgggtctttccacaaagtgctgctcctgctctgctactctgcaatctttacggcaagggcattcttgcctgtgccctgtgaccctctccctgcatcaagtatcctagtccattaacagttttactgctacttagctttgatttgccactacaataaagaaggtatggcatttcattttcaaaaaactatctcggcctaagtcaccagaggactacaacccacttatatcagagtgtgtgtgtgtgtgtgtgtgtgtgtgtgtgtgcataacaatacaattatgtacagtacaaaatacatgataataaatgattgtgctactggtttacttatttactatactacttatcattagcatgtactctttctaataattaaaaaaaaaaagttaactgtaaaacagcctccagcaggcccttcaggaggtattccagaagaaggcattgttatcataggagatgacagctccatgcatggtatcattcttgaagaccttctagtgggacaagatgtggagtg

SEQ ID NO: 6948 - DNA, 595 bp, Homo sapiens
  MAP TO AC016706.2; EXPRESSED IN BONE MARROW, SIGNAL = 1.8; EXPRESSED IN ADULT LIVER, SIGNAL = 2.3; EXPRESSED IN FETAL LIVER, SIGNAL = 2.3; EXPRESSED IN BRAIN, SIGNAL =   2; EXPRESSED IN LUNG, SIGNAL = 2.1; EXPRESSED IN PLACENTA, SIGNAL = 2.4; EXPRESSED IN HEART, SIGNAL =   2
tggctcctgtcctctctgtcttcatcctcgactgctctgttaaacattcactgaatggggtttccgagtctaaaatcttttgattgcttttatttgtatcagattacctcttaaggcacttttagtactctctcttgcttgcactgacaagaggcagaacgtcaaatacatggtttgcagacactcaatgatgatcaaaccttctaggatgagaagtaaaatttcatggaagtcgtaggataacccatcattgtggaatttcactgacttgggttcaacattcaccagcagtgtgatcctgtgggagttatttaacctttctgatcctcagcgttctcatctgtaagtggggattatgatgttcatatgataggcctgttagaattacagcaaggtaacacatgcaatgtgtagggcatggattctgtcacatcatagacacaaagacaaggcgtattattgttaacttgctagagggaaatcccttaacactctgattcttaatttagtcacgttattgatgaccgaaatccatttgtactccttatgtacgcagaagctttcaaactttatttccagcagcagagctacactc

SEQ ID NO: 6949 - DNA, 590 bp, Homo sapiens
  MAP TO AC009943.4; EXPRESSED IN ADULT LIVER, SIGNAL = 2.3; EXPRESSED IN HEART, SIGNAL = 2.6; EXPRESSED IN BONE MARROW, SIGNAL = 2.8; EXPRESSED IN LUNG, SIGNAL = 2.5; EXPRESSED IN PLACENTA, SIGNAL = 2.6; EXPRESSED IN HELA, SIGNAL = 3.1; EXPRESSED IN FETAL LIVER, SIGNAL = 2.6; EXPRESSED IN BRAIN, SIGNAL = 2.1
aaggtattggcagtgttggctccttctgagggttgtaagggaactattgttccaggcctctctccttggcttgtaggtggctgtcttcttcctgtgtcttcacatcgtcttccccctgcacctgtctttgtccagactttctcttcttataaggcaccaatctattggattagggttcaccctaatggccttactttaatttaattatttccttaaagatcctatccacaaacagggttatattctgaggtactagggattacgacttcaacataggaattttttcaatgtacaaggaaatttagcccataacactatcaattaaaacctgagacaagatgacctggccaatgtgcagagcacattgagaaaagagagctctgaaaaaagccatattcagaagagttagaagaggacagaggctgagaaggagatagtttaaagagataatcagtgaagtaaaaaatggcagaacattcaatgaggatctatctggacttagtaaagcaaatgaacttgatgaagctatacgtggtgaccactgatagaacagagtttacagagtgggaaggagtggaaggctgaatgaa

SEQ ID NO: 6950 - DNA, 533 bp, Homo sapiens
  MAP TO AL158206.3; EXPRESSED IN LUNG, SIGNAL = 1.1; EXPRESSED IN ADULT LIVER, SIGNAL = 0.83; EXPRESSED IN HEART, SIGNAL = 1.4; EXPRESSED IN BRAIN, SIGNAL =   1; EXPRESSED IN BONE MARROW, SIGNAL =   1; EXPRESSED IN PLACENTA, SIGNAL = 1.3; EXPRESSED IN FETAL LIVER, SIGNAL = 1.2
tcatcttgcacacaaaacccatcaattttaagtttattcatatgaggattcccagcagctggcccagttaatgggccatgggagcattctgcagaatcctacagaactatctcttgagtctaattaatgtcttgaagtttattgggagagtggtgttatgaccagaaaatatatttttaacctgctcacaaaattgcttaaaacaatctagaattttcagacaaacaaggataaaagttgctattttaaaactgaagaaaacagaaatggtgtatcccactccttctctcccctcaactgcagctgccactcccaccagctcactcaaaacagctcacattctgccaggggtttccattatagggggagtccattgatgatgtgtacacagagggggagctgatggtccttgccctgcctcctgctgtttacatagcagccaccaatgccttagtcctggagctgtggctgccctgtcacttatctgagctggtggtcttccctgggaacatgcctcctttttcctcccagag

SEQ ID NO: 6951 - DNA, 548 bp, Homo sapiens
  MAP TO AL135923.11; EXPRESSED IN BONE MARROW, SIGNAL = 5.1; EXPRESSED IN ADULT LIVER, SIGNAL = 3.9; EXPRESSED IN HEART, SIGNAL = 4.8; EXPRESSED IN BRAIN, SIGNAL = 4.4; EXPRESSED IN LUNG, SIGNAL = 5.1; EXPRESSED IN PLACENTA, SIGNAL = 4.8; EXPRESSED IN FETAL LIVER, SIGNAL = 4.9
cacatgctcacaaacacacgcatgcatacctgtgcatatccacacacatgcaagctcactagatacaaatgaatatttactgaatgcccgttatgttgtaggttgatgctgaagtggtgaacttgactgacagtctttgtgctcacactgtttacagtctagtgtgacaataaataaataattaaatataatctttataggaaaagaaaaaaatagaattgagagacaatgacatttgctatttatagcgtcccattcagagaaaatagaacctgaaacatggaagaatttttgtttacttaccttaaagagagtacaatcatgcacttcctaatgatgtttcagtcaaagatggaccacacatcttatggtggtccataagattataatgctttatttttactgtaccttttccatatttgtatctacttagatacaaaaataattaacatcgtgtaaacgtttaaggcaaatgcaattgcctatggtattcaatacagtaacatgctatacaggtttgtagtttaggataagtaggctatgcccca

SEQ ID NO: 6952 - DNA, 567 bp, Homo sapiens
  MAP TO AC010160.6; EXPRESSED IN ADULT LIVER, SIGNAL = 1.9; EXPRESSED IN BRAIN, SIGNAL = 1.7; EXPRESSED IN LUNG, SIGNAL = 2.1; EXPRESSED IN PLACENTA, SIGNAL = 1.9; EXPRESSED IN BONE MARROW, SIGNAL = 1.8; EXPRESSED IN FETAL LIVER, SIGNAL = 1.7; EXPRESSED IN HEART, SIGNAL = 1.9
tggacacgtttccctctttcagttcccctccagcaagcccacccacagcccagggctcaagacagatggccaggagcagacccctggagactgcacagtcacattgatggtggatgcgcccatttccaagccctgaccaagcaccgggaacagcatctcaccccgttcttgccccaaccacaggctgccatcaggatccgtccccacagcgccgagcagcaagtagaggccaagatcaccttcatactttgtgtgaggccacatagccaggaagaggagaagctagaaaataatcctggtgtggctcacagcaaatctcaggtgaggccagatgccgagggaagtaggtttcctggcaaatacaagccacataagacaggagcagcacgtccaggaagcccgctgcacatgggcacaccacagacctggtacaactgccctggcaggtgatggctcatctcacagacgtcaccttgcaggagcttagcctcagagagctaggggaccacagcaagttcccgcagccaaggggcaggagggcctggaggccaggactagtgagcaagg

SEQ ID NO: 6953 - DNA, 529 bp, Homo sapiens
  MAP TO AC022050.2; EXPRESSED IN PLACENTA, SIGNAL = 1.4; EXPRESSED IN FETAL LIVER, SIGNAL = 1.2; EXPRESSED IN LUNG, SIGNAL = 1.2; EXPRESSED IN ADULT LIVER, SIGNAL = 1.4; EXPRESSED IN BRAIN, SIGNAL = 1.2; EXPRESSED IN BONE MARROW, SIGNAL = 1.3; EXPRESSED IN HEART, SIGNAL = 1.2
tcctctggtcaaatgatggactgagtttcaactaaattaattttgaaaaaaaaaaaaactatttcctgtcaattccatgttatatgcatcacatatggcttaactggcataatcctcaaatgtgctgcagattttattagcacaaactctgaagccaggtattaacaggttttaatagcttcacttgctctggaaatcttaggggatagtgtttgctttccttaagtttcaaatttattacccccagaaaagaagatgaggacagtaagtgcctcatggaattttgggaaaaattacggtgctgaaacctatagatatcttagtacagagcctgatttttatggtatgtgctcagtaaacactagttattatcattattattattatgaatctattattctgggttcttttcctattcaaacagtttcttttgttgtatttagatcctcacctcagagaataaattttaaaaacctttaatagcagaagaggagattaacatgtatagggagatgggaggaaagggaag

SEQ ID NO: 6954 - DNA, 514 bp, Homo sapiens
  MAP TO AC009695.4; EXPRESSED IN PLACENTA, SIGNAL = 1.5; EXPRESSED IN BONE MARROW, SIGNAL = 1.3; EXPRESSED IN ADULT LIVER, SIGNAL = 1.5; EXPRESSED IN HEART, SIGNAL = 1.7; EXPRESSED IN BRAIN, SIGNAL = 1.3; EXPRESSED IN LUNG, SIGNAL = 1.6; EXPRESSED IN FETAL LIVER, SIGNAL = 1.3
tggggaaggaggacatagtgagctttaaggtacaggcactaacctgtttcttaacctggatggaaacgttatgttctaccttctcctctccctcctcctccttctcctcctcctcctccttattctttaaattgtatggggggtcctctatactctgacatattttctaattttacaaaatatagcaattcatcatgacatacaatgccttagttcaggctgctattacaaaaatactctagacccagtggcttaaacaacagaaatttattctttagagtttttgaggctgagaagtccaaggtcgaggtgctgactgattcaattcctggtgagttgccctcttcctggcttgcagagggacaccttctttccttactctcacgtggcagaaagaggactcttgtcccttcagctccttataaggccaccagccccatcatggtggccctacattcataacctcatctaaccctcatcacctcccaaaggccccacctccaaatactctcgc

SEQ ID NO: 6955 - DNA, 577 bp, Homo sapiens
  MAP TO AC007981.43; EXPRESSED IN LUNG, SIGNAL = 1.7; EXPRESSED IN PLACENTA, SIGNAL = 2.8; EXPRESSED IN ADULT LIVER, SIGNAL =   1; EXPRESSED IN HELA, SIGNAL = 4.6; EXPRESSED IN HEART, SIGNAL = 2.9; EXPRESSED IN FETAL LIVER, SIGNAL = 3.8; EXPRESSED IN BRAIN, SIGNAL = 2.6; EXPRESSED IN BONE MARROW, SIGNAL =   3
agctttggctccaaggtctgctccccggtcagtgggatcctgttcaataatgaatggacgacttcagctctcccagcatcaccaatgagtttggggcacccccctcacctgccaatttcatccagccaggtatggggtggaggtccggggggtgggggactggggtggagaggggcgggtgtcctgggcaggcagctgacgggcatccctgtcttctcccatcggccgcagggaagcagccgctcttgtccatgtgcccgacgatcatggtgggccaggacggccaggtccggatggtggtgggagctgctgggggcacgcagatcaccacagacactgcactggtatgtgtcaccccttttctccctggccctgcccactctgcacagcccccaagccacgctgatcacactcccatgccccaggccatcatctacaacctctggttcggctatgacgtgaagagggccgtggaggagccccggctgcacaacaagcttctgcccaacgtcacgacagtggagagaaacattgaccaggtgggccgggggttggagaaactgagtcatggtgtggg

SEQ ID NO: 6956 - DNA, 544 bp, Homo sapiens
  MAP TO AC013291.4; EXPRESSED IN LUNG, SIGNAL =   2; EXPRESSED IN PLACENTA, SIGNAL = 2.1; EXPRESSED IN HELA, SIGNAL = 3.2; EXPRESSED IN HEART, SIGNAL = 2.6; EXPRESSED IN FETAL LIVER, SIGNAL = 2.5; EXPRESSED IN BONE MARROW, SIGNAL = 2.5; EXPRESSED IN ADULT LIVER, SIGNAL = 2.4; EXPRESSED IN BRAIN, SIGNAL = 2.3
aggacttcagcttcagcaggtagggaacgttgctttctaggaatgctactgacattttgattgacagagacattcactgtgcctcccctcttttccctaaaggagtttgtcaattttttcctcctccattataagaaggaagtttctgtttctgatcaaatggaatttgtcaatggatggtacattatgattattattagtgacatattgacaatcattggatcaattctaaaaatggaaatccaagctaaggtaatttttttcctaatcatgctattgttagtgtcagatttgcactaatggtaatgtatttttccagaatgtaagaattttcagaatgaattgtttcttccaaactgtatatcaagtagacttgaaattggtaatggtaattttcttaaatctagtcaggaggtctcttaggcagagtttttcaaagtgtgatccacaaaccattgcatcagaatcattgggtgcctggtaaagtgtaccatgttagacctactgaattcagactcttcggcggggcctgtgaattcttaca

SEQ ID NO: 6957 - DNA, 594 bp, Homo sapiens
  MAP TO AC021383.3; EXPRESSED IN LUNG, SIGNAL = 7.2; EXPRESSED IN BRAIN, SIGNAL = 8.9; EXPRESSED IN BONE MARROW, SIGNAL = 8.4; EXPRESSED IN HELA, SIGNAL = 7.1; EXPRESSED IN PLACENTA, SIGNAL = 8.1; EXPRESSED IN ADULT LIVER, SIGNAL = 9.9; EXPRESSED IN HEART, SIGNAL = 6.8; EXPRESSED IN FETAL LIVER, SIGNAL = 6.7
aagacaggtagctccacccctgtggctctgcagggctcacctcccatgactgctctcaagggcttgcaatgagtgcctgcagctttttcaggtgcactgtgcaagctgtcggtggatctaccattctggggcttggagaaccgtagccctattctcatagctccactaggcagtatccgagtggggactctgtgtgggacctctaacctcatatttcccctccacactgccctagtagaggttctccatgagggctctgcccctgcagcaggcttctgcctggaaatcctggtgcttccatatgtcctctgaaatctaggtggagcctcccaagaatttcttcttgccctctgcacacccacaggcttaacaccatgtggaggccacaaatgcttatggttttcaacctctagagcagcaacctgaaacatatccagggtctgtttagccacaactggagctggagcagctgagatgcagggagcagtgtcctgaggggaaggaaaatgcatggaagtggggccctgggtctggcccgtgaaacaatccttcccgcctaggccttgaggcctgtgatgggaaaggctggtatga

SEQ ID NO: 6958 - DNA, 569 bp, Homo sapiens
  MAP TO AL158012.2; EXPRESSED IN PLACENTA, SIGNAL = 1.2; EXPRESSED IN HEART, SIGNAL = 1.3; EXPRESSED IN FETAL LIVER, SIGNAL = 1.3; EXPRESSED IN BONE MARROW, SIGNAL = 1.1; EXPRESSED IN LUNG, SIGNAL = 1.1; EXPRESSED IN ADULT LIVER, SIGNAL = 1.3; EXPRESSED IN BRAIN, SIGNAL = 1.1
tgccaaactgttttccacagcagctgcaccattttacattcctaccagcagtgcacgaatgttcaaatttctccacttcctggccaacacttgttattttccatttttttggtagccatcctggtggttgtgttatttattgtggctttgatttggattttcctagtgactaatgatgccgagcatctttttgagcagcttttgataatgtcagcacatgatgctacagtgttagtgactaagattcattacattgtagaatatttgaaaagcagataagtcagcatttctggcttcatcctggtgtcctgtactctttgttgacctctcagcgagttatgtgaagttccagtcatgccatcaagagggatggggtcaaaggtgccaagaacacgctgggaaacagacattctcttcaataaatggtgcttggaaaactggatacccatacgcagaagaatgaaagttgacccctgtctctaaaattcaaaatggcttaaagacttaaatctaggaccttaaactgtgaaactactacaagaaaacatgggggaaagtctccaggacat

SEQ ID NO: 6959 - DNA, 511 bp, Homo sapiens
  MAP TO AL133259.21; EXPRESSED IN LUNG, SIGNAL = 3.6; EXPRESSED IN HEART, SIGNAL = 3.2; EXPRESSED IN FETAL LIVER, SIGNAL = 3.3; EXPRESSED IN PLACENTA, SIGNAL = 3.4; EXPRESSED IN ADULT LIVER, SIGNAL = 3.2; EXPRESSED IN BRAIN, SIGNAL = 3.4; EXPRESSED IN BONE MARROW, SIGNAL = 3.2
aaattgtttgtcccttcccctgagccctcttagtactcccagcctgcccacaaccataacactagaaccaaattaaaggccacgtgcaaggttcactctccaacattgcagcctgactttgcatttaaggctgacacagtgaaggtagctccgtcttcagtcgtaaccttggtcagatttgtacagcatcagttggaacaggaagagaaagagcaatagaaatacaactgccaacttggtgtggctgctgcagggtacttcaagaccctcctctttctggctgctttctgccccatttcatttgacgccctatctttgcctggcccacgtggataacaacccagtactggactgttttccttgctagaacccggtagtcacttcggattttgcttcaattgctgcccctctgcagcaacattcctccccacaccctgccagccacttctccccagcctccccactttctgcacacaccccagtgttctacgcagccttggaaatagccttg

SEQ ID NO: 6960 - DNA, 507 bp, Homo sapiens; identical to SEQ ID NO: 6668
  MAP TO AF241728.1; EXPRESSED IN LUNG, SIGNAL = 1.2; EXPRESSED IN FETAL LIVER, SIGNAL =   1; EXPRESSED IN BONE MARROW, SIGNAL = 1.1; EXPRESSED IN PLACENTA, SIGNAL = 1.3; EXPRESSED IN ADULT LIVER, SIGNAL = 2.2; EXPRESSED IN HEART, SIGNAL = 1.3; EXPRESSED IN BRAIN, SIGNAL =   1

SEQ ID NO: 6961 - DNA, 550 bp, Homo sapiens
  MAP TO AC013550.4; EXPRESSED IN PLACENTA, SIGNAL = 1.6; EXPRESSED IN ADULT LIVER, SIGNAL =   2; EXPRESSED IN HEART, SIGNAL = 5.6; EXPRESSED IN BRAIN, SIGNAL = 1.9; EXPRESSED IN BONE MARROW, SIGNAL = 1.9; EXPRESSED IN LUNG, SIGNAL = 1.9; EXPRESSED IN FETAL LIVER, SIGNAL = 1.8
aggaacaaatgcagccactcttgattactcctgctagtgggaatataaataacttgggaaaacgaaatccagtgagctcagaagctttcttcccccatttatttcaacctttccaccctgcaagcatttgacaagcaccactaacaagcagcaaaacggactggctgattccatcttctctccatcctttccagcgtacggctcaggtgcggaggacatgaaccgactggctgattccatcttctctccaacctttccagcgtacggctcaggtgcggaggacatgaaccgactggctgattccatcttctccccatcctttccagcgtatggctcaggtgcacaggacatgaacggactggctgattccatcttctctccatcctttccagcgtctggctcaggtgcagaggacatgaacggactggctgattccatcttctctccatcctttccagcgtctagctcaggtgcagaagacatgaacggactggctgattccatcttctctcatcctttccagcgtctggctcaggtgcagaggacatga

SEQ ID NO: 6962 - DNA, 541 bp, Homo sapiens
  MAP TO AC009046.4; EXPRESSED IN LUNG, SIGNAL = 5.8; EXPRESSED IN PLACENTA, SIGNAL =  12; EXPRESSED IN ADULT LIVER, SIGNAL = 2.2; EXPRESSED IN HELA, SIGNAL =  17; EXPRESSED IN FETAL LIVER, SIGNAL =  11; EXPRESSED IN BRAIN, SIGNAL = 9.8; EXPRESSED IN BONE MARROW, SIGNAL =  11; EXPRESSED IN HEART, SIGNAL =  10
tagcaaaatcgagcctcctgtgatcattttcctttttcattttcctggatatgaggatgatctggctgtgacatctgtcgtgttagcgatggccagggttgatttggctgagatggctggtaaggcagctgttccctcttccttcctcactgctccctgtgaccctgattcactccattttatatcatacaatattttacctactacacatattattgtagttttaggtaagcttgacataatgtactgttatatttcaccaaaggtacagattttaagaaaaagcaagttttgccttgcagctatatttcattgttaggcacatccaacattaagttgaggcttatgaacatggcaaacaaatgtcttcctactcagtacttgctgatctttccacttttgtctgtctttactgcttgatatagcttggctctatttcccccacccaaatctcaccttgaattgtaataactcccacgtgtcaaggacaggaccaggtggagataattgaaccatgggggcggttgtccccatactgttc

SEQ ID NO: 6963 - DNA, 558 bp, Homo sapiens
  MAP TO AL133260.7; EXPRESSED IN LUNG, SIGNAL = 2.5; EXPRESSED IN PLACENTA, SIGNAL = 3.5; EXPRESSED IN ADULT LIVER, SIGNAL = 5.2; EXPRESSED IN HELA, SIGNAL =  10; EXPRESSED IN FETAL LIVER, SIGNAL =  12; EXPRESSED IN BRAIN, SIGNAL = 7.2; EXPRESSED IN HEART, SIGNAL = 6.2; EXPRESSED IN BONE MARROW, SIGNAL =  12
cagaaaatgtgcacacgagctgtctactcattttcttcgctgcacagcctggcactggggttggtgactgtgatggccagttgggcagctctttccacgatggctttgcggttcttggaggaaacattgtgagcgatctcggcacaagtacgattgttgcacatcagcagcacttccagctccttgacgttgtggaccaggaacttccggaagccactgggcagcatgtgctttgtttttttgttgctcccataaccagtgttgggcatcaagatctggaccctgaatcttctacgaaccctgttgtcaatgcctctgggtttccaccagttacgcttaattttgacataatggtctgactggtgccggatgaacttcttggttctctttttgacgatcttgggcttcacaaggggtctgagggcggccaagatgccgaggaggagatggctgccacctccataggcagcgccgaggaagagagaagggcaaaaaaaaaaaaagaaaatatttcagagacacggccagcctcactgtagtggctctggtatcccttga

SEQ ID NO: 6964 - DNA, 594 bp, Homo sapiens
  MAP TO AP000230.2; EXPRESSED IN PLACENTA, SIGNAL = 4.3; EXPRESSED IN ADULT LIVER, SIGNAL = 4.2; EXPRESSED IN HEART, SIGNAL = 3.8; EXPRESSED IN BONE MARROW, SIGNAL = 3.8; EXPRESSED IN LUNG, SIGNAL = 3.7; EXPRESSED IN FETAL LIVER, SIGNAL = 2.9; EXPRESSED IN BRAIN, SIGNAL =   4
gcaggcctaggaggaaaaagtgatctcttgggccaggcccagggtccccatgctgtgtgcagcctggggacttggtgccttgtgtcccagctgctccagccatggctgaaaggggccaacatagagctcggattgtggcttcagagggtgcaagctgtaagccttggcagcttccatgtggtgttgagcctgccagtgcacagaagtcaaaaattggggtttgggaacctctgcctagatttcagaagatgtatggaaatgcctggatgccctggcagaagtctgctgtaggggaggggccctcatggagaatctctgctagggcagtacagaagggaaatgtgggatcggagccccagcacagaatccctactggggcaccgcctagtggagctgtgagaagagggccaccatcctccagaccccagaatgatagatccactgacagcttgctccatgcacctggaaaaaccgcagacaacaccagcccatgaaagcagctaggcaggaggctgtaccctgcaaagccacaggggcggagctgcccaagatcatgggaacccacctcttgcatcagcatgacctggatgtgag

SEQ ID NO: 6965 - DNA, 591 bp, Homo sapiens
  MAP TO AC008597.3; EXPRESSED IN BONE MARROW, SIGNAL = 6.2; EXPRESSED IN ADULT LIVER, SIGNAL = 4.2; EXPRESSED IN HELA, SIGNAL = 4.4; EXPRESSED IN HEART, SIGNAL = 7.2; EXPRESSED IN LUNG, SIGNAL =   6; EXPRESSED IN PLACENTA, SIGNAL = 5.5; EXPRESSED IN FETAL LIVER, SIGNAL = 5.5; EXPRESSED IN BRAIN, SIGNAL = 5.5
ttgactgctttggcagaatgtttgaaagttcgagtgtggttacctgtactttctagtgggattatttgaaatgtttaaggtggaaataattgggatctgaatagcagttggagagccttaagaaaagtgaaagaactgctatttcatagttaagaaaggatttttgaagctcctcttctctctgcctttcagattctggtatgaatggattaaaatgaatgctttgtaatccaaacttggacacctttacatgttagaactctttcagtaattggattttgtttttgaaaccttgacaggaattgttgaacctatcttggttaactagttatgccttttggtggtaacttcttttattttttcttttatttacttttcagtctattcttattctgagaaggaacttatatgccacaatcagttctctctctttcttgttggctctggaggctttggtggaaaacggacatcagacaaagtcaaggtaagccatgactttgtaagcaaaatatatgtgtagttaaggattcttacctatacaattgagacttgaacagcatgagtttgaactgcatgagcccacttataggc

SEQ ID NO: 6966 - DNA, 542 bp, Homo sapiens
  MAP TO AP001412.1; EXPRESSED IN LUNG, SIGNAL =   5; EXPRESSED IN ADULT LIVER, SIGNAL = 5.9; EXPRESSED IN HELA, SIGNAL = 6.7; EXPRESSED IN FETAL LIVER, SIGNAL = 5.6; EXPRESSED IN BRAIN, SIGNAL = 4.7; EXPRESSED IN BONE MARROW, SIGNAL =   7; EXPRESSED IN PLACENTA, SIGNAL = 4.7; EXPRESSED IN HEART, SIGNAL = 3.5
ccacgtccccatcagattagttagatacagagtatggacacaaaggttcttcaaggccccaccagagcagctagatacagagtgtcgattggtgcactcacaaaccctgagctagacacagggtgctgattggtgtgtttacaaaccttgagctagatacagagtgctgattggtgtatttacaatccctgagctagacataaagattctccacgtccccaccagactcaggagcctagctggcttcacccagtggatcccacaccggggctgcagctggagctgcctgccagtctcgcgccatgcactcgcactcctcaggccttgggtggtcgataggactggccgtggtggagcagggggcggcgctcgtcggggaggctcgggctgcacaggaacccacggaggcggggtaaggctcaggcatggcgggttgcagtcccgaggcctgccccgcgggaaggcagctaaggcccggcgagaaatcgagcgcagcaccggtgggctggcactgctgggggacccagtacacccttcacagc

SEQ ID NO: 6967 - DNA, 543 bp, Homo sapiens
  MAP TO AC009635.4; EXPRESSED IN ADULT LIVER, SIGNAL = 2.2; EXPRESSED IN LUNG, SIGNAL =   2; EXPRESSED IN BONE MARROW, SIGNAL = 2.4; EXPRESSED IN BRAIN, SIGNAL = 2.3; EXPRESSED IN FETAL LIVER, SIGNAL = 2.2; EXPRESSED IN HEART, SIGNAL =   2; EXPRESSED IN HELA, SIGNAL = 2.7; EXPRESSED IN PLACENTA, SIGNAL = 1.8
aggatatgggatttgggaggagccaggggcagaataatatggtttggttgtgtccccacccaaatctcatgttgaattcccacatgttgtatgagggacctggtggtagataattgaatcatggggtatgtctttcccatgctgttctcatgattgtgagtaagtctcacaagatctgatggttttaagaaagggtgtttccctgtgcaaggtctcttcccttgtctgccacaatgtgagacatgcttttcaccttctaccatgattgtgaagcctccccagccatgtggaattgtaagtcaaataaacctctttcttttgtaagttgcccagtcttgagaatgtctttatcggcagcatgaaaagggactaataaagtgtgtgattccttttagtattttcatttgcagaatttcattctctaggacttgggtatgaattcttacactctagtccagaagacaaatcttaatagcaaagacaatgtccactctgacaactggagcactgtaattatattgagcaatggttgtgtgctctcca

SEQ ID NO: 6968 - DNA, 583 bp, Homo sapiens
  MAP TO AL157396.2; EXPRESSED IN PLACENTA, SIGNAL = 2.9; EXPRESSED IN HEART, SIGNAL = 3.9; EXPRESSED IN LUNG, SIGNAL = 2.5; EXPRESSED IN ADULT LIVER, SIGNAL = 1.3; EXPRESSED IN FETAL LIVER, SIGNAL = 2.7; EXPRESSED IN BRAIN, SIGNAL = 2.7; EXPRESSED IN BONE MARROW, SIGNAL = 2.9
cctccttcctgttccctctcattcttattcttattcttacgcccagccccctgcctaatttttaggtcctgcttgactatactggtgttggtaacacctctctcttctattcatggtgcatggtacactttaaaaagcaataattcagccagttttattgtctgaagctgattattagtatgtttttcttaaattaaaagaaggaatggggtggttgatgatggaagggagatggatagaaaagcgtgcagattgttgcctccaaaccaatttttctttcactgaagagaattagaatcaccttttatccgtttcagactctcacacaatttcttggatggtctcttttaaatactgacacctacgataagatgaataagctagaaaacagaaaggacattgctcaggaaatgctcatgaaccaaaccaaagccactcctgaagaaattaagtccattttggtaagtgggaaattcagtcctgtggacataagatgttacctaaccacatattctagaagtcatctaattacccaggggtctgacaaatgcaaatggtttactcctgggctgagagagagaga

SEQ ID NO: 6969 - DNA, 526 bp, Homo sapiens
  MAP TO AC013317.4; EXPRESSED IN PLACENTA, SIGNAL = 3.7; EXPRESSED IN ADULT LIVER, SIGNAL = 0.84; EXPRESSED IN HELA, SIGNAL = 6.5; EXPRESSED IN FETAL LIVER, SIGNAL =   4; EXPRESSED IN BRAIN, SIGNAL = 5.8; EXPRESSED IN BONE MARROW, SIGNAL = 4.8; EXPRESSED IN LUNG, SIGNAL = 2.4; EXPRESSED IN HEART, SIGNAL = 4.3
tttggaactgggtaacaggcagaaagtagaacagtttgcagaggctcaaaagaagacaggaaaatgtgggaaagtttagaacttcctagagacttggggggctcaggagataggaagatgtaggaaagtttagaacttcctagacatttgttgaatggctttgaccaaaatgttgatagtgatatggacaatgaagtccaggctgaggtggtctcagatggacatgaggaatttgttgggaacaagagcaaaggtcactcttgttatgctttagcaaacagactagcggcattttgctcctgccctagaaatctatggaactttgaaattgagagagatgatttagggcatctgatggaagaaatttctaagcagcaaagcattcaagaggtgtgaagagcacgaaaatggaaaatttacagccttattcagtagaaaagaaaaacccattttctggggagaaattcagttggctgcaaaaatttgtatatctaatgagccaaatgctaatcgccaagacaatggg

SEQ ID NO: 6970 - DNA, 503 bp, Homo sapiens
  MAP TO AC022714.2; EXPRESSED IN PLACENTA, SIGNAL = 4.9; EXPRESSED IN ADULT LIVER, SIGNAL = 5.5; EXPRESSED IN HEART, SIGNAL =   5; EXPRESSED IN FETAL LIVER, SIGNAL =   5; EXPRESSED IN LUNG, SIGNAL = 5.3; EXPRESSED IN HELA, SIGNAL = 4.9; EXPRESSED IN BRAIN, SIGNAL = 5.3; EXPRESSED IN BONE MARROW, SIGNAL = 5.2
gggtaagttagggcctccagcttcagagacaagaggggtaggatgaacattccaagggatgtccagttgtatccatcagtgatatgaaggaaaagggtcaagtgcttcaagggaccaccagaaagtactgtaactataaggccactaccatgtactgctgatgaagttcatacagctccataggtagcacataagaagtttcatcagtagccaagatgataatcaatagcatctagcagaaaagcattgccaaataaacccaaggaggcacctagacaggatccagcacatcctcatcaacaaattttcccactatcatccttttaatttcctatccttaagcctgcgctggttgcagtatgtttatttattctgatcacatttatatttagatatttgtattaattatgcaagtgtttcagtatttcttggggtgctctgtcattttgctttagatagcaatgaaaacattattcgagtggtcaatttcacatggcaacacc

SEQ ID NO: 6971 - DNA, 600 bp, Homo sapiens
  MAP TO AC023602.5; EXPRESSED IN LUNG, SIGNAL = 1.4; EXPRESSED IN PLACENTA, SIGNAL = 1.1; EXPRESSED IN ADULT LIVER, SIGNAL = 1.3; EXPRESSED IN HEART, SIGNAL = 1.2; EXPRESSED IN FETAL LIVER, SIGNAL = 1.1; EXPRESSED IN BRAIN, SIGNAL = 1.2; EXPRESSED IN BONE MARROW, SIGNAL = 1.1
gcctcaaacacgttgtcctcagttactagcatgcacacaaatctcttttcatcactgatccttgcattactgatagacaaagtgtagttttctgagaggttcaatctgtctttgtattctggtacatcgtcgtactgcacacttttctttgtagaggatctgaaggcaataaatactggggagccatcgggcttttcctaaaaattaaaataataatacatttaaacacaagcatattcagatgtttcaggattacattcaaaataacatttccttggccatattctaccaatatctatattttttgtctacgaagaataatttttatacaagtctcacgtaaatatttgattacagaaaatccttcataagagagaagccataatgagtaaaaatgaaagggtagagctctaggaatcagatttttttttcattgagaagatagaattattaactgttttgaaacttacatgggctgcatatgtttaatataaaataaaacataaataaatgcaaacaaaggtacaaaatgatgttcagataaccatcacggcaggtatacacttgagctgcaaatactggtttggatattttgggcaa

SEQ ID NO: 6972 - DNA, 596 bp, Homo sapiens
  MAP TO AC018583.3; EXPRESSED IN LUNG, SIGNAL = 1.9; EXPRESSED IN PLACENTA, SIGNAL = 1.7; EXPRESSED IN ADULT LIVER, SIGNAL = 2.2; EXPRESSED IN BRAIN, SIGNAL = 1.5; EXPRESSED IN HEART, SIGNAL = 1.6; EXPRESSED IN HELA, SIGNAL =   3; EXPRESSED IN FETAL LIVER, SIGNAL = 1.8; EXPRESSED IN BONE MARROW, SIGNAL = 1.6
acccctctcctttcctcctccgagggggacttcacttcattattcgtgttagctacacataatggcatcttggaaatacatgtaataatcctcaaatgacatcagttttttctcagtctctcttctaaggaggtgacaaaatagtttcttctataaaagatggaaatgttaaaagaaataacatgtgtgagcaagaagaggtgtcatctgacacctgcttcagtgctgcagtaatttttgatgtgtgctacatatgtccaggttgggaaatgccagaaggaaaggaaaatggccaaaagtatattaaaatagaattaggaaaaataataaggtagtgacaaaaatttgcattctttcttacacatagaagtatacttcagaaaaagggtaagaatattgaatatgtataataagtaattttttaaaaagctgataatgcattatttatcttctcacctttacagtagttcctgctgtactgacttcccgagggaaatttctttggcagtttgcctttagctaaacctttagggatagactgaactgaagggatagacagcttcaagtgggtcattacgtgccaatctttgattcaa

SEQ ID NO: 6973 - DNA, 583 bp, Homo sapiens
  MAP TO AL157396.2; EXPRESSED IN LUNG, SIGNAL = 3.4; EXPRESSED IN ADULT LIVER, SIGNAL = 3.8; EXPRESSED IN HELA, SIGNAL =   3; EXPRESSED IN FETAL LIVER, SIGNAL = 3.4; EXPRESSED IN BRAIN, SIGNAL = 3.4; EXPRESSED IN PLACENTA, SIGNAL = 2.2; EXPRESSED IN HEART, SIGNAL = 3.4; EXPRESSED IN BONE MARROW, SIGNAL = 3.3
atttgttgtctctgggtggctttgtcagaataggtcagcatggaatgactaatgctgccttccttttacctggcttcttcgggattcaatattgtacatgtagctggtgtgatgaagccttaggatgatagacacaaagttgaggtatttggaaaagacctacagacggcagagaataacaagttatggttgtgacatcttttctttggttatacaacaaataaatttcctgagcctccaaccagatgcccagggttagcattacctcttcatcctgtttggaaaattcagatgcatttactttgttaactgccatgatcacagcaagaacctccttgcccaccacgatcggggttgccagcaggttcttagtgacatacccagtttgcttgtccatgaagtcagaaaaatggctgttctgaaagagacagtcacatatttgtcaaagtggcacaaaatcatagagtggtagatctagggatgatgacagatcattctctctcatttaaatgctaccaacagataaccagggctccagtacagtggtccccagtaaacaatcccactccacctgccatcctat

SEQ ID NO: 6974 - DNA, 514 bp, Homo sapiens
  MAP TO AL133173.13; EXPRESSED IN LUNG, SIGNAL = 1.2; EXPRESSED IN ADULT LIVER, SIGNAL = 1.2; EXPRESSED IN HEART, SIGNAL = 1.2; EXPRESSED IN BRAIN, SIGNAL = 0.99; EXPRESSED IN FETAL LIVER, SIGNAL =   1; EXPRESSED IN PLACENTA, SIGNAL = 1.5; EXPRESSED IN BONE MARROW, SIGNAL = 0.99
aaggcaagatcttccaggtggccaaggacgcaggcattgccctgctctccatcaccctccagccctccctgtggtaggtgccctgtctccctgcctggggtcagtgggagtggctgcctgaggggaggaggtggcctgttgggccaggcggcagcagcaggcggctgtcatcatcagccctcgtgccgtgcccctgaccctgtccctctcctggccagggagtaccacacacacttgctacagttcgatggggagggtggctggaagttcgagaagctggactcagctgcccacctgagcctgacagaggagaagcagcggctggagcagcagctggcgggcattcccaagatgcagcggcacctccaggagctctgccaaatcctgggcgaggccgtggccccagcgcacgtgccggcacctagcctgcaaggccctggtggactccagggtgcctccacctgaccccaccctctccagccccttccccgcccccaagctcgaatcacatgaa

SEQ ID NO: 6975 - DNA, 543 bp, Homo sapiens
  MAP TO AL161788.2; EXPRESSED IN PLACENTA, SIGNAL = 2.3; EXPRESSED IN ADULT LIVER, SIGNAL = 2.2; EXPRESSED IN HEART, SIGNAL = 1.8; EXPRESSED IN FETAL LIVER, SIGNAL = 1.8; EXPRESSED IN BRAIN, SIGNAL = 1.9; EXPRESSED IN BONE MARROW, SIGNAL = 1.9; EXPRESSED IN LUNG, SIGNAL =   2; EXPRESSED IN HELA, SIGNAL = 2.7
aacatgctgtctatggtgcgcaggcagtttgtgctgaggggtgcctacaggcccgcaccaagccaacctcagaccccctttagcctccctcccatgctcataggcacccaaaatccagggggagctgacgcgtcaggggctggcacgtcaacaccaccccgaatgcatgcacacctggcctggtcacgatggcacctggactcagccacaaccttgttctgccctggagtgggtgctgggagagggagagccagggagcaggagcagacactttcaagcttgtggggcaaggggcttcccaggcccctgagagcactggtatactgggatctggagccacagctgggtggcagtggctgagcctgggagcatgggcgcctgccccaccaactcagtaagggggcggggctcttgcttgttcatggctctctgaccaagaacatccctggggagaatgcagccctggtcgtccctctcctgctgcagctcgtatccttgaagcagctgctccagatgggccatcgctgccgtcactttcatatg

SEQ ID NO: 6976 - DNA, 576 bp, Homo sapiens
  MAP TO AL138796.2; EXPRESSED IN ADULT LIVER, SIGNAL = 0.63; EXPRESSED IN HEART, SIGNAL = 3.3; EXPRESSED IN BRAIN, SIGNAL = 0.73; EXPRESSED IN PLACENTA, SIGNAL = 0.67; EXPRESSED IN BONE MARROW, SIGNAL = 0.5
tccctgggaagaatgtcctacctgatgtgggacactgaggagaatcctgcttcctcaatttgagcctttagctccttcagttcctcctcagctttcctcttctcttctaagtgctggtggaactcagccctcaggtggagcatttcttcctgaagacacctgttactgtcccctcccatcggagaaggaggggaaaaagatgggttctgggtctccacagttgccagacttttctccaaagccaccttgacaagctaaaagaaaatcatggtttgaagaagttaggccattaaagaggacccaagagaaacatgagattgcaaaggcagttttaaatgagaacaaaaacaaacaaaaaaagcagatctaaaataaactccctaaccagaacctccttagtcaggcataagggccctggggactggtttgggtgggaaggacacacaaaatgagcaggaggaatttccccatggagaagaggagaatccagagatggtgagggagaaaagcacataagaaattaaaacaaatgcaaacaaacgaggttgaaacaggactggagggtgtgaatacggt

SEQ ID NO: 6977 - DNA, 589 bp, Homo sapiens
  MAP TO AC013644.3; EXPRESSED IN LUNG, SIGNAL = 5.6; EXPRESSED IN BONE MARROW, SIGNAL =  22; EXPRESSED IN HELA, SIGNAL =  21; EXPRESSED IN HEART, SIGNAL =   5; EXPRESSED IN PLACENTA, SIGNAL = 3.5; EXPRESSED IN ADULT LIVER, SIGNAL = 5.6; EXPRESSED IN FETAL LIVER, SIGNAL =  21; EXPRESSED IN BRAIN, SIGNAL = 8.4
atttctagtcttggccgcagaagcgagatgatgaagggaacgtcatcatttggaaagcattgcaataagacgtacacgttatgccaccactgtggctctaaggcctaccaccttcagaagtcgacctatggcaaatgtggctacactgccaagcgcaagagaaagtataactggagtaccaaggctaaaagacgaaataccaccagaactggtcaaatgaggcacctaaaaattgtataccatagattcaggcatggattccgtgaaggaacaacacctaaacccaagagggcagctgttgcagcatccagttcatcttaatgtcaacgattagtcatgcaataaatgttctggttttaaaaaatacaaaataaataaataaataaataaaaaataaattaaaaaagacagccctacaggccaattttttgtggactcctgttctaaaataatcacaatctgtgtactaagacaaaaatgcctagcaaatgcacatcattaagtgtatttaatccttgctctatctcgtgatcctaccaaaatgtatttctatttaactagtcagaaaaggaaaagaggcaatcatgga

SEQ ID NO: 6978 - DNA, 539 bp, Homo sapiens
  MAP TO AL109824.21; EXPRESSED IN PLACENTA, SIGNAL =   1; EXPRESSED IN FETAL LIVER, SIGNAL = 1.1; EXPRESSED IN BONE MARROW, SIGNAL = 1.1; EXPRESSED IN LUNG, SIGNAL = 0.83; EXPRESSED IN ADULT LIVER, SIGNAL = 0.96; EXPRESSED IN HEART, SIGNAL = 1.4; EXPRESSED IN BRAIN, SIGNAL =   1
aggatgtgcatgcagttgtctaagatctctaggggtctgtactagaaatagaaatacaaatttacaagtcatctgtgaaaggctgttactaaagaagaggggcatgactgagatccattagggagaaaatacgaatttgaagagaaaaggtgactcaggatcaaagtctgaggaaggtcaccatctaatggctgggaagggagactgaggaggagcagctggagaggtggtagcagaagacaacagagagttcttggtcacagaacccaagggaaaagttaatttaaaaaggagatagtagtcaacagagaacactcacagggtaaggttcttaagaaggtcagaggagatgggatcaaaggcatagatggagaaactggccttagacttgaggaaggacagctgctctattatagaaagcacaaaggaggatactggtagatttatttcttggtagtgggaagctgagggaattctattttctctgtgaagaggtcagggtctctaccaagagagagggggagaaagtgtggaccaga

SEQ ID NO: 6979 - DNA, 572 bp, Homo sapiens
  MAP TO AP001439.1; EXPRESSED IN PLACENTA, SIGNAL = 1.4; EXPRESSED IN FETAL LIVER, SIGNAL = 1.1; EXPRESSED IN BONE MARROW, SIGNAL = 1.2; EXPRESSED IN LUNG, SIGNAL = 1.3; EXPRESSED IN ADULT LIVER, SIGNAL = 1.4; EXPRESSED IN HEART, SIGNAL = 1.4; EXPRESSED IN BRAIN, SIGNAL = 1.6
ccagtgatgggcagtttttcacatagtaacattcttttaatctttttttctttttaatgagtagacataaagaaatgcttaaataaataattatcaactaacttacctacatttaactacacatacctaacagacctgaatataggcagaggatgtgacattttacttacccttttattaaagttactgcttcatttattggtctttacttcactagtgcatccataaaatgtttacatttttttaaacaataaaatactcttgaaattagtccttctctgtaatcactacataaaactgctttagagacagccttcagatcaactaaattatattttacaaaatggcttaggtatttcagtagtaactctatggaacaacagaattcactgtttaaccagggaccaatattggcagctggcttccataacttgtttgaggaatgtagtaattccaaggttgctgcaaggactaatgtacaggaatattcctgtattttatggaataaaaaggaagaacgagaggagaaagaaatagatagtacataccaaccccagaggtagggagtatga

SEQ ID NO: 6980 - DNA, 528 bp, Homo sapiens
  MAP TO AC015842.4; EXPRESSED IN ADULT LIVER, SIGNAL = 3.2; EXPRESSED IN HELA, SIGNAL = 3.6; EXPRESSED IN FETAL LIVER, SIGNAL = 2.3; EXPRESSED IN BRAIN, SIGNAL =   2; EXPRESSED IN BONE MARROW, SIGNAL =   2; EXPRESSED IN LUNG, SIGNAL =   2; EXPRESSED IN PLACENTA, SIGNAL =   2; EXPRESSED IN HEART, SIGNAL = 3.1
ccctcaccacactcataggccccttactctcctacctgaggatgcccaacttcaaacaatgctcacctcctggttggctgttgcaagaggctcctaagggtgtcccagccttttttatccaccacatcgtatataactattaagtgatcatcataaaatgcaaatatgatcatgcctctctcctccttaataatcattaatgctccttctgtcctcagaaacactattatctacagaatatagaatggtgtgatctggtgtctaattttccaggctcatctcttacaattcggtagcacaaaatctatccttaaagcccataaagttgattttttttaaatccctgaattagaactgcatgctgcttaatgattctgggtctcttcatatactcttctctcctcgtggatcttctcttctcatctgacacattaatgcctatttatccttcaagcatcaggtcaaatattactgtaaatgaagcttgccctaacttccataggaaaagccaatcactgccttctgtca

SEQ ID NO: 6981 - DNA, 505 bp, Homo sapiens
  MAP TO AC015897.3; EXPRESSED IN PLACENTA, SIGNAL =  23; EXPRESSED IN ADULT LIVER, SIGNAL =  21; EXPRESSED IN HEART, SIGNAL =  19; EXPRESSED IN BRAIN, SIGNAL =  19; EXPRESSED IN BONE MARROW, SIGNAL =  23; EXPRESSED IN LUNG, SIGNAL =  24; EXPRESSED IN HELA, SIGNAL =  15; EXPRESSED IN FETAL LIVER, SIGNAL =  18
gggaaattgaggagagagggtgtagccattaccagtaggatttgaataccttattttttcctagttttgttttgcttgcagttactcaagcatgcagactgaagagctccccctgatcaatttgcttccatatttcaagagccacaggggcaaagatgagccatttgacatgtgcaatcccttcactgggtatcagctcaagactcagctgcagcaataacagactgtggtccaagactgtcagctcaattagcaccatatgcaaaacatgatggagaagcaaagttcctctctctccttggacatcctacttttgtgaggctaactagaaataaaaagagcaggggttgcacatttctcctcaggccagagatccaaggcggcacagcagctgacccagtgccagggtgctaattaaattaggcttcttgaattaaaacactgccacgggggccaggccctgctgatgaggacatgtctccaaagcactcccagcctagcttta

SEQ ID NO: 6982 - DNA, 551 bp, Homo sapiens
  MAP TO AC022638.3; EXPRESSED IN PLACENTA, SIGNAL = 2.1; EXPRESSED IN ADULT LIVER, SIGNAL = 2.3; EXPRESSED IN HEART, SIGNAL = 2.3; EXPRESSED IN FETAL LIVER, SIGNAL = 1.8; EXPRESSED IN BONE MARROW, SIGNAL = 1.9; EXPRESSED IN LUNG, SIGNAL =   2; EXPRESSED IN BRAIN, SIGNAL =   2
caaagctgaaggcatcacactgtctgactttaaagtacagtaggtccttgaataacatcatttcatttaatgttattgcattataatgttaatgaggaaaaaatctatatttccagctgatgccagaactctacacggtttatgtaaactttacatgttctctttatgtctgcatgagttttctcaaggtacactagtctcctcccatatccccaaaatgtgcatgttaggttaattggcatatctaaattgtgccattatgagtaattatgggcttgtgaatacacgctgtgatggaatggtgtccggttcagggatggtttctgccttggccctgagcttccaagacagggtttggccacctgtgaccctgaatgggaataagcaggttagaaaatgaataagtgaataaataaaaattattgtaaaataaaatccgtaaagcatacagtcatcatccaactgcatgacaataaatgatgtggcatgaaaggactcagtgatcttgccatatttgctattattcgttttcaaactgtgatgggaggagg

SEQ ID NO: 6983 - DNA, 576 bp, Homo sapiens
  MAP TO AC015873.2; EXPRESSED IN PLACENTA, SIGNAL = 5.6; EXPRESSED IN ADULT LIVER, SIGNAL = 1.7; EXPRESSED IN HELA, SIGNAL = 8.1; EXPRESSED IN FETAL LIVER, SIGNAL = 4.6; EXPRESSED IN BRAIN, SIGNAL = 4.8; EXPRESSED IN BONE MARROW, SIGNAL = 5.3; EXPRESSED IN LUNG, SIGNAL = 3.7; EXPRESSED IN HEART, SIGNAL = 5.4
ccgtcaggagaagaaaccagatctatgaaagttcattagaaatgtgaagggtcctaaaaagctctttccagatcttccatttggaaacatggacagtgacagagtagaagcctgtaagagcctcctataataattcctgaagcaactgtatgccattccagcgattgctaacaacagtgaggaggtgcaggagtttcttgctgtgaacacagatgctcgcatttcctttgtcaagaaaccatttatggtctctagaatagagaagatggtgttgagtgccattgtggacaccttgaagacagcgtttccttgctctgaatcccagagccccacagagaagctgagtgaggccgagactgaaagcaagtcccatatagaaggcaagaaggctagcaagtccaggctgaggttcttacccagtaaaatatctccagcactaagtgtgactgaagcacaagacaagattctttattgtctccaggaaggcaatgtggagtccaagaccctatccatgtctgggatggaatcttttattgaaaaacagacaaagttactggagatggaggcaacagaagc

SEQ ID NO: 6984 - DNA, 575 bp, Homo sapiens
  MAP TO AL109614.27; EXPRESSED IN LUNG, SIGNAL = 2.7; EXPRESSED IN PLACENTA, SIGNAL = 3.2; EXPRESSED IN ADULT LIVER, SIGNAL = 4.6; EXPRESSED IN HEART, SIGNAL = 3.5; EXPRESSED IN FETAL LIVER, SIGNAL =   3; EXPRESSED IN BRAIN, SIGNAL = 3.3; EXPRESSED IN BONE MARROW, SIGNAL = 3.2; EXPRESSED IN HELA, SIGNAL = 5.1
tgctagacaaggcagcagagatgattcagggtaccattctctaggggtctcagtctagtggacaggtaatggaattttcctttggcaaaatagctctgtcagagatgtctctcctggacagtcttttcttctctcatagcccccttgtgctccaagaccaccaagagcccctcctggccccattcctgaaagttcttctcgcagatgaatgccagatgattcccgttaaggagttagctgctaactacaggtgttaactgctaatgaaagtgccagcactaagatattagctaataaggattaacacctttcagagtgttggtatattaataagggacctaggaggaccaaaacgatttcaaaagccagaggaacagaacccaaaaggtggcagaagaatttggttcaacaattctttctgcccctactgcgaactgggtcttgagccaagacatgcagccaacgtgttgcatatacatagagctttgcagtctacagcactcagcagcttacaaagcacttcctcatccatcacctcccctgctcttcacatcagcccagtgaggtaagctctg

SEQ ID NO: 6985 - DNA, 533 bp, Homo sapiens
  MAP TO AF240629.1; EXPRESSED IN PLACENTA, SIGNAL = 1.3; EXPRESSED IN ADULT LIVER, SIGNAL = 1.4; EXPRESSED IN HEART, SIGNAL = 1.3; EXPRESSED IN LUNG, SIGNAL = 1.1; EXPRESSED IN BRAIN, SIGNAL = 1.2; EXPRESSED IN FETAL LIVER, SIGNAL = 1.1; EXPRESSED IN BONE MARROW, SIGNAL = 1.2
gaagagcagcccaaagagtgttgattgtagcaccgtccaatagatagagctgaaaacagctgtctggatcataaagcaagagaataaaaagtaggactgagatagcagatttttttatatatgtgaacattacctgaggattccagaagtacctggaggtgaaggaatttcacaaatactaagctaccagtagaaaaactgaatggtctctcaagccatcgtactttgtcattagaaagaaataagagttctggtatctgatctagcaaaggagactagaagctttcatttagtcctaacaatgagggaaaagctgtacaaactagatcacactcacaatttttaaatacatcacagaagtgaggtcacaggaaatgacaattttcctgaacagaaatccaaaatcagaaacctccacgagaaccagtgctgaaaccagaactgtaattaaggaattgctggaagctccatttggacaaataaaaactccatagggatgcagtcgtaggaggaccccatgcttctgtgagttt

SEQ ID NO: 6986 - DNA, 520 bp, Homo sapiens
  MAP TO AC015785.3; EXPRESSED IN PLACENTA, SIGNAL = 1.1; EXPRESSED IN ADULT LIVER, SIGNAL = 1.5; EXPRESSED IN HELA, SIGNAL = 2.8; EXPRESSED IN HEART, SIGNAL = 1.5; EXPRESSED IN FETAL LIVER, SIGNAL = 2.7; EXPRESSED IN BRAIN, SIGNAL = 2.6; EXPRESSED IN BONE MARROW, SIGNAL = 2.1; EXPRESSED IN LUNG, SIGNAL = 1.6
agcagagttcatttgggtggttctggcagagaggttgttcatgaatgttgttaatgtacactagaagacatctgatgtgaagttcataattgaaatgttatgagcagtttagcatatggatccttcacatccacttaattgccagtttagtaataattttatgtaatgaggcattattaataatacgtgaaatacgaaattgacgtaatgccctaaaaacgtaatatgacatttaccactgaaaaagcgttatgattccaggtgtctttactgatttcaaaaacatatgtgatattacataaaatattaaaatcagtctttagaacagcttggttatgatgtatttcaaattcgttctccaaattatagtccatttttgacaaaaagggcaaaactttgcttgcacttgtggacttgcatttcaactgctgctggaagctctcgtgccatttgatgtttgccatcctgttcttccatggctgagggggcatctgatatggcagagagggaagccagacag

SEQ ID NO: 6987 - DNA, 500 bp, Homo sapiens
  MAP TO AC015756.4; EXPRESSED IN LUNG, SIGNAL = 2.4; EXPRESSED IN ADULT LIVER, SIGNAL = 3.1; EXPRESSED IN HELA, SIGNAL = 3.6; EXPRESSED IN BRAIN, SIGNAL = 2.3; EXPRESSED IN HEART, SIGNAL = 2.2; EXPRESSED IN PLACENTA, SIGNAL = 2.5; EXPRESSED IN FETAL LIVER, SIGNAL = 2.2; EXPRESSED IN BONE MARROW, SIGNAL = 2.4
aagagaatacattgcaccacaggtagccttaatatcttctgtacatgtatttggattttttaatatggtgtttcaaaaatatatttgaagaggaattgactcttatcaatgtaaatagatatttcatgaattatatattaattttttctcttaataaaacaggttagatgataaaggccaagtggttcgcatcaacttcaataacgcaactagggacacaatatttgatgtgcctgttgaaagagttcagcctttttatgctgctctgaaggagtttgttgacctcatgaacagcaaagaatccaagtttaccttcaagatgaatccaggtcagtgaatacattttctcaaataaccaaaagcatggattttcttcaaccttaaccacctagaattatatccagagcagtttttctcaggtatggcatgtagaacaccaacaacagaatcttggtgagcaactgacttgcttatgtagtggactcgtggccctcattgag

SEQ ID NO: 6988 - DNA, 595 bp, Homo sapiens
  MAP TO AC013641.4; EXPRESSED IN LUNG, SIGNAL = 3.5; EXPRESSED IN PLACENTA, SIGNAL = 1.9; EXPRESSED IN ADULT LIVER, SIGNAL = 5.2; EXPRESSED IN HEART, SIGNAL =  14; EXPRESSED IN FETAL LIVER, SIGNAL = 7.9; EXPRESSED IN HELA, SIGNAL = 4.5; EXPRESSED IN BRAIN, SIGNAL = 9.3; EXPRESSED IN BONE MARROW, SIGNAL = 7.5
tggtgacacaggaagctttgctgatgactgtgaagttgtttttgcacttctcatgatttacatccatcatgaacatgggggcatcagaggagggggcagagatgatgactctttggcttccttatctaagtgagcctcagccttctccatggtagttaatacactggtgaactccacaacataatcagtgccagcatcgccccatttgactggggtaggatctcactcctggaagatggttatgggatttccactgatgacaagcttcccgttctcagccttgatggtactgtggaacttgccatgggtggaatcatactgaaacatgtaggccatgcagttgaggacagtgaggggggttgttgatggcagcaatatccactttgctagatttaaaagcagcactagtgaccaggtgcccaatacagccaaattcatttactccggccttcaccttcaccatggtgtctcagggatgtggctggggttgcacgagaagatgtggctgtctattgaatgggaggagaagagagctgctcctcggattttaattttcactcagttccaagtacttaggaaatgtgtttgaggggaa

SEQ ID NO: 6989 - DNA, 525 bp, Homo sapiens
  MAP TO AC008528.4; EXPRESSED IN PLACENTA, SIGNAL = 4.6; EXPRESSED IN HELA, SIGNAL = 7.4; EXPRESSED IN FETAL LIVER, SIGNAL = 4.7; EXPRESSED IN BONE MARROW, SIGNAL = 4.2; EXPRESSED IN LUNG, SIGNAL = 4.1; EXPRESSED IN ADULT LIVER, SIGNAL = 6.6; EXPRESSED IN HEART, SIGNAL = 5.4; EXPRESSED IN BRAIN, SIGNAL = 5.4
gtctttcccgtgctgttctcatgatagtgaataactctcatgagatctgatggcttttataaaggggcattcccctgcacacaccctctcttgcctcctgccatacgagatgtgtcttgctcctccctgtcttccaccatgattgtgagtgaggcctccccagccacatggaactgtgtcaattggacctctttcctttgtaaattgcccagtcttgggtatgtctttattagcagtgtgagaacagactaatacaagtagataggtatcttttaacttgtttccagtgactcttgctttactttcaggtggatgatgacagaatggaccccttgttcacgaacttgtggaaaaggaatgcagagcagacaagtggcctgtacccaacaactgagcaatggaacactgattagagcccgagagagggactgcattgggcccaagcccgcctctgcccagcgctgtgagggccaggactgcatgaccgtgtgggaggcgggagtgtggtctgaggtgcatacatgc

SEQ ID NO: 6990 - DNA, 542 bp, Homo sapiens
  MAP TO AC019278.3; EXPRESSED IN PLACENTA, SIGNAL = 0.6; EXPRESSED IN ADULT LIVER, SIGNAL = 0.63; EXPRESSED IN FETAL LIVER, SIGNAL = 0.51; EXPRESSED IN BRAIN, SIGNAL = 0.51; EXPRESSED IN BONE MARROW, SIGNAL = 0.58; EXPRESSED IN HEART, SIGNAL = 2.6
gccattgcaggaagagattcattcccgggtccctagcttcctttcacattacctgcttcagtgtacttcagtcccactttttcttctgtgtcttttgtctttgggggtggccagacagcttgaagtctgccaggagtcctgtcatcctgctcagtcaggctgtggtcaggctgttgaaagagcaggcaaatagtaagtggaatgtagtcagagccgattaattcctgaaaaatgacatgctaaacctaattctgaagttaattttaatggctagttgcacattgctctcattcactataattcagatatctcactatagtgtgacccttttccagaagtgtaacgtgatcagttgaggtgaaaatttaaaactacaacaacaaaaaaacctcaaggctaagtatatatcacacaacccttaaaagattatttttattatataattatttgaaaaagcacaaatatactttgacctgaaggtacagacataaatgtactacactgatgtgcatttatgggaatgtttaccaatgtatcccggg

SEQ ID NO: 6991 - DNA, 593 bp, Homo sapiens
  MAP TO AC013800.3; EXPRESSED IN PLACENTA, SIGNAL = 1.5; EXPRESSED IN FETAL LIVER, SIGNAL = 1.4; EXPRESSED IN BRAIN, SIGNAL = 1.3; EXPRESSED IN BONE MARROW, SIGNAL = 1.2; EXPRESSED IN LUNG, SIGNAL = 1.4; EXPRESSED IN ADULT LIVER, SIGNAL = 1.4; EXPRESSED IN HEART, SIGNAL = 1.4
ccaggcactgaattaggctctacaggactgcagagatttttgtcttgaatggattcgtagaaaccagaacttggtggaattattattatggagaacttcggatgtcatgtagaaaacgttatactttatcctaaaatcaatgggaagttgtcattttttttttaactaggggggaattgtgccagatttggattctgggaagatcactgctccatgtggcagatgggtagatgggagtgagaggactagagccagcgatgctggttgggaagactctgccactattcaagtgagaggtgatgagggagggactcagctcagcagtgaaacagaagtgggatgcggaaaactgacagaatctgggaatggagtcagaggtggggagagggaaaaggaggaggcggagatgaggcctagggatggcatggatggtggtgctgttcgtgaagatggggtacacaggtgcaggtcacaggtgtgggggcagagatggcgagcttggttttggatggtattacggactgaacttgtgtgttcccccaactcccccaaattcctgtattgaggctcttagcccccagtgtgactgtatt

SEQ ID NO: 6992 - DNA, 544 bp, Homo sapiens
  MAP TO AC010789.7; EXPRESSED IN LUNG, SIGNAL = 4.9; EXPRESSED IN ADULT LIVER, SIGNAL = 5.3; EXPRESSED IN HEART, SIGNAL = 3.8; EXPRESSED IN BRAIN, SIGNAL = 4.4; EXPRESSED IN HELA, SIGNAL = 5.2; EXPRESSED IN BONE MARROW, SIGNAL = 4.9; EXPRESSED IN FETAL LIVER, SIGNAL = 3.8; EXPRESSED IN PLACENTA, SIGNAL = 4.4
gctgaattagcccaagggagaaaaattaatgtgcttgatgtatttactaagacttgcatctcaagtcttcaataatgcctatttttgaaagaaacctaggcaacgaattgaagagacttggaaatgtgccaattccctaaatgtttttctccctgtgggataattttttttaaagggacaatatatttgaggagaagagattattcctggtgcacctacctaaccactgtacaaaagacttcaccatagacattatactcttgatatcccaaacataggagtacatgtcataaagaattgtcctgttggcacaattggagagccgagtgaacattcccatcactagtccacacatctcttcaaacttggctgctcgtgaccgccattcttcaatctattgaagatcaataaaaagactcaaaaaactgtaagcttaacaaaataatctgagacacagttacacattaagctgcttatgttgtcaggtactggcaatttatcttaaccattaaagtatcattttgtgtctccccaaactgacaaa

SEQ ID NO: 6993 - DNA, 598 bp, Homo sapiens
  MAP TO AL136419.2; EXPRESSED IN HELA, SIGNAL = 2.3; EXPRESSED IN LUNG, SIGNAL = 1.2; EXPRESSED IN PLACENTA, SIGNAL = 1.4; EXPRESSED IN FETAL LIVER, SIGNAL = 1.6; EXPRESSED IN BONE MARROW, SIGNAL = 1.5; EXPRESSED IN ADULT LIVER, SIGNAL = 2.1; EXPRESSED IN HEART, SIGNAL = 1.4; EXPRESSED IN BRAIN, SIGNAL = 1.9
ccgtgtcctctctccttcacactcagtctctttttctttttctttttctccctggctctccacatctgccgttttctctcctttctctttctgatttctcttctcactttctctcttcctttctttcccagtttctcttttttctctgttggtctttcccaaataatgaaaaggagtggaggtctgaatgttatcagatgctattgtcaggcctgcgtttgcaacctctgtctgcagaaatgtgtaacagtcaattaatttgtctctcgtttctgcagcactcaaaatatcatcaacataatgaataatataacagtctgaaaacttgtctctaactggttgaagaacttgagctacaaaagtctgacaaatagttggactattaagcattccctgaggcaacactttccgctgaaatctggtggctggttttttattatttatggctggtatagtaaaagcaaatttttttaaatcctattttgccagaggaatggtaaaaacgcaatcctttagctcaattataattaaaggccaatctttggggatcatggccggagaaagcagcccaagttggagagtccccatgggttgaatt

SEQ ID NO: 6994 - DNA, 527 bp, Homo sapiens
  MAP TO AC013751.3; EXPRESSED IN LUNG, SIGNAL = 8.3; EXPRESSED IN HELA, SIGNAL = 8.1; EXPRESSED IN PLACENTA, SIGNAL = 7.7; EXPRESSED IN FETAL LIVER, SIGNAL = 6.7; EXPRESSED IN BRAIN, SIGNAL = 7.3; EXPRESSED IN BONE MARROW, SIGNAL = 7.3; EXPRESSED IN ADULT LIVER, SIGNAL = 9.2; EXPRESSED IN HEART, SIGNAL = 7.2
agatatgggtggggacacagccaaaccatatcactaaggtttagacaggctgaaaataataatagctagcacttacacagcatttactgtctaccagatactgctctaagtgttgtacctctgttagctcatttaatcttcgtaatagccccatgatgtaattattgtttttatcatcctcaccatttctcagatgaggaaaatgagacatctctttccctaggcactgtgaatgcaaagatttcccatgtccagatattggaaagagctcaccacattccacagagcatactcatacacatgtggggcttttacgtaaaggccatggaaaagatgcagcaagagaaaaagagcacaggcaagcagtgggagcctgacaatcatcccatgagcaagctccccaaggtggttacacaaggatctgaccagactctgtctcagggattgaaccaccaagatctgtgcaaggaatctaggctttgggagagctcaaagctataaaatcaacagtgggcttcatatacccc

SEQ ID NO: 6995 - DNA, 580 bp, Homo sapiens
  MAP TO AP001538.1; EXPRESSED IN BONE MARROW, SIGNAL =  11; EXPRESSED IN LUNG, SIGNAL = 3.2; EXPRESSED IN ADULT LIVER, SIGNAL = 2.8; EXPRESSED IN HEART, SIGNAL = 3.6; EXPRESSED IN BRAIN, SIGNAL =  15; EXPRESSED IN PLACENTA, SIGNAL = 1.6; EXPRESSED IN HELA, SIGNAL =  10; EXPRESSED IN FETAL LIVER, SIGNAL =  16
aaggtgtgctggtaggatggcgtcttaagaagcaattacttggctttgcagacgccgccgccgaggaaaaccgtgtactattagccatggtcaaccccaccgtgttcttcgacattgccgtcgacggcgagcccttgggccgcgtctcctttgagctgtttgcagacaaggtcccaaagacagcagaaaattttcgtgctctgagcactggagagaaaggatttggttataagggttcctgctttcacagaattattccagggtttatgtgtcagggtggtgacttcacacgccataatggcactggtggcaagtccatctatggggagaaatttgaagatgagaacttcatcctaaagcatacaggtcctggcatcttgtccatggcaaatgctggacccaacacaaatggatcccagtttttcatctgcactgccaagactgagtggttggatggcaagcatgtggtgtttggcaaagtgaaagaaggcatgaatattgtggaggccatggagcgctttgggtccaggaatggcaagaccagcaagaagatcaccattgctgactgtggacaactcga

SEQ ID NO: 6996 - DNA, 528 bp, Homo sapiens
  MAP TO AC022428.3; EXPRESSED IN ADULT LIVER, SIGNAL = 1.7; EXPRESSED IN BRAIN, SIGNAL = 1.6; EXPRESSED IN BONE MARROW, SIGNAL = 1.8; EXPRESSED IN LUNG, SIGNAL = 2.1; EXPRESSED IN PLACENTA, SIGNAL = 2.2; EXPRESSED IN HEART, SIGNAL = 1.4; EXPRESSED IN FETAL LIVER, SIGNAL =   2
gttgttgggtgatggggtaggaagtagtgttatgtttcactatattttttgtgtacctttgaattttgcactatttgtggtattatttctttaaaaaggcaatttattttattatttttttcaaacccagcacagaatattaacaaagtagataatacataggatggatatggaatgatttgcttggatcactccaagcaaggcatctgaactattcacatggttgtgtttggaagctcccagggtctaaacactgtaagatttcggagatttataccagatcagactcacaaacatttgattttcctcatttttcaagattttttcccctctggcctttcatttattcatttagtcttcagtagagagaccaggggatggcttggatttaggggcttaaccacctccatcttcatcagctccattcagctgaagctgttgctgttcttctgaaaagatcccaggagcttcccaatacatatgcaatctctgtaaaagcagtgtgtttgcaaacacagctgcaagaaa

SEQ ID NO: 6997 - DNA, 553 bp, Homo sapiens
  MAP TO AC019342.4; EXPRESSED IN PLACENTA, SIGNAL = 4.6; EXPRESSED IN FETAL LIVER, SIGNAL = 4.9; EXPRESSED IN HELA, SIGNAL = 7.3; EXPRESSED IN BONE MARROW, SIGNAL = 6.8; EXPRESSED IN LUNG, SIGNAL = 3.8; EXPRESSED IN ADULT LIVER, SIGNAL = 0.56; EXPRESSED IN HEART, SIGNAL = 5.2; EXPRESSED IN BRAIN, SIGNAL = 8.1
cagtttggagggctcagaagaagaaaggaagatgtgggaaagtttggaacttcctagagacttgttgaatggttttgaccaaaatgctgatggtaacaaggacaatgaagtccaggctgaggtggcctcagatggagataaagaaccttttgggaactggattaaaggtaacttttgctatgatttagtaaagagactagtggcattttgcccctgccttagagatctgtggaactttgaacatgatagagtttatctgaaattggaacttatgtttaaagttgaagcagaacgtaaaagtttggaaaaattacagcctgaccatgtggtaaaaaagaaaaaaacattttccaaaaagaaattcaggctagctgcagaaatttgcataagtaatgaggagcctaatgttaaccaccaagacaatggggaaaatatccccagggcacatcagagatcttcacatcagcccctctcatcacaggtctggaggcctaggagagaaaaatgattttgtgggccaggcccagggtccccctgctttgtgcagtctcag

SEQ ID NO: 6998 - DNA, 578 bp, Homo sapiens
  MAP TO AL117336.16; EXPRESSED IN LUNG, SIGNAL = 4.3; EXPRESSED IN PLACENTA, SIGNAL = 5.8; EXPRESSED IN ADULT LIVER, SIGNAL = 5.7; EXPRESSED IN HEART, SIGNAL = 5.3; EXPRESSED IN FETAL LIVER, SIGNAL = 4.8; EXPRESSED IN BRAIN, SIGNAL = 4.7; EXPRESSED IN BONE MARROW, SIGNAL =   5; EXPRESSED IN HELA, SIGNAL = 7.5
acaatggaaggagcaagcaggagtggaattcaaatatatagatttaacaaaagcttctttttggttattcttacctttttcaaggtagcattggtctacattaacaccaataacagaaagttaactgaattttacatgctgtttgtcccacctgtcattagatacattgaaggactgactgctgaccatcagatgtatgtttttaaattagtttaaaataatgttacgtatttaatttaaaaatagtgttgtggtgggggcacatatgccagtaggatgctctttgagtgtgttcataaaagtataaaatattaagagatgacatacttatttataaagagttttgaagccttctgtgaaagtcagcttcaatagggaacattacctgcattaatatatttattaggcagttcatttctgtgaattgtgtttttatacttcattttttccagctactcctttagtgtttttttcagaagtttgagttatttatggattagcctaatagctcattcttataattactgcaattttaaaaaccatctattacaaaccaaagtcttcaccaaagcaaagcc

SEQ ID NO: 6999 - DNA, 529 bp, Homo sapiens
  MAP TO AC011572.4; EXPRESSED IN PLACENTA, SIGNAL = 2.5; EXPRESSED IN ADULT LIVER, SIGNAL = 1.8; EXPRESSED IN HEART, SIGNAL = 2.6; EXPRESSED IN FETAL LIVER, SIGNAL = 2.3; EXPRESSED IN BRAIN, SIGNAL = 2.5; EXPRESSED IN HELA, SIGNAL = 2.2; EXPRESSED IN LUNG, SIGNAL = 2.7; EXPRESSED IN BONE MARROW, SIGNAL = 2.5
tcagagggaaagaaggaaggaacaaaggaatgaagaaaggaatgaaagaagaaaagaaggaaggaaggaaagaaggaaggaagaagaaagaaagaaattaagaaaaactacatgtgatatattttaacacaaagcagactcccatcaatgtaaccagatgatgtcagcaggatggtgaaaggactcaacataaagaaaggactgttgaagctgttgaaacaatccaatcagctacttcttgacattcagacagtggtccaatctgagtggaagaaccactatgaactcttgctgtgggtcacacttgctaagaccaagccatacctcctgacataagactctaaaccatactttctactagaaaatataagaaacatagtagctctccctaaggggctatttcaccattcataaagatgataacttggatagatatctatgttaatcatgctttgagaagtcaataagatgttacatttgttgaaaagtaatttaaacagactaagacaccaacctgaaatgtgctcaa

SEQ ID NO: 7000 - DNA, 522 bp, Homo sapiens
  MAP TO AL133417.9; EXPRESSED IN ADULT LIVER, SIGNAL = 5.2; EXPRESSED IN HEART, SIGNAL = 4.3; EXPRESSED IN BRAIN, SIGNAL = 4.4; EXPRESSED IN BONE MARROW, SIGNAL = 4.4; EXPRESSED IN HELA, SIGNAL = 4.8; EXPRESSED IN LUNG, SIGNAL = 4.9; EXPRESSED IN PLACENTA, SIGNAL = 5.1; EXPRESSED IN FETAL LIVER, SIGNAL = 4.3
acctaccctgcacacctcaggttacctgcactttggatgtcttgtgcaaatttttccaagtcttcctcaggtgtctgggatcaggcaccccatcccacactgggacttgcatgagctctggcccccatttctccttttcaggatactctccaaccctctgccccattgtggggttgaccacataccccaaggaacctctctgtggttatccaggcctgtgattaggccctgttccaggagagtggcctggtaaacaggtcacccctatggacaagtgtggtgtttattttgcaggatctcataatgttgtgccagagtggcaatgacatactgatttggggtgattcactcatgttggacacaggattattcagggttctgcattcactgcccatcctggacttgagtctggcttttgtggacctatcagtgtttccacggtggtgctgcctccggtctacagaaccccaggctggtagggcagtagcaggtgtccttcatcctatgccactcccaccctaa

SEQ ID NO: 7001 - DNA, 592 bp, Homo sapiens
  MAP TO AL138796.2; EXPRESSED IN PLACENTA, SIGNAL = 0.81; EXPRESSED IN ADULT LIVER, SIGNAL = 0.92; EXPRESSED IN FETAL LIVER, SIGNAL = 0.52; EXPRESSED IN BRAIN, SIGNAL = 1.2; EXPRESSED IN BONE MARROW, SIGNAL = 0.74; EXPRESSED IN HEART, SIGNAL = 4.1
tcctcagccagcttctcttctagtccattttttgggagctgggcctccagctgggatactctctggatgagactctccaggtcctttttggcctgaagccctggagagtagaaagccccagtgccatcagacagccacccctcatcctcatcagggacactatgaggtgaagacccctccaaggtgccaacagctctcagcttccggggtctttccagactagacgaataatcacttgtaactgagagggaccggacccggctcttgaggtttgaatgaccttgttggcattctgcagctgggccttcagatctttgatgtcctttcgtaggaccaagatgttttctgacttccatatacccggaactctctgcttccctagctgttctccagggcttcctctcagaggaactagccagtgttgagccccggcgtccctgctcagagcacagcccctccatcaggaccatttccttgaggctgttgtgctcctcacactctgaaaaaagacaaagatgtcttcctaaataaaagttggatgtgctgttgtggccactgcctttgagaggaggcaggtttggtcatgaggaca

SEQ ID NO: 7002 - DNA, 584 bp, Homo sapiens
  MAP TO AC022860.3; EXPRESSED IN HEART, SIGNAL = 1.3; EXPRESSED IN BRAIN, SIGNAL = 1.3; EXPRESSED IN BONE MARROW, SIGNAL = 1.3; EXPRESSED IN LUNG, SIGNAL = 0.94; EXPRESSED IN PLACENTA, SIGNAL =   2; EXPRESSED IN FETAL LIVER, SIGNAL = 1.2
cagagccaacaacttcctcctattcttccaaatcttctcactccttcaggatcacaggcctaagcccactgaccccatcacctgtcacctggcccttgtccacttagggatgctcctcattgtggtcttcttggcatctccagacctgtttgagtcactgtattttcagaatgacttcaagtgtaaggcattcttctgcatgcacagggtgatgaggagcctctccatctgcaccacctgcctcctgagcatgctccaggctgtcgccatcagccctggcacctcctggtctgcaaggattaaacagaaattcaaaggttacatctttcactccttcttcttcctatgggttctcagtttgtctctcagtagtaacctgctctcctccactgtggcttcttctaatgggaccaagacggttgtgctaagtatcagtaaatactgatcactttcttccataagctacattatcaggagcctgtctttcatgctgccactgcttacgaatgtcttctttgtagcaatcatgcagccctcaagtgcatacatggtaattctcttgttcaggcatcagagacaatccc

SEQ ID NO: 7003 - DNA, 576 bp, Homo sapiens
  MAP TO AC022474.3; EXPRESSED IN LUNG, SIGNAL = 2.1; EXPRESSED IN HELA, SIGNAL = 3.4; EXPRESSED IN HEART, SIGNAL = 1.9; EXPRESSED IN BRAIN, SIGNAL = 1.7; EXPRESSED IN BONE MARROW, SIGNAL = 1.9; EXPRESSED IN PLACENTA, SIGNAL =   2; EXPRESSED IN ADULT LIVER, SIGNAL = 2.4; EXPRESSED IN FETAL LIVER, SIGNAL = 1.8
agctccacagctcaagaagctagaagtattagaacaaactacacccaaacttatgagaaaaaataaataataaccattagagcagaaataaataacatagagagtagaaaaaggatagaaaaaaatcaaggaaactaagagttgattttttaaagagtttaacaacatttacaaatctttagctagaccaacaccgaaaaagagagagccagaatgataccaataagatggtttaacagaagatgcctcatcatcactctccccagaatatctagcaactactcaaaagttaagaatctctctgaattcagcaaacttgaggaggaacttggatccacagaaacaagaaaaaccttgaccggtaagaggaactgttattttagaccacaccacctataccccaaagctggtaaaaacaacccattttcctacactcagaatttctgaggtaggagaagtgaattgaaggtgatgtttgatctccctacaggtctgagaagttttgtggaagcctactccagtcctgtaccacaggaagcaatgaaagtgccagaagggctgaaccacctgaggtaa

SEQ ID NO: 7004 - DNA, 500 bp, Homo sapiens
  MAP TO AL139115.2; EXPRESSED IN PLACENTA, SIGNAL = 4.4; EXPRESSED IN ADULT LIVER, SIGNAL = 4.1; EXPRESSED IN FETAL LIVER, SIGNAL = 3.8; EXPRESSED IN BRAIN, SIGNAL = 4.9; EXPRESSED IN BONE MARROW, SIGNAL = 3.8; EXPRESSED IN LUNG, SIGNAL = 3.9; EXPRESSED IN HEART, SIGNAL = 3.9; EXPRESSED IN HELA, SIGNAL = 3.8
catcaccatgactcctgtgggagcccacaagtcaaccaaagtcacttggtggggctggatgacgtggaccactgcggcctgcacttgggatgtgttataagcagcattgccaaagcagtggttaaccgtaactatctgggtcaagaggaggcgagccagccagcataacatcctaatggggcagggcaaccagaatttccacataattgatggggaagaagcctgaatggccatgcagcatcccctcataccagttctcatcaatttggttagtgagtgtgatgatatcgccctctttaaatcccaactccccttcattttcaggttcaaagtcgtacagagctcggcagcagggctgatccatttggacacctgggagtaagagcaggagagaagagaagaacacaaaaggataaggggtatttaactcacagaatctgctgcctgctgtacccacctggcttgctgctccccgtctttcctccctcattcctcttcct

SEQ ID NO: 7005 - DNA, 511 bp, Homo sapiens
  MAP TO AL162261.1; EXPRESSED IN LUNG, SIGNAL = 0.97; EXPRESSED IN PLACENTA, SIGNAL = 1.2; EXPRESSED IN FETAL LIVER, SIGNAL = 0.7; EXPRESSED IN BONE MARROW, SIGNAL = 0.71; EXPRESSED IN ADULT LIVER, SIGNAL = 1.1; EXPRESSED IN HEART, SIGNAL = 1.7; EXPRESSED IN BRAIN, SIGNAL = 0.98
tgaacccctgctgataaagcacttgccagcttcaatggggctgctagagatgagagtacacaatccctgacttacagataccttgtcccaactaaggcctatgttatctgaaggggagattatcaatggcaaatgcaggctcctcctgtggaaagaaattctgctctctggagctggtggtctcttctcccaccagttcaaagaagcttgtcttgtactgtgggatctgccctccctgccccacaaggttaggggtatgtgccattgatgctgaggcatatgtgggaaattcagacattctgtaacacctgctgctcttccacgcaggtgaacccttgctgaagcaggacagtaacaaggtccaggtggacctccaggactcgggccacgagacttgtggccaaagcaagaatgaggctgaacaggaggaaaccaccagtcccggtaagagcacagggtgtggggctcaccttccctccctggagtcagctgtcacatttgggtgctgttg

SEQ ID NO: 7006 - DNA, 584 bp, Homo sapiens
  MAP TO AC024193.2; EXPRESSED IN PLACENTA, SIGNAL = 5.8; EXPRESSED IN ADULT LIVER, SIGNAL = 5.9; EXPRESSED IN HELA, SIGNAL = 9.1; EXPRESSED IN FETAL LIVER, SIGNAL = 6.4; EXPRESSED IN BRAIN, SIGNAL = 5.6; EXPRESSED IN BONE MARROW, SIGNAL = 5.8; EXPRESSED IN LUNG, SIGNAL = 6.8; EXPRESSED IN HEART, SIGNAL = 6.9
tcataggaggggcactcaacaaggcatctgggggtctctgagtcctggggctcagagcaccctgggcataacatggaaaacacaggaaccctacttgcaaaaaaaaaaaaaaagagagagaggagatatgaggatctttttagtcttatgtataacacatttataggcaaagctcacaaatttatccatttcaaatcacctatggttatatatttcacaaatcccttctattttaaatggaatgcataaaattgaagttcacctggaaacaggactgaacagcagagattccaccctccccctacttcatctgccttttcttctctaaccaactatgaaggctgcagcagtcaccaccgacttggccaagcagggtgcaaccttctctgcatctattgtcttctgtcatcctggcactggctctctaaggttgattccatcatccctgtcttccaggggcacagatggtaggtcagctgcccaagcttccagagcctgaagcagtagagacaggatttgaacccagatctgattccaaggcccacattcctcacgtgtctttcccctgcctcctgagaatatgc

SEQ ID NO: 7007 - DNA, 533 bp, Homo sapiens
  MAP TO AC015954.3; EXPRESSED IN LUNG, SIGNAL = 1.7; EXPRESSED IN ADULT LIVER, SIGNAL = 1.7; EXPRESSED IN BRAIN, SIGNAL = 1.8; EXPRESSED IN BONE MARROW, SIGNAL = 1.6; EXPRESSED IN PLACENTA, SIGNAL = 1.6; EXPRESSED IN HEART, SIGNAL = 1.8; EXPRESSED IN FETAL LIVER, SIGNAL = 1.8
aaccagaactgaagccaagccccatgacccgttgtccactgccggaccatgtatcatgctctattttccatatgtcctgtatttcaatgtggactgaaactgaacagtaagcctcctttaccaactttccctaggcaaagagcttatcttgttcttggaagcaattccacacacacacaccccagaatgggaagtacctttcagatagaagtgagtttaaaaagcttagagattgcaactctcaagatccaagcactggcagaggaactaggtgaggaagcctgtggatttagtcctactacaggctggctaataaacaccacttccttaagtataactctaattactattataatcatttactctgttccttttgaggggcagcatactgcaaagccccttttcttttcttatgctggaacttgagttcttgtcataggtagtaggaagagggagatgcttcatgggtgcttgtttgtttttaattcttccttttactttcactctggatgtgtgttgctctccctctcctg

SEQ ID NO: 7008 - DNA, 570 bp, Homo sapiens
  MAP TO AL157997.2; EXPRESSED IN HELA, SIGNAL = 2.7; EXPRESSED IN BONE MARROW, SIGNAL = 1.9; EXPRESSED IN LUNG, SIGNAL = 2.7; EXPRESSED IN ADULT LIVER, SIGNAL = 2.3; EXPRESSED IN HEART, SIGNAL = 1.9; EXPRESSED IN BRAIN, SIGNAL = 1.7; EXPRESSED IN PLACENTA, SIGNAL =   2; EXPRESSED IN FETAL LIVER, SIGNAL =   2
gcatccatacgggtatccactccaggttaggcaggagcctgggggcagctggctaagatgcgttcccaaagcttcctccaggcagacactgatgaatattctctctttaaaactaaacaagaaaaaaacctcaaaacttcaaggtatacaagctgatttatgtttgaacttctctaagagcaactatgttctctttctatattcccaaaaaaggcaaagaaaagtattggtcttccaaaacaaatagaggacggagctgctgctgttgcatggtgtctagaaactcagacaacttcatcattccatatttgcatccaagagagagaaagaaaaactacaatcattttccatttacccatcaacccatcaacctccaagtaagtgatctttaggtcatttgcttcttgctcacaaaggtttagtgatctttcttgaaagactttcatgtattctaggggaaaagtgcctctccaggccaagcccagctcttccacatttagggtgagctccctgatttaccactggagctcctcacatttctttaccttgacttcctcttctgccatcagg

SEQ ID NO: 7009 - DNA, 518 bp, Homo sapiens
  MAP TO AL118505.13; EXPRESSED IN ADULT LIVER, SIGNAL = 1.6; EXPRESSED IN PLACENTA, SIGNAL = 1.8; EXPRESSED IN HEART, SIGNAL = 1.9; EXPRESSED IN FETAL LIVER, SIGNAL = 1.5; EXPRESSED IN BRAIN, SIGNAL = 1.6; EXPRESSED IN BONE MARROW, SIGNAL = 1.8; EXPRESSED IN LUNG, SIGNAL = 2.5
agcgatgaccttcaccattcaccttgccactctcgttcttccttcatgccgtgctggcctcctgggtttgtgcgttctggagtagttggcagtttcccttctgtgtttcagttgagtcagggtggatcagagacctgccgaagctcacatccctctacctgaggaagatgcctcggctgacgaccctggagggggacattttcaagatgacccccaacctgcagcagctggactgtcaggactccccagcacttgcttctgtcgccacacacatctttcaagatactccacatctacaggtccttctgttccagaagtaagtgcttctgaggcacatcttcatcacatgactgatttttgcccattacgctatgttgaattttatagaacaaaccagaccttaatttttctcccactactcttccaaatcctctctggggctttgttttcccccaccctttgggtgatatcttgggtaggtcccagatagtccacccagccatctagccttgcaactc

SEQ ID NO: 7010 - DNA, 547 bp, Homo sapiens
  MAP TO AC022470.3; EXPRESSED IN PLACENTA, SIGNAL =   1; EXPRESSED IN HEART, SIGNAL = 1.2; EXPRESSED IN FETAL LIVER, SIGNAL = 1.1; EXPRESSED IN BONE MARROW, SIGNAL = 0.92; EXPRESSED IN LUNG, SIGNAL = 1.1; EXPRESSED IN ADULT LIVER, SIGNAL = 1.1; EXPRESSED IN BRAIN, SIGNAL = 2.2
tcctgtaatcccagtttggcagggctggaccaggcctgtcagatttctagcctaaggaatgtgtgggaaatgatctctgtagcacccgttctctgtccccacaaactatataagggggatcatagctgtaccctgaacaaagcctgatgacctccttttggggtcaaaagtaggtctcttaggctctaagctctagggcccatgaagaggaagatgagaaaattgtgtgagaagcagcaaatgaatagctacagcctggctttcctaatagatgaggcccacatcccaggccatggttctcactcatccaccgctcctcacttacagagttggctccgtggatgacagtgctggggctgctgctggctgtggtgctagagctggagcgcagtggggggttttcctgagagttctcactgtctgggccaggctcttctgcttccttctgattctgcagctcgtcaatctccacctcgctggcatcccccagtgctgcatgtgtcagagggtccacatctgccaaaatccaagggaggcaggtacagac

SEQ ID NO: 7011 - DNA, 592 bp, Homo sapiens
  MAP TO AC019099.3; EXPRESSED IN ADULT LIVER, SIGNAL = 4.5; EXPRESSED IN HELA, SIGNAL = 6.8; EXPRESSED IN HEART, SIGNAL = 4.5; EXPRESSED IN BRAIN, SIGNAL =   4; EXPRESSED IN PLACENTA, SIGNAL = 4.1; EXPRESSED IN FETAL LIVER, SIGNAL =   4; EXPRESSED IN BONE MARROW, SIGNAL = 3.9; EXPRESSED IN LUNG, SIGNAL = 4.5
ctaggcttctctttgggcaggcctaggccagggccttaggggatctctgagtccgtggtataaatctgaatgagatcagacacaatattgtcaatgattggtaaggtcgtcaccaaactcctgccaccacggcttctcagcctcgacctcagcgggcacctcaactccgcagacctgcagggccaggtagagcactgccacggtgatgtgctgggcctggaagtggaggcacagccccccgtggtaggtgtcctgcagcagggcccaggcagtgacggcaacgggggtccgctgccaggtatggcggttcagccagttcttgagggaaaccaggtagtggagcaggtacttgtgtggatgctggaaggagacttggaagcgcagaactctcagcatgagaagctgacactgcacaatgctgtccctaagctcccagaagagggagtccaattccaggggctcatcgcttgggtttaagtacctgttggacacattgatgatgtcacgagtccgcaggtgctgctcttccactttgccggccaagtaaatggaagacatggtaatcaggtaagggtcacaggcgtccagtcag

SEQ ID NO: 7012 - DNA, 544 bp, Homo sapiens
  MAP TO AC020719.3; EXPRESSED IN LUNG, SIGNAL = 2.8; EXPRESSED IN PLACENTA, SIGNAL = 2.9; EXPRESSED IN ADULT LIVER, SIGNAL = 3.1; EXPRESSED IN HEART, SIGNAL = 2.3; EXPRESSED IN FETAL LIVER, SIGNAL = 3.5; EXPRESSED IN BRAIN, SIGNAL = 2.7; EXPRESSED IN HELA, SIGNAL = 3.7; EXPRESSED IN BONE MARROW, SIGNAL = 2.9
aagaggctgcttctgctgactgagatagcccagaagaatctggaggctctagcatttttggactcatgcatccaaatattcccatcttaagtcttctttatcagggtcctcattttctgcgcaggaaacctgtcactcctgtgcattttctccccttatctctgcaatgcaggcctgattttcaacacagtctgcctgtggctctatgagaagagaatctctttaaatgctaccttgaaggactttcagattttacgatcactctgagttgatagttggctaaactgatccagtggttttctttcttgaggacttttgtagccagtgccataatcttttaagttaccacgactctcctactattccggtgctagagctattgggtgggtaaatccttcgcctcccacctgtacctcatctgaatctacccaggtgagtctgttttggggacgcttcagcgtgccacaggttacatcaggaatcagtcacttaccactagcaaaaggtccttgttactatttgacgggtgagtgagtgttgcaga

SEQ ID NO: 7013 - DNA, 566 bp, Homo sapiens
  MAP TO AC009278.3; EXPRESSED IN PLACENTA, SIGNAL =   2; EXPRESSED IN ADULT LIVER, SIGNAL = 1.6; EXPRESSED IN HEART, SIGNAL =   2; EXPRESSED IN FETAL LIVER, SIGNAL = 1.8; EXPRESSED IN BRAIN, SIGNAL = 1.6; EXPRESSED IN BONE MARROW, SIGNAL = 1.8; EXPRESSED IN LUNG, SIGNAL = 1.8
ttgtgattcgttttctcccctttcttgttacagttatggcaagagagctttgattggatccataccaaggctgtcaatctatcagttttgtgagcttcaaagttttaaagctaggaatatgtcctatcaccgtgttatttttcttgaaagttttggtaaagtagatgatgattgtacatctgctgcaatgatggtggacctctgttagcagaaagatacagcgtctctcaatattctgccaaaagtttctatagcacttgtacctttcacacctacagcagctttatagaactgctgccattgggttcctgcaaagccttacattttcctattgtcttgaccctaaagaaatcaaatatgcagcatgggggaattttaggccttttccaaattgccatggtcagatcagatagcctttgacattaaaaaataaaaataaaaaaaaaagattgacaggttaatgacatagtcccaggaatggagagggagataatctacaaaaggcctacttaggctgagtaattaaaggaacctgcagtggtccagggggcaggaggatgtaaagt

SEQ ID NO: 7014 - DNA, 511 bp, Homo sapiens
  MAP TO AC009466.2; EXPRESSED IN LUNG, SIGNAL = 1.7; EXPRESSED IN PLACENTA, SIGNAL = 1.6; EXPRESSED IN HEART, SIGNAL = 1.3; EXPRESSED IN FETAL LIVER, SIGNAL = 2.1; EXPRESSED IN BONE MARROW, SIGNAL = 1.9; EXPRESSED IN ADULT LIVER, SIGNAL = 1.5; EXPRESSED IN BRAIN, SIGNAL = 2.3
tctaaacagacccctgtgggttatcatgttttgagctggggttggaagctcagtttcaggaaggagaaacagcacaatgctctccctggtcactgacacctagacctggggaccagtagacccttcccagatcacacttggcctcctctttgctctttctcagtctctcaacccagaggttttcccccttagggaggagactccaagcaaggaggctccaaggctttgcatggtcagccttgggcctcagataaccacagctttgggacacgcaggtagacccaataacaataatcctgcctttcaaggtcctctaactcaagtcttcccagctcttccccatcgtgaaggtgctgctcactgactggacattgccaccagcctggaggaaggaggaggtggtgacccatgaccaggggctgggcaggcagagcagagaacctctctaggcacatgtgagccttgtgggtagaggtgtggacttcctccagggtactggacagtgggcact

SEQ ID NO: 7015 - DNA, 594 bp, Homo sapiens
  MAP TO AL121723.35; EXPRESSED IN HEART, SIGNAL = 1.3; EXPRESSED IN BRAIN, SIGNAL = 2.6; EXPRESSED IN LUNG, SIGNAL = 2.6; EXPRESSED IN HELA, SIGNAL = 2.2; EXPRESSED IN PLACENTA, SIGNAL = 2.1; EXPRESSED IN ADULT LIVER, SIGNAL = 2.3; EXPRESSED IN FETAL LIVER, SIGNAL = 2.8; EXPRESSED IN BONE MARROW, SIGNAL =   4
acggagggtgtcacagagaggttcccatcaggttcacagggcgcccgctgtacctcttggagatgtcagcttcaatcagcttctgcagctccttggtcttctccagcagcaggtccagcttaggctccagagcctcctgctcctcaagtgcctcctgctgcttctgcaccatcagctctttcttcaaagccagcagctgggactgcttcaggttttgctggaggaattcagtcactcggtccacataccttggtgaggccaggttcataaacaggtgttgcagttgaagactggtaagtttgccaatcagatcttccaacactgacaccatgataaccatcttctctttggtctggccctgcaggatgactggagccagctggaactggctcacagacaggacatctgccttctcactcaactccactgctctctgggctaagaagatctcaagttccatgagctcatcaaggaactgattctgggtctcagtgtattcaagaagtgtcagagcatctgggcccctggcaacaccttctggagcctggattcctgcttccaccactgtgatctgcaaagcaacagcatcgtctc

SEQ ID NO: 7016 - DNA, 578 bp, Homo sapiens
  MAP TO AC025749.2; EXPRESSED IN PLACENTA, SIGNAL = 1.3; EXPRESSED IN ADULT LIVER, SIGNAL = 2.1; EXPRESSED IN HEART, SIGNAL = 4.3; EXPRESSED IN FETAL LIVER, SIGNAL = 2.4; EXPRESSED IN BRAIN, SIGNAL = 2.9; EXPRESSED IN BONE MARROW, SIGNAL = 3.3; EXPRESSED IN LUNG, SIGNAL = 1.9
ccttacctgtcctttgcagcagccatgaacgggctggcagggcctctccatggactggcaaatcaggaagtgcttgtctggctaacacagctgcagaaggaagttggcaaagatgtgtcagatgagaagttacgagactacatctggaacacactcaactcaggacgggctgttccaggctatggccatgcagtactaaggaagactgatccacgatatacctgtcagcgagagtttgctctgaaacacctgcctaatgaccccatgtttaagttggttgctcagctatgcaagattgtgcccaatgtcctcttagagcagggtaaggccaagaatccttggcccaatgtagatgctcacagtggggtgctgctccagtattatggcatgacggagatgaattactacacagtcctgtttggggtgtcacgagcattgggtgtactggcacagctcatctggagccgagccttaggcttccctctagaaaggcccaagtccatgagcacagagggtctgatgaagtttgtggactctaagtcagggtaaaactggagactgggggaaagtgactacca

SEQ ID NO: 7017 - DNA, 577 bp, Homo sapiens
  MAP TO AC006460.3; EXPRESSED IN ADULT LIVER, SIGNAL = 0.93; EXPRESSED IN HEART, SIGNAL = 1.3; EXPRESSED IN FETAL LIVER, SIGNAL = 1.2; EXPRESSED IN BRAIN, SIGNAL = 1.1; EXPRESSED IN LUNG, SIGNAL =   1; EXPRESSED IN PLACENTA, SIGNAL =   1; EXPRESSED IN BONE MARROW, SIGNAL =   1
acaccaaaggttcagcatcccaaatctgaaatgttctaatgcgggtttcctttgagtgtcattctgacactcaaaacattttggatcctgaagcatttcgaattttccagttagggatactcaacctgtaggaacactgtcagtaatgacttttttttttttttttttttttttgatgggggaggaaatagaacagaatttaaagatgcttttattcaagtgttaccctctcatcatatagcacgttctcacctgatgagtgggactttgcctcactggggtaaagtctgctcagctccccatccaccacaaaatgatggggttgtctgttctgtaaattaggcattcggagattcaaaggtctttctcctaatgaaaagaaaaaagaaatatgcataatattaaaaacataccatggtttttcttaaaaataaattttgcctgaacactccttaggaaaaaagtgaggagagtcaacgagcactgaagaatttaaataagacttggaaaaaacattttaaataataatttaagaggaaaatggcaagtcatttcatgccagtcccaaggtttacaa

SEQ ID NO: 7018 - DNA, 554 bp, Homo sapiens
  MAP TO AC013612.3; EXPRESSED IN PLACENTA, SIGNAL = 6.8; EXPRESSED IN HELA, SIGNAL =  12; EXPRESSED IN FETAL LIVER, SIGNAL = 6.5; EXPRESSED IN BONE MARROW, SIGNAL =   7; EXPRESSED IN LUNG, SIGNAL = 6.5; EXPRESSED IN ADULT LIVER, SIGNAL = 8.3; EXPRESSED IN HEART, SIGNAL = 6.7; EXPRESSED IN BRAIN, SIGNAL = 5.9
atgaaggaaaatgcctggtgtggtggctcatgtctctaatccaagcacacacttggggaggctgaggaaggaggatctctttgagtttgagaccagccttggaaatatagggagatcttgtctctacaaaaaattaaaaaattagccaagtgtggtggcacatgccagtagtctcagctactcaggaggctgaggtgggagaattgcttcagcccaggaggcagagattgctatgagccaagattgcaccactgcacttaagcctgggcaacagagtgagaccctgtccccaaaacaacaacaacaacaataacaacaatgagaatgaaggacaaaaacgatatgatcttttcaattgatattgaaaaagaattcaaaaaaattcagcatctcttcatgataaaaaccatcaaaaaactgggtatagaaggaacatacctcaacacaataaaagccatatatgacagactcatggttagcatcatactgaatggagaaacactgaaagcctttcctgtaaaatctggaatatgacaaggatgcccactttcact

SEQ ID NO: 7019 - DNA, 535 bp, Homo sapiens
  MAP TO AC016113.4; EXPRESSED IN LUNG, SIGNAL = 2.5; EXPRESSED IN PLACENTA, SIGNAL = 1.7; EXPRESSED IN ADULT LIVER, SIGNAL =   3; EXPRESSED IN HELA, SIGNAL = 2.2; EXPRESSED IN HEART, SIGNAL = 1.6; EXPRESSED IN FETAL LIVER, SIGNAL = 3.5; EXPRESSED IN BRAIN, SIGNAL = 3.6; EXPRESSED IN BONE MARROW, SIGNAL =   4
tgccctcattccagtaaaccgacaaccttccagcatgggtgtcaaggccatcacaaacatgtcacactgctgcagagattttgtttatggccagttttgggaccagtttgtggccagattttggagcctgttcccaacatgttccccttctttgttttgcaaagcgataagagcaaaggcagctttgtcactatgagctacttcttgcaggagtcaggatctgcatctgcagaggcaatggtgatcgctgctatcatagctaccattaaattactcattgtgactggttgtcctgctttcctaaggttttcttctgccatctgtgacagcttcttgatctgtccccaggtggatggctgtgttcaacgggtgttgcttgtgacagttggggtcctcctcagagtcattctccacatggctgcaactggggggagctcgggatcctcctggaatctcttcctcagcatctgtttcatggtaaggtttcaggtgtctcaatggtatccaaattggctgttgattttggcctggagaa

SEQ ID NO: 7020 - DNA, 523 bp, Homo sapiens
  MAP TO AC021498.4; EXPRESSED IN HELA, SIGNAL = 4.3; EXPRESSED IN BONE MARROW, SIGNAL = 3.4; EXPRESSED IN PLACENTA, SIGNAL = 4.1; EXPRESSED IN ADULT LIVER, SIGNAL = 4.6; EXPRESSED IN FETAL LIVER, SIGNAL =   3; EXPRESSED IN BRAIN, SIGNAL = 3.7; EXPRESSED IN LUNG, SIGNAL = 3.9; EXPRESSED IN HEART, SIGNAL =   4
ttaaatatcccacctcccccaggtagttttccctatcacttcaacagaatgatcctaatctagaactgtgcttaatatgtagcaagtgctttttttttaattcccatagatttcacaacaaaatatgtgaatttttaatctctctttactaggcggcacccctgcttcaggtggccaaaatagaggacaggcaattgtactaccgattgtcagtaggagaaccagagaataaaggtgctattttttttatttgattcagatgtgagataagaaagatttgaaaacatgcagtcacaacaggctttctgtccctcacctagaccagccaaagactccaccacctagggagtaacaggagtgatggaaaggaagcaatgacttacatttgtcctatttctgtgatcccagatggatttgaagaaatcagtaaggagagggagaaaggtctccttgctcccacagaaatatattgagatatgatttaagaacaacagaacagagatgcctgttgagtctgctaggg

SEQ ID NO: 7021 - DNA, 596 bp, Homo sapiens
  MAP TO AL158091.7; EXPRESSED IN LUNG, SIGNAL = 1.6; EXPRESSED IN PLACENTA, SIGNAL = 1.4; EXPRESSED IN FETAL LIVER, SIGNAL = 1.3; EXPRESSED IN BONE MARROW, SIGNAL = 1.4; EXPRESSED IN ADULT LIVER, SIGNAL = 1.4; EXPRESSED IN HEART, SIGNAL = 1.4; EXPRESSED IN BRAIN, SIGNAL = 1.5
aaaaccacaccaaagccaagcggcccccagggcctgcacttacgggacagcgagtgggcccctctgggcaggtactcgaacagcagggagccgtcatcccccagcacgtcggccttcagcgacagcaggctgttcttactcatgagcgccgcgcgcaggttggccaccgcggtggcctgatgcagggcgtcgtccttctctggggtgaggggagggcccagatagctggcttctcctcccaggagaccctcctccacctgtgcatagagctcggccctctctcctcggctgtcggagctgctggcttcggtgacggacaggtccgcatctggggacagagggacacacgtcagaagacacgggtcgttcccagactctccaagtgggacaggcgacacatttagaaggacagcgaccagcttctgcctgagctacagagcagcatcaagtccagcccaccctgggagccgggcacctgccccagcaatgcagcagcctcggcccagcccggcctttcctgcccacccaggtcccatggctgcggtggagtctcagccaaggctttggaggacggctcaactcagaacaacggggtt

SEQ ID NO: 7022 - DNA, 564 bp, Homo sapiens
  MAP TO AC025324.2; EXPRESSED IN BONE MARROW, SIGNAL = 4.2; EXPRESSED IN LUNG, SIGNAL = 3.7; EXPRESSED IN PLACENTA, SIGNAL = 3.7; EXPRESSED IN ADULT LIVER, SIGNAL = 4.4; EXPRESSED IN HEART, SIGNAL = 3.7; EXPRESSED IN FETAL LIVER, SIGNAL =   4; EXPRESSED IN BRAIN, SIGNAL = 3.8; EXPRESSED IN HELA, SIGNAL = 4.9
tggatgtagctggctctgtggctatggctggcactgtgactgtggctgtggctggcactgtggctctgactggccctgtggctgtggctgtgagtggcactgtggctgtggctatgactgatactgtgtcttggctggtgctatggctgtagctggcactgtggctgtggctgtgagtggcactgtggctgtggctatgactggtactgtgtcttggctggtgctatggctgtagctggcactgtggctgtggctgtggctctgactggccctgtggctgtggctgctgctgtggatgtagctggcactgtggctgtagctggtgctgtgactgtggctgtggctggtgctgtggctctgactggccctgtggctgtggctatgactggcaccgtggccgtggctgtggctggtgctggtgtgatcgctgtcaggggaaggcaaggactggagtaggaagaaatggagttggaaatggtattttaggaacagtggctctggagtaacttccttaaggagccatgtgaaggaagggagggaggggcactgggacaggagttggat

SEQ ID NO: 7023 - DNA, 574 bp, Homo sapiens
  MAP TO AC012662.5; EXPRESSED IN PLACENTA, SIGNAL = 0.84; EXPRESSED IN ADULT LIVER, SIGNAL = 0.91; EXPRESSED IN FETAL LIVER, SIGNAL = 1.2; EXPRESSED IN BRAIN, SIGNAL = 1.7; EXPRESSED IN BONE MARROW, SIGNAL = 0.83; EXPRESSED IN HEART, SIGNAL = 1.9; EXPRESSED IN LUNG, SIGNAL = 1.2
actggactgcttggaggttgaatgatgaccttggacaggttacttaactcagccacttttgccaacctaaacaaaataaaatgctgactagagggcaggaagttaagaaggtcaacgagggaaaaggccagaggcctgagaatgtccctgtccttcaacttctgtccacccctgggtcaaaaccctacaagatggcacagaacaaccaacggagtttggagaggccttcagggctggagatcttgaacctcacttcccagcctcgctctggcagagaagggagcctgaaggcagcatcagagccaaggtgccccctagtgtcacgccctgaaagcaccagagcctttccaaaccctcaccctaccctgccaggcctgctgaagctgttttccgatgaaattaatgtcatacccaatttttaccttaaccactttgaatacattcacccttttaggctcctggtagaaggagaaagacgattttcattctccatattttctatgacttggagaacagacagtaatatctctacccacctacccatccaaaaaccacacaaatgcacctagccaaa

SEQ ID NO: 7024 - DNA, 551 bp, Homo sapiens
  MAP TO AL139352.8; EXPRESSED IN LUNG, SIGNAL = 1.2; EXPRESSED IN PLACENTA, SIGNAL = 1.1; EXPRESSED IN ADULT LIVER, SIGNAL = 1.6; EXPRESSED IN HEART, SIGNAL = 1.6; EXPRESSED IN FETAL LIVER, SIGNAL = 1.3; EXPRESSED IN BRAIN, SIGNAL = 1.4; EXPRESSED IN BONE MARROW, SIGNAL = 1.3
ggtaagctctgtgaggccagggaccatggccagtttgttcatggtggtatctgtgccagtgcctggcgcatggtattaataaatgtgtgtacatgtttgtcaataattttatttaaagaaaagtctgagcccatgttctttaaaatgttgatggtggttgtctgggtgtggaattatgagtgacttgttttgttctttgtacttttctgtgctttttgctttgttttcaataagaggcaataactgtcattttgacagaagccactgtgctggggaactggagctgtcctctctgcagaatgcatctggacttacctctgcccccttgccttctgtccccacaggcctgaggagcgatgcgacaggcatgatggaggtcgagtcctcctactcggacttcatctcctgtgaccggacaggccgtcggaatgcggtccctgacatccagggagactcagaggctgtgagcgtgaggaagctggctggagacatgggcgagctggcactcgagggggcaggtaagagccagcaggtccttggcactactgcat

SEQ ID NO: 7025 - DNA, 515 bp, Homo sapiens
  MAP TO AC008521.5; EXPRESSED IN ADULT LIVER, SIGNAL = 2.3; EXPRESSED IN HEART, SIGNAL = 1.8; EXPRESSED IN BRAIN, SIGNAL = 2.1; EXPRESSED IN LUNG, SIGNAL = 2.2; EXPRESSED IN HELA, SIGNAL = 3.2; EXPRESSED IN PLACENTA, SIGNAL = 2.1; EXPRESSED IN FETAL LIVER, SIGNAL =   2; EXPRESSED IN BONE MARROW, SIGNAL =   2
tctgcatctatctcccacccacccaatccccaaacacacaaacaggcggggtaaaatatctgttttcaacataaccaagctataggcaagaaagggacgactccagatgccagaaatgaggaggaaacccaaagctgaaaccaagagcctggcctgggagtttagggaacagatgactaggactcaggagaggcagggaagccagaagacacctacttcagaaggttttccgctccggtcctcatccgcacggctttcaggatctgctgattcaaagcagctctttgattctgcaatttactccggccggtttgtgcaaggggattacagccctgaggaaaaataagagatgccccttcagaggtcggccactctaaaaatgatgacagggtttaatataatggaaaatgtttaactttaaaaataatcttttctgaaaacaaagcatctacatagaaaatattgaaaagtataaagaaaagtcgctcataacaacacaattgcaaaacagccac

SEQ ID NO: 7026 - DNA, 579 bp, Homo sapiens
  MAP TO AL031661.28; EXPRESSED IN LUNG, SIGNAL = 1.5; EXPRESSED IN ADULT LIVER, SIGNAL = 1.8; EXPRESSED IN HEART, SIGNAL = 1.7; EXPRESSED IN BRAIN, SIGNAL = 1.6; EXPRESSED IN PLACENTA, SIGNAL = 1.7; EXPRESSED IN FETAL LIVER, SIGNAL = 1.6; EXPRESSED IN BONE MARROW, SIGNAL = 1.5
tctctgcccagttctgttccttactcagcaaaaatctcttctctctactaatagttcataggtctttgtccaccaaaagtccataaggattctgcctgattcatttgcatatgactcatatgctaagagcttcgtaccaaaatgttaagtgtaacatatttgaactacactgtgatatttcatcaagagttgccaaactatagcatggaatatacaaaaatgttcacttcaagttattaaaaaatttgtcctttattacttaacgtaaagttggagtccattataggaatcatctctatcatcaccattgtacccatcatcatcctggtgatccccacggatcatcagcagcagcatctctgtcatcatcatcatcatcatcatcatcatcatcacaacagataacattgctagaccagtggttcttaaagtgtggtcctacatcaaaagcattagcattacttggaaagttgttagaaatgcaaaatcttagagcccattctagacttaataaatcagaaattctggagtcaggcccggaaatttttgctttaacaagccctccaggtgattgtgagt

SEQ ID NO: 7027 - DNA, 504 bp, Homo sapiens
  MAP TO AL049870.3; EXPRESSED IN LUNG, SIGNAL = 2.4; EXPRESSED IN PLACENTA, SIGNAL = 4.6; EXPRESSED IN ADULT LIVER, SIGNAL = 2.8; EXPRESSED IN HEART, SIGNAL = 2.2; EXPRESSED IN BONE MARROW, SIGNAL = 2.5; EXPRESSED IN BRAIN, SIGNAL = 2.3; EXPRESSED IN FETAL LIVER, SIGNAL = 2.5
gtgagctaagttgcaagccccgtgtttaaaggtggatgcggtcaccttcccagctaggcttagggactcgctgtcggcctaggaaatccagctagtcctttctctcagtccgccctctcaacaggaaaactcaagtgctgttggggtggttggctgatgactgctctaactgcttcctgctgaattggggcatagtaggggtcatgcagttgagatttcctcgggaggggtgacttcagtgtcatcaacatcagagcatgggctagcaggctggtccaggggtctgtggtagattttagtcatggactgcatctggggctccatttgaagagccatttgtagctttaccgcttcgattctggaagagaccaatttaataaggaggttaaagatacagggtccaaagaagagtaacaatattatagctgctagaggtcctaagaaggggagaatccagggcatccactggctgaggaggccccagggtctggtgctttgaagctc

SEQ ID NO: 7028 - DNA, 511 bp, Homo sapiens
  MAP TO AL136089.8; EXPRESSED IN LUNG, SIGNAL = 8.6; EXPRESSED IN PLACENTA, SIGNAL = 8.7; EXPRESSED IN HEART, SIGNAL = 8.4; EXPRESSED IN FETAL LIVER, SIGNAL =  11; EXPRESSED IN BONE MARROW, SIGNAL =  12; EXPRESSED IN ADULT LIVER, SIGNAL = 7.9; EXPRESSED IN HELA, SIGNAL =  11; EXPRESSED IN BRAIN, SIGNAL =   9
caccttactgctccagcctctggggcacattccagtcttccaacctgcgaccagcagagaaaagaattacatgttttcttgccccatagatactttgaggtgaacaaaaaaattaaattttaaccatgagggaaattgtgcatatccaggccagtcactgtggcaaccagatcagtgtcaaattcttggaagtgatccatgatgaacatggcattgaccccaccatcacctaccatggtgacagtgacctgcagctggactgcatctccatgtactacgacgaagccacaggtggcaaacatgttcttcataccatcctggtagatctagaacctgggaccatggactctgtttgctgaggtccttttggccagatctttagatgagacaactttgtttctggtcagtctggggctggcaacaactgggccaaaggccactacacagaaggggctgagctggttgattctgtcctggatgtggtattgtagcgggaaatcagaactggaga

SEQ ID NO: 7029 - DNA, 533 bp, Homo sapiens
  MAP TO AC015908.4; EXPRESSED IN FETAL LIVER, SIGNAL = 2.8; EXPRESSED IN PLACENTA, SIGNAL = 3.8; EXPRESSED IN HELA, SIGNAL = 4.8; EXPRESSED IN BONE MARROW, SIGNAL = 2.9; EXPRESSED IN LUNG, SIGNAL = 3.6; EXPRESSED IN ADULT LIVER, SIGNAL = 3.8; EXPRESSED IN HEART, SIGNAL = 3.7; EXPRESSED IN BRAIN, SIGNAL = 2.7
gttctggactctctgccctgttgcatttgtccttcaggctatttacacaccatccccatattgttttagttattattactttgtcatgtgtttccctgcccctccaagcctctgatttatatttttaaatgtctatgctattctcttacattttctactccaggtgcatttttttcttcagtttgaaaaactccatgaaatatccctaaggttcttaagggaattgctttgtatttataaattactttgtgtagaactgacctactggggcttcccaccaggaacacaatttgtctctgtttattcacatcttcctttgtggccttctggacagtttcacaacttttcttcatatcgaaagcctatattttctaattgattactcctagtatgtaagaatgcttttgaatttttgaatgttacttttttatcctctccatttttttctattgaagtgtttgtctttttcttagtagttcaggtattagactttctcaggctctgaagaagcaggttacctgtggtgatggggt

SEQ ID NO: 7030 - DNA, 524 bp, Homo sapiens
  MAP TO AC007000.2; EXPRESSED IN ADULT LIVER, SIGNAL = 2.8; EXPRESSED IN FETAL LIVER, SIGNAL = 2.7; EXPRESSED IN BRAIN, SIGNAL = 2.8; EXPRESSED IN LUNG, SIGNAL =   2; EXPRESSED IN PLACENTA, SIGNAL = 2.8; EXPRESSED IN HEART, SIGNAL = 1.7; EXPRESSED IN BONE MARROW, SIGNAL = 3.6
gagctctaggaaaggtgggcgcgatctcgcgcccacacccagtgctctgggtcataagcctggatctggaaaaacaaacgcgctttgagaagacggggactccccaggatacccctctctcccctcgtccagcctccagcccacccgattcctccccacatcctccacgtccccaggccccacccacctcttccaactcctccagggaaacccaagccctgcagcgcatggaacaaaagaagtggaaccgatacttccggaacaaggctatctgagagcagttcttcctggccctcgggttcatgtaacggcataactggaaccaaagctcactgagcaagggtatatgagagcgggtctcctcgtacaggaagtagaagatgttttgtttgggggcctcgtcgtcctcctccatgtcattggccagatagctgaggacagaaatcaggttgctgctcaggggcaccaccaggagagacctccggctgaggtcagcttctcagagaggaaggtaagggaccgtc

SEQ ID NO: 7031 - DNA, 524 bp, Homo sapiens
  MAP TO AC024259.5; EXPRESSED IN BONE MARROW, SIGNAL = 4.9; EXPRESSED IN LUNG, SIGNAL = 3.6; EXPRESSED IN BRAIN, SIGNAL = 4.3; EXPRESSED IN HEART, SIGNAL = 4.7; EXPRESSED IN HELA, SIGNAL =   3; EXPRESSED IN ADULT LIVER, SIGNAL = 3.7; EXPRESSED IN PLACENTA, SIGNAL = 4.3; EXPRESSED IN FETAL LIVER, SIGNAL = 4.1
aacgtgactttggaactgggtaacaggcagaggctggaacagtttggaactaccaagagacttgttgaatggtttactaacatgcttatagagatatggacaatggagtccaggctgagttggtctcacatggagatgaggaacttctggggaagtggagcaaagctgactgttgctatgctttagcaaagatactggtggcattttgctgctaccctagacaactgtggaactttgggtgtgagagaggtgatctgaaattgggacttatgtttaaaaggaaagcagagtataaaggtttgaaaaatttgcagtctgatgatgcaatagaaaagaaaaacccattttctgggaagaaattcaagccagctacagaaatttgcataaataatgagagaccaaatattaatcccaggacaatggggaaaatgtatccagggcatgtcagagaccttcatggcagcccctcccatcacacaccctgaggtctagacagaaaatatggctttgtgggctagttccag

SEQ ID NO: 7032 - DNA, 559 bp, Homo sapiens
  MAP TO AL158138.1; EXPRESSED IN ADULT LIVER, SIGNAL =   3; EXPRESSED IN HELA, SIGNAL = 2.6; EXPRESSED IN BRAIN, SIGNAL = 2.9; EXPRESSED IN BONE MARROW, SIGNAL = 3.6; EXPRESSED IN LUNG, SIGNAL = 3.5; EXPRESSED IN PLACENTA, SIGNAL = 3.3; EXPRESSED IN HEART, SIGNAL = 3.4; EXPRESSED IN FETAL LIVER, SIGNAL = 2.5
ggtgtgaagtccagcctagctcttcagctattactcagagtgggacactcatctggatgaagaaagccagtggcacaccctgattcacttaaaaatatatactacttttatgtgtaaaagtgcatgaagagtgaaatactactgattaagtggcacacacagattttattttcacttaagaagtattaatgaaagcccatgaatgtaacacaatacattcctaaacacctggatttcctggagactgactatatcaccatattcacttgtctgcttccctgttcttaccaggtcctctcatctaagatgaacttcaactatagagtcaagcccagcaacagtaagaataaggctgggaagctaagcaagagccagagcattgttggtttcttcctactttggagattttgtgttttaaattaactttaaaagaacagggaacacaacaaaatctagagaaatgcactgaaaaatctagagaaatgtgttagaaatgcactttaaaaagagggctcactgaaactaatgaaaagcaaggccggggtgcttgtctcttcta

SEQ ID NO: 7033 - DNA, 509 bp, Homo sapiens
  MAP TO AL138769.5; EXPRESSED IN ADULT LIVER, SIGNAL = 1.4; EXPRESSED IN HEART, SIGNAL = 1.4; EXPRESSED IN FETAL LIVER, SIGNAL = 1.3; EXPRESSED IN BRAIN, SIGNAL = 1.3; EXPRESSED IN BONE MARROW, SIGNAL = 1.3; EXPRESSED IN LUNG, SIGNAL = 1.4; EXPRESSED IN PLACENTA, SIGNAL = 1.5
tgaatcaagctcctcatcccccgtccttcctttctccatctcactaaatggttagccagctgctccgggcagacctccagaggctttgcttctcccacattctccacatccaggccatcaacaaccttgtgggttccgcgttccacctgcagtcgctcctgctgtggccactgctttcttacgccccagaccgagtacacatgtttcccatctggactggtcacccgaccatcatctctcacctggacttgagattgtgctcggatcccccagtggcttcctcgcatacctagaaagcaagccagcgtccttaaaatatcccacagccacagaccgcctgccgcttgcagttccagcatcttacatttgctctgctccacccacatgggcttcttcgctgtcctgtgacgctgccagcacaccctcttcaggttgtctgtgctcgctcttctctctgccctgaaccctcttccctcagttgtgggcacggcctttgcgtcttcacttct

SEQ ID NO: 7034 - DNA, 551 bp, Homo sapiens
  MAP TO AL133354.8; EXPRESSED IN HELA, SIGNAL = 4.7; EXPRESSED IN LUNG, SIGNAL = 4.3; EXPRESSED IN PLACENTA, SIGNAL = 4.2; EXPRESSED IN ADULT LIVER, SIGNAL = 4.6; EXPRESSED IN FETAL LIVER, SIGNAL = 3.6; EXPRESSED IN BRAIN, SIGNAL = 3.4; EXPRESSED IN BONE MARROW, SIGNAL =   4; EXPRESSED IN HEART, SIGNAL = 4.1
ctctcagcacctccacttcccttcttctcttcttctaagccaactccaaatctcaatgctgtcaaaattctgggtaaatcccagagcagttagtgaactggggaagctttggttctttcctcagtccttcatttgacactggaaacaattaagatcccaggcagagagagacaagaaagagtgttttcacctctgcagagacagtgcgtcccaggagaggagccctttgggaatttggaaggccaaaccttcctctgtggaagcctgagggacatgctgaaattgcccctctatttccttgctttccatccaagtgatctgctccaacttgtcccactgtggatgaggtcatctccattctctgacggccccatctgagatattcaacttgacttttcttgctctgaggagctcaggccattgggtgtttggggttggcttttggttggtttgcttcattctcctctgagcacatggctgtcaactccaaggtacctgccagatagaaagtatgagggaaagcattttgcaggcactctggagttttcagc

SEQ ID NO: 7035 - DNA, 544 bp, Homo sapiens
  MAP TO AC018511.3; EXPRESSED IN BONE MARROW, SIGNAL =   1; EXPRESSED IN ADULT LIVER, SIGNAL = 0.56; EXPRESSED IN HEART, SIGNAL = 1.2; EXPRESSED IN BRAIN, SIGNAL =   1; EXPRESSED IN PLACENTA, SIGNAL = 0.94; EXPRESSED IN FETAL LIVER, SIGNAL = 0.89
atgtgtttggaatgctgctgctagctgcgtgaattgacttagagtgccactgtcaaagattcaggagcgtaaacttcacggagatcaaatcactataactgggaagaggctacattcctaaagcgaatgcacttctctgttgtgatgtttttaccttgtcactactcatattatttctagtggctcctgttctaagctctgggaatgccacagtgaggaatgcccatttattttttctgccctacgctatttgctttctagaagagaaggccaagcagggtctcctgaaaagcctctctccgatctgggccgtctctcctacctggcatattggaagagcgtcatcttggagtatctctaccaccaccatgagaggcacatcagcatcaaggcaattagcagagcgacgggcatgtgcccacatgacattgccaccactctgcagcacctccacatgatcgacaagagagatggcaggtgagtcctgggaccctgggcagctccgtggctcaggcatcccacaccagaaagggtccctggagat

SEQ ID NO: 7036 - DNA, 504 bp, Homo sapiens
  MAP TO AL157376.1; EXPRESSED IN PLACENTA, SIGNAL = 4.9; EXPRESSED IN ADULT LIVER, SIGNAL = 8.5; EXPRESSED IN HELA, SIGNAL = 7.2; EXPRESSED IN FETAL LIVER, SIGNAL =  10; EXPRESSED IN BRAIN, SIGNAL =  11; EXPRESSED IN BONE MARROW, SIGNAL =  11; EXPRESSED IN LUNG, SIGNAL = 6.9; EXPRESSED IN HEART, SIGNAL = 6.8
aacaatcatgccttcccaagagtcacccaaagtcttaactcatttcagcattaactcaaaagtccacagttcaaagtctcatccaagacaaggcaagtccgttccacctatgagcctgtaaaatcaaaagcaagttagttacttcctagatacgatgggggtacaggcaaacttctgcctgggcatccaggtgtttccatacatctcctgaaatctaggcagaggttcccaaaccccaatccttgacttctgtgcacttgcaggctcaacaccacatggaagctgccaaggcttggggcttacaccctctgaagccacagcttgagctctatgttggcccctttcagccacagctggagaagctgggatgctgggcacaaagtccctaggcctggcccaggaaaccacttttccctcctgggcctctgggtctgtgatggcaggggctgctgcgaacacctctgacatgccctggagatattttccccattgtcttgggaatta

SEQ ID NO: 7037 - DNA, 504 bp, Homo sapiens
  MAP TO AL136172.12; EXPRESSED IN LUNG, SIGNAL = 1.4; EXPRESSED IN PLACENTA, SIGNAL = 1.3; EXPRESSED IN ADULT LIVER, SIGNAL = 1.3; EXPRESSED IN BRAIN, SIGNAL =   1; EXPRESSED IN FETAL LIVER, SIGNAL = 1.3; EXPRESSED IN HEART, SIGNAL = 1.5; EXPRESSED IN BONE MARROW, SIGNAL = 1.6
aagccccttcctcatacctcttttccgcttatcactagagacagaaactaaataccatggcttcaggcttctaaaagcctaaaacaaaacagaacagaacaacaaaaacaaaaaaaggcaggttggacgagtttgtattaaggcattctgactccttcactctccccagctccctccatgtcaatcccttggcagaaacactgtagacttataaatggatgacagatgcaggctttgagagggaccaaaaggaacactctccactggggtgtggggtcagtcatcctgggaggggctgacattagaggggcaaagctcaagggcttacagccacagccacatatgccatcttctcctgtgcaggctcattatggcatttctgcagcttcctcaggagcctccacagaatccaggtcgtgctgggaagctccaccgacagcattctccacacctcagccaggtgcctggaaatcccaaagagcaagaggagaatggctgattcca

SEQ ID NO: 7038 - DNA, 534 bp, Homo sapiens
  MAP TO AL118505.13; EXPRESSED IN LUNG, SIGNAL = 2.4; EXPRESSED IN PLACENTA, SIGNAL = 2.2; EXPRESSED IN ADULT LIVER, SIGNAL = 2.4; EXPRESSED IN HEART, SIGNAL = 2.4; EXPRESSED IN FETAL LIVER, SIGNAL = 2.1; EXPRESSED IN BRAIN, SIGNAL = 5.9; EXPRESSED IN BONE MARROW, SIGNAL = 2.3
tttccgatctggccactaactcctctttttttatagctgaagcctgctttctttcattgagaaaagcgttttgtgtctctcctggctcttcaaggtgtttctcttcactgctatcttcccctcgctcccctttttgatagttctctccctcctcctcctcctcatcctctctctggctcttctcagaatggcgtgtcttcacttcttcagagacttggctgtcggagggatagaggctccactggggctcatccgctcgctctcggctgtgcccgcctccctctgcccatttctctgtgtctgcctttgttgggccttggatgtcctcctcccctggggctcctgcctctcccctgctggaggactcgtgggcttccgaggcatcagctgggtctcttaacaatcttacttcaaactttgtgttttcattttcagttgtctctttgtctttgacgtcttttctacctataatgaaaatgaagagtaggtataatttcagaattgcttgtggttccacaagcaccagcctcagta

SEQ ID NO: 7039 - DNA, 577 bp, Homo sapiens
  MAP TO AC019162.3; EXPRESSED IN PLACENTA, SIGNAL = 2.8; EXPRESSED IN FETAL LIVER, SIGNAL = 4.6; EXPRESSED IN BONE MARROW, SIGNAL = 3.9; EXPRESSED IN ADULT LIVER, SIGNAL = 3.6; EXPRESSED IN HEART, SIGNAL = 3.5; EXPRESSED IN BRAIN, SIGNAL = 3.1; EXPRESSED IN LUNG, SIGNAL = 4.3
gcagtatggcattgaggttgttgactctgatggccagctgggctgctctttccacgatggccttgcagttcttggaggaaacattgtgagcgatcttagcacagtaagatttgttgcacatcatcagcacttccagctcattgatgtcatggaccaggaatttccggaaaccattgggcagcatgtgctttgtttttttgttgctcccataaccaacgatgggcttcaagatctggcccttgaaccttctacaaaccctattgtcaatacctctgggtttctgccagttaggcttgattttgacataccagtctgactggtacaggatgaacttcttggttctctttttgacaatcttgagtttcacaaggggtctgagggcagctgtgatgccaaggaggagatggctgcaacctctgtaggcagcgctgaggaagagagaatatcctctactattttattttattgttttattttttgagacagagtcttgctccattgcccaggctgcagtgcagtggcatgatcatggctcactacagcctcgacctcctaggctcaaatgatcctcctggga

SEQ ID NO: 7040 - DNA, 598 bp, Homo sapiens
  MAP TO AC006460.3; EXPRESSED IN LUNG, SIGNAL = 2.5; EXPRESSED IN FETAL LIVER, SIGNAL = 2.6; EXPRESSED IN PLACENTA, SIGNAL = 2.9; EXPRESSED IN ADULT LIVER, SIGNAL = 2.7; EXPRESSED IN HEART, SIGNAL = 1.8; EXPRESSED IN BRAIN, SIGNAL = 2.5; EXPRESSED IN BONE MARROW, SIGNAL =   3
tgggagatttgttctttcgctctttgtggtaaatcttgctactgctcactctttgagtccacactgcttttatgagctgtaacactcaccgggaaggtctgcagcttcaatcctgaagccagcgaggccaccagcccaccgggaggaacgaacaactccagacgcaccgccttaagagctgtaacactcaccgcgaaggtctgcagcttcactcctgagccagcgagaccacgaacccaccagaagaaagaaactccgaacacatccgaacaccagaaggaacaaactccagacgcgccaactgtaacactcaccgcgaggatccgtggcttcattcttgaagtcagtgagaccaagaacccaccaattccggacacactgtgagtcaggatcagtcttattatagctaattagagcaaccccattgctaaagagtttagagcctgggtcagacttcatggtagcaaagcaatgttttattgtaatagtgtaattaggaatgtgtggcaatattttaacccctcctcccaagagttccacaatgctttcttaacatgtttataaatatttgcttttgtgccattttaggggagctttc

SEQ ID NO: 7041 - DNA, 590 bp, Homo sapiens
  MAP TO AC024570.2; EXPRESSED IN ADULT LIVER, SIGNAL =  14; EXPRESSED IN PLACENTA, SIGNAL =  14; EXPRESSED IN HELA, SIGNAL =  16; EXPRESSED IN HEART, SIGNAL =  13; EXPRESSED IN BRAIN, SIGNAL =  11; EXPRESSED IN BONE MARROW, SIGNAL =  13; EXPRESSED IN LUNG, SIGNAL =  15; EXPRESSED IN FETAL LIVER, SIGNAL =  12
taacactgcaaaccttcccccccaaaaacaagattcccagggtcaaataggattagaataccctgaattctcagtactcttcctacagtttcacactgcacttaccatattaaaggctctgggaagtcctaaaaatatggaaacttttttcatttagcttagcacgttattttccaatttttttttctttttctttgtcatagcaacaattgtcattctgctcaatctgattttgaagaacatcactttaggaaacactaatccagaaaaggaccagaatgctgacaatgtctgtgttttattggtcacacaggccaaccctcatacaacgtgggaggagactagtaaagggtatgaataccaagcgggtggggattgcagggagtcctcttggaggctggctaccacatcacattttgaataattctggcaaaaaaaatgattatcatcagctcatactaaaactcttcctgctttatacttttgctagattccattccaaaacttgaattgctatctttggcaagtaatacaaaatatcacatgctacataataggtttgatagttttcagtatggacgacagagcca

SEQ ID NO: 7042 - DNA, 595 bp, Homo sapiens
  MAP TO AL161422.3; EXPRESSED IN LUNG, SIGNAL = 2.8; EXPRESSED IN PLACENTA, SIGNAL = 2.6; EXPRESSED IN ADULT LIVER, SIGNAL = 2.9; EXPRESSED IN HEART, SIGNAL = 2.5; EXPRESSED IN FETAL LIVER, SIGNAL = 2.5; EXPRESSED IN BONE MARROW, SIGNAL = 2.6; EXPRESSED IN BRAIN, SIGNAL = 2.5; EXPRESSED IN HELA, SIGNAL = 3.2
tttgcaaaaccttgtctccctccagcttgccaacctcttttttcttctcctgcttgccatcctcttttccccctctatctacccaaaaacttttctccccactgtcttttctccatatcatctttttgcaaaaccttctctccctcctgctcaccaccctctcttccccctccctctcagcaccctctcttctcctcccacttgccaccctctttcttgccctccatctacccacaatgtttttccccactgcctttcttttcttcccacagtgtttttccccaccatctttgcaaaccttctccccctcctgtttgtctccctgtttttccgcctccatctacccacttttttccaccatcttttccccaccatctttttgcaactccttcttctgctcgccccgccatccacttttccctttggcactcaccaccctctttactcctccatctaccccaaaactatttccttcctcctaccactccagctggctgcagtctccgttgctgccaccaaccacagcgatgtgagccacagtggcacaggctgcagcatccagcgtgtagcaggtggcttctccctctggtcctct

SEQ ID NO: 7043 - DNA, 589 bp, Homo sapiens
  MAP TO AL133395.14; EXPRESSED IN HELA, SIGNAL = 2.9; EXPRESSED IN LUNG, SIGNAL = 1.6; EXPRESSED IN PLACENTA, SIGNAL = 1.4; EXPRESSED IN ADULT LIVER, SIGNAL = 1.7; EXPRESSED IN HEART, SIGNAL = 2.3; EXPRESSED IN BRAIN, SIGNAL = 1.5; EXPRESSED IN BONE MARROW, SIGNAL =   2; EXPRESSED IN FETAL LIVER, SIGNAL = 2.1
ccctgtcgatacacattccctttactttgccaagtttttattcctcaagataaacctgaaggccaagctgccagagatgaattacaaagcacagctctttgctcaagtggcatttgataatgccaagcagtcgggggccaataaagtcgccacttctgcgaatcaaatgaaccagctcccaaacatgtataaccctgcgctggcacccttgccagaagagggagagggcaggaaggaaaatgggcaatgaaactactggaataggtaacatttttattccttctgcagttattgtcaccctttagagtgttgaatggctaagacatggtcatttgtcatttctgggaatggtatagaggaaggaccagtatgactttgtgaaattctgatttacgtaatttaattttttaaagaactggcagtttattcatatttgagtatgtaacagcttcttgaacatatacaaaaccaatatggaattccctggtgggaagcccttgcggagctggtgtagtaaattactaaatattatttgtaattaacacactgctgttgtgaggtagagtgctcctggagtttatgccttcca

SEQ ID NO: 7044 - DNA, 568 bp, Homo sapiens
  MAP TO AC016109.3; EXPRESSED IN BONE MARROW, SIGNAL = 2.5; EXPRESSED IN LUNG, SIGNAL = 1.3; EXPRESSED IN ADULT LIVER, SIGNAL = 1.4; EXPRESSED IN BRAIN, SIGNAL = 1.4; EXPRESSED IN PLACENTA, SIGNAL = 1.2; EXPRESSED IN HEART, SIGNAL = 1.3; EXPRESSED IN FETAL LIVER, SIGNAL =   2
agggattgtggaacatgaggaacagaaagtcaagccaaggaatgcagaggattgtctttatgaacttccagaaaacatccacatttcctcagcaaagaagaccaagaagatgttttccaaccagatgctgagtggcattcctgagttggaccttggcatcaatgctagaataaaaaatatcatttcttcagaggatgccaaggtccatctgctggcagagtagcagaataagaaaaaagacagtaagctatccttcatgcctaccaacatgtctgtgaattacgtgcagcagaacagattttatcatgaggagctcaacgttcccatacagagaaacacagaagaacccaaaaccagactcttgagggtaggcgacacggagaagctaggtgacacagagaaggcagaggctgagaggtcccctcctaaccacaagcatcctgataagcagaaggccactgatgactatcgttataaaaaggtcaagaagatgaacaggcagtactgagctgtgcagaatgggatgtaaatattgccttcctctccctctctccattcctcccatgaa

SEQ ID NO: 7045 - DNA, 564 bp, Homo sapiens
  MAP TO AC010781.3; EXPRESSED IN LUNG, SIGNAL = 2.1; EXPRESSED IN PLACENTA, SIGNAL = 1.9; EXPRESSED IN ADULT LIVER, SIGNAL = 2.5; EXPRESSED IN BRAIN, SIGNAL = 3.6; EXPRESSED IN BONE MARROW, SIGNAL = 4.5; EXPRESSED IN FETAL LIVER, SIGNAL = 3.5; EXPRESSED IN HELA, SIGNAL = 3.1; EXPRESSED IN HEART, SIGNAL = 2.1
agaaaggggtcccaattcagaccccaagagagggttcttggatcttgcacaagaaagaactcaggtcgagtccacagagtaaagtgaaagcaagtatattagagaagaaacaaaagaatggttactccataggcagatcagccctgagggctgctggttgcccatttttgtggttatttcttcattatacgctaaaaaaggggggagtggattattcatgcctccccttttagaccatatagggtaacttcctgatgttgccatggcctttgtatactgtcatggcgctggtggaagtgtagcagtgaggatgaccagaggtcactctcatcaccatcttggttttggtgggttttagccagcttctttactgcaacgtgttttatcagcaaggtctttacgacctgtatcttgtgttgacctcctatctcatcctgtgacttaaaatgcctaaccatccaagaatgcaacccagcaggccttaaccttattttacccagcccttattcaagatggagttgctctggttcaaatgcctctggcacttgcactggttccttgtca

SEQ ID NO: 7046 - DNA, 569 bp, Homo sapiens
  MAP TO AL121895.18; EXPRESSED IN LUNG, SIGNAL = 3.9; EXPRESSED IN PLACENTA, SIGNAL = 4.1; EXPRESSED IN ADULT LIVER, SIGNAL = 4.1; EXPRESSED IN HELA, SIGNAL = 2.9; EXPRESSED IN FETAL LIVER, SIGNAL = 4.5; EXPRESSED IN BRAIN, SIGNAL = 4.3; EXPRESSED IN HEART, SIGNAL = 4.3; EXPRESSED IN BONE MARROW, SIGNAL = 4.1
gtgcaaggacagagaggaggggggaatcttccaatcaatgaccttccaagtatggacatgcagaatcttgagcagacgattctagtccctgagaagcaataagaaaaacactccgctccaccagactctgacacccagagccagccacgtatgtggttcttctgactgcaaatgccgggaggggtcaggaaggtttgtgagaagcccttgatgtccaaggaggggatgaggatggaggtgtgaggcagcatgctaggacttaataggagaggaaaaatcgaggacagatgtgaggcatgaaaggtggcagtggtcctggagcaggtggggctgaggaaacatgattttgactatggcaaaataaaaaataaaaaaaaaaaacactaagaaaaactggaacaaaatatagattaattacatttcgtcttaagatgagaatggacttttaagcattaaagcaatggggaaaaaatcaaaaggaaaaagctcgacatacgtaatataaaaaataaagcatacatttcaaaatcaaaacattaaaaagcaaatggcaaactgggggaaatatt

SEQ ID NO: 7047 - DNA, 515 bp, Homo sapiens
  MAP TO AL121823.12; EXPRESSED IN PLACENTA, SIGNAL = 1.6; EXPRESSED IN HEART, SIGNAL = 1.6; EXPRESSED IN FETAL LIVER, SIGNAL = 2.1; EXPRESSED IN BONE MARROW, SIGNAL = 1.5; EXPRESSED IN LUNG, SIGNAL = 1.5; EXPRESSED IN ADULT LIVER, SIGNAL = 2.1; EXPRESSED IN BRAIN, SIGNAL = 1.7
ctgttcttcccgatgctctccctcaccctgcctgcttctgcaacaggccccggtatgttttgttcccccacatgtgtccatgttttctcattgtttagctcccacttataagtgagaatatgtggttcttggttttctgttcctgcattagtttgctgagcataagtgtttccagctccatccatgtccctgcaaaagacatgatttttattattattattattatttatggctgaatagttttagattctgcttcacagaaaacacaaccagcaacaacatttacacactagagcacacgggactacaacacacccaaaaatgtatgtttcttgccgaagatacacttagtattaaacaattcaaaagttcagaggacatgatctgtaacaagtgagttaagagacaccatgaacaaaatgagtattataaaggtacatgacaaagagagggaggctgaagcaagttggtggaatagaaagctccaccaatcgtcctccctacaaggacaccaa

SEQ ID NO: 7048 - DNA, 507 bp, Homo sapiens
  MAP TO AC009466.2; EXPRESSED IN HELA, SIGNAL = 4.3; EXPRESSED IN LUNG, SIGNAL = 2.8; EXPRESSED IN PLACENTA, SIGNAL =   3; EXPRESSED IN HEART, SIGNAL = 3.4; EXPRESSED IN FETAL LIVER, SIGNAL = 4.1; EXPRESSED IN BONE MARROW, SIGNAL = 3.4; EXPRESSED IN ADULT LIVER, SIGNAL = 3.2; EXPRESSED IN BRAIN, SIGNAL = 3.8
acaggtaacccccaaagaccatgctttgagaaacttttctctaatgtttttcccccatcagggttccaaatggagaacgtgcaatgaaaggaaaggcaccagctgatggcgcagggtggtgcagctgctgggtccctgggctggagcagagcccaaacctcagcaaggtggacaggtctgcactcacgagaaggcggccttgccctcctccatgtccttgcccttggccccgggcccggcttttccacacaggttgaccgcaatgcacatgaacaggccacacttgttcaggaagtagcaggtgatgtccacaaccaccaggagcaggacgaagatgacgatgaggatgcccacgatggccccggtgctcaggcctgaggtggggctgccgttggcttgagtgggagagagatggctggtggttaacagactgagatgcgagacctccagaccctgccagcaaaagcccctgcgggtggggagggcccagaggacagagtcatggca

SEQ ID NO: 7049 - DNA, 566 bp, Homo sapiens
  MAP TO AC013685.3; EXPRESSED IN ADULT LIVER, SIGNAL = 2.6; EXPRESSED IN HEART, SIGNAL = 2.6; EXPRESSED IN BRAIN, SIGNAL = 3.1; EXPRESSED IN LUNG, SIGNAL = 2.6; EXPRESSED IN FETAL LIVER, SIGNAL = 4.1; EXPRESSED IN PLACENTA, SIGNAL = 3.1; EXPRESSED IN HELA, SIGNAL = 3.6; EXPRESSED IN BONE MARROW, SIGNAL = 3.2
gaaaagccagcagagacaccagtggctactagcctgacatcaactcatagtacatcaggagattcttcttggtcaaacctttttgaagatgcaacgagtgcacttgtgatgggtcagtcttacgataatatggtaactgagatcatgtcaatgggctatgaacgagagcaagtaattgcagccccaagagccagttccaacaaccctgacagggcagtggagtaccttttaatgggaatccctggagataaagtcaggttgtggttgacccccaccaagcagctagtactggggctcctcagtcttcaacagtggctgcagctgcagcaactacgacagcaacaactacagcaagttctggaacatccccttgaatttttatggaatcagcctcagtttcaacagatgagacaaattattcaacagagtccttcccttcttccagtgttactacagtagatagattgagagaatcctcaattacttcagcaaattagccaacaccaggagcattttattcagatgttaaatgaaacagtttgagaagctggtggtcaaagaggaag

SEQ ID NO: 7050 - DNA, 583 bp, Homo sapiens
  MAP TO AL162171.1; EXPRESSED IN PLACENTA, SIGNAL = 1.3; EXPRESSED IN LUNG, SIGNAL = 1.2; EXPRESSED IN ADULT LIVER, SIGNAL = 1.2; EXPRESSED IN HEART, SIGNAL = 1.4; EXPRESSED IN FETAL LIVER, SIGNAL = 1.1; EXPRESSED IN BRAIN, SIGNAL = 1.1; EXPRESSED IN BONE MARROW, SIGNAL = 1.1
ccctgagcctagcacaactctgagataaaattccaccctgccttccgggtcctgttagtgccttttttccagtggagagggacggcttgttctttggccacagcttgactggcttttctttatacaagcaaagcccagcgttacgtttgcttaactaacggcgttcctctttccccagcgctggcgtcaatgctcccttcctcgggccattggagactccgttgctttttaatggcggcagcggctgctgggtgagcagctggaggccggacagtgttcgtcccatccggagaggatcgctttctcctggcgtcaccagcgctgggttggtgggggtagcttttccctctttgctcctccattcttgaagaaagaagaagatgccactgccatttgggttgaaactgaaacgcacccggcgctacacggtgtccagcaagagttgcctggttgcccggatccaactgcttaataacgagtttgtggagttcaccctgtccgtggagagcactggccaggaaagcctcgaggccgtggcccagaggctggagctgcgggaggtaagccacctaaagacactgca

SEQ ID NO: 7051 - DNA, 512 bp, Homo sapiens
  MAP TO AC021468.2; EXPRESSED IN LUNG, SIGNAL = 1.3; EXPRESSED IN PLACENTA, SIGNAL = 1.2; EXPRESSED IN ADULT LIVER, SIGNAL = 1.5; EXPRESSED IN FETAL LIVER, SIGNAL = 1.2; EXPRESSED IN BRAIN, SIGNAL = 1.2; EXPRESSED IN HEART, SIGNAL = 1.3; EXPRESSED IN BONE MARROW, SIGNAL = 1.2
cagcccagaggctagttcagccccagcactacttcccattgcatggggtggctgatgggctatggtgttactgccttcttcatatgggcattcagcagggtcctgagttcttgtcctgcatccaagaagaatgagcttatgctgacagccatgggtaagcaaggtgaagagttttatggagtgacaaaacagctctcagcagagaggggacacgaggatggtctaccacccaaagtcgggtggtctctctgtgtcccagtgtggctgagtttggggtttttataggcacacaatgggggaggtgcaggatgtaggtagcattagaaaaggcaacattttattggttcaaagccattattcagaaagaatcaattgggaaagagcaagtaaataggaatgcaagttctcactctggtccagacttcatccggaagcagcagcttggttttcaggctttaaactgtctttggtttgaaggtggggttttactggggacccatccctgtctacct

SEQ ID NO: 7052 - DNA, 530 bp, Homo sapiens
  MAP TO AC007009.2; EXPRESSED IN LUNG, SIGNAL =   3; EXPRESSED IN ADULT LIVER, SIGNAL =   4; EXPRESSED IN HELA, SIGNAL = 2.6; EXPRESSED IN FETAL LIVER, SIGNAL = 3.9; EXPRESSED IN BRAIN, SIGNAL = 3.6; EXPRESSED IN BONE MARROW, SIGNAL = 3.3; EXPRESSED IN PLACENTA, SIGNAL = 2.8; EXPRESSED IN HEART, SIGNAL = 3.2
ggtaccccttctgctaaccctcataaaacctcctaccttcctgaacttctccatttgcttgtagaggtctggatcaagctcctgagacacgtccttcatccataatagtgctcctctatattccgtcctgcactgttccatgcggttcaccgtcagccaagtatctgagatggcccgatgccgaaaagtctccacttcttggtgaaatcgacacaaaggatttcgtaaggccaacctagacaagaggacaaagccacactctcaaaactaagccagtgagcaatttaaatccttgacattctgccaatcttagactcgtgagtctagaacagtacctggaatgtagaagatgctccatcaatatttgctgaataataatcgaaatgcatgtagttccaactgattagtcagccagagaagattatccatgtacccatcccttagtttactgctactaactggaccactggcaagcacctccatccgcgttgttgggggtggtcttgagcctgggctgagtgctcatttga

SEQ ID NO: 7053 - DNA, 593 bp, Homo sapiens
  MAP TO AL157879.2; EXPRESSED IN LUNG, SIGNAL =  10; EXPRESSED IN ADULT LIVER, SIGNAL =  10; EXPRESSED IN HELA, SIGNAL = 2.2; EXPRESSED IN HEART, SIGNAL = 9.8; EXPRESSED IN FETAL LIVER, SIGNAL = 9.6; EXPRESSED IN BRAIN, SIGNAL = 9.6; EXPRESSED IN PLACENTA, SIGNAL =  11; EXPRESSED IN BONE MARROW, SIGNAL =  12
cagctactcaggaggccaagggaggaggattgcagctcaaagctgcagtgagctgtgatcaggccattgcgttccagcctgggtgacagagtgagaccatcacaaataaataaataaataaataaataaataaataaataaataaataaaaaatctgggcctcccgccaagggtgggaaacatcagaaagctcagaaaagctcagaggaccacacctgcccgttcacctgtcctgggctcctgctgaagccagggctaccagatgggagctaaagacctcccttaagcaagtcccaaaccaccattacctcccacgagtacaggtaggcggggtgttcgtgcatcaggtacggccaccagaggttggcacccagcaccttcagctggccctgggtcccagcctggttgtccacgactttgttgtctgatttcaaaagacacacttccaacttgaactggttactgcacttgacggagatatggtaattcaccagccctgcaggaggcaagagagaccagggcttagggagggacatgacctgggtcacacgaacaggaatgccccacaatgaccactcccaggcactctcatt

SEQ ID NO: 7054 - DNA, 551 bp, Homo sapiens
  MAP TO AC009301.3; EXPRESSED IN BONE MARROW, SIGNAL = 1.7; EXPRESSED IN FETAL LIVER, SIGNAL = 1.6; EXPRESSED IN LUNG, SIGNAL = 1.6; EXPRESSED IN PLACENTA, SIGNAL = 1.9; EXPRESSED IN ADULT LIVER, SIGNAL = 2.3; EXPRESSED IN HEART, SIGNAL = 1.5; EXPRESSED IN BRAIN, SIGNAL = 1.8
tcacatcagctcctcaccaggggcagtgcatggtgtgggtgtgggaagagcaaagggtcaaggtgatgctgtgcagctcccatggggttttcctgcctctgtcgcaggggtggcattctcaggacaggttctcttcttgtgggatagctctgctcatcagagggcacttgtttcccaggatgaagccagttctcagaaaacagcaggatgtggcagcatcaggagacctgggcttctgaccagctgtccatcaattacttctttgatatggaagaaaactcccttcaccctctggatccactgaacgggggccaggtctttgagggcttgcccacctatccagccactgattattagcttggaatctgctcccctcctgccttccttggtagccccttttcaggcatttctctggcatctctccagagaagtctggggactgggacgaagaaaaggaaaaaaatatgagggtgtgtgagtttgctagggctgctgtaacagcataccacacacggggctgcttaaacaacagaaatgtatcgtcccgcagt

SEQ ID NO: 7055 - DNA, 551 bp, Homo sapiens
  MAP TO AC016205.4; EXPRESSED IN BONE MARROW, SIGNAL = 2.2; EXPRESSED IN LUNG, SIGNAL = 1.2; EXPRESSED IN PLACENTA, SIGNAL = 1.2; EXPRESSED IN HEART, SIGNAL = 1.4; EXPRESSED IN ADULT LIVER, SIGNAL = 1.3; EXPRESSED IN FETAL LIVER, SIGNAL = 1.7; EXPRESSED IN BRAIN, SIGNAL = 1.8
atgggagagcatgaggtgactagggtctggagtggaaccccagcaaactgcagcagccctatggaagacgggacaaactgaaaaacaacaacaacaacaacaaaacagaaagcaacaataacatcaacaaaaagaccccacaaaaaccccattcaaaagtcagcaacctcaaagatcaaaagtagataagctgacaaagatgataaagaattaatacaaaaatgctgaaaactcaaaaagccaaagtgtctcttctcctccaaatgactgcaacacctctccagcaaggacacagaactgtgctgaggctgagatggatgaattgacagaactaggcttcagaaggtgggtataatgagcttcgctgagctaaggagcatgttgtaacccaatgcaaagaagctaagaatcatgataaaacattatatgagctgataaccagaataaccagttaaagaggaacataaatgacctgatggagctgaaaaacacaacatgagtacttcacaatgcgatcacaagtatcaatagccaaacagaccaagtggagg

SEQ ID NO: 7056 - DNA, 585 bp, Homo sapiens
  MAP TO AC018993.3; EXPRESSED IN PLACENTA, SIGNAL = 7.1; EXPRESSED IN HELA, SIGNAL = 8.3; EXPRESSED IN FETAL LIVER, SIGNAL = 6.9; EXPRESSED IN BONE MARROW, SIGNAL = 7.4; EXPRESSED IN LUNG, SIGNAL = 7.2; EXPRESSED IN ADULT LIVER, SIGNAL = 7.9; EXPRESSED IN HEART, SIGNAL = 7.4; EXPRESSED IN BRAIN, SIGNAL =   7
ccagcattgtgtttaccacgtactagctgtgagttacttagacctcagtttcctacctcataagtttattgtgaggattataggagtcaagagtataggaaccatatgaaatgatggccacttcaccagtttttaactataaaaaatagaaatttcatatgttcatcttaaaatataaagaaatgttcaaagtacctgtcacaggtgagcaccatacatctgaaagtcatgtctgagaagcattcttcaggtacacactgtaaattaaagcatctttcttacctttaaagctattttctctgcccttgaagagtagctgtgaatttatgtttcttcagcagcacatcaattgtgtggcatgtaccaagctgaattctctgttgaatgaggcagcaccattcccctaagggatgtatgtatgggaagcaagcggcagtggagggcaggtaataacacaaagagagagttatcgtgaggtccatgaggactacacacactgcaatgctgggacagtcctggacaacgaagagctgtccaaggattcccataacttgcgctgttttatgcaacctcccctacttcctc

SEQ ID NO: 7057 - DNA, 583 bp, Homo sapiens
  MAP TO AL121901.10; EXPRESSED IN LUNG, SIGNAL = 9.1; EXPRESSED IN HELA, SIGNAL = 4.8; EXPRESSED IN PLACENTA, SIGNAL =   5; EXPRESSED IN ADULT LIVER, SIGNAL = 5.5; EXPRESSED IN FETAL LIVER, SIGNAL = 4.4; EXPRESSED IN BRAIN, SIGNAL = 4.5; EXPRESSED IN HEART, SIGNAL = 4.7; EXPRESSED IN BONE MARROW, SIGNAL = 4.9
ctcaacagcctctcctggacaccgtgccccaggtcaccgggcatcatgggcctgcccttggcccctctgcctcaggtccctctgtgctcaccccaggtctggcatcctgcacttgctgccctctgacacctgggaagatggccggcccgtggaccttcacccttctctgtggtttgctggcagccaccttgatccaagccaccctcagtcccactgcagttctcatcctcggcccaaaagtcatcaaagaaagtaagttttgtccctccggagctggctgccataagacaagggggtaggtggagcagcttcccaaaggagggagagagttcctcatcacgggggatgtgcatggctgagatcccagaacgtgggtgaacatgagtgggaggttgtaaaggtctggagagtctgtgatctcaagagtccacgattccaagaaccccttcttaaattccacagttccaaagaccctgagtttccacagcctgcagaaggggcatgcagccactgcatgcagtgatgcagctgcctctcccactgccttcacctgaaatcccatcgtcagagcaccccgtcttag

SEQ ID NO: 7058 - DNA, 551 bp, Homo sapiens
  MAP TO AL157377.1; EXPRESSED IN PLACENTA, SIGNAL =  21; EXPRESSED IN ADULT LIVER, SIGNAL =  27; EXPRESSED IN HEART, SIGNAL =  21; EXPRESSED IN FETAL LIVER, SIGNAL =  22; EXPRESSED IN BRAIN, SIGNAL =  21; EXPRESSED IN BONE MARROW, SIGNAL =  25; EXPRESSED IN LUNG, SIGNAL =  26; EXPRESSED IN HELA, SIGNAL =  29
ggttgttgctaccccagttgtcagctacccaggttaagaatagcttgcccctttacgttcttatggatgcatgaagttgttacttacattttgtaggtgagggcagaaacagtcaagagactctgtgggcaatggattagcaaagccacaaacagaaaactttgacacctcctctgcatgggatggctcataaaaaggcaccttcagaagatggtttaaactaccatgggttccattgtttggtgctggttgaatgcgtagaagatctgttttttgaaaaaataagttcaaagtagctttacactggaaagcaacaactcctctgtgggagatgggaagaaacaaacacctactctttcactccctttaataaattctgctgtaacgaagctatgtactctatatgccattcagtttactgactttcttctccatggtttcaatcactagtcttgctaaagaatagaactagccaggtgcggcagtgcacctgtagtcccagctactcaagaagctgaggcaagaggcttgcttgagcctgggagtttgag

SEQ ID NO: 7059 - DNA, 592 bp, Homo sapiens
  MAP TO AL136528.9; EXPRESSED IN HEART, SIGNAL = 2.8; EXPRESSED IN PLACENTA, SIGNAL = 2.5; EXPRESSED IN ADULT LIVER, SIGNAL = 2.4; EXPRESSED IN HELA, SIGNAL = 3.7; EXPRESSED IN BRAIN, SIGNAL = 2.2; EXPRESSED IN BONE MARROW, SIGNAL = 2.8; EXPRESSED IN LUNG, SIGNAL =   3; EXPRESSED IN FETAL LIVER, SIGNAL = 2.6
cttgtgctcagtccgtctcccacctgtgtccggcagccggtgcctgctgcggggcgagcagcactgcctactcggaatcccatctgcacagagccatggtgcgtggagctgtgcgtctgcttccttttccctggcatcttgctggttttgagtgtgctgggttgtggggtggatcagtggcccgttcctccatcttgagagtgctgggtcatggtgtggagagagtgctgggtcgtggcatggatcagtggcctgttcctcccgtcttgagtgtactgggtcatggcttggatccgtggcccattcctctcaccctgagcatgctgagttgtggtgtggatcggtggcccgttccttccgtcttcagcacactgggtcgtagcgtggatcagcggccccttccttccctcctgagtgctctgggtcatgtggatccctctggtcctttcttcctgctgctgagtgctgtggagcccatcccacgggtctcctccgctggcttctccagtggtcagtggaaggtaacagcgctgatgaaggtgtatatttaactacctttttttcttattgggtttttaaaagttgcaaagtt

SEQ ID NO: 7060 - DNA, 517 bp, Homo sapiens
  MAP TO AC019126.3; EXPRESSED IN LUNG, SIGNAL = 1.7; EXPRESSED IN ADULT LIVER, SIGNAL = 1.3; EXPRESSED IN HEART, SIGNAL = 1.8; EXPRESSED IN BRAIN, SIGNAL = 1.7; EXPRESSED IN BONE MARROW, SIGNAL = 1.8; EXPRESSED IN PLACENTA, SIGNAL = 1.8; EXPRESSED IN FETAL LIVER, SIGNAL = 1.8
gcagcattccatactgcctcatcagaaatggggcaccagcagcatagccatcacttagtaaccacagaaaccagacctctgaccttagtagcaacatccaatggcacccagattgcagttcaggtgagtaccaaggcatactgtcctcagtcgacagcagtgctgctcatagctttcaactttgtacactgtgcttcgtgtataacctttacaggaggcaaggtgtagaataatctctatcacctagcctactttaaggaaatcggtgtatttgaggtggactcaaaaagaccagcactttgttctctacccatctttgcatattctaggggaatttatagcaagaaaaaaaaccttcaggtatatatccctgtgtgcacccacccaggcatctttactctcaaaataaaagtctaattaggcaggggtctgtaaagcacttaagagctactccttagagaaaaacctagtggaaacacaaatcctaaataagtcctctgagaatccttgcacagcc

SEQ ID NO: 7061 - DNA, 540 bp, Homo sapiens
  MAP TO AC019042.3; EXPRESSED IN LUNG, SIGNAL = 4.5; EXPRESSED IN ADULT LIVER, SIGNAL = 6.2; EXPRESSED IN HEART, SIGNAL = 4.3; EXPRESSED IN FETAL LIVER, SIGNAL = 4.6; EXPRESSED IN BRAIN, SIGNAL = 5.3; EXPRESSED IN PLACENTA, SIGNAL = 3.5; EXPRESSED IN BONE MARROW, SIGNAL = 5.5
tgctctggagacattttccctattgtcctggggattaatatctggctcctcattacttatgcaaatttctgcagctggcttgaatttctccccagaaaataggtttttattttctatcacatggtcaggctgcaaattctccaaacttttatgctctgcttccacttgaatgctttgcagcttagtaatgtcttctgccagataccttaaatcatctctctcaagttcaaagtaagttccacacatctctagcacaggggcaaaatgccaccagtctctttactaaagcagagaaagaatcacctttattctagttctcaacaagtttctcatctccatctgagaaaacctcagtctggacttcgttgtccatatcactatcagcattttggtcaaagccattcaacaaatctttagggagttccaaactttcccacatctccctgtcttctgagccctcaaaactttctaacttttgcctcttacctagttccaaagttgcttccacattttcaggtatctttgtagcagcaccccact

SEQ ID NO: 7062 - DNA, 561 bp, Homo sapiens
  MAP TO AC013451.7; EXPRESSED IN PLACENTA, SIGNAL = 1.9; EXPRESSED IN FETAL LIVER, SIGNAL = 1.6; EXPRESSED IN LUNG, SIGNAL = 1.9; EXPRESSED IN HEART, SIGNAL = 1.3; EXPRESSED IN BONE MARROW, SIGNAL = 1.3; EXPRESSED IN ADULT LIVER, SIGNAL = 1.7; EXPRESSED IN BRAIN, SIGNAL = 2.1
ttgaccccatatggaagaggaagtgggtggggccaggccatgagagaaggctgccagggttgggtgctgctgctccaagctccctttcctaatgccacagagatgggatgcccagggacccaggattaacacccacacttctctgaggtgctggaaacttaggggaaaggaaaatccctcaggcatctcccccagctcagatacccttgtcagggatggtcccggcctcaagccaggtgtccgtgacgacccggaggggctgcctctctgctggcccgggcagtgccccgctgctcctctgcccttgctcccttgggggccttgccagttcctcctcctcggctttcctcatggacaggcggatgtcggagctcgcgtaggtgtagccgtggccggcagggcagatctctctgaaggcctctgcaaagccaacagccagaggacaaactgagaggtgctgttcctgcaggaaaccagggccttcctttccctccctttgggagacacggcaattgtggcagcaaggagggagggagccccaggttgggataagcacgtgag

SEQ ID NO: 7063 - DNA, 523 bp, Homo sapiens
  MAP TO AC005103.2; EXPRESSED IN LUNG, SIGNAL = 4.6; EXPRESSED IN HELA, SIGNAL = 5.2; EXPRESSED IN PLACENTA, SIGNAL = 3.8; EXPRESSED IN FETAL LIVER, SIGNAL = 3.6; EXPRESSED IN ADULT LIVER, SIGNAL = 5.3; EXPRESSED IN HEART, SIGNAL =   4; EXPRESSED IN BRAIN, SIGNAL = 3.6; EXPRESSED IN BONE MARROW, SIGNAL = 4.3
tgatggctgttttcctgttgtgcagatcccgtaccagctttggatctcggacagcaactccagctcaaagtgcagcgcctgcacgatattgaaacagagaaccagaaacttagggaaactctggaagaatacaacaaggaatttgctgaagtgaaaaatcaaggttggtggaaaatgcgttctttgctttttcttttcttctttttttttcctcttctttttattttaattggcttttcccatacttttgagaccagctctccttgtaatatacacgtcataaagtcagggtggggcaggaatctgagtcgttaaagagagatgataatcatgctgagctatttcgaagtaaaacttttcctctgcacaacaagatgtaagattttattgccctctgatgagaccgatcaggattctttgaaaattcttcccgtatcattaggtgattgggtctgcctcttgaaaggcccatgcattgcctccaggcgacacctgtcagagagccagctcatgatcaaagggt

SEQ ID NO: 7064 - DNA, 508 bp, Homo sapiens
  MAP TO AC013396.4; EXPRESSED IN LUNG, SIGNAL = 1.7; EXPRESSED IN PLACENTA, SIGNAL = 1.8; EXPRESSED IN ADULT LIVER, SIGNAL = 1.7; EXPRESSED IN HEART, SIGNAL = 1.9; EXPRESSED IN BRAIN, SIGNAL = 1.3; EXPRESSED IN FETAL LIVER, SIGNAL = 1.1; EXPRESSED IN BONE MARROW, SIGNAL = 1.5
cagagttcaaggctgcactgagctatgatggtaccactgcactccagagcatgggcaacagagcaagaccgtctcttaaaaaaaaaaattcctatatatggatgaagagtggtaaatcttcccacccctttccctcaccctcccaggttcccttacctgagatgtcattactctttacatattctttgagatattttatgaatctgcaaagaccttttttgtttttactatttgctttaatacaggtttaaaaagctcccatttcttcactttcatgcagtgtcatcccataaactgactatgacactggttgtgatggtgctgccgtggccagaggcaattgaagaggtcaccttctacagtgcttggaagagtctcaagctcacagggaagaactaataaattattctaaaatgcattaattagaactctagatccatcaatattttgagaataacacacttcagccttatctgaaagtacattcacattgcatcacagcgattct

SEQ ID NO: 7065 - DNA, 593 bp, Homo sapiens
  MAP TO AC025826.1; EXPRESSED IN BONE MARROW, SIGNAL = 1.2; EXPRESSED IN HEART, SIGNAL = 1.2; EXPRESSED IN LUNG, SIGNAL = 1.4; EXPRESSED IN PLACENTA, SIGNAL = 1.2; EXPRESSED IN ADULT LIVER, SIGNAL = 0.99; EXPRESSED IN BRAIN, SIGNAL =   2; EXPRESSED IN FETAL LIVER, SIGNAL = 1.6
tacctgtccaaaaaccggacaagtcttacagattagttcaggatatgcgccttatcaaccaaattgttttgcctatcaaccctgtggtgcccaacctgtacattcttttgttctcaatacctccctccacaactcactattccattcttgatcttaaagatgcttttttcacaattccactgcacccctcatcccagcctctctttgctttcagactgaccatgacacccatcagtcccagcagcttacctgggctgtgctgctgcaaggtttcatggacagccctcattacttcagccaagctgtttctcgtgatttactttctttccacccctctgcttctcaccttattcaatatattgatgaccttcttctttgtagcccctcctttgaatcttctcaacaagacatacttctgctccttcagcatttattctccaaaggatatcaggtatccccctccaaatctcaaatttcttctccatccattacctacctcagcataattctacataaaaacacaagtgctctcaaaccccaaccccttctacaaaaaaacaactcctttccttcctgggcatggttggatactt

SEQ ID NO: 7066 - DNA, 554 bp, Homo sapiens
  MAP TO AL133319.21; EXPRESSED IN PLACENTA, SIGNAL = 1.9; EXPRESSED IN ADULT LIVER, SIGNAL = 2.3; EXPRESSED IN HELA, SIGNAL =   4; EXPRESSED IN HEART, SIGNAL = 2.5; EXPRESSED IN FETAL LIVER, SIGNAL = 3.3; EXPRESSED IN LUNG, SIGNAL = 2.3; EXPRESSED IN BRAIN, SIGNAL = 2.1; EXPRESSED IN BONE MARROW, SIGNAL = 3.2
ataattcttgcggaagaccgtgtgatagttttctgtgtgtcataaattatttcaaaccctttgcagtttcagtatgaaatatttctaatgaacaactcctttgaattatactagcaacattctatgtggctatttcagaggataatatgtctacatttttgctgtatgtttttgtactcttaaccacatttaaaccattgttaaccttggaacatcctaagatctggccctgtattttttacatcttttaaagaggtgacacaccctttataatgtgcatttttcactttttaaacctaccatttactttttaagacattttgaacgtttatttcatcctattgtgatttttaatttttctccattatcgcttacaatgtttatatataatttatgataataatgtatatttgcaatgcatataattcacctttttgccaattgatcttcattaagtcagtcaacaagagaagcttaataatgttcatgtcctttaagatgctatttaccttcatggttcagtctataaaaattgggtccaagacaaaggaaca

SEQ ID NO: 7067 - DNA, 508 bp, Homo sapiens
  MAP TO AL109624.11; EXPRESSED IN BONE MARROW, SIGNAL =   1; EXPRESSED IN LUNG, SIGNAL = 1.4; EXPRESSED IN PLACENTA, SIGNAL = 1.6; EXPRESSED IN HEART, SIGNAL = 1.6; EXPRESSED IN FETAL LIVER, SIGNAL = 1.1; EXPRESSED IN ADULT LIVER, SIGNAL = 1.2; EXPRESSED IN BRAIN, SIGNAL = 1.2
tactttttcccacagccagggctcatcctggatggttccagaccctttctatctttcctctctgctgtccttttcctatgatgttgccttcatgcctgttgcttcatagtcacaagatggctgctcttagtctcacctcagaattccagaccagcaaaggagggaggggtggggcctatattggtgaaacaaaagctgtccctgaaatccccagcagatttttacttgcttttcattgtcaaacaggcattgttatcataggcgatgtcagctccatgaggattattgcccctgaagaccttccaggggataagatggtgaaggtggagacagtgatactgatgatcttgaacctgtctgtgtaggccgaggctcatgtgtgtgtttgtgtcttcgttttttacaaaaaacttcaaaaagctaaaacaaaattttaggtagaaataaggatatagtccttattctttttgtacagctgtacaatgtgtttgtgttttaagctaagtgc

SEQ ID NO: 7068 - DNA, 544 bp, Homo sapiens
  MAP TO AC013698.3; EXPRESSED IN HELA, SIGNAL = 9.8; EXPRESSED IN HEART, SIGNAL = 7.6; EXPRESSED IN LUNG, SIGNAL = 8.4; EXPRESSED IN PLACENTA, SIGNAL = 8.4; EXPRESSED IN ADULT LIVER, SIGNAL = 8.4; EXPRESSED IN BRAIN, SIGNAL = 5.4; EXPRESSED IN FETAL LIVER, SIGNAL = 7.8; EXPRESSED IN BONE MARROW, SIGNAL = 8.5
actttccatccgatgagtgccaaaaccattgcatccagatctgctgcagacaagaacagagctttcaatggaaattttaagtaagtgagatcaagatcctgaagcatttctttgaagaactgtaacaggagatgaaacatggctttaccagtatgatcctgaagataaagcacaaccacaatggctaccaagagagagaagtggtccagtcaaagcacaagcagactggtcaagagcaaaggttggcaacaattctttgggacgctcaaggcaggttgctggttgactttctggaacaccaaagaactatcatgaaaagttagccaaagctttagcggaaaaaggcccaaagtttcatcagagactcctcatacactatgtaaatgcccctacttactccgctcatcaaacaagggcaattttgagagtttcaatgggaaattattaggcatccaccttatagacctgatttggctccttcttactcctttatgtttcctaattgatatagattggatatctgtcccctccaaatctcatgttg

SEQ ID NO: 7069 - DNA, 539 bp, Homo sapiens
  MAP TO AC007000.2; EXPRESSED IN HEART, SIGNAL = 6.4; EXPRESSED IN FETAL LIVER, SIGNAL =  18; EXPRESSED IN BONE MARROW, SIGNAL =  13; EXPRESSED IN BRAIN, SIGNAL = 7.8; EXPRESSED IN HELA, SIGNAL =  10; EXPRESSED IN ADULT LIVER, SIGNAL =  12; EXPRESSED IN PLACENTA, SIGNAL = 3.7; EXPRESSED IN LUNG, SIGNAL =  11
ggcaggaaaacagtcagctcaatgggatccatgtcgtgtgtagtcaccaccagcggagctttcttgttatccacaaaggtggtgacggtgttaactcctgctcgaaagacaggtagtctcttcatggggaggtcccctttgcccacaactctgcctgggccaacagcctccacttcttctcttgctttgtctctggtctgtatttgtgggccagcttaagcagctgagtagctgtttggccttccagggcctgggtgaactggttaatcgcaggaggcactttcagctgcttatagagtatggatctctgccattgcaacctgatatagcggggccatttcacaaagcaggtgaggtctcttttgggctggatgtcctgtccaatgccaaaattcttaggccttttctcaaacaggggattcaccactttcttggcctcctgcttcttcacaaaagcaggggccagagccaacttcttccccttggcctcctttcctttcggcatcttgggcgacgggaggcgcacacttgttgtttta

SEQ ID NO: 7070 - DNA, 530 bp, Homo sapiens
  MAP TO AC007164.3; EXPRESSED IN LUNG, SIGNAL = 2.2; EXPRESSED IN PLACENTA, SIGNAL = 3.2; EXPRESSED IN ADULT LIVER, SIGNAL = 2.2; EXPRESSED IN HEART, SIGNAL = 2.1; EXPRESSED IN FETAL LIVER, SIGNAL = 2.6; EXPRESSED IN BRAIN, SIGNAL = 2.9; EXPRESSED IN BONE MARROW, SIGNAL = 2.2
gggtgtgtcagtgagtggtgattgaatgtgaagacctaggatattctgtacactatgaacttgtaaacagtgtacacttagattgcactgaatttataaaaattggttttctttctacaacaataaattaaccttagcttactgtaaatttttactttaaaactttttattttttttaactttttgattcttttgtaataacagcttaaaacacaaatacactgtacagctgtctgaaatattttctttatagcctaagcttttttctatttagaaaatttttaaactttttttctactttgtaagcttaaataaactaacacacaaacacacacactaggttaagcctacacagggtcaggaccctcaatctctctatcttccacctctacatcttgtcccactggaagatcttcaggggcaataacacacatggagctctcatctcctgtgataataattccttcttctgaatatctcctgaaggatcttgcctgaggcaatttcacagtgttcttttgagcagaagg

SEQ ID NO: 7071 - DNA, 505 bp, Homo sapiens
  MAP TO AL121871.8; EXPRESSED IN PLACENTA, SIGNAL = 4.4; EXPRESSED IN HELA, SIGNAL =  12; EXPRESSED IN FETAL LIVER, SIGNAL =  14; EXPRESSED IN BRAIN, SIGNAL = 8.4; EXPRESSED IN BONE MARROW, SIGNAL =  17; EXPRESSED IN ADULT LIVER, SIGNAL = 7.1; EXPRESSED IN HEART, SIGNAL = 5.7; EXPRESSED IN LUNG, SIGNAL = 7.1
tgccctaaacaatgtcctggaaaattttcctggtagttttcttttcttttttctttgtttcaagttgtaatcaaagcttgtgtataagattactttattcctgcatcttctcaattgtttcttccttgtatttgcccttttgctttcctacttggcaagatttggctttccgttcacggatatttttgcggtctttgtccagttttagcctagtgataaccaccttgctggggtgaatgcctacgtggacagttgtgccattagccttttcccgctgcacccgttcaatgtagatagcatatttcttcctgtaaaccttgactattttgccaatttgttgacctttatagtgtcctcgtacaacctgaacttcatcatccttttggatgggcatggatcacccgttatacttctgtttcagctcgttggaaagaggggaagacaatcttcccgtgaatgtaggaaggtgcattgaaatgccttttgcgactcttccttcagttgg

SEQ ID NO: 7072 - DNA, 551 bp, Homo sapiens
  MAP TO AC011841.3; EXPRESSED IN LUNG, SIGNAL = 3.2; EXPRESSED IN ADULT LIVER, SIGNAL = 3.2; EXPRESSED IN FETAL LIVER, SIGNAL =   3; EXPRESSED IN BRAIN, SIGNAL = 2.6; EXPRESSED IN BONE MARROW, SIGNAL = 3.4; EXPRESSED IN PLACENTA, SIGNAL = 3.6; EXPRESSED IN HELA, SIGNAL = 3.8; EXPRESSED IN HEART, SIGNAL = 2.9
tcttgcctaatttccttggctaggacttccagtactatgttgaataagagggctgaaagtttggacgatttgtcttgttccagatctcagagagaaagctttcaacttttccttattcagtataaagttagcattgctttttcataaatggcctttattgagttaaggcacataccttctattcctaacttgttgagagttttcatcataatcaaggctgaatttcatccaattcttcttctgcatatgcaaaagctacaaaaatgaaaatacttaatgtgatggctaatacagggtgtcaaattgattggattggaggatagaaagcattgatcctgggtgtgtctgtgagggtgttgccaaaggacattaacatttgagtcagtgggctgggaaagggagatccactcttaattgggtgagcaccatctaatgagctgacagtgaatataaagcaggcagaaaaacgtgaaaaagagagactggcctaagctcccagactacatctttctcctgtgctggacacttgcagccctcaaacatcagactcc

SEQ ID NO: 7073 - DNA, 585 bp, Homo sapiens
  MAP TO AC015649.5; EXPRESSED IN PLACENTA, SIGNAL = 3.4; EXPRESSED IN HEART, SIGNAL = 3.5; EXPRESSED IN BONE MARROW, SIGNAL = 4.8; EXPRESSED IN LUNG, SIGNAL =   2; EXPRESSED IN ADULT LIVER, SIGNAL = 0.53; EXPRESSED IN HELA, SIGNAL = 5.1; EXPRESSED IN FETAL LIVER, SIGNAL = 4.7; EXPRESSED IN BRAIN, SIGNAL = 3.1
catgttgccctctgtctgcccatccaggttactcctcactgcaggacgagctgctgtcccctgcctccctgggctgtgcactttcctctccgctacgtgcagaccagtactggaatgaggtggccgtcctagacgccatccccttggcggccacggagcatgacaccatgctggagatgtctgacatgcaggtgtggtctgcgggcctcacgccttctctggtcactgctgaggactcctctctggagtgtagcaaggctgaggactctgatgccacaggtcacgagtggaagttggagggggcactctcagaggaaccgcggggccccgagttgggctctctggaacttgtggaggacgacacagtggattcagatgccacaaatggccttatcgatttgcttgaacaggaggaaggtcagaggtcagaagagaagctgccaggttctaagaggcaggatgacgcgacaggtgcagggcaggactcagagaatgaagtgtctcttgtttcaggccatcagagggggcaagcccgaatcacacattcccccaccgtgagtcaggtgacggagaggagtcaggaca

SEQ ID NO: 7074 - DNA, 510 bp, Homo sapiens
  MAP TO AC022995.2; EXPRESSED IN HELA, SIGNAL = 4.5; EXPRESSED IN HEART, SIGNAL = 3.4; EXPRESSED IN LUNG, SIGNAL = 3.9; EXPRESSED IN PLACENTA, SIGNAL = 5.4; EXPRESSED IN ADULT LIVER, SIGNAL = 3.1; EXPRESSED IN BRAIN, SIGNAL =   3; EXPRESSED IN FETAL LIVER, SIGNAL = 3.5; EXPRESSED IN BONE MARROW, SIGNAL = 3.4
gcccacagtggttcaatttcttgaacaattcctgcatgtgaatttggctgcttgcatgccctgccctggaagatgtattctcattgtgtgttcacccacgaactcagtatataggaagttgcctcttagatgtggggtatttttgaactgcacagttaagaattttcccaagtccatatccataaggtgatcagattgttgtaagatgctgctttagtctgttttgtgtctccataacagaataccacagactgggtaatttgtaaagaaaataaatttatttctcacagttctgaggttgggaagtccaatatcaaggtgctggcatctggtgaagacctctgtgctgtgtcagcccgtggtggcaggctgatgggccagtgagtgtgagagagcaagatatgatactcacagcctccagccctattataatgggcattaatccattcatgaaggtggagccctcatgacctaaacacctcccgttagggtccacctcccaacactgtt

SEQ ID NO: 7075 - DNA, 505 bp, Homo sapiens
  MAP TO AC011218.4; EXPRESSED IN LUNG, SIGNAL = 2.8; EXPRESSED IN PLACENTA, SIGNAL = 3.8; EXPRESSED IN ADULT LIVER, SIGNAL = 4.1; EXPRESSED IN HEART, SIGNAL = 3.1; EXPRESSED IN FETAL LIVER, SIGNAL = 2.6; EXPRESSED IN BRAIN, SIGNAL = 3.3; EXPRESSED IN BONE MARROW, SIGNAL = 3.1
cagattggagggctcagaagaacactggaaaatgtgggaaaatttggaacctcctagagacttgctgaatgactttgacaaaagtgctgatagtgtattgaacaataagttccaggccgaggtgttctcagatggagatgaggaacttcttgtgaactggaacaaaggtaactctcgttatgttttagcaaagagaatggcagcattttgcccctgtcctagagatttgtggaacttttaacttgagagtgataatttagggtatctgctggaagaaatttctaagcagtaaagcattcaagaggtgacttgggtgatgttaaaggccttcggttttataaaggaagcagagcatacagttttggaaaatttgcagcctgacaatgtgatagagaagaaaatcccattttctgaggataaattcaagctgtctgcagaaatttgcataagtaataagaagctgaatgttaatcccaaaaacaatggggaaaatgtctacagggca

SEQ ID NO: 7076 - DNA, 553 bp, Homo sapiens
  MAP TO AC011929.3; EXPRESSED IN LUNG, SIGNAL = 3.1; EXPRESSED IN PLACENTA, SIGNAL = 2.7; EXPRESSED IN ADULT LIVER, SIGNAL = 2.5; EXPRESSED IN BRAIN, SIGNAL = 2.6; EXPRESSED IN BONE MARROW, SIGNAL = 2.7; EXPRESSED IN FETAL LIVER, SIGNAL = 2.5; EXPRESSED IN HELA, SIGNAL = 3.5; EXPRESSED IN HEART, SIGNAL = 2.8
ggttgaaagaagatgcctggagggaaaggagtactctcaagggtttctgagaatgttgtgttcacctgctaatgtctcacctgccaggtcttgaccctgatgataaggtttggggaatgacttgtctctgaaatacttcttgacatggtttggctgtgtccccacccatatctcatcttttgaattgtagttctcataatccccatgtgtcacaggagagacctggtagaaggtaattgaaccatggggacagttacctccatactgttctcgtgatagtgagttctcatgagagctgatggttttatagaggcttttccccactttgctctgcagttctccttgctgccaccacgtgaagaagggtttgcttccccttctgccatgattgtaagtttcctgaggcctccccagccatgctgaactgtgagtcaattaaacctctttcttttgtaaattaccccgtctagggcagttctttatagcagtgtgagaacggacaaatacacttctcaagtacttcacacatgtatgcacactcctgtgactgcat

SEQ ID NO: 7077 - DNA, 501 bp, Homo sapiens; identical to SEQ ID NO: 6896
  MAP TO AC007326.28; EXPRESSED IN LUNG, SIGNAL = 2.9; EXPRESSED IN HELA, SIGNAL = 7.7; EXPRESSED IN HEART, SIGNAL = 4.7; EXPRESSED IN BRAIN, SIGNAL = 4.3; EXPRESSED IN BONE MARROW, SIGNAL = 4.2; EXPRESSED IN PLACENTA, SIGNAL = 3.8; EXPRESSED IN ADULT LIVER, SIGNAL = 0.71; EXPRESSED IN FETAL LIVER, SIGNAL = 4.8

SEQ ID NO: 7078 - DNA, 587 bp, Homo sapiens
  MAP TO AC015473.3; EXPRESSED IN PLACENTA, SIGNAL =   4; EXPRESSED IN ADULT LIVER, SIGNAL = 2.9; EXPRESSED IN HELA, SIGNAL = 3.6; EXPRESSED IN HEART, SIGNAL = 2.9; EXPRESSED IN FETAL LIVER, SIGNAL = 3.4; EXPRESSED IN LUNG, SIGNAL =   4; EXPRESSED IN BRAIN, SIGNAL = 3.1; EXPRESSED IN BONE MARROW, SIGNAL = 4.1
tgcctcctgagcattctctccctaccaccactacctcagatggttttgatactatctatgcaaatcctatcctcacagcccagttcaactctacaatacccttaaaagctttgtacaattattttcccttccacagagctgcccccatctctaggaattaaataactttctataattgtaaactatttggtatttgcttacatcccttcccaattagatgtccaaacaccttgggttgaattctttttatcactcccacaaataacaagtaggtgctcaaagtaacatagcccataagtcatatgctattaaaaaaaaaaaaagtcacttacctaaatcacctgtaaccctgtaagatccatttgcaaaaatccagaagaaaattcctctggcacttctaatcaaaataccacctttatttactcttcctgcaatgaacacacctcctgtgtcaggggtctctatgtaaacatcacactttgtagtcagattggtcctgcaaaataaaacggttgattagtactctttaaaatatgccctttgtaacatagtacagatatgtcatttcacagcacatgcttccaaac

SEQ ID NO: 7079 - DNA, 513 bp, Homo sapiens
  MAP TO AC013625.3; EXPRESSED IN LUNG, SIGNAL = 4.3; EXPRESSED IN PLACENTA, SIGNAL = 3.6; EXPRESSED IN FETAL LIVER, SIGNAL =   6; EXPRESSED IN BRAIN, SIGNAL = 6.2; EXPRESSED IN BONE MARROW, SIGNAL =   3; EXPRESSED IN ADULT LIVER, SIGNAL =   4; EXPRESSED IN HELA, SIGNAL = 5.5; EXPRESSED IN HEART, SIGNAL = 4.7
ggcagtttgagaacctctgcaagctcctggaagaaaacttgaagaagaaaactgagaaagtgaaaatctccaatagtctgtttcttcatcctgcagctgcagtcacaggtgcactatgactggcacctacagctgaacagccaatatgaagtagcttgtgaaagctcagacactttgagacaactctataatgggctacatgatggccaaaaagcacctggaaatcaaccttgaccaacctattgtggagacactgcagcagaaggctgaggtggacaaggacgacaaagctgtcaaagacctgggggtgctgctgtttgaaactgtggggctctcttctggcttctcccctgaggattctcagacctactccaatagcatctaccatgaacaagctcggtctagctacagatgaagatgaagtggcagcagaggaagccggtgatgctgttcctgatacaatactccctcccgactcgagggcgattaggatgtgtcttgcatggaggaggt

SEQ ID NO: 7080 - DNA, 592 bp, Homo sapiens
  MAP TO AC015823.3; EXPRESSED IN LUNG, SIGNAL =   2; EXPRESSED IN ADULT LIVER, SIGNAL = 1.3; EXPRESSED IN HELA, SIGNAL = 3.2; EXPRESSED IN HEART, SIGNAL = 2.5; EXPRESSED IN BONE MARROW, SIGNAL = 2.5; EXPRESSED IN BRAIN, SIGNAL = 2.3; EXPRESSED IN PLACENTA, SIGNAL = 2.5; EXPRESSED IN FETAL LIVER, SIGNAL = 2.2
tcttatcccctggcaacaaccattctactctctggttctgtgtgtttgaaccttttatataactccctgactcttttatataactcctttaagtagtattatccagcatttattcttctgtgactggcttatttcacatagcataatgtcttcaaggtttatccatgttgttgcctatggcaggattgccttttattttaaaggctgaatcatattccattgtatgtatataccatattttctttgtcccttcatctgtcagtagacatgtaggttgtttccacatcttggctattgtgaatcatgctcagtgagcatgggagtggaaatatgtctttgagatcctgatttcaattcctttggataaatatccagtatcaggattactggattatatagtatttctatttttaatttttttttttaggaatctccatactgttttctacagcagctgcactgttttacattctcaggatggcacaaataatcagtttcttcacatctatgccaatacttcttatttcgtctttttcgataaaaaccatcttaagaggtgtaaggtgacatctcaatgtggtgttgatttgcg

SEQ ID NO: 7081 - DNA, 560 bp, Homo sapiens
  MAP TO AC027273.2; EXPRESSED IN PLACENTA, SIGNAL =  12; EXPRESSED IN ADULT LIVER, SIGNAL =  12; EXPRESSED IN HEART, SIGNAL = 8.3; EXPRESSED IN FETAL LIVER, SIGNAL = 7.6; EXPRESSED IN BONE MARROW, SIGNAL =  10; EXPRESSED IN LUNG, SIGNAL = 9.2; EXPRESSED IN HELA, SIGNAL = 6.6; EXPRESSED IN BRAIN, SIGNAL = 7.6
tggaagggactttggaactgtataacaggcagaggttaaaacagtttggaggactttgaccaaaatgctgatagtgatatggacaatgaaatcccggttgaggtggtctcagatggagatgggaaatttgttgggaactggaacaaaggtgactcttttcatgttttagcaaagagactggcagcattttgttcctgccctggagatctgtggaactttgaatttgatagagataatttagagcatctggcagaagcaatttctaagcaacaaggcattcaagaagtgatttgggtgctgttaaaagcattcagttttatgtatccacagatatatggatacataaaatttgtatttggaattggaacttatgtttaaaagggtagcagagcataaatgtttgaaaaatttgcagcctgatgaggatgcgatagaaaagaaaatctcattttcagagaagaaactcaaacctgctgcagaaatttgcttaagtaatgaggagccaaatcttaattgccaagacaatgagaaaaatgtctccagggcatgttggagaccta

SEQ ID NO: 7082 - DNA, 574 bp, Homo sapiens
  MAP TO AC011181.5; EXPRESSED IN LUNG, SIGNAL = 1.7; EXPRESSED IN PLACENTA, SIGNAL = 1.4; EXPRESSED IN ADULT LIVER, SIGNAL = 2.5; EXPRESSED IN HEART, SIGNAL = 1.7; EXPRESSED IN FETAL LIVER, SIGNAL = 2.4; EXPRESSED IN BONE MARROW, SIGNAL = 2.6; EXPRESSED IN BRAIN, SIGNAL = 2.5
atgcttgtgtttctccaggcaaaaatcaacagctgatttggataccatcaagacacctgaaaccttatgagtcagattccgggaggatccccaggacccctcagttgcagccatgttgagactgacgctgaggaggaccccatctgtcacaagcaacacctgtcgagcgcagcacccacctggggacagatcaagaagctgtcagagatggcggaagaaaatctgaggaaagcaggacaaccagtcacaatgaataatttaatggtagctatgatagtggtgatcactattgctgtgagtatttcttcaacaagagctgacacagagaacaattatacttattgggcatatttatcaatcttggctggcaataatgcctggatgtaatcactctatgacacagttacacatgctttctgatctcagtatttaccataataaatctgctcctataattgaggcataccgccctcaaaaacctatttgtaaacaggattggacccagttagaaaaaatgaaggtacttgtttaggaagattgctttgcagaacagacagaggtgctgcacaatgat

SEQ ID NO: 7083 - DNA, 502 bp, Homo sapiens
  MAP TO AC025747.3; EXPRESSED IN LUNG, SIGNAL = 3.9; EXPRESSED IN PLACENTA, SIGNAL = 4.1; EXPRESSED IN FETAL LIVER, SIGNAL =   3; EXPRESSED IN BRAIN, SIGNAL = 2.7; EXPRESSED IN BONE MARROW, SIGNAL = 3.6; EXPRESSED IN ADULT LIVER, SIGNAL = 4.2; EXPRESSED IN HEART, SIGNAL = 3.3
acaggtgtgagcaactgtgcctggccaacttcattttctgttaccatttttgtcatgtttgaaagaattttaaaataagatgaatctatcacttttgaaacagaaaaagtagtaagaataatacttattttattataatgtcaaaaataaagtaaaaagtaacaaagattagaatggaaagtagctgaacaaacgatatcatccccagtatgaaagaaaccaaagttacctatgacagtcttcaggttgtgcacgtaaatgactgcattgttggagccagaggccatcagatagctcaattctggctggctgccatgctcatgatgccagctaatggtattcacaagcttgtgatgctgttggatagtacagatcagtttcaggttgggaatctgaaatatttctattgatctggaataagaaacacatcaaaacaagaaagatggatgatcaaattacaagttaccatgcaaatagtagctccctcattccgtcagtcaag

SEQ ID NO: 7084 - DNA, 515 bp, Homo sapiens
  MAP TO AC022045.2; EXPRESSED IN ADULT LIVER, SIGNAL = 2.5; EXPRESSED IN HEART, SIGNAL =   2; EXPRESSED IN BONE MARROW, SIGNAL = 2.2; EXPRESSED IN LUNG, SIGNAL = 2.5; EXPRESSED IN PLACENTA, SIGNAL = 2.3; EXPRESSED IN HELA, SIGNAL = 3.2; EXPRESSED IN FETAL LIVER, SIGNAL =   2; EXPRESSED IN BRAIN, SIGNAL = 2.1
tgaaacagagacccagacccagtgagccttgagcggactcacaggctgtgagacttgatgtcgatgccctgtcagtccgaggactgcagagggttttgccgtcagaggaggtagatccaaaagatgccctccagccccagttctgccactcggagcctcggtctgcctgggagctggacgaggagacttcctctggtcccaaaaagaaatggaagcctcctctttcctgagaaggctctctgggttcccacgggctgggaagaggcccaggggtgggaaaggattgcccggggcagcatgcaccgtggtcactgcggggctccagaggtgccctgggaccccccccccacctcaaatcgccacagccaccctcgcctcccctgacactgcccttcccaacttccaggtcggagctcctcccaccctcacgccatcccatctcccaacacctccagggtgctcttgtaaaagtgctcaggtgaccctagcacccctgcaatctggatgaagcactg

SEQ ID NO: 7085 - DNA, 515 bp, Homo sapiens
  MAP TO AC021855.3; EXPRESSED IN LUNG, SIGNAL = 3.5; EXPRESSED IN PLACENTA, SIGNAL =   3; EXPRESSED IN ADULT LIVER, SIGNAL = 3.8; EXPRESSED IN HELA, SIGNAL =   3; EXPRESSED IN HEART, SIGNAL = 3.8; EXPRESSED IN FETAL LIVER, SIGNAL = 2.6; EXPRESSED IN BONE MARROW, SIGNAL = 2.7; EXPRESSED IN BRAIN, SIGNAL = 2.7
caggaagagctggagaatggacttacctgggcctaccaaccgtggccattccaaattactcatcctttgaacaggaagggaaaagtcaatgtcttccttccccacatcctaaacctactacttcatctataatttgaatctcacctaatagcttcaccatttacatagtttccaaaaccagaatccttggatttttcctcaacaccttcttcttcatcatactacatatacaaaacaatcaccaatcaagtcctgttgattctatctacaaaattaaaaatgaaaattgccaactctcctccattttcctcctattcccttacttcacactattgtcatctcttttctggaagattaaaaattttctggccttggcctcatccaatttcttctctgataccagggtaacttttaaaatatgaatctggaaaacactatttataatagttcagacttcactccctctatgaagtctaccccaatgccttaggcatagtcgtctccttctgtgtcca

SEQ ID NO: 7086 - DNA, 561 bp, Homo sapiens
  MAP TO AL136438.8; EXPRESSED IN LUNG, SIGNAL = 3.1; EXPRESSED IN PLACENTA, SIGNAL = 2.8; EXPRESSED IN HEART, SIGNAL = 2.9; EXPRESSED IN FETAL LIVER, SIGNAL = 2.9; EXPRESSED IN BONE MARROW, SIGNAL = 3.1; EXPRESSED IN ADULT LIVER, SIGNAL = 3.3; EXPRESSED IN HELA, SIGNAL = 3.7; EXPRESSED IN BRAIN, SIGNAL = 3.5
tggctaacatcctggctctcctactcttagctgtatacttaggcaactttcttttttttttaattttattttaagttctggggtacatgcgcaggatgtgcaggtttgttacataggtaaacatgtgctatggtggtttgctgcacctgtcaacccattacctaggcattaagtccagcgtgccttagctatttttcctgatgctctccctccccaacccccacaggccccagtgtgtggtgttcccctccctgtgtctatgtgttcacactgttcagctccccatgcggtgtttggtcttctgtttctgcgttagtttgctgagggtaatggcttccagttccatccatgtccctgcaaaggacatgatctcattcctttctatggctgcacagtattctatggtgtatatgtaccacattttctttagcattctatcattgatgggcatttgggttgattccgtgtctttgctagtgtgaatagaaacaaggatttcttgaagagtcaaaaattttgtatcattccttctaccttgaactcgttttccattccacttga

SEQ ID NO: 7087 - DNA, 526 bp, Homo sapiens
  MAP TO AC019214.2; EXPRESSED IN PLACENTA, SIGNAL = 1.5; EXPRESSED IN FETAL LIVER, SIGNAL = 1.4; EXPRESSED IN HEART, SIGNAL = 1.3; EXPRESSED IN BONE MARROW, SIGNAL = 1.3; EXPRESSED IN LUNG, SIGNAL =   2; EXPRESSED IN ADULT LIVER, SIGNAL = 1.8; EXPRESSED IN BRAIN, SIGNAL = 1.5
gtccctctcccatcttcctcacctctgaggccctgtcccaccgagccagccctggttccccgttggacagctgacccttgtgccagccactcctctgctccttggagaaggaaaagtcgggagcggcagccggctgcactatgtcggcaggaaagagtccggaacggcccccggcagagccaaactgccagcctggaaggcacccagggatgtggctcacccactggaccctctgcccccgggcagcctctgccaagtggatgccctccctgtgtgagcccctgccggcctctggcgatacctggctccagggtggccaccggcagcagcttgatgaggtccccacggtggaagctgaggaggctgcagttgtcagtgatgtagctgcgcagggcgatgacatagccggagtcctgtgggcaagcaggcgagggcctggagcagcaagtctgcctgtgcctccctgtcctgcctgcccacctgctccccctgctggcctgcccctccacctagcaccccagacttc

SEQ ID NO: 7088 - DNA, 503 bp, Homo sapiens
  MAP TO AC019214.2; EXPRESSED IN BONE MARROW, SIGNAL = 1.2; EXPRESSED IN LUNG, SIGNAL = 1.5; EXPRESSED IN PLACENTA, SIGNAL = 1.6; EXPRESSED IN ADULT LIVER, SIGNAL = 1.5; EXPRESSED IN FETAL LIVER, SIGNAL = 1.3; EXPRESSED IN BRAIN, SIGNAL = 1.3; EXPRESSED IN HEART, SIGNAL = 1.3
tctggatccctgaaatgagctcctgctcacctccctcagggctggaaactccctccttcccagcgcagtcacaatcatagcgacaatgacagtggccagggcctctgggcttcgtgacactaacccatttactgccccagcaagcctccgggctcgacgcttgcatgccgaggaaaccaacaagcagaggagcaacctaggctcatccgagcggctaggcccagggatctgcacccaggcctgcctgactccaggggccacgctcttgaccgctgttttaaacgattccactcggtgtggggcgctgtgcctatcccccaccccgctgcccccacagaggcgtaccacttccccccgccggatgtgaaaggacccagtcctcgtcttctggaacatcttggaggtgacctctgtccgaaggcctcgggggctgtctagggcccggatgtccaggttggagcggatccgctaaaggaggaaggaggttgatcagtgctctgtgg

SEQ ID NO: 7089 - DNA, 511 bp, Homo sapiens
  MAP TO AC013818.3; EXPRESSED IN BONE MARROW, SIGNAL = 2.2; EXPRESSED IN LUNG, SIGNAL = 2.7; EXPRESSED IN HELA, SIGNAL = 2.6; EXPRESSED IN PLACENTA, SIGNAL = 2.7; EXPRESSED IN ADULT LIVER, SIGNAL = 2.9; EXPRESSED IN HEART, SIGNAL = 2.2; EXPRESSED IN FETAL LIVER, SIGNAL = 1.9; EXPRESSED IN BRAIN, SIGNAL = 2.3
aaaccaaccaagcaaccaaccaaacaaaaacccagaaaagcaagcaaaaaatgcaaacaattcataaaataagcaaaaattgttgaggaagaggataaaagtattgtataaaagaggattttgtgttaaattccagttttaatatgtccagcagagtgcctaacacaaattatacactcacaaattgctagtttctttccttccaccccaagagagaatgttaaatgttacctgccatagagggtctttctgctcagggaagagctcaaaatactggtgggccagttgcactggaggcagagtttgcaatttcaggttggtccagctctgcacaaagttgaccaagttcacaaaggtatataaccctaggcggtcatttccatagtttgataaatgggtcatgaaaatgctgatctgaaagataaataaaaatgaccacaaaaatatcatatgcttaagcttaaaagtagcagtacaagccccaggcagcacctcacctcaccttggaatt

SEQ ID NO: 7090 - DNA, 563 bp, Homo sapiens
  MAP TO AC025749.2; EXPRESSED IN HELA, SIGNAL = 7.9; EXPRESSED IN LUNG, SIGNAL = 7.4; EXPRESSED IN ADULT LIVER, SIGNAL = 6.7; EXPRESSED IN BRAIN, SIGNAL = 6.9; EXPRESSED IN BONE MARROW, SIGNAL = 5.8; EXPRESSED IN PLACENTA, SIGNAL = 5.8; EXPRESSED IN FETAL LIVER, SIGNAL = 5.5; EXPRESSED IN HEART, SIGNAL = 6.3
gagggggaacaggtaaggagaatgggtggcccaggtggagggcacagcacaggcaaaggccaggcaggttgggatctgggctcaagttgagctgtagtgcctgctggggcctcgatctccggtcccagcaagcctggccctctgtccccagggccgtctacctggtgcggcaccgtgacacacggcagcgctttgccatcaagaagatcaacaaacagaacttgatcctgcgtaaccagatccagcaggtctttgtggagcgtgacattctcacctttgccgagaacccctttgtggtcagcatgttctgctcctttgagacccggcgccacctatgtatggtcatggaatacgtggaaggtacgctcactggggcttgcatgcctccagcgatggggagctcacccctccacgcctgggagaaaatttttagaccaagttgaggtctgttctgtcctccatgaggtctcaccctgctttggggaaccctcaggaaccccagtctggggtagggagcccagccatgggggtttagggctggaggagcccagacaggagtgtgt

SEQ ID NO: 7091 - DNA, 528 bp, Homo sapiens
  MAP TO AC025749.2; EXPRESSED IN LUNG, SIGNAL = 1.7; EXPRESSED IN PLACENTA, SIGNAL = 0.74; EXPRESSED IN ADULT LIVER, SIGNAL = 0.82; EXPRESSED IN FETAL LIVER, SIGNAL = 1.8; EXPRESSED IN BRAIN, SIGNAL = 0.65; EXPRESSED IN HEART, SIGNAL = 1.3; EXPRESSED IN BONE MARROW, SIGNAL = 1.4
tgaagaagggaacctcatgccaaaggcctgggtcccttcctcctcatgcccaccacccccatgacgaaagccagagaggatgagggcaatgtggggcttccataccccaaatatgatcctggtgcctggtatggaaccccagagcctgccaccgtgtctctagtgatccttgaaaagttccagcatattttgggagtactcaacaccaacatcgatgggtggtggaaaatagcctttgctatcactgccattaaaggtgtggatggaagatacgcttatgtggtgttgaggaaaacagacattgacctcaccaagagggcgggagactcacggaggatgagatggaatgagtgatcaccattgtgcagaatccacagcagtacaagatcccagactggctcttgaacagacagaaggatgtaaaggatggaaaatatagccaggtcctagccagtggtctggacaacaagctccgtgaagacctggagcaaccgaagaagattccggcccatagagggatgcaccact

SEQ ID NO: 7092 - DNA, 542 bp, Homo sapiens
  MAP TO AC012571.3; EXPRESSED IN LUNG, SIGNAL =   3; EXPRESSED IN ADULT LIVER, SIGNAL = 3.2; EXPRESSED IN HELA, SIGNAL = 6.3; EXPRESSED IN BRAIN, SIGNAL = 4.1; EXPRESSED IN PLACENTA, SIGNAL =   4; EXPRESSED IN FETAL LIVER, SIGNAL = 3.4; EXPRESSED IN HEART, SIGNAL = 1.8; EXPRESSED IN BONE MARROW, SIGNAL = 3.4
atcggactgtccaactcacctggcaaccactcccagagcccctggaactctggcccaagactctctgactgactccttcccagatcttctcagcttagcagctgaagactgaagctgcccgatcacctcagaagcctcctggaccatcaaagatgctttaggtaactcttacagtggagggtaagtccgtccccttcttaatcaatacagaggctacccactccacattaccttcttttcatgggcctgtttcctttgcctccataactgttgtgagtattgatggccaggcttctaaacctcttaaaactccccaactctggtgccaactaggacaacattcttttatgcactcccttttagttatccccacctgcccagttcccttattaggccgagacattttaactaaattatctgcttccctgactattactgggctacagccacacctcattgccactcttttccccagttcaaagcctccttcgcatcctccccttgtatctccccatcttaatccacaggtatgggatgcctct

SEQ ID NO: 7093 - DNA, 540 bp, Homo sapiens
  MAP TO AC019222.3; EXPRESSED IN LUNG, SIGNAL = 3.3; EXPRESSED IN ADULT LIVER, SIGNAL = 2.7; EXPRESSED IN HEART, SIGNAL = 3.3; EXPRESSED IN BRAIN, SIGNAL = 2.6; EXPRESSED IN BONE MARROW, SIGNAL = 2.5; EXPRESSED IN PLACENTA, SIGNAL = 2.7; EXPRESSED IN FETAL LIVER, SIGNAL = 2.6
ccaagcttagctaacacgccaggaccacctgaatagctctccagaaccttctgcaattttaatttggtgagcctaaggtgggaccgaggaccctgcccttgcctggatggatgtggctagtccagctccagtgcacagagctacctctgggctgaacttgtttcaagctcctggcccatgtgtattccaacttctagttatcctagctccataaaacatggcatttttactaatgtcaattattatggattcctgaacgttattacctttcttgtatgttccaatactagacttagctcacttagctaccctctgatttttttcagtgctcttagtgatggcagcagtaggtggctacttgatgtggcggaattggcaacacaagaacatgaaaagcatgaactttgacaatcctgtgtacttgaaaaccactgaagaggacctctccatagacattggtagacacagtgcttctgttggacacacgtacccagcagtaagtcagctttgtgtctttatacaccatggcttgaagtgaga

SEQ ID NO: 7094 - DNA, 580 bp, Homo sapiens
  MAP TO AL133419.11; EXPRESSED IN LUNG, SIGNAL =   3; EXPRESSED IN PLACENTA, SIGNAL = 3.2; EXPRESSED IN ADULT LIVER, SIGNAL = 3.9; EXPRESSED IN FETAL LIVER, SIGNAL =   3; EXPRESSED IN BRAIN, SIGNAL =   3; EXPRESSED IN HEART, SIGNAL = 3.1; EXPRESSED IN BONE MARROW, SIGNAL = 2.8
ctcaaatgttttgccactcgttagacataaaatttgttttctatcatctgtcagtttcactctacattttatttcatggatgagacagaatgatcattagtagttagttggttgtaaggggaaacataaaataaaaatagaagttcatgggaaggattttccatatgcatctgcatggaaaaaaatttaagcaaaaggatttaacgtgctgatatttcaaactaccttttcataggatgaaatatgatttgcctgtatgtgattctgaaattcagatagtagaaactctacgggcaacgctatctcctctagaagttggtaaaataagaggcaagtcttattaaaaataattataattcttttcaaccaatatttatcggtgactcactcagggtcaaaaaagtaaatattttttaacggtaagaaggtacaaagaacagtatgatgccaaggaacacatgccactttttgatggagaatatgaaagcatcctgggggaagaaagagatgatgcagaccattcagagcaggtaggatttggataggtataaatcgatgttgaaaggaaggggctagcaac

SEQ ID NO: 7095 - DNA, 600 bp, Homo sapiens
  MAP TO AC017073.3; EXPRESSED IN HELA, SIGNAL = 2.9; EXPRESSED IN LUNG, SIGNAL = 3.7; EXPRESSED IN PLACENTA, SIGNAL = 2.9; EXPRESSED IN BONE MARROW, SIGNAL = 3.3; EXPRESSED IN ADULT LIVER, SIGNAL = 2.7; EXPRESSED IN HEART, SIGNAL = 1.5; EXPRESSED IN FETAL LIVER, SIGNAL =   4; EXPRESSED IN BRAIN, SIGNAL = 1.9
acatagacattgccctgagctgaatttttgtcaacataaatatgaataattcctccatgtttattacattcctcaatcacatcgtccttaatctctgtatcccatccaacttcttctgtttgagggttaaacatgttagagagttggaaacactgtgttgcaagtggctgaacagaagcagctgcagctaaagctgaagcttcagtctgctgggaaagtcttgtttgcaaatccataacaaaagaaaattctgccacagcaccaaatgccaaagagccactcatttgtagagcttgctgtgctgctggtggaatctgcaaacctgtatcctctgcaagtcttgccactaactgaagacgaccagttgttcccaaatcaattctagtcctttccagttcatcactgtccaaaaatgaactagtactcgaagcatcagcacgttcaataacatgaccaactttcattggcctccctgctagttcaaatccattaaattgttccaaagactttttggcacattctgaatcagaaaatgtaataaatccatatcccttggatcgaccagtttcactgtctatcgtcagctggatactttcaatc

SEQ ID NO: 7096 - DNA, 542 bp, Homo sapiens
  MAP TO AL133458.11; EXPRESSED IN PLACENTA, SIGNAL = 5.6; EXPRESSED IN ADULT LIVER, SIGNAL = 5.1; EXPRESSED IN HEART, SIGNAL = 4.8; EXPRESSED IN BRAIN, SIGNAL = 4.9; EXPRESSED IN BONE MARROW, SIGNAL = 4.5; EXPRESSED IN LUNG, SIGNAL = 5.1; EXPRESSED IN FETAL LIVER, SIGNAL = 4.3
ggggttctctctccttcaccagcatgttcttgcaaaactaaccaaacacatacaaagcgcaaacagtacaatagtgcactgcaccttcatgacccttacctgttccagcctcttcctacctcttccacatgtgatatgtgtgtacatacccacagacagaaacacagagacatgtttggaagccagtgtggatgccctgtgatctgtgtgtacacatgacaagtgcatacacacgcacataaaggaacccagagacgtgtttggaagccagtgtggacaccctgtgatctgtgcgtacacatttgacacctgcgtacacactcacagacagaaacacagagatgtgtttggaagccagcgtggatgccctgtatctctgcatacacgtgaacatgcatgccaggcccatacaggagcagagagacacatttggaagccgatgtacgccctgtgatctgtgcgtacacgtgacacatgcgtacacacccactgacaagaacacagagacgtgtttggaagccagtgtggacgccctgtaatct

SEQ ID NO: 7097 - DNA, 600 bp, Homo sapiens
  MAP TO AC023340.2; EXPRESSED IN HEART, SIGNAL = 3.5; EXPRESSED IN BONE MARROW, SIGNAL = 4.1; EXPRESSED IN PLACENTA, SIGNAL = 4.2; EXPRESSED IN ADULT LIVER, SIGNAL = 4.1; EXPRESSED IN BRAIN, SIGNAL = 3.7; EXPRESSED IN LUNG, SIGNAL = 4.1; EXPRESSED IN HELA, SIGNAL = 2.5; EXPRESSED IN FETAL LIVER, SIGNAL = 3.2
cgtatgaaagctcagggctctgccaaatgcagacttgaagcctggtcctgccacttaccggtgtggccttgggcaagttgcctaacctctctgagcctttgtttcctcatctataaaatgggtgaatgattttacagtatctgcatcttctagtgccaacaagaagatttaaaaagcaactgctggaaaaccgggcacgtaataggcacttaattctaatgatctcgttattcccctggcattgctgttacatttctaggaaaatcagctaagtcctagaactcctgcggctacctgggcctgggctaaccttctcccctaatggtgggtcagcctggcctccccagtgggtgccggaggcccctgctctgcaccccaccttggagcgatgcacctccccgtcgtcatcctccccgcccacgccgaggatcttgcgggtcttcaggcggctcacgaggtccgtctggctgtgcttcttcatcagaggcgggggctgcttggccgccatcttctcctccagcccggcctctgcagaagggctgaggggagacaccggcctcaggccacagttcctacccagcttccagaccctaggggaag

SEQ ID NO: 7098 - DNA, 591 bp, Homo sapiens
  MAP TO AL157392.2; EXPRESSED IN LUNG, SIGNAL = 3.5; EXPRESSED IN HEART, SIGNAL = 2.8; EXPRESSED IN BONE MARROW, SIGNAL =   3; EXPRESSED IN FETAL LIVER, SIGNAL = 2.8; EXPRESSED IN PLACENTA, SIGNAL = 2.9; EXPRESSED IN ADULT LIVER, SIGNAL = 2.5; EXPRESSED IN BRAIN, SIGNAL = 3.6
ctcctctggctctgaccatcgatgacagtttctctgcccagaaggtccttttattaggtgtgacatctcacagattttcagttgtggtgagtgagcatcccggcatggaatgcctaaattcttagaaggaaaaaaaagagagagagagagcgcaagcagggcattcattccttatttataaagggaaaggacctcggctgtgcggctgattaagagcagagccaggcccccagcccccggcactccccatgtcaccctcttcacataacagagtatccttcaatgacagacgcatctgttaagaaacaaagtagacaggtgggctccatccattccaaggaaatggccctttccctcgtctgcccctgagccaggaaatctccactttgcgtgtgtttacttcctccagtcccatattcacccaaactttttttgatatcctaggacaagcagggcataccatggtggctgggcctgagctacaaagggatcttccagtatgactaccatgataaagtgaagccaagaaaggtaaggctggtctcctgcttgggtttaactcctctcagatccagagaggaacaggcgtag

SEQ ID NO: 7099 - DNA, 517 bp, Homo sapiens
  MAP TO AC019214.2; EXPRESSED IN LUNG, SIGNAL =   3; EXPRESSED IN PLACENTA, SIGNAL = 3.1; EXPRESSED IN ADULT LIVER, SIGNAL = 1.9; EXPRESSED IN HEART, SIGNAL = 3.6; EXPRESSED IN BRAIN, SIGNAL = 3.3; EXPRESSED IN FETAL LIVER, SIGNAL = 3.1; EXPRESSED IN BONE MARROW, SIGNAL = 3.4
tgctcacaccgatagagtggccggccagaggatatgggctgtggaagcctgggtggcccttgggctcctgcagggacagagggcctctgtccctagtggtttgagggaaactggttgtatttaagcaaaagccacccagagggtgggtgaccaggaatgtgcagggcccagcctgccccacggggcccgggtctggggcaggcctgaccaagggaccctgctctccccctgcagagcacctggtgaatggccggatggactttgccttcccgggcagcaccaactccctgcacaggatgaccacgaccagtgctgctgcctatggcacccacctgagcccacacgtgccccaccgcgtgctaagcacatcctccaccctcacacgggactacaactcactgacccgctcagaacactcacactcgaccacactgcccagggactactccaccctcacctccgtctcctcccacggtgagtgacctcagccaaccctgcctctcccactaacccttcc

SEQ ID NO: 7100 - DNA, 506 bp, Homo sapiens
  MAP TO AC018730.3; EXPRESSED IN PLACENTA, SIGNAL = 2.4; EXPRESSED IN HELA, SIGNAL = 2.2; EXPRESSED IN FETAL LIVER, SIGNAL = 1.7; EXPRESSED IN BONE MARROW, SIGNAL = 1.7; EXPRESSED IN LUNG, SIGNAL = 1.8; EXPRESSED IN ADULT LIVER, SIGNAL = 2.1; EXPRESSED IN HEART, SIGNAL = 1.5; EXPRESSED IN BRAIN, SIGNAL = 2.3
gagcctcttgcggattgtagttaattcaaggcaacccaaccagagatatgggtgtggaggtacaggtcttcaggcttttagggggaaaaaatggggccaggaatgtaccttgatggaactcctgacaacggagtggtcaggactcatcttcagccagtagggacccacacagagtccctatagtgcagtcccctcgctgactgccagtcaggccacggaatgctgcaattcagtgcccttgttcagacttccattggtatctacagcttccaaaatattcagaacaacagccctgaaagtcatctggtcaagctttgcaatagaagaaagcttatcctccgattcccaaagccctgaagtcagggatttgattacacttatcatgatctcagcttccactgctccaaatgtgattagttttgtaattagttaatgtcattacctgtcatcaaatccagacagtgttggtctctaaaacctctcctggcagaaaatcccacaacctg

SEQ ID NO: 7101 - DNA, 501 bp, Homo sapiens
  MAP TO AC010789.7; EXPRESSED IN ADULT LIVER, SIGNAL = 1.3; EXPRESSED IN LUNG, SIGNAL = 1.4; EXPRESSED IN PLACENTA, SIGNAL = 1.3; EXPRESSED IN FETAL LIVER, SIGNAL = 1.5; EXPRESSED IN BRAIN, SIGNAL = 1.4; EXPRESSED IN BONE MARROW, SIGNAL = 1.4; EXPRESSED IN HEART, SIGNAL = 1.6
aatttggcatcccacaagaggagaggagaatgctttctctgtctttggttgcctctcccattcccatgctcctctcccatttggtggctgctcttaagtggcctctcactccccccagcacactgggacgctgccactgactggcatctctggagcctctttcctggaggctcagattcccatcctctgggtgttgtctggcccttttcttcctaagtgcattgtgttcttgcccattttcctgcccacttacaaaggcttatacggttaagccctttgcccaaggtcacagctggttagtaacaaaagccaggctagaacctgggttcaaccctcaaagtgaagtccttctgagcttccaatgaagggttttattttcctaacaaactgccttgtaacctgaagaggtgaaccccagccaatctcagacccactttttttttttttttttgctaatttagctgcaccttggccattccaggggtggcagagttcataagc

SEQ ID NO: 7102 - DNA, 574 bp, Homo sapiens
  MAP TO AC025249.2; EXPRESSED IN ADULT LIVER, SIGNAL = 1.7; EXPRESSED IN HELA, SIGNAL = 2.3; EXPRESSED IN HEART, SIGNAL = 1.6; EXPRESSED IN FETAL LIVER, SIGNAL = 1.4; EXPRESSED IN BONE MARROW, SIGNAL = 1.6; EXPRESSED IN LUNG, SIGNAL = 1.2; EXPRESSED IN PLACENTA, SIGNAL = 1.6; EXPRESSED IN BRAIN, SIGNAL = 1.1
tatctttgcccctgcatagcctgtcacgtggttggtaccattgcagagtatgtgtgtatgcatatgtcagtatgctcgatactgggtgactgaaagtatcagtgctgatttccatcttggctccacagatacaggtggaaacccgaaaacagagtattgtatgggagtttgaaaaataccagcgattactagagaaaaagcagccaccacatcggcagctgggggcagaggtagcagcagctctggccagcctacagcgggaggcagcggagaccatgcagaaactggagttgaaccatagcgagctcatccagcagagccaggtcctgtggaggatgattgcagagttgaaagagaggtcgcagaggcctgtccgctggatgttgcaggtgagtagtaggttttcctggtaaccctgagtgacagctgaagatagactgagactccaggagagagcatcagttacccttcagtagggactgccagccctctgccagctggtcatggatcctgtgtttccccagctaatacctgctgtttccctatccctggctggtggatgacctggtctgtt

SEQ ID NO: 7103 - DNA, 585 bp, Homo sapiens
  MAP TO AL133279.2; EXPRESSED IN PLACENTA, SIGNAL = 1.8; EXPRESSED IN HELA, SIGNAL = 2.3; EXPRESSED IN HEART, SIGNAL =   2; EXPRESSED IN LUNG, SIGNAL = 1.6; EXPRESSED IN BRAIN, SIGNAL = 1.9; EXPRESSED IN ADULT LIVER, SIGNAL = 1.8; EXPRESSED IN FETAL LIVER, SIGNAL = 2.5; EXPRESSED IN BONE MARROW, SIGNAL = 1.8
caatcttctcaaaccctgccactgctttatcaactaagttgatataatattctgaattctttgttgtcatttcaacaatgttcacagcatctttaccaggcaggagcagattccatctcaagaaatcactttctttgttcatccataagaagaagctcctaattcattcaagttttatcatgagatgcagcatttcagtcacatcttcacactctacttctaattccaacacatcagcagtggcatcctctagtgaagtcttgaagctctcaaagtcatccatgagccttggaatcaacttcttccaaactcttgttaatgttggtattttgacctcttccaattcatcacaaatgttcttaatggcatctacaatgatgactcctttccagaagatgttcaaatcactttgctcagactcatcagaggaatcattatgtatggcagctacagccttatgaaatgtatttcttaaataataagagttcaaagtcaaaattactccatccatgggctgaagaatggatgtggtattagcaagcatgaaaacaacatttatctccttgcacctttccatcagagctc

SEQ ID NO: 7104 - DNA, 600 bp, Homo sapiens
  MAP TO AC013751.3; EXPRESSED IN LUNG, SIGNAL =   4; EXPRESSED IN PLACENTA, SIGNAL = 4.3; EXPRESSED IN HELA, SIGNAL = 2.6; EXPRESSED IN HEART, SIGNAL = 3.4; EXPRESSED IN FETAL LIVER, SIGNAL = 3.8; EXPRESSED IN BRAIN, SIGNAL = 3.7; EXPRESSED IN ADULT LIVER, SIGNAL = 3.4; EXPRESSED IN BONE MARROW, SIGNAL = 3.8
catggagatcaccagcacaccacagtcggagcagcacatcaagaaagagccgagcgagaagctgggtgagctgaaggagatggtagagctgaagagccaagaggctcagagtctacagcagtagtgagatcagtacctgggtcacctgcagcagtatgtggccacctatcagcaggtgccctatgagaaggagctccacaagcagttactgctgcagacccagctcatagaccagctgcagcaggaggaagctcagggcaaagtcgtggccaagatggcctgccaagggttgcaggagacccaggagcacctggaagctaccagccagcagaagtagcagccacaggcccagctgaccctcatggctctccatggggaaggagatggactggacagtgaggaggaggcgcttccgctcatgccaagcatcccggaggaactggagagtcgggaggccatggtggcatttttaaactcagctgtggccagtgccgaggaggagcaggcatggccacgtgggcagctgaaggagcaaagggtgagctgtcaggctgtcagtgtctggctcacctggtggcctcagtccagaaggagccagag

SEQ ID NO: 7105 - DNA, 530 bp, Homo sapiens
  MAP TO AC015502.3; EXPRESSED IN ADULT LIVER, SIGNAL =  10; EXPRESSED IN HEART, SIGNAL = 5.4; EXPRESSED IN BONE MARROW, SIGNAL =  10; EXPRESSED IN LUNG, SIGNAL = 5.9; EXPRESSED IN PLACENTA, SIGNAL = 8.3; EXPRESSED IN HELA, SIGNAL =  11; EXPRESSED IN FETAL LIVER, SIGNAL = 7.4; EXPRESSED IN BRAIN, SIGNAL = 7.4
cagtttggagggctcagaagacaggaaaatgtgggaaagtctgggacttcctggagacttggagggctcagaagacaggaagatttagaaaagtttggaacttcctagagacttgttgaatgacttggaccaaaatgctgacagtgatatggacaatgaagcccaagctgagatggtctcagatggagacgaggaacttgttggtaaatggagcaaagaggacacttgttctgcttcagcaaagagactggaggcattttggccctatcttagagctctgtgtaacattgaacttgagagagattatttaggctatctggcagaagaaatctctaagtggcaaagcattcaagaggatggctagcataaaggatgggaaaatttacagcctgacaaggcaatagcaaagaaaaaactattttctgggagagaaattcaaacctactgcagaaatttgcacaagtgacaaggagctgaatgttattcaccaagacaatggggagaatgactccaaggcatgtcagagacct

SEQ ID NO: 7106 - DNA, 576 bp, Homo sapiens
  MAP TO AL158150.2; EXPRESSED IN PLACENTA, SIGNAL = 1.9; EXPRESSED IN ADULT LIVER, SIGNAL = 1.7; EXPRESSED IN FETAL LIVER, SIGNAL = 1.8; EXPRESSED IN BRAIN, SIGNAL = 1.8; EXPRESSED IN BONE MARROW, SIGNAL = 1.6; EXPRESSED IN LUNG, SIGNAL =   2; EXPRESSED IN HEART, SIGNAL = 2.1
ctgattattgccttcctggccaggcacttgcttacgtcaaatcttacctatctgccaggctgggacatgatctcaggtcttacctttgtgactttgaataagagaatgctgtcattggtaccccttccactcccgctttctggttcaggggtatttaacctggggtccacaagctttgggaactccataagccctctaatatatgtgcaaatatgcttttctctggtgaaagaatccagaactttattcagtttcttaatagatgcattacccagcaacattaactacttgctctacatcaaaaggttgacaacaaattcggtcttaccaataattaaagaaaagcaaataaaatgaaatactatttgccataaataggttggtgaagatgaaaaagtttgtgaaatctgtattaacttgattgcagctgtaacaaattaccatagatttagtggcttaaaacaagacacatttactctgttacagttctggaggtcagaagtccaaaacagatcttactgggctaaaatcaagattgaccaagatgtttccttctggaggctctacggggaaata

SEQ ID NO: 7107 - DNA, 519 bp, Homo sapiens
  MAP TO AC016429.4; EXPRESSED IN LUNG, SIGNAL =   6; EXPRESSED IN PLACENTA, SIGNAL = 5.4; EXPRESSED IN HELA, SIGNAL = 8.1; EXPRESSED IN HEART, SIGNAL = 5.2; EXPRESSED IN FETAL LIVER, SIGNAL =   4; EXPRESSED IN BRAIN, SIGNAL = 4.5; EXPRESSED IN BONE MARROW, SIGNAL = 4.6; EXPRESSED IN ADULT LIVER, SIGNAL = 5.8
agagcccaccttctctctcctttctctctccatttatcattctttaatttggtgacagtttctttactcttcctgttccacagcagagcttagataccatcaactcttcaaatcttttaatcaacgaagatgcaactaactcctcccttcccccaaatctagtaaaacacttgatattattacacaacacatttaaaatagctatttatagaaaaagatctataggtcagctcactactgtaattccaatgagcagcttcagtccatggaacttcagtattatggataatgatatagccagcaaatatctaagtgttatagacatagatcgtattatagataatttgtctttttatgtttttcttttttggttcgccaatatcgacatgagtgacatgagtcagtagggtataaaaaattctcaaaaaattacttttcctgtcctgacatatagaatgtttttcgaggtaggtggaaagttatcacttgtctctttattgacaggagggaatgaggagc

SEQ ID NO: 7108 - DNA, 502 bp, Homo sapiens
  MAP TO AL161644.1; EXPRESSED IN ADULT LIVER, SIGNAL = 1.4; EXPRESSED IN HEART, SIGNAL = 1.8; EXPRESSED IN FETAL LIVER, SIGNAL = 1.2; EXPRESSED IN BONE MARROW, SIGNAL = 1.2; EXPRESSED IN LUNG, SIGNAL = 1.2; EXPRESSED IN PLACENTA, SIGNAL = 1.5; EXPRESSED IN BRAIN, SIGNAL = 1.1
gggagtgagagggaggtaggcatcaccctctcttggagcccctggcaggttaagccaacacttaagcttatttctctctgtgtaatcgtttttgtccttagcctggcagctcctcagggtcaggacaagtctgatgtgcctccagaccccagcatggggctggctggccacataggaggtcagcacccggcatctcggtgctctcccaagtccttcagccttgggttcattccactttgccctttgctttctgccctgacagatgacacggaggtgctgctcgcagtcttgtagaatgatgggctacccaggaccctgttagactctagaatcagacatcgaggcctggctccaccacgtaatagctatgcaatcctggagtgcctttatctttccaagcctcagttccttggcaataaaatggggcaattgatcccttactgcgaggagtccgggattagatgagcttatgtaggtagaggccacgctccctgttattgtt

SEQ ID NO: 7109 - DNA, 548 bp, Homo sapiens
  MAP TO AC026442.1; EXPRESSED IN PLACENTA, SIGNAL = 4.5; EXPRESSED IN ADULT LIVER, SIGNAL = 4.5; EXPRESSED IN HEART, SIGNAL = 3.1; EXPRESSED IN FETAL LIVER, SIGNAL = 2.7; EXPRESSED IN BONE MARROW, SIGNAL = 3.6; EXPRESSED IN LUNG, SIGNAL = 3.8; EXPRESSED IN HELA, SIGNAL = 2.6; EXPRESSED IN BRAIN, SIGNAL = 3.6
tgaaagatgggctttcaaggacttgggcagttctgcccttggggctttgcagggtacaaccctcatgacttctctcatgggttggagttgagtgactgctgcttttccaggctcacagtgaaacctgccagtacatataccattttaaggtctggaaggcagcagccccattcccacagatccactaggcagtctgggtggtgctctaaccccacatttccttttgggactgccctagtagaagttatctgcgtgtggcaggcttctgcctgggcacaaaggctttcccatatatcttctgaaatctaggtgaaagttgccaggcatccttcactcttacgtctgcacaattacaggcttaacaccatgttgaagctgacaagacttatggccaaaaacttctggagctgtggcccaacctgtacctggggccttttgagccagagctggagctggagcagcagagatgtaaggaccagcctcccagggtggcacagggcattgatgctctgggcttggcccacagaaccattctttcctcctaggcc

SEQ ID NO: 7110 - DNA, 508 bp, Homo sapiens
  MAP TO AC011111.3; EXPRESSED IN PLACENTA, SIGNAL = 2.5; EXPRESSED IN HELA, SIGNAL = 3.9; EXPRESSED IN HEART, SIGNAL = 2.3; EXPRESSED IN FETAL LIVER, SIGNAL = 2.2; EXPRESSED IN BONE MARROW, SIGNAL = 2.5; EXPRESSED IN LUNG, SIGNAL = 2.1; EXPRESSED IN ADULT LIVER, SIGNAL = 2.4; EXPRESSED IN BRAIN, SIGNAL = 2.9
cacaagatagggaagccaggcatgtgatggaaaagaacactctatttagggcaaatgctttctggaaccattccccctactgagcaaagtgaggttgaggattatggagagaagacaaggcagaggatacactaaaatgagcctccaaaatggaaaccatccaagcagtgcctatttgggagaagccgatctcatggcagagggaaaaaagaaagtcaaccaccaatggccaggatacagagtatatcacatttgctcacattccactggctgaacacaataagtaggatggccaggccaaagtcaatggggcagggaaacagactcttttccatagcgggagccactgtaaagcacacggcaattggcagggatgaggaaggcagggagcagctgagagcaaccatgcatcccaccgcaggcctgtgtcatgaccccatacatgtatgcagctgggagatccctttcctgtggacatggaagctttcccccaatctacacagtgcct

SEQ ID NO: 7111 - DNA, 582 bp, Homo sapiens
  MAP TO AL133334.14; EXPRESSED IN PLACENTA, SIGNAL = 4.1; EXPRESSED IN ADULT LIVER, SIGNAL = 4.8; EXPRESSED IN FETAL LIVER, SIGNAL = 4.4; EXPRESSED IN HELA, SIGNAL = 4.8; EXPRESSED IN BRAIN, SIGNAL =   4; EXPRESSED IN BONE MARROW, SIGNAL =  15; EXPRESSED IN LUNG, SIGNAL = 4.9; EXPRESSED IN HEART, SIGNAL = 4.2
ctaggctgggctgtgaactccctttgaaagggacaaattcactcggttcttcaattcagcacccagtaagtgcttacaaactgtttattgaattggacaggattatatggattaaagattcttgtgggaaatcttgtttacattattaatttgcttggcatgttctttctttctagatagcaataaggcacactttatttccagctcttgtccaaatttaaaattccaccttagtgaagttctgtcatctctcagtaagcctgtgggtctttattctccaaccaggtctttacttcttcccacagtgtcccaaggaggaccccagccagcagctggctccattgcctggagtttgctgccaatgtggccagaatcatgcatttggcctgctgtggtccaccaaagcccacaggccccatcctgtgtacctggcccaaggcaggcactatggtgcacttggtctcagaaggtggggcgaagttagaaaggctcactgcagaggcagtgtttctacatcgtgggctttggcaccacacttcacctgattcaaatcctggctctagccctttctaagtgtgtggc

SEQ ID NO: 7112 - DNA, 552 bp, Homo sapiens
  MAP TO AL121901.10; EXPRESSED IN ADULT LIVER, SIGNAL = 4.9; EXPRESSED IN BRAIN, SIGNAL = 4.9; EXPRESSED IN PLACENTA, SIGNAL = 7.8; EXPRESSED IN HEART, SIGNAL = 3.9; EXPRESSED IN FETAL LIVER, SIGNAL = 7.8; EXPRESSED IN BONE MARROW, SIGNAL = 3.9; EXPRESSED IN LUNG, SIGNAL = 5.5; EXPRESSED IN HELA, SIGNAL = 2.8
gcaccctcacacatatgcacacatcagtggactcaccacacataagtacacgtggatacacagacacactcactcaaacacatgctcacagagccctgactccaggcctgatggcttgcccagggtctcagcctcctcctgtccctctggggcatgagtttgatgatgagtcaatatcagtaacgctcactgaccttgagtctccatcctgattagggtcttcccccaacagaactatttcttgctgctcaatccatttcctctggcccagcttcccagtgctcacagatggctggcccatgtgctggaagatgacacagttgccttctctccgaggaacctgccccctctcctttcccaccaggcgtgtgtaacatcccatgtgcctcacctaataaaatggctcttcttctgcatcaggggccttgtcatccttcaccattacttgagggctcctgggttggaaacagccctggcctgggtggttgggcccatagcatagagtttggcacttactttgtagatctgaatagtcttgagcaggtcagggag

SEQ ID NO: 7113 - DNA, 522 bp, Homo sapiens
  MAP TO AC016546.2; EXPRESSED IN PLACENTA, SIGNAL = 8.4; EXPRESSED IN ADULT LIVER, SIGNAL =  13; EXPRESSED IN HEART, SIGNAL =  11; EXPRESSED IN FETAL LIVER, SIGNAL =  23; EXPRESSED IN BONE MARROW, SIGNAL =  27; EXPRESSED IN BRAIN, SIGNAL = 8.6; EXPRESSED IN LUNG, SIGNAL =  14; EXPRESSED IN HELA, SIGNAL = 6.8
accagtcctgaaaatggcacagaaacggtatcaagaaaccccgatcacaaagatatgactctcttaagagggtggaccccaagttcctgagcaacatgcactttgccaagaagcacaagaagggcctaaagaagatgcaggccaacaatgccaaggccatgagtgcacgcgctgaggctatcaagatcctcgtaaagcccaaagaggttgagcctaagaccccaaagggtgtcagctgcaagctagatcgacttgcctacattgcccaccccaagcttgggaagcgtgctcgtgcccgcattgccaaggggctcaggctatgccagccaaaggccaaggccaaggatcaaaccaaggccctggctgcagctccagcttcagttccagctcaggctcccagaggtgcccagggccctacaaaggcttcagagtagagatctctgtctgccaacgtgaggacagaaggactggtgtgacccccccgggctaccgtctgcatggggctgggattctcctgtgcta

SEQ ID NO: 7114 - DNA, 597 bp, Homo sapiens
  MAP TO AC015805.3; EXPRESSED IN LUNG, SIGNAL = 4.4; EXPRESSED IN PLACENTA, SIGNAL = 3.8; EXPRESSED IN HELA, SIGNAL = 5.8; EXPRESSED IN HEART, SIGNAL = 3.9; EXPRESSED IN BRAIN, SIGNAL =   4; EXPRESSED IN ADULT LIVER, SIGNAL = 4.4; EXPRESSED IN FETAL LIVER, SIGNAL = 3.5; EXPRESSED IN BONE MARROW, SIGNAL = 3.7
aaagtaccatccaaagggggaaatgagagagccagaaagataatgggaggcaagaagtggtgcagaacacatcttccccaaaccaccagcatttccctctggccttggccagcctttcttctaagagaatcaagatgatatttctgtgtatgtgaccttaacaggaaaagcataaaatcaagctggtactcacacaacttagtcaaaacacaaatcaaataaattgtcaagacatgagacagaaagctgccttctgagagatttcagtgctctgttcccctcaccccggccttttgagatggctccactgtaactcattacccccaaggtaaaatctgctcttacccacaacctggataatctgggccaggaggacgccatctgtcacatcttgctggagatccctgatgagacgcttgtggccggatttggctaggtaatgattggcccagtctgtgtagatctgtaaaaaaagcaaacaggcaactttaggaagccagtcggatcccctctcagagtctgaggcagctgctcgggccggcacagtggccactgtcccattggtgagctttcagggccagccagcaccattaaaat

SEQ ID NO: 7115 - DNA, 547 bp, Homo sapiens
  MAP TO AC019083.5; EXPRESSED IN LUNG, SIGNAL = 1.3; EXPRESSED IN PLACENTA, SIGNAL = 0.98; EXPRESSED IN ADULT LIVER, SIGNAL = 1.3; EXPRESSED IN HEART, SIGNAL = 1.7; EXPRESSED IN FETAL LIVER, SIGNAL = 1.8; EXPRESSED IN BRAIN, SIGNAL = 2.2; EXPRESSED IN BONE MARROW, SIGNAL = 1.1
cccagaatgtggtgtcattgagtgcatggccatccttccacatgatcaaggacatgcccctggggttctattccaagaccccagaagaatgggccaccgctgccaagaagtataatatgtgtgtggaagactatcagccttacttggatgatggcatggagtatggtaactactcaaagttctttgaccattcacagtaggagagggatctgtggtttgactgggaccaccaagacttgaggttgaactggggtgaactgatacactggcatctggacaagtatatcaggaaccatgtggatatggccctccacccctgtttcttggaatatcatgttcaataatctcttcagcttcctgaccttcatgaactttatgttctatgtagtggagaattattctacctaccagcctgtggggccaaagcagtatccttttaataatctgtacttgggacaagacagtgatccaccaaagaacctgagctagtgtttcactatgagatctaagggcttcataagcttttgtgccctctacctaggactcc

SEQ ID NO: 7116 - DNA, 579 bp, Homo sapiens
  MAP TO AC013552.3; EXPRESSED IN ADULT LIVER, SIGNAL = 3.3; EXPRESSED IN LUNG, SIGNAL = 2.3; EXPRESSED IN HEART, SIGNAL = 2.2; EXPRESSED IN BRAIN, SIGNAL = 2.2; EXPRESSED IN BONE MARROW, SIGNAL = 4.7; EXPRESSED IN PLACENTA, SIGNAL = 2.3; EXPRESSED IN HELA, SIGNAL = 9.5; EXPRESSED IN FETAL LIVER, SIGNAL = 4.1
atttgaggacctggattccctgctcagtgccctgagtctcaattaagagtctctaggtaacaggagaattcgagtggacgttgctgatcaagcacaggatacagacagggacgatcgttcttttggccgtgatagaaatcgggattctgacaaaacagatacagactggagggctcgttctgccacagacagctttgatgactacccgcctagaaggggtgatgataggtttggagacaagtatcgagatcgttatgattcagaccagtatggccgtgggtattggtatgagtatcgggatggcccatgccgggatatggatcgatatggctggcggtagggatcgctatgatgaccgaggcagcagagactatgctagaggctatcatcctggataggcagtggcagaaagggcatttgggcagtgggtacccagggacaatgactacagaggaggcagggaccgctatgaagaccgatacaacagatgggatgatgggtcgtgcagctccagagatgatttctctcgggatgattgtaggtataatgatagacgtccccctcaaagacccaaactga

SEQ ID NO: 7117 - DNA, 503 bp, Homo sapiens
  MAP TO AC016847.3; EXPRESSED IN ADULT LIVER, SIGNAL = 6.3; EXPRESSED IN FETAL LIVER, SIGNAL = 5.2; EXPRESSED IN PLACENTA, SIGNAL = 6.1; EXPRESSED IN HELA, SIGNAL =   8; EXPRESSED IN BRAIN, SIGNAL = 4.7; EXPRESSED IN BONE MARROW, SIGNAL =   5; EXPRESSED IN LUNG, SIGNAL = 6.5; EXPRESSED IN HEART, SIGNAL = 5.7
ggattactctaaaccagcccgagtttcctgactatacccacagttgttacttcagctctaaaaagaaacaaatgagtttgagaagataaaataatgcattaaaattgtaaatagatgctttcctctaaaacaactttataatatgcttgcattctaagcttttcttaatccttcaaaaacaaagcttaccagagtctgaactatagcgtggttggtggcattcatatgggcgttaagtggaaaagaacattctccatcacaataaaatgcagcgtatccttctggtgctataatccagtcctgacacatacacacacacacacacacacaaaaaaaaaaaaaaaaaaaaaaaccaaaaaaaaaaccaccaggaaaaaatatcaccaaagtaaaaatttttaaaaaatcttaaaagttattgaaatatattgtatctgaataggtttctattcttggtccaacaattattctaatggaattatcttccccacaccctttaattt

SEQ ID NO: 7118 - DNA, 594 bp, Homo sapiens
  MAP TO U82670.2; EXPRESSED IN PLACENTA, SIGNAL = 5.7; EXPRESSED IN FETAL LIVER, SIGNAL = 8.5; EXPRESSED IN BONE MARROW, SIGNAL = 1.8; EXPRESSED IN LUNG, SIGNAL = 1.7; EXPRESSED IN ADULT LIVER, SIGNAL =   2; EXPRESSED IN HEART, SIGNAL = 2.2; EXPRESSED IN BRAIN, SIGNAL = 2.1
cgatgacaccagcagtgaagcagcccagagagcaccgtgctcaaactgagcctgaagacgaaggatcccagagtggcgcccatgaacacgcaagaaagaaattatcagacaaggggacacccattgacggggaagtgtgcatctgcaggggagttgcaagatataccagtcctaagcacattaaaaacgggcaaaaaaaaaatgatttcaacaagatgattactgctgaagaaaacaaagttcattaaaggaaatgtaattatagtgcattgtgtgttctagccaagagcactatttacataatcatgatgctataaatatgtaataatcatctgccacaaaataagatgtaactaagttggggaaaggtgaagccagtgtgagtgtgagtgtgtcaatgtgtgtaagagtgtgtgtgagagaatgtgagtgtgtgaatgtgtgtaagagtgtgtgtgtgagagaatgtgagtgtgtgaatgctagtgtctcaaatgtgtggagtttgtgtgacagtgcaagtgtgtgtgtgagcagatgtgtgtgagacagtctgtgagtgtatttgagtgtgcaagtgtgtgcgagtgtgtg

SEQ ID NO: 7119 - DNA, 597 bp, Homo sapiens
  MAP TO AC008597.3; EXPRESSED IN PLACENTA, SIGNAL = 2.1; EXPRESSED IN FETAL LIVER, SIGNAL = 4.1; EXPRESSED IN BONE MARROW, SIGNAL = 2.9; EXPRESSED IN LUNG, SIGNAL = 2.8; EXPRESSED IN ADULT LIVER, SIGNAL = 2.8; EXPRESSED IN HEART, SIGNAL = 2.4; EXPRESSED IN BRAIN, SIGNAL = 2.4
tgccagggttatgggactacacatacttgttattttcttctttttgctggcattttgaactaactctcccctcttttattcttaaaaagaaaaatcaaaagatatgctaaactaaccactataaataattatataaatatatatacacacactacacacacatatatataagatatgacattaatgaataatatttacagaaatagaaaagcaaaataaaggttttttattaggcatacctttgcaaagttgattgaaagtccaggaatttctgctaatcctccacccatcatagatttctgacctatgataactccgaaggtgggcaaacaggagaaatcagaacttccttcataaataaatttcaaatcttttggatccttgattgacgctcccactccaagggcatacataatagcttccagttccgtataagcataagaaaatggagggagtttctggccaatagctccagcctaagaacagttttaaaaagtaatttatttcattgataacttttcaaaactattaacttcttacatacctagttttgtttttgaatagatgtgactagaatgttagtgaatttgatggagc

SEQ ID NO: 7120 - DNA, 528 bp, Homo sapiens
  MAP TO AC011022.4; EXPRESSED IN LUNG, SIGNAL = 1.2; EXPRESSED IN HEART, SIGNAL = 1.2; EXPRESSED IN FETAL LIVER, SIGNAL = 1.6; EXPRESSED IN BONE MARROW, SIGNAL = 1.8; EXPRESSED IN ADULT LIVER, SIGNAL = 0.82; EXPRESSED IN BRAIN, SIGNAL = 1.9; EXPRESSED IN PLACENTA, SIGNAL =   1; EXPRESSED IN HELA, SIGNAL = 2.5
ctgaaccaggatttgatggggatggcattgtctggatggctcctgtaagcccctagggagttatccaggatcacaatgctggagaggtcactgtggaccacagagaggtccttgatgtagctgctcaactgcaaagtgcagtgctgtctgtaatatctcctcttaaggatgcttctgctattgtccagtttacctgccacagcaaagccatagatctccatgctttctgtaaacaccaccagctcgtaccactggctcaccacttccaggaagaaatccacatggggcctcttacgtacaaaaaaccggacagaatgtttgtctattaccaccttgaggatgaagtcaggaggcctaacaggccggactgcggcctcaggaccccatcatggtgggagtgaataagtgtctcatccagatccagcaccaggatcttcctcctcacctgggctagccaattccgggacacaggagataaggggaggatatcatatcgaacagtttggtactgaattaccgtgcggatct

SEQ ID NO: 7121 - DNA, 501 bp, Homo sapiens
  MAP TO AL133174.9; EXPRESSED IN BONE MARROW, SIGNAL =   4; EXPRESSED IN HEART, SIGNAL = 3.8; EXPRESSED IN LUNG, SIGNAL =   4; EXPRESSED IN PLACENTA, SIGNAL =   3; EXPRESSED IN ADULT LIVER, SIGNAL =   4; EXPRESSED IN HELA, SIGNAL = 3.5; EXPRESSED IN FETAL LIVER, SIGNAL = 4.2; EXPRESSED IN BRAIN, SIGNAL = 3.7
agtgtgttccttcaccagccagtgagcagagtctaaatggaaatgtttcagggtgttggggaataagtgtgtcttatagacagggatgacttttggagagtcatgactgccgttgtctgcaatcacaatgcccagagcattccatcttcttcattagctcttctatcctctgtcctgtcctctagcaagacacgctggatgcagatatccacatagagacggaggatcagggcatgtataagtacatgtcttcccagcacctcttcaagctgttggactgtttgcaggaatcccattcattctcaaaggccttcaactccaattacgagcagcggactgtcctgtggcgagcaggtaaggccacacagcagataagatagatggccacactggtcaccttcctaaaacattaaagtgcttggaaaatgcccaaaattttaaacatagctagaataacttaacagatattttcatgcttgagggggagagaagggaaatgtt

SEQ ID NO: 7122 - DNA, 595 bp, Homo sapiens
  MAP TO AC021186.2; EXPRESSED IN LUNG, SIGNAL = 3.4; EXPRESSED IN HELA, SIGNAL = 4.8; EXPRESSED IN HEART, SIGNAL = 3.4; EXPRESSED IN FETAL LIVER, SIGNAL = 3.8; EXPRESSED IN BONE MARROW, SIGNAL =   4; EXPRESSED IN PLACENTA, SIGNAL = 3.3; EXPRESSED IN ADULT LIVER, SIGNAL =   4; EXPRESSED IN BRAIN, SIGNAL = 3.7
cacctctgaagactggagccaggtgcagaatggtgaggggtgcctgagcaaatgagagcagggtccggctcctgtcacagccaggcatgtcagctgctgtggggggcaggcagctacaggcaccagcacaggtgccagctctgtgcaagcctgtggctggaacagatgcaccaaaatgccttctgctgtgggcacccatgtctggatgaggggaacacaatggtgcccagaagcttggagatgccagaaaccacagagccccaaagagggtggcacagccctggctcagggagccccagctcttctctacttcttgttgcccacagtgtggtgagttgggggacgggggtgtacatgtttcagctctgtttgtgttatacctctttcagtcccaccattcggtgggccccaagttcttttcccacattagtaagaatgaggtacatggacaactggaggatgaccaaggcaaagaggtgtcttattgagcaacagtacagctccaaggacacccaaagtgggtagctactttccaaaggcaggttgtcctgaggagtgtgcagtcctcagcagaggggagacccagagagggtag

SEQ ID NO: 7123 - DNA, 568 bp, Homo sapiens
  MAP TO AC011957.2; EXPRESSED IN LUNG, SIGNAL = 3.5; EXPRESSED IN PLACENTA, SIGNAL = 3.4; EXPRESSED IN HEART, SIGNAL = 3.1; EXPRESSED IN FETAL LIVER, SIGNAL = 2.4; EXPRESSED IN ADULT LIVER, SIGNAL = 3.2; EXPRESSED IN BRAIN, SIGNAL = 3.2; EXPRESSED IN BONE MARROW, SIGNAL = 3.1
tgcagacttctgtgtccctggggaatctgtcatgtggcactcctatactgtgtccataggcttgtcaatttagaaagtgatatcacagaggaggaccagggtggcttacttctgattccggttcttgatgttgaagaagagaaaagcactggccatgatcatcccgaggatggtgagggcagagaggatgctgtagagaggtagggagatcttccgcagctgctccaggatgatggtcttgtcttttggtggttcggatcctagaggatcaagagaagacatcagtgggacccaatgcaagtcattccccgagaacacctttgccttagtgtccctgacatccagccaggccctgcgcacaaactctacacaaggcacatctatctaccgggtgagccagatccggtggttggccagtctgctcaacagggagcctgagctaggactgtatttctttctctaaatagaatcaataaaggatttgtgatgcatttaatagccattagaagactagaatttgatttggtctaattacactattgaaaaaccatcaccatttatcccccaa

SEQ ID NO: 7124 - DNA, 544 bp, Homo sapiens
  MAP TO AL157405.2; EXPRESSED IN ADULT LIVER, SIGNAL = 2.3; EXPRESSED IN FETAL LIVER, SIGNAL = 3.8; EXPRESSED IN BRAIN, SIGNAL = 1.9; EXPRESSED IN BONE MARROW, SIGNAL = 1.9; EXPRESSED IN LUNG, SIGNAL = 2.1; EXPRESSED IN PLACENTA, SIGNAL = 2.3; EXPRESSED IN HELA, SIGNAL = 2.5; EXPRESSED IN HEART, SIGNAL = 2.2
ctcaggtggacaaggaggaggcaggtaaggctcagggcacttcgggggtggacatggctctgggcactttggcgtggggcacacaggaggtggctggcagggctgcttgcactgctgctgctggtaagacatctctcctcagtctcagagaatctgaaagatacatacgaaacagtgctcataagagagacagtcctgttggtggagcaattagctaggacatcaaatctccagtatctagggaccaactttgatccctaatacagtctttatgactttgtgaaccttcttcacacttcacttttaggacctcttaccctcagttcttccgtctttctggctgttctctcattctaccattttctgaaaataaaattgcctatgagacagcaacaaatgttgtctgaatacaaacactatctgaagaagaaaaactcagatattaaaagtctagccaataccaaacaaatctgtgctcttatcttccatgaggccctagttaccagttttaatgagctggctgtggtgctgagccatgagtttt

SEQ ID NO: 7125 - DNA, 587 bp, Homo sapiens
  MAP TO AC013584.3; EXPRESSED IN FETAL LIVER, SIGNAL = 8.2; EXPRESSED IN HELA, SIGNAL =  13; EXPRESSED IN HEART, SIGNAL = 9.4; EXPRESSED IN BRAIN, SIGNAL = 7.4; EXPRESSED IN BONE MARROW, SIGNAL = 9.5; EXPRESSED IN ADULT LIVER, SIGNAL = 8.1; EXPRESSED IN PLACENTA, SIGNAL =   9; EXPRESSED IN LUNG, SIGNAL = 9.7
atgactcagccattcccaagtgacctaagtttgaagccagaatgtcctatagtattggaaaaggaatatttcacataaaatgacaaccaaatgagtctatcaggttaggctggtgtatgatcatgctataagagattaataagacagtttgacagtattctttattagtgaaatacatcctaatgcataaacatgaattctgtcagaaatctttggagcttgagtggtctaaagagcgtagattctataaatgcaagacttcagacttctttactagattttcagtaaataaaattttaagctcatccctatttgttaccaacacaggtcatattataattctaagaagaatatttggtacccactgaatctgattgttttgaggatactgcccatggtatttgctgccattgggcatttgctgccatggcatttgccatggcatttgctgccattgcaatctcattttcttcttccgcatcggatttctaactcatttgcctctgaaggagtatctttaacattataattatattccagtatgtgaatttttaattttctgaaaaggtgtaaggcagtcaaagtgg

SEQ ID NO: 7126 - DNA, 525 bp, Homo sapiens
  MAP TO AC021973.2; EXPRESSED IN LUNG, SIGNAL = 1.2; EXPRESSED IN PLACENTA, SIGNAL = 1.4; EXPRESSED IN ADULT LIVER, SIGNAL = 0.88; EXPRESSED IN HEART, SIGNAL = 1.2; EXPRESSED IN FETAL LIVER, SIGNAL = 1.6; EXPRESSED IN BRAIN, SIGNAL = 0.9; EXPRESSED IN BONE MARROW, SIGNAL = 0.93
tttgcgaaaagttgctgatggcttttcaaaaccatcatgcaatatgaaggccttatgtgcatttttgtttatgatcatattggcaccacgtaggtagcaattgcattaattgtctcacactaatgagagaagaacacagcgcattagcatgtaaaataatgggtttgtgtctggacaagtaaagtaaaatggtattatagtgagctatatatgtgattgtaagcttttcagtagtttggaaggagacgtgtgggaggaaattaagtcttcatatgacgacaagagtaaaggcatgagcaaatcaacagtttgttctgcagcagccaagattatctatactgcaattagccatagcaatgcagaaaataacttcatccatcattttagtgttgtcacgttgaattttattgttggtatatatgtgtttatatttctcttaaaatttttctttgcttctgttgttgtgttagggagtttggttattctctcaaggcaagaagagagtctttaactttgccaacccca

SEQ ID NO: 7127 - DNA, 594 bp, Homo sapiens
  MAP TO AC016487.4; EXPRESSED IN PLACENTA, SIGNAL = 2.8; EXPRESSED IN HELA, SIGNAL =   5; EXPRESSED IN HEART, SIGNAL = 2.6; EXPRESSED IN BONE MARROW, SIGNAL = 3.9; EXPRESSED IN LUNG, SIGNAL = 2.3; EXPRESSED IN ADULT LIVER, SIGNAL = 2.3; EXPRESSED IN FETAL LIVER, SIGNAL = 3.4; EXPRESSED IN BRAIN, SIGNAL = 3.6
tagccagcagtgacaacctgctcaggtccccttccacattgtggaagctttattctttcgctctttgcagtaaatcttgctgctgttcactctttgggtctgcactgcttttatgagctgtaacactcaccgcgaaggtctgcagcttcactcttgagccagcaagaccacgaacccaccagaaggaaggaactccaaacacatccgaacatcagaaggaacaaactccagacacgcagcctttaagaactgtaacactcaccacgagggtccacggcttcattcttgaagtcagtgagaccaagaacccaccaattcagggcagaaaatgacaaagccaccaagaagcctggtgatgaaagcctgaacaccagaaaccagaaggtcacaccataaagataggtaagcttgatccactgggaattgagaaaatggttcaaagagcgtggatgaagtttctaagaacaaaataggcatgtagtcaacaacagtctaccaaagacatacaaccagaaagaggtaagaacctaggaacaagagattaatggcaggcacccaaacaagaagccatactccctcattctgttctcaggc

SEQ ID NO: 7128 - DNA, 540 bp, Homo sapiens
  MAP TO AL135929.2; EXPRESSED IN LUNG, SIGNAL = 1.4; EXPRESSED IN ADULT LIVER, SIGNAL = 1.7; EXPRESSED IN FETAL LIVER, SIGNAL = 1.5; EXPRESSED IN BRAIN, SIGNAL = 2.5; EXPRESSED IN BONE MARROW, SIGNAL = 1.2; EXPRESSED IN PLACENTA, SIGNAL = 1.3; EXPRESSED IN HEART, SIGNAL = 1.4
ttatcacagtggagcatggcaaaatggaaacagaaacagcagagtcacagggtaatgttagctatccccacccttaatttgaggaagtttgctgagaataaataaggtcaatagagattaaaactcacctctcacagtgacattcagcaccatgctctggacagggccgtagctgttgtctgctgtacagtagtatccccctgcatggctctgtctgatggcagggagctccagctctgctctcagggaacgctgagttttcctccccagactctcctgcatgtcctctcggtgccaggagaatgtggtatcccctgtgccttcagccacggagcagacaaggaccagcatctccccttcaacagcctggccccctgagggctgggtctccaggagcaccccagacacagggatccctatgtgaaaatgagaccacaggtgggggtcgggtgtgaaggagggcagggctaggtagctggggtgttgggcagggttactttttatgtgacttcaagatatactcttcagcaggcactagca

SEQ ID NO: 7129 - DNA, 540 bp, Homo sapiens
  MAP TO AC013612.3; EXPRESSED IN PLACENTA, SIGNAL =  29; EXPRESSED IN ADULT LIVER, SIGNAL =  31; EXPRESSED IN HEART, SIGNAL =  25; EXPRESSED IN FETAL LIVER, SIGNAL =  27; EXPRESSED IN BRAIN, SIGNAL =  25; EXPRESSED IN BONE MARROW, SIGNAL =  31; EXPRESSED IN LUNG, SIGNAL =  33; EXPRESSED IN HELA, SIGNAL =  39
tgtggttttgctctgtcacccaggctggggtacagtggcacaatcatagctcactgcagcctcaaattcctgggctcaagccatcctcccacctcagcttccagagtagctagaattacaagcacagtgtactttttcttaatgaaagaagtccattacaaaacatcttaagtcctcctaaagtttctcaacttttaaatccctaattattttatgccaaacatttcccttttctatactcctttaaaaaacatttgactcctcatgatttttatttgacttcttagaagtccaactggttgagacttaagggattttgattacataaaatagtacatgcattcctttagagtaacccttaccttatgcagttctttcatcattcctaaaagagctttaacattacagtgatcctgttcggttttagtctgatgaagcagctgagagatgatggctgctttaagcatctggatcagcggattcagagaagattcttgcaaaaatgcccaacacttctctgggggtgtaaaattagccatg

SEQ ID NO: 7130 - DNA, 551 bp, Homo sapiens
  MAP TO AC019159.3; EXPRESSED IN PLACENTA, SIGNAL = 3.1; EXPRESSED IN HEART, SIGNAL = 1.7; EXPRESSED IN FETAL LIVER, SIGNAL = 1.2; EXPRESSED IN BONE MARROW, SIGNAL = 1.3; EXPRESSED IN LUNG, SIGNAL =   2; EXPRESSED IN ADULT LIVER, SIGNAL = 1.6; EXPRESSED IN BRAIN, SIGNAL = 1.2
actgcattgtttcctgcctctttaacttaccagcaaaagaattcttgctactgggggaaaacatatgctctgaaatattccaaacttcactccagtaacatttcttcacttttaataggaatcattccagccatcattgtctggatcctctgaacaacctccagcagcatcatgacctttaccaacatccgaggtgattctcagctctaagtattttttatttatttgaatcttcaggataaaagagggaaagctttggggttcttctccaggttgacattctgactccacctcttaacagacaagtgattttgagaaaattacttcacaagtcttcaacctcagtttcatggttttaaaactagaagcaatgctactacctaggggaaatttgttttaacaattacaagcaaaaatatgcacaaggaacctgggacaggtgccgagcactcttcactctgcaatgatcacccagaagacaacagagtgatgcttctctccacctgctgtatgaggacagcctgggcaatggggacatcggtatgagctgt

SEQ ID NO: 7131 - DNA, 535 bp, Homo sapiens
  MAP TO AL136969.2; EXPRESSED IN PLACENTA, SIGNAL = 3.9; EXPRESSED IN LUNG, SIGNAL = 4.9; EXPRESSED IN HEART, SIGNAL = 5.9; EXPRESSED IN FETAL LIVER, SIGNAL = 6.2; EXPRESSED IN BONE MARROW, SIGNAL = 4.3; EXPRESSED IN ADULT LIVER, SIGNAL = 3.7; EXPRESSED IN BRAIN, SIGNAL = 4.7
ttctccacgtagaacctgggagtaggagactcagaatcgaatctcttctccctccttcctcctgtttttggctttgtgggaaccttatcaaacacaatggccagcaatgttaccaacagaacagatcctcgctccatgaactcccatgtgttcactggaaatctcaacactcttgtggtcaagaagtgtgatgtggaggcaatcttttcgatgtgcagcaaaattgtgggttgctcagttcataagggctttgcctttgttcaacaggtgaatgagagaaatgccccggctgctgtagaagagagaagggcagaataattgctggccaggttttagatattaacctggctgcagagccaaaagtgaacggaggaaaagcaggtgtgaaatgatctgcagcgatgtatgggtcagtaacagaacacccttctccatcgcctctattcagctcctctcttgacttggactatgactttcaacgggattattgtgaaaggatgtacagttgcccagcacattttcctcctcctcctcc

SEQ ID NO: 7132 - DNA, 522 bp, Homo sapiens
  MAP TO AC020991.3; EXPRESSED IN ADULT LIVER, SIGNAL = 0.93; EXPRESSED IN FETAL LIVER, SIGNAL = 2.4; EXPRESSED IN PLACENTA, SIGNAL =   1; EXPRESSED IN BRAIN, SIGNAL = 1.2; EXPRESSED IN BONE MARROW, SIGNAL = 1.9; EXPRESSED IN LUNG, SIGNAL = 1.2; EXPRESSED IN HEART, SIGNAL = 1.8
aagcccatttgagggtcttctcttttctaaacttcaagtattccttccacctatttttaaaaacgtttgtaccttaagaactaagtcttaccttagaaaaagaggttagacctaaagcttaggtatttaaaaaaaaaaatcaatatatattttagttttacctgttgaataactttaactagatcttttagaacctgccgacgttttcgaacatccttgtttgttatgactgctgtagtcaaatagcgaagaatgtgtggacacattgtctgaattgcattaagatatctaagaaaaaatataaaagttatttaataacttacccagggtgagataaagaaaactctcgagcaggtcattagattgtactatttcactagcctaagactgcaaacacttaagaatgagtattataagaaaatctcctccaaggaaatttaaaaacagaatccagtttcaggaatccaaatgaggagaatgctagccactatttctttaatatggggtgagatggaagactca

SEQ ID NO: 7133 - DNA, 564 bp, Homo sapiens
  MAP TO AL161668.1; EXPRESSED IN LUNG, SIGNAL = 1.2; EXPRESSED IN HEART, SIGNAL = 1.3; EXPRESSED IN FETAL LIVER, SIGNAL = 1.2; EXPRESSED IN BONE MARROW, SIGNAL = 1.3; EXPRESSED IN PLACENTA, SIGNAL = 1.2; EXPRESSED IN ADULT LIVER, SIGNAL = 1.2; EXPRESSED IN BRAIN, SIGNAL = 1.1
caaaccttagctgccagaccattcttactgtgcatgtatctgggcaagatactatgcttttacacttactgtctcataaccctcacaacatccttatgtgccatttactattacaaatgaggatttggaggatcagaaatgttaactgtcttggccaacatcggtcagtaaagagtcaggattcaaaccaaagcagtcagggttcagcccatgcttttgatccatgctgctatgcaacctctcatgtttgcatccctcagaggcacggaaggacagaattgaggggctcaacaagggaaatgattcattcttctctgctccttcccaaggctggagggccaaggcccagctacactgtatcaggaagtggacgaggccattcaccagcttgtgcgcctctccaacctgcacgtgcagcagcaagagcagcggcagtgcctgcggcgactccagcaggtgagccaggatccccacgtccctcttactcagcctgggagtgtggcctccagcacctttcccgttggtacttatagttgatggtgttcttctagcctggcttggttg

SEQ ID NO: 7134 - DNA, 535 bp, Homo sapiens
  MAP TO AC011831.4; EXPRESSED IN PLACENTA, SIGNAL = 6.4; EXPRESSED IN HELA, SIGNAL =  11; EXPRESSED IN HEART, SIGNAL = 6.3; EXPRESSED IN BRAIN, SIGNAL =   5; EXPRESSED IN BONE MARROW, SIGNAL = 5.9; EXPRESSED IN ADULT LIVER, SIGNAL = 7.5; EXPRESSED IN FETAL LIVER, SIGNAL = 5.4; EXPRESSED IN LUNG, SIGNAL = 7.3
cctgctgcagacatgaaatgaactattatgtgattattacatataataaattatattatagaaattttaagacacaaatctaaaggtatggtttataattttcttgttaggtgataaaacaggaagaacttggcaaggatctctttgattgtactttgtatgttctattgaaatatgatgattttaatgctgacaagcacctggctcttgaagaattttatagagcattccgtgagtacaagattcattctccaatttccctttgttctttttcctgttgctttacacaatatggtctatttgcttgctctcatagtacaagctgtttcttaagaaaaattatataatttagtgaatttaagtttcaagttgtattgaaacatatgaaaaagctaagggattcagtagttctgaaatgaacagttagaaatatttgataaccacgaatatcatcaattctcattgattatagtttaagacattagttcctcaatgctgctttcaaggttattttagagcaggaggagcttttgac

SEQ ID NO: 7135 - DNA, 500 bp, Homo sapiens
  MAP TO AL121586.28; EXPRESSED IN LUNG, SIGNAL = 2.7; EXPRESSED IN PLACENTA, SIGNAL = 3.6; EXPRESSED IN HEART, SIGNAL = 2.2; EXPRESSED IN FETAL LIVER, SIGNAL = 2.2; EXPRESSED IN BONE MARROW, SIGNAL = 2.9; EXPRESSED IN ADULT LIVER, SIGNAL = 2.8; EXPRESSED IN BRAIN, SIGNAL = 2.3
tctggtgtgctctggacttgcaggatccctggagttgcagctaccagacatggtgcgtggggcccggggccccgagctctgctctgtgcagctggcccgcaatggggccgggccgaggtgcaatctgtttcgctgccgccgcctgaggggctggtggccggtagtgaagctgaaggaggcagaggacgtggagcgggaggcgcaggaggctcaggctggcaagaagaagcgaaagcagaggaggaggaagggccggccagaagacctggagttcacagacatgggtggcaatgtgtacatcctcacggtgggtgcccgtgggcagaggccaggctgagctggggcctgagcccgccccctgctcccagtgatgcaggaatgtcttttttagggcaaggtggaggcagagtttgagctgctgactgtggaggaggccgagaaacggccagtggggaaggggcggaagcagccagagcctctggagaaacccaggtgagtca

SEQ ID NO: 7136 - DNA, 600 bp, Homo sapiens
  MAP TO AC024196.2; EXPRESSED IN LUNG, SIGNAL = 1.9; EXPRESSED IN ADULT LIVER, SIGNAL = 1.6; EXPRESSED IN HEART, SIGNAL = 1.7; EXPRESSED IN BRAIN, SIGNAL = 1.8; EXPRESSED IN BONE MARROW, SIGNAL = 1.8; EXPRESSED IN PLACENTA, SIGNAL = 1.6; EXPRESSED IN FETAL LIVER, SIGNAL = 1.5
ggacccttgcctatcctctctcctctgggtcacccacctgcacgcctggccctccagggccaccttgatgctcatcagctcctggtactcacagagcagctggtccagcctccacctcagccagcttgtcctgggcatctccgatggctaccttgcccttctgctctgcctccaggatggtgtcttgcagggcagcactgtgccgagggccaacagtaggcagtgagtggatcacgagagaccaggtaccttcctgcacccacctatgcttgtctcttctccaccctctttcccacccttattgtgggaaatgtgagaatatagaaaagttggaaaaaaaatctatcttaaccccactctcccccctccaaaggctaccactgctgagttggggtcccatctgtttcctgaggttggtgatttctgcctgaagtctctgggtggctcagttcagctcatcgacctccatctaaatggctttgaggtcctcacccttcctcctggcagtgacctggagcttctggtacaggaagtgggggaaggcaagagtgaaaagatagcacagagagagtgaaagcagggctcctaaccccagatctc

SEQ ID NO: 7137 - DNA, 536 bp, Homo sapiens
  MAP TO AC015785.3; EXPRESSED IN PLACENTA, SIGNAL = 1.5; EXPRESSED IN ADULT LIVER, SIGNAL = 1.2; EXPRESSED IN HELA, SIGNAL = 2.4; EXPRESSED IN FETAL LIVER, SIGNAL = 1.5; EXPRESSED IN LUNG, SIGNAL = 1.2; EXPRESSED IN HEART, SIGNAL = 1.3; EXPRESSED IN BRAIN, SIGNAL = 1.5; EXPRESSED IN BONE MARROW, SIGNAL = 1.5
gcagggctagactatgcaggctcacagtaaggattttcattgtttccctatgaacaatgagaaatcactgaaggatcaaaatcaggggagtgttctgaaagcatatttgtgttttgaaaagttctttctaactggtgtatggagaatggatcagaagatgtggcagaaacctgggatttaaagcaacacatttactgaacccacctgacttcggcacagctactgtggacagttccatgcaccttggctggagtcccacattgagcatgtgcagcagggtgcctatgctctgtcttctcctgagctgcagaaggattcccatctgtaagaaagcatagcccagcaatgcagaggagttaatgcccctaccaccaatctcaatcaatgaggatgaggatgagtgagtgataggtgctccaatctccctaccctccagtgtgacaattctgaggatccccagtgggactgggccccagctgcccactgtagtaagcaacatatctgcaaacatttgttggctttcttcctgcactgtc

SEQ ID NO: 7138 - DNA, 525 bp, Homo sapiens
  MAP TO AL133352.10; EXPRESSED IN LUNG, SIGNAL =   2; EXPRESSED IN PLACENTA, SIGNAL = 2.2; EXPRESSED IN HEART, SIGNAL =   2; EXPRESSED IN ADULT LIVER, SIGNAL = 2.7; EXPRESSED IN FETAL LIVER, SIGNAL = 2.2; EXPRESSED IN BRAIN, SIGNAL = 2.1; EXPRESSED IN BONE MARROW, SIGNAL = 2.2
ccagtgcctctctccagttcttcaggctacaggtacacaccacatccttccaattcttttgcacaacacaggctagaagctgtaatgggcagagagggaaagagaccatcagccatccatccagcataggcagcaggattcctgcacaggcctcctgttagagcactgagtaggggcaagggatgaggtgggggtggttagagtagaaagagagaggcaggcagatactcaaacatgggtcccaaggtgtgggtatccacctcacaaggtccaagtaatcccctcccttcttctcctgcatgatgggcagttaccgaggagattttggttttcttcttggccaagtagcgctcctgtgtttgcttcagcagatctgtacccccagcctgggccaggataatggcatcagcaaagcgctcctccttcagacacagctccacggccggacccagttccccaagcaggagagcctggcttaggagtccatcaatatctgcaggcagaagcatcccctgtgcattagtt

SEQ ID NO: 7139 - DNA, 591 bp, Homo sapiens
  MAP TO AC013314.4; EXPRESSED IN BONE MARROW, SIGNAL = 1.9; EXPRESSED IN PLACENTA, SIGNAL = 1.9; EXPRESSED IN ADULT LIVER, SIGNAL = 1.9; EXPRESSED IN FETAL LIVER, SIGNAL = 1.6; EXPRESSED IN BRAIN, SIGNAL = 1.7; EXPRESSED IN LUNG, SIGNAL = 1.8; EXPRESSED IN HEART, SIGNAL = 1.6
ccctaaaatgagggcagatgaaagggttttgtaaatggatatattattttgaaatagtacttaattaattgcatctagttcatctttaaagtagtcttacttcactgatactatataacattatatgtcaaatgcatcatgcttaactttaaagactgatccaaatgcagccaactaaaacacacatccattatttcaaattattatgaggaaggtatttctaaatctcacaactggtggatacagaacttgaaaccaggtctttcaaattcaagattattttctctatttagaacattgcctttcttcagaggtgctgttttaccagctgttttatacagatgtggaacagaatcaaaccactgatgagaccaaagacttgccggtctccttgttcaaaatgaggcaaaagcagtcagaaactgtagccctacacaatgataaacatgggaaataccccatgtctaatgggaaaatacaaccaatctcattaaaattagctgagagaagaggtaaaattcacccatgtaagcttatagaaaacagggaagaagtagagatgaccttatctctgtacctgagccaagctga

SEQ ID NO: 7140 - DNA, 570 bp, Homo sapiens
  MAP TO AC013691.3; EXPRESSED IN LUNG, SIGNAL = 2.7; EXPRESSED IN PLACENTA, SIGNAL = 2.3; EXPRESSED IN ADULT LIVER, SIGNAL = 2.7; EXPRESSED IN HELA, SIGNAL = 3.3; EXPRESSED IN HEART, SIGNAL = 2.1; EXPRESSED IN FETAL LIVER, SIGNAL = 2.1; EXPRESSED IN BRAIN, SIGNAL =   2; EXPRESSED IN BONE MARROW, SIGNAL = 2.2
cccacccccgatatctaatcagttgccaggtcccacccattctgcttgttcagtcagttctctccgccctcacagtccctctccaggttcagttcgttatctctcctctgcaccattgcctcagcctcctccatggtgtcttcattagggttcccccaaaagcagaccctgatataaggacttgggttatgtagtttatcaggggcagtgtgggggtgatcctcctagaagcaaagcaggcagtgaggaaaatgaggagaaaaaacaatgaagtgtgtgtgagaaacaaacttggtctcactgggcacgctgaggtatctgtagggcggaacaggctcatgtgaaagcccttatcttcttgggcggagaagcagagagagggtggcacatggggtgggccgctgtcacagcatgacattattgcagctggggtgaccttgggggatgtagggcagggcatcagagcatctgcagcactggtctcctgcctcagtctcccctctcttgcctgtctctgcccagcagctggagggtgtttctgagacagtgtctcaggctgcactggtatga

SEQ ID NO: 7141 - DNA, 588 bp, Homo sapiens
  MAP TO AL161662.1; EXPRESSED IN BONE MARROW, SIGNAL = 1.9; EXPRESSED IN LUNG, SIGNAL = 1.3; EXPRESSED IN ADULT LIVER, SIGNAL = 1.4; EXPRESSED IN FETAL LIVER, SIGNAL = 1.8; EXPRESSED IN BRAIN, SIGNAL = 1.7; EXPRESSED IN PLACENTA, SIGNAL = 1.3; EXPRESSED IN HEART, SIGNAL = 1.4
atcctgaagcagctggattgatagaatggtggaatggccatttgaagtcacaattacaatgccaactaggtgacaatactttgcaggcctggggcaaagttttccagaaggccatgtatgctctgagtcagcgtccaatatatggtattatttctcccatagccaggattcacacatccaggaatcaaggggtggaagtggaagtagcaccactcaccatcacccctagtgatccattagcaaaatttttctttcctgacccagtgacattatgttctgttcgcctagaggtcttagttccagagggaggaatggtgccaccaggagacacaacaacgattccattaagctggaagttaagattgccacctggacactttgggctactcctacttttaagtcaacaggctaagaagaaagttacagtgttggctggggtgattgacctagacaatcaagatgaaatcagtctactattacacaatggaggtaaggaagagtatgcatggaatatagagatccattagggtgtctcatagtattactatgccctgtgattaaggtcaatgggaaactacaacagcccaa

SEQ ID NO: 7142 - DNA, 525 bp, Homo sapiens
  MAP TO AC015908.4; EXPRESSED IN LUNG, SIGNAL = 5.4; EXPRESSED IN PLACENTA, SIGNAL = 5.1; EXPRESSED IN ADULT LIVER, SIGNAL = 6.3; EXPRESSED IN HEART, SIGNAL = 4.7; EXPRESSED IN FETAL LIVER, SIGNAL = 4.1; EXPRESSED IN BRAIN, SIGNAL = 4.2; EXPRESSED IN BONE MARROW, SIGNAL =   5; EXPRESSED IN HELA, SIGNAL = 5.8
ctctgatttctgagcctgggtcaggagaagctgccctgcccaggcaccaacggaacgcacgcctccatgaaacttgaagacagactgcagagaagcatcatgaatttttcacaagattcatctaattgtggctgagcagagctgagaaagccacagtccgaggacccatgccagcagctcacaaagagttaacccattaggccattgcctggtgagctcatccatccctgctggagcctgctcagttgctgggattcacaacacactgacttctggacgtggtcagggtggctttctctggctggcatggacttgagcagaaactcattgccggcttcctccttgcacgagcaccaagtgattcccaggtcccccatcctcccctgggacatcgaggacagtaagtaaggagggaatgtttccttctgcccttccttccatctcgctgaaggaaggagcagattttaactttgctttggagcgtgttgtctttaaactggggttggaaggcaagcatgaacaaca

SEQ ID NO: 7143 - DNA, 565 bp, Homo sapiens
  MAP TO AL139248.2; EXPRESSED IN LUNG, SIGNAL = 6.6; EXPRESSED IN HELA, SIGNAL = 4.2; EXPRESSED IN HEART, SIGNAL = 3.6; EXPRESSED IN PLACENTA, SIGNAL = 7.6; EXPRESSED IN ADULT LIVER, SIGNAL = 4.4; EXPRESSED IN FETAL LIVER, SIGNAL =   4; EXPRESSED IN BRAIN, SIGNAL = 3.3; EXPRESSED IN BONE MARROW, SIGNAL = 3.8
acaggggtggctattcacagcagggtcaggcccttgggtcttacctcgatagcactgactggatcctccagcagtcacctggcaggcagactttagttctagagaacccacaggttgggtaccacgacgaggaaggggttggggaggcaccaggtggggagggccagtggtagttttggtgaagtgactctgctgtggtacttgactgttactcttctcattagttcctgctcagaaaacaagggaagagcagattaaagttcagcaaactaagtgaagggaccatatgtgtggaggtgaggtcaagagagagggatcatcaccattccgatgaaggattcctagagaaggtagcattttaacagttgcttaaacaatggggaagaaagtagagtccacaggaaacaggagaaagttttttatgaaccataggtgtaatgtgaaagaagtctcagaagcagataataaaatggaaaagtgaatgaatcaacacattctttattaaaagggcttcccgaatgtctcttgtaaagtcgatgcaaacccggagttctgaggcataagc

SEQ ID NO: 7144 - DNA, 558 bp, Homo sapiens; identical to SEQ ID NO: 6656
  MAP TO AC018909.3; EXPRESSED IN PLACENTA, SIGNAL = 1.2; EXPRESSED IN HELA, SIGNAL = 2.3; EXPRESSED IN HEART, SIGNAL = 1.2; EXPRESSED IN BONE MARROW, SIGNAL = 1.2; EXPRESSED IN ADULT LIVER, SIGNAL = 1.7; EXPRESSED IN FETAL LIVER, SIGNAL = 1.2; EXPRESSED IN BRAIN, SIGNAL = 1.4; EXPRESSED IN LUNG, SIGNAL = 1.2

SEQ ID NO: 7145 - DNA, 523 bp, Homo sapiens
  MAP TO AL137026.10; EXPRESSED IN PLACENTA, SIGNAL = 3.1; EXPRESSED IN ADULT LIVER, SIGNAL =   4; EXPRESSED IN HELA, SIGNAL = 5.1; EXPRESSED IN FETAL LIVER, SIGNAL = 3.4; EXPRESSED IN LUNG, SIGNAL = 1.7; EXPRESSED IN HEART, SIGNAL = 3.9; EXPRESSED IN BRAIN, SIGNAL =   3; EXPRESSED IN BONE MARROW, SIGNAL = 4.9
ttgagacactgagcaggtggcttctaatttaaactcccgcctcatctaggctccggctctccccaggcctgttgggctccttgccctgtagaagctgagcctgagctcagccagcactcactgtgttgcctgaggagatggcctttcccaacatacaccagtaacctggaacttaccccagtgatgccgtctcttgatccttaatcgctgcaccaactgctgcagcccagacacacattaccaaaatctggcagggtagtaaagtgccttgttgtccttacctcttctagggaagcccgtcagcctgagctacagatgcccatgccgattcttcgaaagccatgttgccagagccaacgtcaagcatctcaaaattctcaacactccaaactgtgcccttcagattgtgtaagtcttgaaattgaacatcatctaacgaacatagttgcatctaacgaacatagtaacatctaacccgagtcttattaaaggtgtagaggtgacaagccaagtgtccaacctt

SEQ ID NO: 7146 - DNA, 513 bp, Homo sapiens
  MAP TO AC013550.4; EXPRESSED IN PLACENTA, SIGNAL = 0.62; EXPRESSED IN ADULT LIVER, SIGNAL = 0.69; EXPRESSED IN HEART, SIGNAL = 6.7; EXPRESSED IN FETAL LIVER, SIGNAL = 0.7; EXPRESSED IN BRAIN, SIGNAL = 0.66; EXPRESSED IN BONE MARROW, SIGNAL = 0.59
tccctggtttggactctcagatctcctcacacagccaggctttgtcactgagtgacagctcatacccactgtttgatccttgttcacccagaggtttccttgataaaatttcattttggtttcttcctatcataatcccttgagatctcatggctgatgcaattgttaaatgttgcaagggaaaactaggagagatttccttgtataattctccatttcccttgttttgcttgcagatacacagaattaaatgtgacaaagctactggcattattgagatggtgatggatcgatttagtattgaaaatgaggggacctacactgtgcagattcatgatgggaaagccaaaagtcagtcttctctagttcttattggagatggtatgctatatcgaatatttccacatgtccatacaagataattcaaatgaaattcttttgactggagagaagcaaacatgtttcatatatatttttttaaatattgaatttagcattcaagactgtgctgga

SEQ ID NO: 7147 - DNA, 547 bp, Homo sapiens
  MAP TO AL138796.2; EXPRESSED IN ADULT LIVER, SIGNAL = 0.53; EXPRESSED IN BRAIN, SIGNAL = 0.86; EXPRESSED IN PLACENTA, SIGNAL = 0.64; EXPRESSED IN FETAL LIVER, SIGNAL = 0.54; EXPRESSED IN BONE MARROW, SIGNAL = 0.55; EXPRESSED IN HEART, SIGNAL = 2.6
gcagggaagtttcagactggatgtgtgccagctcagtgccatccccaggccacacacagaaatggtgacatctccatcacagatgggttgcatgagactcagatgatagtggggtccttggcagaaaagaatgtcacagaggagggttctgacaagtgcttggaaatacttgggtcaatgttaccagactccttctctctcagcttacagcctggatgcctgtcaccaaatccctttgagcagtgacctgagccacctggtggcagaggtacgagctctgagagggcagctggagcagagcattcaggggaacaattgtctgcgactgcagctgcaacagcagctggagagcggtgctggcaaagccagcctcagcccctcctccattaaccagaacttcccagccagcactgaccctggaaacaagcagctgctcctccaaggtaggaaggaaaagggacttagaaagcccttggccagtcgggagatcaccaggaagttctgcggcagaaggtgtaatctgcctggtccatgctccttagggtca

SEQ ID NO: 7148 - DNA, 597 bp, Homo sapiens
  MAP TO AC013657.3; EXPRESSED IN LUNG, SIGNAL =   6; EXPRESSED IN ADULT LIVER, SIGNAL = 6.3; EXPRESSED IN HELA, SIGNAL = 8.1; EXPRESSED IN HEART, SIGNAL = 4.4; EXPRESSED IN BONE MARROW, SIGNAL = 5.1; EXPRESSED IN PLACENTA, SIGNAL = 4.8; EXPRESSED IN FETAL LIVER, SIGNAL = 3.9; EXPRESSED IN BRAIN, SIGNAL = 4.4
gcaagcctatgaagtcccaggatcaaggttaaagaccctcttttttgctgtcttcttgtgctctcttttctctcttggaccttcaggcgcctgcttggttctctttcaagcgaattttgctttctttcctgttctaaagccttttaactaaacttccactcctgctctgaaacttgctctctttttctgccttaacgcccctcagtcgaattctttcttctgaggaggcaaggactgaagttgctgtggacccatagggattcgccattggtaactcggggtaactcggctctcttccactgctgacgtatgtagcaagtcctgtcttcgggttggcaggcaccacggctgacaccacatgcgcagagagaggggaaagaccaagaagtgactcatgacatcaccctcgtctctgaaagacaagatgttggtctcctcaggtgccgtgcagtcttcagtgttggctgcagccacagcccctgcaatgcagaccaggatgagggaaagccgctggaagaggcctacagcattttttattagtaaatccagaggacgtgttatataaagtgtaagacaaccaccattgcatgcatttat

SEQ ID NO: 7149 - DNA, 580 bp, Homo sapiens
  MAP TO AC008773.3; EXPRESSED IN HEART, SIGNAL =  14; EXPRESSED IN BRAIN, SIGNAL =  13; EXPRESSED IN BONE MARROW, SIGNAL =  15; EXPRESSED IN LUNG, SIGNAL =  14; EXPRESSED IN HELA, SIGNAL =  19; EXPRESSED IN PLACENTA, SIGNAL =  16; EXPRESSED IN ADULT LIVER, SIGNAL =  16; EXPRESSED IN FETAL LIVER, SIGNAL =  13
tcaagcaatcctcccacttcagcctcctgagagctaggactacagctgtgtgccaccactcctggctaactttttacaaaaatgttttatagagacaaggtctcactattgctcaagcaggtctcaaatacctggcttcaagtagtccttctgcctcagcctctggagtctttgggattacaggcatgagccaccacacccagctgctctgaattttaattatacaagttgtaaggtttgctttaatcatccttttgtttcccctttgcaagggcattttgggtcagcaccaatttcttgaaggccccgagggcattgaaaacactcgatttggttcagcaattgcagctctttcagacatcaacatggatggctttaatgatgtgattgttggttcaccactagaaaatcagaattctggagctgtatacatttacaatggtcatcagggcactatccgcacaaagtattcccaggtaatccatgagctgttatggtgatgtatgtatttgtgggtcttatcatattagacatagaaagcgtcatgtaaaccatgcaatccgtccgccttattttgtaa

SEQ ID NO: 7150 - DNA, 520 bp, Homo sapiens
  MAP TO AL121911.10; EXPRESSED IN ADULT LIVER, SIGNAL = 0.98; EXPRESSED IN BRAIN, SIGNAL = 0.95; EXPRESSED IN BONE MARROW, SIGNAL = 0.8; EXPRESSED IN HEART, SIGNAL = 1.7; EXPRESSED IN FETAL LIVER, SIGNAL = 0.91; EXPRESSED IN PLACENTA, SIGNAL = 0.79
ccctctgggggattttagagaatagattaggtggctgcatctaaaaaaaaaaaataatcctgaaactctgagagggacaactctctatttgccacctcaccaccagataaccttcctatacctcttcccagagcatggatctcatttccatgctcctggtaaacacctgtcacccaggtgtgagggacagggggtgggaggagagaattctcgggagctgtagatctgattgagcttggtatcgccatctctccctttagccctgtctaagtccgatactgatgcctgacatccagcctgggccttcaccgatgatgccacctccttgtagagtgacatggcaggaaatgactcattcaggtaatggggtaagaggaaagtgtaccatagaattccctctctcattctgattgctttctctcgggtctgtttcctacccactctgagatgcatctgtttctgggagtgtttgtcttagtgccagatcgaggcacttcttactccaagtagcgtttcaggg

SEQ ID NO: 7151 - DNA, 531 bp, Homo sapiens
  MAP TO AC022050.2; EXPRESSED IN LUNG, SIGNAL = 3.9; EXPRESSED IN BRAIN, SIGNAL = 4.2; EXPRESSED IN PLACENTA, SIGNAL = 3.2; EXPRESSED IN ADULT LIVER, SIGNAL = 3.4; EXPRESSED IN HEART, SIGNAL = 4.4; EXPRESSED IN FETAL LIVER, SIGNAL = 4.5; EXPRESSED IN BONE MARROW, SIGNAL = 4.7
aagagaaagtggggaggtgctgcacacttttaaacacccagatctcacgagaatcactcactatcatgataacagccccaatggggtggtactaaaccattaatgagaaatccacctccatgattaaatcacctcttatcgggccccacctccaacaatgaggactttgatttgtcatgatatttggtggaacaaacatccaaaccatatcagtaggtttggccacttcatgtaactcatatttgttaaaggctttgttcatttcttaaaattcctttttccttatttttgtctgactgggttaatttgaagaaccagtcttcaagctctgaaatgctttcttctgtttggtctaatctagtattggaactttcaactgtagtttgtaatttcttcagtgcattttttatttccagaagttctggaaggttgtaaatatctatctttttaatacatttttaattcatatcctttactgtttttctgatttattgttttgattttcacctttcttttggatctcattgggct

SEQ ID NO: 7152 - DNA, 527 bp, Homo sapiens
  MAP TO AL160281.2; EXPRESSED IN BONE MARROW, SIGNAL = 1.1; EXPRESSED IN ADULT LIVER, SIGNAL = 0.9; EXPRESSED IN FETAL LIVER, SIGNAL = 1.1; EXPRESSED IN BRAIN, SIGNAL =   1; EXPRESSED IN LUNG, SIGNAL = 0.97; EXPRESSED IN PLACENTA, SIGNAL =   1; EXPRESSED IN HEART, SIGNAL = 1.2
acagtggttgagttccctgggttttcctttatcctcccatatatcatcaaaaggtactgcagaaacttacaactcagaaccatcaacaggaacagactccccccgccaaaacaatatggctccaagaaaagccattcctgttaacggaccaggaaaaaggtgacttcgctgaacagaaaacctttttgaagatacacagccttctccagccaaacactaatggaatgcaccttcctttcaagcacctgctgaacattctccaaatagaccacaccgggggtcataaaacacctccacaaattgaagtcgtacagagtatgttctctgattataatagcatagaactatcaatcaacaacagaaagataacaggagaatctccagatactttaaataatatatttctatatgatccatggatcaaagatgaagtcccaagggaaattaaaatgtgatgaatgaaaacgaaaaatgtaacatatcaaaatctgtggggtacagataaagcactgttgagagggaacatt

SEQ ID NO: 7153 - DNA, 519 bp, Homo sapiens
  MAP TO AC008572.6; EXPRESSED IN PLACENTA, SIGNAL =  10; EXPRESSED IN FETAL LIVER, SIGNAL = 9.5; EXPRESSED IN ADULT LIVER, SIGNAL =  11; EXPRESSED IN BONE MARROW, SIGNAL = 9.8; EXPRESSED IN LUNG, SIGNAL =  12; EXPRESSED IN HELA, SIGNAL =  12; EXPRESSED IN HEART, SIGNAL = 8.6; EXPRESSED IN BRAIN, SIGNAL =   9
ccaacatcagttactctgtttttcccatgtattagttatagttctacccagtagatttactgtaaaagttttttaattaaaaatgtaaaaaattggaaacttttttgaatatttgaaggaaatgagcatgttccttagagtttcttctttatcagctacagaattttaaatcaaaggacgtttttacttttcaatttcttcagctccttctctgtctcaacctttactctccaaatacccctgagagaggagctcagggacctaagtcagaagtatgtctacatcacaattatcaagctattgccattgtcagccggactaaggtcaatattattgggtgagtttgtctgcctctcttccctcgggataataaatcttctccctagaaattcttcaccagttggatttatagcggccagcttcatcaggtcataagacatggtgagtcagtaaatttgacaaaatttaggcatagggtatgacaacatttcatctcattccccctgcccaagttactat

SEQ ID NO: 7154 - DNA, 584 bp, Homo sapiens
  MAP TO AC015805.3; EXPRESSED IN PLACENTA, SIGNAL = 1.6; EXPRESSED IN ADULT LIVER, SIGNAL = 1.8; EXPRESSED IN HEART, SIGNAL = 1.7; EXPRESSED IN FETAL LIVER, SIGNAL = 1.8; EXPRESSED IN BONE MARROW, SIGNAL = 1.5; EXPRESSED IN LUNG, SIGNAL = 1.8; EXPRESSED IN BRAIN, SIGNAL = 1.6
agctcagagataggggcctggcaacttcatgatgcaatttgtgcaagagttgcttgctggactgaattctggtctcctcttaagattgccttttttcattgtggacaggactatagaaaggcgatggaaaaactaagcaaatccagagtggcctgctatgatcgcagacaaatcccacagcctgtaaccttgaagacaaaactctggtatgcagtgtttaaatcaggtgttaaggccacatctagaaactgctccaagtaggatgaaatgcaatatctttgctccaccttaggtctacctgttacactaccaaggcatcttaggtctttccttcatatgactcattactcttgtaattatttaattcattcaggtatttattgagcacatactctggtactctgataatcttagaggattcaacagtgtctaaggaagtgctctcatgaggctttattctactgaggatgagaggtaggagagagagacaaaatggtaataaaaaataagcaaactaatattagagaataataaatgctatgaagatgcattagagagtgaatggccaggagtggagggataat

SEQ ID NO: 7155 - DNA, 592 bp, Homo sapiens
  MAP TO AC013641.4; EXPRESSED IN HEART, SIGNAL = 3.9
ctggcagttgagtttgcttggcatcaaaagcacccaattaaagaccaaacctcacttccttctttttcttcatttccttctttctctataactacacaatctcacatgccttataatgcttttagatgtaagtgactgtgaattattaccaactgtatgcctttcatctttaagactgacagtctaagttcaacatctctcaggagggagagactattataactatatttttgcttaccaagagaattgttaatggttatcctggagggaaaaaaatctataaatatccaactcgtaatgaagccttaagcttacattcttcctttactaatgaaactctttctgactatactgccagaattgctacataaccatttcactgagaaaagagaccaagtctgtagtaaattttttcttttacctgtttagttcttattttggaatccgaagacagattgttgtaggtataatgtgcttgtgtgactccacagaagagaacagcaactatccctgaaattaaaaaaacagatcagtcaaaaccaatttttcttttccatccaagtcaaaggttagggctattccagttggaaaa

SEQ ID NO: 7156 - DNA, 585 bp, Homo sapiens
  MAP TO AC025747.3; EXPRESSED IN BONE MARROW, SIGNAL = 1.5; EXPRESSED IN LUNG, SIGNAL =   2; EXPRESSED IN ADULT LIVER, SIGNAL = 2.5; EXPRESSED IN HEART, SIGNAL = 1.9; EXPRESSED IN BRAIN, SIGNAL = 1.3; EXPRESSED IN PLACENTA, SIGNAL = 1.9; EXPRESSED IN FETAL LIVER, SIGNAL = 1.3
tggtgggtttctataagagcaagttttacttttaccactggtagatcacaaatcaaatacccagtaaacatttgttgcataaatgaactacaaattccaatgctacttgagttctgataaatctacttatcctctctatgtaatgcaattcctatagaaatttacagatgtttcatcatagatggttaagaaaagtttatcagagacttttgatgaatacacttatgtaaaaagctaatagaaaagactcattactttaggaataagaaaaagaaagacaaggctgaggggctagaagagggaaaggagcagaatgctgaatcaaaggcaagagatcatttcagaaactctaagtttgcttttcctgtgggtgaaaatagatattattccattaatatactgaagtatcattctaattctgataaaattaaaaagagacagcaagttttagtgaagaatattagactgggtatcaggacccagcatgataactatacatacaatgaaaaatttcagatcaaatagaagaacaatgctttagtgagtttggggaagcttattatgggtaaatggtttctcccagga

SEQ ID NO: 7157 - DNA, 584 bp, Homo sapiens
  MAP TO AC024193.2; EXPRESSED IN LUNG, SIGNAL = 4.8; EXPRESSED IN ADULT LIVER, SIGNAL = 4.6; EXPRESSED IN HELA, SIGNAL = 2.3; EXPRESSED IN BRAIN, SIGNAL = 3.5; EXPRESSED IN BONE MARROW, SIGNAL = 4.1; EXPRESSED IN PLACENTA, SIGNAL = 4.6; EXPRESSED IN HEART, SIGNAL = 4.3; EXPRESSED IN FETAL LIVER, SIGNAL = 3.5
aagtggtgggtacaggcatcaagtctgtctgtcagtcagtctgtccacagggccactcaccttcccagtactccacactatcacccaggtaatgcgaaaagagtcatagagaatgaaggggaagctaatttggcccaagccccaaggacttggagaactcaagaggggcatttcaactttagccttcttagggcaggccagccaccaaatggggtctcacacatttgaagtgtccacagatattaattggcaacctggaaatccgggctgtcagccactggttttatatctacggagaaggggctgacttctatatggttgtcctgctcatctccctattctcctgcctgctaggagaaaaattgtccctggacccactttcttacctgcacacttgctctcgcacatcaggtaccatgctattgattctggtatcatcaaggcttgccacgttccaaatgccaatcttcttttccttgttgggcccctaatcttttagagcagcagttcccaaccctgggcaccaatgaaaattaacataggagctttaacaaatactcatgcccaggccttctagtctgcat

SEQ ID NO: 7158 - DNA, 580 bp, Homo sapiens
  MAP TO AC018390.3; EXPRESSED IN LUNG, SIGNAL = 1.7; EXPRESSED IN ADULT LIVER, SIGNAL = 1.8; EXPRESSED IN HEART, SIGNAL = 1.5; EXPRESSED IN BRAIN, SIGNAL = 1.2; EXPRESSED IN BONE MARROW, SIGNAL = 1.4; EXPRESSED IN PLACENTA, SIGNAL = 1.6; EXPRESSED IN FETAL LIVER, SIGNAL = 1.2
tcccagcttaccactgaacctatcatgcaagaagcagtctataaataaacgagcaaatgaaaaacacctcaaaataaacttagatctgaactgccacccacagtaggtagaacagagttttcagtttgaatctaatcatgttaattatttgctagaacaaaagtatcacatgcttcaaaagaaaacagcagaatccagggactccacagcctaatattcaaactccaaaaaattcaatccaaagttactcaatgtgccaagaactaggaaaccatgattcattcacaaggtcagactggaataggatggactctaactgcagtcactggtgtcctcataggaagagactaggagatacagaagagacagaaagaagaatgtcatgggaagatggaggtagagattgtggttatgttgccacagtcaaagaacacctgcaatcaccagaagctacaagaggcaaagaagcattcttccctagagactttggaaggaacatggccctaccaatctatgatgacatacttctagcctctaaaactaggaaataataactttctgttgtttgaagccagccagt

SEQ ID NO: 7159 - DNA, 527 bp, Homo sapiens
  MAP TO AC025539.2; EXPRESSED IN LUNG, SIGNAL = 3.8; EXPRESSED IN PLACENTA, SIGNAL = 3.8; EXPRESSED IN HEART, SIGNAL = 3.4; EXPRESSED IN FETAL LIVER, SIGNAL = 3.1; EXPRESSED IN BRAIN, SIGNAL =   3; EXPRESSED IN BONE MARROW, SIGNAL = 3.7; EXPRESSED IN ADULT LIVER, SIGNAL = 3.9; EXPRESSED IN HELA, SIGNAL = 5.4
gcctaggaaggttctggctctagtaagagctgctgattctagtccccaggcttatgattagggttgccagaaaaaaaaaaaaaagaaggaaaaacaggaagtccagttatatatgaatttgagataaacaacaattttttatgaatatgcccaaaatattttataaaacacgcaacagaaaatttttgtttacttgaaatttaaatttaactggacttgttaagtttttgtttgcttaatctggcaaccctgccctgagcaatagcaaacctagaccctgatcacatgcccagttgaaacggatgagggcagccacaccaccatccatccacagatggatgtgcctcatctgagactgagagacaggattgacttcacctccagcattcgtagatggatacatataaatgtaaatataattatacacaaaaatatattgaaaactgaggttttgggaggagtggcttgggagattgaaagcacccagacatcccgggtctcaccatggaaagaggagtgccttccct

SEQ ID NO: 7160 - DNA, 557 bp, Homo sapiens
  MAP TO AP001427.1; EXPRESSED IN LUNG, SIGNAL = 8.2; EXPRESSED IN BONE MARROW, SIGNAL = 7.2; EXPRESSED IN BRAIN, SIGNAL = 6.4; EXPRESSED IN FETAL LIVER, SIGNAL = 7.4; EXPRESSED IN HELA, SIGNAL = 7.9; EXPRESSED IN ADULT LIVER, SIGNAL = 7.8; EXPRESSED IN PLACENTA, SIGNAL = 7.4; EXPRESSED IN HEART, SIGNAL = 6.9
atctgggccaaaataacacgccgccttggcaggaaaataaacctgctgaaaatcgttagagcactttctccctcacctgcctgataggctctgctgcacagacaaagagcctgttctccgataaaacaaggcagctaaggggcaggtctgggctttaaatcagccctctgagggggtaggctgcatcgctgggccccacgtccataccaagttgtgctcctgtgcaccgcagaatggctcgtacgaggccgtggggaaccaggatggcaacaacaaaaaatgggttctccgcctccaggagaggcaaggcaagacctggtgacagcagccttgtctgcattctgtaattggcagcctcagacatgtgcctgtgctctccatgggggttggccagttgagccctggcaaagacgtggcctgcacctctgtgttttcacacagcacccacaccagcggtgcagggggagagtggagcttcagagggggagaaggtaaatgctgtgacgtgtttcttccagcaaccccccccttggatagcactgcccacctggtcttat

SEQ ID NO: 7161 - DNA, 549 bp, Homo sapiens
  MAP TO AL158175.6; EXPRESSED IN ADULT LIVER, SIGNAL = 1.8; EXPRESSED IN HELA, SIGNAL = 2.5; EXPRESSED IN HEART, SIGNAL = 2.1; EXPRESSED IN BRAIN, SIGNAL = 1.8; EXPRESSED IN BONE MARROW, SIGNAL = 1.9; EXPRESSED IN LUNG, SIGNAL = 1.6; EXPRESSED IN FETAL LIVER, SIGNAL = 1.8; EXPRESSED IN PLACENTA, SIGNAL = 1.6
gtcaggagacttctggctggaggcttgaccccacttttcctgatgaatgacctttagaggtggctccaggtattgcttcctaaacctgagtaaccatgacaacctctctaattccggagctcaactgtagacacctagactataattctgggcaactttgtgtcttatacaggtctgagggctagagatcagagtggacacatggttcaccatgtagaactgtcatcttgtaaagaccttctgtgacctccgggactttgcatgggtactcctatcatgggtgtgcagcctggggatgtgtgctgtgtgtcatatatttttctgaaccacagccatggtgtttttggctccagcacacatcacaggaagacttctgtgcagggcagtgtgacacaaacacattcagagcagtctgttgctggagaaggtttatctccttggctttgaaacgcttgcagcctttcagcccctaaaagcatttagaagcaggatgtggatgattttccatatttctaaaaagactctttctcctcttctccaacagttgcc

SEQ ID NO: 7162 - DNA, 583 bp, Homo sapiens
  MAP TO AL139352.8; EXPRESSED IN ADULT LIVER, SIGNAL = 1.7; EXPRESSED IN HELA, SIGNAL = 4.3; EXPRESSED IN HEART, SIGNAL = 1.5; EXPRESSED IN BONE MARROW, SIGNAL = 2.5; EXPRESSED IN LUNG, SIGNAL = 1.6; EXPRESSED IN PLACENTA, SIGNAL = 1.5; EXPRESSED IN FETAL LIVER, SIGNAL = 3.2; EXPRESSED IN BRAIN, SIGNAL = 2.8
cccaaatcctcttctttccctcccacctgtcccttcagtcccaaccccaagcgtcgctgagtcttgtgattcttccttttctactgaaccatctgacgtctcaccttcttcccagactgctcctcctcagctcgctccccaccaggctgaatcagcctccaactcttcttcagcctctgctcccacatcctataacccttctattacccgccctccccacacccagtctggttttcagtttcgttctgcggctagctctcccccacctgcccaacaatttcctcttagagaggtggctggagctgaaggcatagtcagggtacatgtgcctttttctctatcagacctttcccaaatcagccagcatttaggctctttctcatcagaccccactaaatatatacaggaatcccgatatctaactctgtcctacagtttaacctggagtgactgaaatgtcatcctgacttctaccctctccccagatgaacgggaaagagttttttctctagcccaatctcacactaataaccgccggcttcatgaacctgacacaagaaaggcagtagagcagttccccgag

SEQ ID NO: 7163 - DNA, 536 bp, Homo sapiens
  MAP TO AC011440.5; EXPRESSED IN PLACENTA, SIGNAL = 2.9; EXPRESSED IN ADULT LIVER, SIGNAL = 2.9; EXPRESSED IN FETAL LIVER, SIGNAL = 2.6; EXPRESSED IN BRAIN, SIGNAL = 2.9; EXPRESSED IN BONE MARROW, SIGNAL = 2.7; EXPRESSED IN HEART, SIGNAL = 2.7; EXPRESSED IN LUNG, SIGNAL = 2.6; EXPRESSED IN HELA, SIGNAL = 3.4
ttggtaggagaggcaaggagacatttttctaatcacattctttcagtatgtgttgggataaatttcaggggttggaatttccatcaagtgcacatgtacacctcttagaattgtcactttaggttatgacaactaggatgcattttttaaataaaagaagtgtattttgtatatgtattatatactgtattcttacaataaagtgagctaaagaaaagaaaatgttattaagaaaatattaggaaatattaagaaaatgttattaagaaagagaaaatatatttactattattacctgaaagtggatcatcataaaggtcttcatcatcattgtcttcatgttgagcaggttgaggaggaggaagagagaagttagtcttgctgtctcaggcatggcagaggtggaagatatggaggaggtggaaggagaggcgaaggaggcagtatattcagtgtgagctttattgaaaaaaatacacatatgagtggacctacacagctcaaatgcatgttattcaggggtcgactgtaccttg

SEQ ID NO: 7164 - DNA, 558 bp, Homo sapiens
  MAP TO AC019222.3; EXPRESSED IN LUNG, SIGNAL = 1.5; EXPRESSED IN PLACENTA, SIGNAL = 1.6; EXPRESSED IN ADULT LIVER, SIGNAL = 1.7; EXPRESSED IN BRAIN, SIGNAL = 1.2; EXPRESSED IN BONE MARROW, SIGNAL = 1.2; EXPRESSED IN HEART, SIGNAL = 1.4; EXPRESSED IN FETAL LIVER, SIGNAL = 1.3
tggtccaagactctgtgctgccatgttacacaaggattacagtacaaagtgtcatgtctatgagaggttcatgctatgtcctccaaaggacacaactttatcaaggctttaaacattttcagtccaagttctgattgcagtagaatttcagtggttatggaagacacgataagtatagtctggatacagattaccctcgttagtcacttaaagggtgctttaagtgtgtgcatgctggggcctcctactgtgggctctgtggttacggtcccaaacatcacaaatgtcaatgcgcttgaagaaaaggttaaagacaacaaaaggaagacaaagttacatggcaaaaagagaaatgctcctgggatctccaaccttattaaacatgacaacatatatataatgacaaaaattccacagatccactcccacatgatactagagatcaagaccaaaggaaacacaggactgtagcaggtatttctgggtgagaaaagggaacatcatttttggggggaaaagggagtttttgtcggggtaggagtttccaagtgcccacat

SEQ ID NO: 7165 - DNA, 564 bp, Homo sapiens
  MAP TO AC013497.4; EXPRESSED IN PLACENTA, SIGNAL = 0.95; EXPRESSED IN ADULT LIVER, SIGNAL = 1.4; EXPRESSED IN FETAL LIVER, SIGNAL =   1; EXPRESSED IN BRAIN, SIGNAL = 0.97; EXPRESSED IN HEART, SIGNAL = 1.2; EXPRESSED IN BONE MARROW, SIGNAL = 0.97
gttcccaggaccctctatcctacctcagccagatctgtagtttgaaaccatgcagagataaatacatacctgatttttgggaaacacttttggaaaatgaagcagttcataagctgctgttctgataatgaaaggatctaatattcggatttgataaggtttataaatcaggtttaaggctggtttcttccaaaaaccattagtgttctgaaagtaaaaaatatagagaatagaacagtgtggctgtctgttttttaaggaaaaaaagcactaaaggtaatctgaaggcagaacaattttgcctacttactattttgtcacccatcaacaattccaacagccaccttaaatcatgtggcttaaaagcagtgagaatcactgtcgtattagggtcattgtgaataggatctgaaaaaacagattctggataaaaaagtcggaaggttgtccttctcccaacttcttcttcatgtcctaaaacaggaccattattcattctgtggatagtaaaacatacaagatatgtagaccaagtgcagtatctgccattcccatcacagttct

SEQ ID NO: 7166 - DNA, 512 bp, Homo sapiens
  MAP TO AL133377.4; EXPRESSED IN ADULT LIVER, SIGNAL = 3.9; EXPRESSED IN HELA, SIGNAL =   4; EXPRESSED IN BRAIN, SIGNAL = 3.3; EXPRESSED IN LUNG, SIGNAL = 4.1; EXPRESSED IN PLACENTA, SIGNAL = 3.5; EXPRESSED IN FETAL LIVER, SIGNAL = 3.7; EXPRESSED IN BONE MARROW, SIGNAL = 3.8; EXPRESSED IN HEART, SIGNAL = 3.8
aacaaatcagacagtccgggttctcctggaacttacaggctagtgccccaagggctggaaaggattgcagatatatattttgtatttacatcacactaatatttgtatcataatattattgcattcattatgtgttaatagttgacagatccaacatggaccttgaagaacatgtgaatattttcaagggagtagccataaacctttatttgaatgccagtgaaaataattacatactccaaatcatattcctgtgccattgtcaaattcagaatttggtgttaaaggaactgtaagacttaacaagcaaggcaatttcttatgttctcatgatacaaatatatagagagtagccccacgtggattggttactgctgggtgacagtacttgtagaaattcagaactggaagatgcctacatgtaaggagtgtgaagaacagaggaattaactggttcattcatggtcagccagactgcaaatgtggcagttcccagccaggtgttcacagta

SEQ ID NO: 7167 - DNA, 584 bp, Homo sapiens
  MAP TO AC011294.3; EXPRESSED IN PLACENTA, SIGNAL = 4.9; EXPRESSED IN ADULT LIVER, SIGNAL = 5.3; EXPRESSED IN HELA, SIGNAL = 7.6; EXPRESSED IN HEART, SIGNAL = 4.5; EXPRESSED IN FETAL LIVER, SIGNAL = 4.6; EXPRESSED IN BONE MARROW, SIGNAL = 4.7; EXPRESSED IN LUNG, SIGNAL = 5.2; EXPRESSED IN BRAIN, SIGNAL = 4.2
tagaaaaccctcatgcctgggtggccaaccttccatttttcttattttcctcagcatgaatgatctggcaggcattttgactaacacacatgtgccagggattacaaaattaaaagggagcccagggagacaacaggagtaggagaagcattttctaatggcttcaagttctaagcatccagcaaagcagaatcactagttatcattatgcttgccacctgtgcaattgacccactggctgggatgtggtctaagagaagaaacgtgtgccttctgctggatcttttggaactcctccaagataaaaggaattctgacaccacattcagcagtatcaacttcagggaggtactacagaaacactcacggatctcaagtgagtcctggtaggattccagttagctgagaacatttgttcttggaaagagctttattgaaaggacatggattcccaaggggactttttggtgacttcctaggaagtctctgaactttcagaaacttatgtagggtggcctggcatgggtgtgttagtttatcataggtcttcctctggcatcagctcacagcatcagcgagagtgt

SEQ ID NO: 7168 - DNA, 535 bp, Homo sapiens
  MAP TO AC011938.3; EXPRESSED IN LUNG, SIGNAL = 1.3; EXPRESSED IN PLACENTA, SIGNAL = 2.4; EXPRESSED IN ADULT LIVER, SIGNAL =   3; EXPRESSED IN HELA, SIGNAL = 3.8; EXPRESSED IN HEART, SIGNAL = 2.2; EXPRESSED IN FETAL LIVER, SIGNAL = 2.6; EXPRESSED IN BRAIN, SIGNAL = 2.2; EXPRESSED IN BONE MARROW, SIGNAL = 2.4
ttagcgtatccaccacctcacacatgtatcacttcttggcaatgaaaacattcaaaatcctttcttctagctattttaaagtatacgatattgtgaatcgtagtcaccctactgtgccatagaacaggagaacttattcctcctaactataactttttacccattgatcaatctcttatcctctttccccttcttcttaccagtctttggtaaccactattccatactctacttctgtgagatcaatttctttagatttcacatatgtgtgatactggtctttctgtgcctggcttatttcacttaacataatgtccttcaggctcatctatcctgctgcaaatgacaggactttattctttatggctgaatagtattccattgcgtatatacattacattatcttcatctattcatccactgacagacacaagttgattctatatcttggctattgtagatagtgttgcataagagtacagatatctctttgacataccgatttcaagaagaatcaaggtctctctccccacaa

SEQ ID NO: 7169 - DNA, 576 bp, Homo sapiens
  MAP TO AL157837.4; EXPRESSED IN LUNG, SIGNAL = 5.6; EXPRESSED IN ADULT LIVER, SIGNAL =   5; EXPRESSED IN HEART, SIGNAL = 6.1; EXPRESSED IN FETAL LIVER, SIGNAL = 5.7; EXPRESSED IN BRAIN, SIGNAL =   6; EXPRESSED IN PLACENTA, SIGNAL = 5.3; EXPRESSED IN HELA, SIGNAL = 6.3; EXPRESSED IN BONE MARROW, SIGNAL = 6.2
acatcttcaccaccacctcctcactgatcatacccaaatccatattttaagtctgatttcatgagttccagagccatatattcaattccattctagatatccccagaaattcaaattcaaattactgacaaaaggaaggcaccatctttcttctgaaatctgctttttttctatttatgttttctagcttaggtaatcttatcagtatccactcagactcccaagctagaaaattaaacaaactaaatttgtgagaaatcttattagttccactattaaatccatcctctcttcactttcctcactcttaccatgattatttcttcacttaatttctgctttggcttcttcattgctctgcttgcctccattccagctccaccattcctgactgtgccaggtagtattaccaaggtaatcatattaaaattaaaatctcgtatcatggtcttgagtaaattaagcatggttcaccagcctctcagactcccctctgttttctagcctcattttaccacaagcatccaggctgggttctcagacctgggagaacagagaagtgggcagtgccagtat

SEQ ID NO: 7170 - DNA, 515 bp, Homo sapiens
  MAP TO AL138914.5; EXPRESSED IN LUNG, SIGNAL = 3.1; EXPRESSED IN PLACENTA, SIGNAL =   3; EXPRESSED IN HEART, SIGNAL = 3.3; EXPRESSED IN FETAL LIVER, SIGNAL = 3.6; EXPRESSED IN BONE MARROW, SIGNAL = 3.2; EXPRESSED IN ADULT LIVER, SIGNAL = 3.1; EXPRESSED IN HELA, SIGNAL =   5; EXPRESSED IN BRAIN, SIGNAL = 3.1
ttcaactctctccacagcccagtccatagtttttttcagtgggaactcttgtaacaggaactcttctgagaggacagaaagtgaagggagcattggatacgtcggggtctctggagtcactaaggtgagacattccagggtggaaagccttagagaccacctagctgagcctctgttaacgtcggaagtggggtctagaaagatgcagatgacagctgagcaaggtagggcccctgggcggctgttgaaattacactccatgttattcggaaggtatcacttgagtattattcattccgaacatatcctttttctttttttcttttttgcaagtcacttcattttgaaactcacttgcagttctgcagagtgggctgtatgagcccccaccctctacctccagacctacgtccacatctaccctgtgtttggattctcagctgagaatcccttggtcacacaggcctgtttgaagaggtgatcagggagagcaaaggctgaagagaccaaggaga

SEQ ID NO: 7171 - DNA, 590 bp, Homo sapiens
  MAP TO AC022020.3; EXPRESSED IN LUNG, SIGNAL = 1.5; EXPRESSED IN PLACENTA, SIGNAL = 1.2; EXPRESSED IN FETAL LIVER, SIGNAL = 1.1; EXPRESSED IN ADULT LIVER, SIGNAL = 1.3; EXPRESSED IN HEART, SIGNAL = 3.2; EXPRESSED IN BONE MARROW, SIGNAL = 1.1; EXPRESSED IN BRAIN, SIGNAL = 1.2
caagggagagcatggagaagcaggtagaggcattttactgactcggactaggagggacatatattatttctgtgcacaatccactcaacaacaaggggccttggaagcatgggagagtccacaagtatttgatggttattaaatctctctttacacgggttatctcatagtgatgttaagagacttcatgatgttgttactctacttagaaactcttggatttcagcccttgaagaccatgctccaacttcatcatcaaatcctcaccagaaaagacaagaggatacagaacactgagcaactcacaagatgtgtgctgcagatgtgtttatcagaactcaaaagtttcctctcttttctctgtcctatgactattccaggagtgccagacagaactagttcttacgctctgcgaagaaaagagtggactggaggtgggtcacattgacattttggtaagagccctactccttagaaacagaatgaaagttgtcaatgaggggaagggagtaaggactggctaagagtagccatgctgggaagatttcattgcaaattttcctctacctgggagctggcagataaaccag

SEQ ID NO: 7172 - DNA, 600 bp, Homo sapiens
  MAP TO AL157396.2; EXPRESSED IN PLACENTA, SIGNAL = 2.7; EXPRESSED IN BONE MARROW, SIGNAL = 3.3; EXPRESSED IN ADULT LIVER, SIGNAL = 2.5; EXPRESSED IN HELA, SIGNAL = 3.2; EXPRESSED IN HEART, SIGNAL = 3.3; EXPRESSED IN BRAIN, SIGNAL =   3; EXPRESSED IN LUNG, SIGNAL = 2.7; EXPRESSED IN FETAL LIVER, SIGNAL = 2.9
tgcagagtcaaaaatctgtgcataactttttgtcttcccaaaaactcaattactaatagcctactgttgaccagaagacttatcaatgacatagttgattagcacatattttgtatattttctatatattgtattcttacaataaagtgagctagagaaaaaatgctattaaagaaatcatcaggaagagaaagtatatttactactcattaaacggaagtagattatcataaagatcttcaccctcatcatcttcatgttgagtaggcttaggaggaagaggaagaagaggggttggtcttgctgtctcatgggtggcagaggcagaaaagatggagaaggtggaagagaaggtggaataaccaggtacactcagtgtaactttacagcaatacattataatttctatttgatttttgctttttcatttctctaaaaattttctatatggtactgatccttctttcaccatttgatttagtttcagtgtctatatcttagtagggtccatgttagaaaaaaagtcaaaagcagtcatgaatgatcagaaccactctgctagattgtctaatgtcaatttgctttctggaactgctttcc

SEQ ID NO: 7173 - DNA, 581 bp, Homo sapiens
  MAP TO AL133511.5; EXPRESSED IN PLACENTA, SIGNAL = 1.1; EXPRESSED IN FETAL LIVER, SIGNAL = 1.2; EXPRESSED IN ADULT LIVER, SIGNAL = 1.3; EXPRESSED IN HEART, SIGNAL = 1.4; EXPRESSED IN BONE MARROW, SIGNAL = 1.4; EXPRESSED IN LUNG, SIGNAL = 1.5; EXPRESSED IN BRAIN, SIGNAL = 1.7
ggcacctggagatgaagaagtaatcaaatgccgctgaaaaaggcttaaactggtagaggcagaaagtggtatttgacaaaagaggctaaactaaacttctcttgttttataaagaaaggcattcaatcaagtttccatgaatgggataagggaatcatattctgtagaccaaaaacacatgctctttagtaaaagtaaaagaaaagaaaccaacccacgtcagtgtaggacttacctattggtttctattttcatccttccaagctgtacattcagtgaccggtgagcactctgggaatcatgagacacagtagaactgagcgtgctcacgcctgaggtagccacagcatcttcaatgacagcctgaggtcttcggacagtttgatttgaaggctgttcctcatggtcatcttctacatccaagtcttcttgatcagcagtatcactctcagatgcaaggctgaaatgtggccttagttctgtttggcataatatcagtggtagtgtttataaaatatgactcattgccttaatttcttaagatatgaatgctaccctcctgccccaccgtcaataagata

SEQ ID NO: 7174 - DNA, 574 bp, Homo sapiens
  MAP TO AC013726.3; EXPRESSED IN ADULT LIVER, SIGNAL = 3.2; EXPRESSED IN BRAIN, SIGNAL = 2.6; EXPRESSED IN LUNG, SIGNAL = 2.8; EXPRESSED IN PLACENTA, SIGNAL = 2.9; EXPRESSED IN HELA, SIGNAL = 3.6; EXPRESSED IN BONE MARROW, SIGNAL = 2.7; EXPRESSED IN HEART, SIGNAL = 2.3; EXPRESSED IN FETAL LIVER, SIGNAL =   4
gatgtgaagggaagcagaccagcaccagcccgccctgccagggcttattccctgagcctcgaggactcacatggtgctggaggcaaggtttgtgtcctcgtgcttgattttcccatccagggcaatgcctctcctttctcgattgttagccagcaagggcagcagcgtcagcgtcttggtcaaagtgctgtttggtggcactttttctctagaggaagaagaacagaggagatttataaccatcaaagctgccatggaccccatgagcccctatttgacattaggcattttccaggatccacatcccctgatggacctcctgggaaggtgggttcaagagcctgggaacttgacttacgagaagcagaacagtgcttgtgaaatctcagggtgggctggcagcaacaggaggatatttcttcaagcaactcagcctattctgaattgctgaatttctagaatgttctatggagttaatgagacaaactggctcaagagtcagagaccacagcctcctcctgagactttgtgaaccacacggtggcctgcagaaccttctggttggtgtcagcaa

SEQ ID NO: 7175 - DNA, 507 bp, Homo sapiens
  MAP TO AC007940.2; EXPRESSED IN LUNG, SIGNAL = 1.6; EXPRESSED IN ADULT LIVER, SIGNAL = 1.6; EXPRESSED IN HEART, SIGNAL = 1.4; EXPRESSED IN FETAL LIVER, SIGNAL = 1.3; EXPRESSED IN BRAIN, SIGNAL = 1.4; EXPRESSED IN PLACENTA, SIGNAL = 1.5; EXPRESSED IN BONE MARROW, SIGNAL = 1.4
actgggcagaactagatggggcatgaagtgaatgatgaatcacatgggttcaacggacagtgtgcatggatgaggcatgatttgcatcatgcagaaacagtcattgggacagcagagagccaagaatataatttagctttatgtgaaaaccattcatggccctgagtgtaattatgcacaaatgtgctatgactttcaaatgcaggtgtgggaaccatagcaaggggcttacgtaagtagtgtagaattttgtggaagtgtaaaatactggacttatagaaatagtgctgaattccctccttctcctcctctccctcctcttcctccttctcctcctcatcatcactatcctcatcctcatcaccatcattatttaattgattgcttaccataagacatattctttacataaacatcatttcatatactttataaattatcatttctttcaaaaatatgggaaatgaacctaaaggaatttaagaaactctctggtctcaggcagct

SEQ ID NO: 7176 - DNA, 593 bp, Homo sapiens
  MAP TO AC013611.3; EXPRESSED IN LUNG, SIGNAL = 3.3; EXPRESSED IN ADULT LIVER, SIGNAL = 3.1; EXPRESSED IN BRAIN, SIGNAL = 2.8; EXPRESSED IN PLACENTA, SIGNAL = 3.2; EXPRESSED IN FETAL LIVER, SIGNAL = 2.6; EXPRESSED IN HEART, SIGNAL = 2.8; EXPRESSED IN BONE MARROW, SIGNAL =   3
tctaagcttcagaggccaggcccaagtctgcagcccgagtctgcagccaagaccagttctatgcatttgcaggggcacgtgccccaccctggcccttacctcggcagacggtgccattctcaacggcctcgaagcctgctttgcacatgcagcgcccgatgggcaccagccactcgccgtccccgttacagtagagcttgatgggtacatccacctcttccgcattggcgatgcagctgccccgggcagccactagcgatgtgctctcagcccccgacagggtttcctggaagatggcgccattctggatgatgcgggggcacttgcggtagaagacacgcacggcgatgagggacatgcagccgccatagtcctggaaggccaggtagaagccgctgcgggacacaggtccgaagctccgcacctcggtgttgattttcatgacgcggccacccaggtccacctgggagaagctctcgtcggctgcaatggtatccaccttcacccatggattctccatccagttggggaaggtcttggtggccgagtcaaagtcagcctcatagtaatagaggttgaaggtctccttgcag

SEQ ID NO: 7177 - DNA, 586 bp, Homo sapiens
  MAP TO AL133414.3; EXPRESSED IN PLACENTA, SIGNAL = 1.3; EXPRESSED IN FETAL LIVER, SIGNAL = 1.5; EXPRESSED IN LUNG, SIGNAL = 1.6; EXPRESSED IN ADULT LIVER, SIGNAL = 1.4; EXPRESSED IN HEART, SIGNAL = 1.2; EXPRESSED IN BRAIN, SIGNAL = 1.2; EXPRESSED IN BONE MARROW, SIGNAL = 1.3
ccacagaaaaccttccctcctggcccacccaggtcccctggtgaaatcagaagagacagtcatcctgcaatgttggtcagatgtcatgtttgagcacttccttctgcacagagaggggaagtttaatgacactttgcgcctcactggagagctccatgatggggtctccaaggccaacttctccatcggtcgcatgacgcaagaccttgcagggacctacagatgctacggttctgttcctcattccccctatcagttgtcagctcccagtgaccctctggacatcgtgattacaggtgagagtgtctggacattattctcattgtcactgggacacagagtgaatgatccacgacttggaggcccaggtggttataaggaagatgagcttggtattcttatggagagagactaatttggtgaggtctgtaccaacagagacagagaaacaggagacacaagtacagaccaggtgtcataacagaggacagacacaggggccatacagggagttagaaaagacagaaagagttaaaggagacacagacagacatgtgccagagagaggtgtccttccatgctgact

SEQ ID NO: 7178 - DNA, 524 bp, Homo sapiens
  MAP TO AL133324.7; EXPRESSED IN PLACENTA, SIGNAL = 2.1; EXPRESSED IN ADULT LIVER, SIGNAL =   2; EXPRESSED IN HEART, SIGNAL =  19; EXPRESSED IN FETAL LIVER, SIGNAL = 1.7; EXPRESSED IN LUNG, SIGNAL = 2.4; EXPRESSED IN BRAIN, SIGNAL =   2; EXPRESSED IN BONE MARROW, SIGNAL = 1.9
cacagccgtttgctacagaggcagtttcctctccagggcctggcctggtgtctctctgctggtttacctggccctcccccaacccggccccgttccgtgtgccctccaggagcaggacaacctggcagatgccgaggagcgctgccacttgctgatcaagtccaaggtgcagctggaggggaaggtgaaggagctgagtgagcggctggaggatgaggaggaggtgaacgctgacctggccgcccgccggcgcaagctggaggacgagtgcacggagctcaagaaggacattgatgacctggagctgacactggccaaagctgagaaggagaagcaagccactgagaacaaggtgtgggccgggccagctgtggggaagggccctgagccaggggccagctttggggccaggtggctgcaggtcccaccccggctctgctaagcctctgctttctggccctgggcatgtcactgcctttcctgggcctcagtttctttatctgtcaagtggggttagcagcact

SEQ ID NO: 7179 - DNA, 536 bp, Homo sapiens
  MAP TO AC020704.3; EXPRESSED IN BONE MARROW, SIGNAL = 1.6; EXPRESSED IN PLACENTA, SIGNAL = 1.3; EXPRESSED IN ADULT LIVER, SIGNAL = 1.2; EXPRESSED IN BRAIN, SIGNAL = 0.96; EXPRESSED IN LUNG, SIGNAL = 1.3; EXPRESSED IN HEART, SIGNAL = 1.2; EXPRESSED IN FETAL LIVER, SIGNAL = 1.1
aggtccagaaggaatgagaggagattgagttagatgctgaggagtttagtactccccttcaagaaagctaccaggaaggagccagctataggtttttcaaggaagggagaatgatctactgaggagaggaaatattgcttatattggaaagaaaaattggcagactttagacattcacggacctcaccttcattggaacctgtccatatgaccctatcttaagtttcagggtctcattccttctcaattcgtgtccaaagttcatatgattttgcatggttgtgaaatctatatcaaatataattaagttacccacagaaatagactttcagttagttttcataaatgtagactctgtgggtcttcaaattctctactacacttagaaagtcaatcaaatcccattatccttactttaaatgaaatgtgcaatggcagcagatacttcacaacccaaatctcatacaaaaatctcttaagagaattcttaagtggttacaagaggctgtgggctggggggttaggggcatgttagt

SEQ ID NO: 7180 - DNA, 589 bp, Homo sapiens
  MAP TO AP001538.1; EXPRESSED IN HELA, SIGNAL = 4.5; EXPRESSED IN BONE MARROW, SIGNAL = 2.8; EXPRESSED IN LUNG, SIGNAL = 2.7; EXPRESSED IN PLACENTA, SIGNAL = 2.7; EXPRESSED IN FETAL LIVER, SIGNAL = 2.7; EXPRESSED IN ADULT LIVER, SIGNAL = 3.7; EXPRESSED IN HEART, SIGNAL = 3.2; EXPRESSED IN BRAIN, SIGNAL = 2.8
caacttccttctggcctctggccttcattgttactaccaataagacttttctaaaatgcaaatcttaacacctgcttgtttgcaaaaaccaaccaattactctcaaaataaagtacaaataattatattaacatactttatcagtgggatggttaatttgatgtatcaacttgtccaggccatggctcccagatttgtaaacaaatatttgtcttggtgtttctatgaaggttttcagatgtgataaacatttaaacttgtgggctttgagtaaagcagattgtccttcatgatgtggtaaggactcatccaatgagctaaagacctgtaataaatagaacataagactgacttctcccaaataggagggaattctgcagcagactgccttttgacttgaactgcagcactggctcttctctggttctctagcctgctgacacaccctgcatattttggattttccagtcttcataatcacatgagtcatttccttaaaataactctcttatctatatatacattttctactggtactgctgctctggacaatcctaagtaatacaaatgggcacttgtatccttccct

SEQ ID NO: 7181 - DNA, 505 bp, Homo sapiens
  MAP TO AC019214.2; EXPRESSED IN ADULT LIVER, SIGNAL = 2.5; EXPRESSED IN HELA, SIGNAL = 3.1; EXPRESSED IN BRAIN, SIGNAL = 2.1; EXPRESSED IN BONE MARROW, SIGNAL = 2.6; EXPRESSED IN LUNG, SIGNAL = 2.8; EXPRESSED IN PLACENTA, SIGNAL = 2.6; EXPRESSED IN HEART, SIGNAL = 2.2; EXPRESSED IN FETAL LIVER, SIGNAL = 2.5
atggaagggaaggtttttgggggctcaaatgtccagtgtttccttctgggtgggtgcagctgtcctgagtcctggcctcccaagcagacgcccacctgtccccctcctgccctgctgtcctccactctggccctgccgtacccaggttctgccccatcttcttgaggttgtccagatcatcggacatggagttggagaagtccatgaggatgtacaggtccacggggctctccagtggctcaaacacctccagctcaaaatgccgctcctcaccgggccgcagacggacccgcaggccttggggggacatctggctgcgccgcagggtggtgtcaatctgggtctcctgcagccagtggaaggggacagctggctagagggtcactccggaggcccgatggggcccagcccggccaaggggcactatacacccccataaatagccaggctgagcatggggagcccccaccccagtccccacaccaggcacctctgtgatttggaa

SEQ ID NO: 7182 - DNA, 588 bp, Homo sapiens
  MAP TO AC011572.4; EXPRESSED IN LUNG, SIGNAL = 4.6; EXPRESSED IN PLACENTA, SIGNAL = 5.3; EXPRESSED IN ADULT LIVER, SIGNAL = 6.1; EXPRESSED IN HEART, SIGNAL = 5.5; EXPRESSED IN FETAL LIVER, SIGNAL = 4.9; EXPRESSED IN BRAIN, SIGNAL = 4.7; EXPRESSED IN HELA, SIGNAL = 8.1; EXPRESSED IN BONE MARROW, SIGNAL = 5.1
gattagtgccttgcagcctccacaaaatttaaaaactattgagagcaagaatcatttcttattcagctttctattctttagcacataaaacaaaaattgttgtaaaccacatgaagaattggtctcttggtcagagactagaattcccttagttctgtggcatgtcctctggggccagaagtgaatcctctccaatcagaactatgtctggcttttggagaaccaattctcattttaggaagacttctcctatgggatcaaggtatcccaccaacaaattaggagctttttagagtagtcctcaccctttgctggtccttcatttccgtaaagtttattaattttaagaaactcaggaacttccccaaaattaacattcattttactaatgccctaagaagagaagttgatggctgatgtcattatattatttaaattcggttaagtgctaaatccaatgttacatgaacacattaatctctactactcaagctatagaaatcaagaagcattgatatatctcaaggtgttattgagaagatcacagccaagagacaataccaccttaggtggtccataatcagggtg

SEQ ID NO: 7183 - DNA, 500 bp, Homo sapiens
  MAP TO AC015908.4; EXPRESSED IN LUNG, SIGNAL = 2.4; EXPRESSED IN PLACENTA, SIGNAL = 2.1; EXPRESSED IN ADULT LIVER, SIGNAL = 2.3; EXPRESSED IN BRAIN, SIGNAL = 1.6; EXPRESSED IN FETAL LIVER, SIGNAL = 1.5; EXPRESSED IN HEART, SIGNAL = 1.9; EXPRESSED IN BONE MARROW, SIGNAL = 1.8
tgcctctccctttcaacatcattttgtcaggatagacatgaactgtgccaaaggcttggctgtctggagctgtttcaataactccttctaggttgacgtggtatacaccaaaaggatcctcagagtagccaccatcatgggtgtgaccagcaaagaaacacaccacacactcatgagaccaaatgactgccagggcatctctgtagttccaggccaggcacacattgtcagaggcgtccgggtaaatgggaagatggcctgttagttaaagaaaagaagagttatgagccaattaagaaatatctcttctataaaaataaatggctaaaagctagtactcagaaaaagaaaaaaaattgctatctcattatgcaaatgaactgagaccagagagaattcacacacaagaaaactaggccatctacagccacatctctggagcatagaagaagggtaagacagttcacatgaggcgcgacaggctgctgtagaggcaaaac

SEQ ID NO: 7184 - DNA, 571 bp, Homo sapiens
  MAP TO AC015842.4; EXPRESSED IN LUNG, SIGNAL = 1.5; EXPRESSED IN PLACENTA, SIGNAL = 1.3; EXPRESSED IN ADULT LIVER, SIGNAL = 1.5; EXPRESSED IN HEART, SIGNAL = 1.3; EXPRESSED IN BRAIN, SIGNAL = 0.74; EXPRESSED IN BONE MARROW, SIGNAL =   1; EXPRESSED IN FETAL LIVER, SIGNAL = 0.91
ttccccaaactcacttggagctgacaagttacatgaagcttctgtctctccagtctcaccttcaacccaccattcacctctctatgattacccctaatcccagcctctccacttatcagctctgtgtctttggcaagatatttagtcccatgagcttgagagtcctcatctgtaaaatgtgggacagtcaagagaattaaatgagatcatatctgcggagctcctggaacacagaaggcattcaataaatgcgtgtttatttcctccctgcttctccttcttagcgctggccttcgagatcttgaatttggtacttcacgttcccaaatataaccttttagctggctccttctctcattctccatccgacacaaatttgttcttccacctcatccagataaatattcacttattaactccatccatctagctaattccattttccatgtctgttctactcaaatttcaatacttgtttttgacctcacggttatttacaacctgtgtgtacaatacctccctgttccctggtgggagacacagtaaagtggctgaagttggggacacaggt

SEQ ID NO: 7185 - DNA, 515 bp, Homo sapiens
  MAP TO AC018528.3; EXPRESSED IN LUNG, SIGNAL = 2.2; EXPRESSED IN PLACENTA, SIGNAL = 2.2; EXPRESSED IN ADULT LIVER, SIGNAL = 2.4; EXPRESSED IN BRAIN, SIGNAL = 1.8; EXPRESSED IN BONE MARROW, SIGNAL = 1.7; EXPRESSED IN FETAL LIVER, SIGNAL = 1.7; EXPRESSED IN HEART, SIGNAL = 2.2
attctctcccacagagcagggcctgctgctttgtttctggaaaaacacattctgctttaaaaatgatactctgtaactctgtttcctgagaattacacacgacttgaatctagtcctttgctgagatgaagtacagatttgaggtgcattcatattccccataaaatatgtttgtcaccctagcaactgccctaaaataccttgtagtatcctgacatgagtataaatacaatttctcatactctgagaagccaagcaagtgacataagttattccaacatcagaagtcttccaggtgtagacttcagggtggaagccaggatatcatcatcatcatcatcatcatcatcatcatcatcatcatcatcttcgtcatcttcatgatatcactatttcttttcacaatatttctttacaggtgacaaaggtttctacaactaaatatagtatctgaatgcattaaatggtaagaacctttgcctctgcactggtggggatgtttggtggcctctgtt

SEQ ID NO: 7186 - DNA, 570 bp, Homo sapiens
  MAP TO AC018909.3; EXPRESSED IN ADULT LIVER, SIGNAL = 1.3; EXPRESSED IN FETAL LIVER, SIGNAL = 1.3; EXPRESSED IN BRAIN, SIGNAL = 1.3; EXPRESSED IN BONE MARROW, SIGNAL = 1.2; EXPRESSED IN LUNG, SIGNAL = 1.3; EXPRESSED IN PLACENTA, SIGNAL = 1.3; EXPRESSED IN HEART, SIGNAL = 1.5
cccagaaagagaagcaccagcagaaatttatcactcagttttctatcctctgctcttcttagtgcacttaattctaccaggctccaaggaggtgaccagctttcttcacatctggtgctaattatgctagcttttgagaaatagcacctttttttttttcttttgagaaacccaagtgaatcatcgaggcctgatgatttgctacttcttgtgctctgccccgcagggggtgatccccacgttccgcgtcaagttcctgctgcggctactgcgtgggaggctggaggtggacctggacaaggacaagctcctgtttaagcacatgtgctacgaaatggagaggctccacaatggcggcgacgtcaccttccatgatgtcctgaggtacaaggcaggctttcgcagggctgaatgggggccagaaaccacagctgtcagccttcaaggcctctgcagtacaattaacaagtgtgtttccaacccaaaatgccacatctgctgtggtcgtgaagtggggtcacatgtcccaggcgctaagtgccctttcctgccgtcctccagtgaacattt

SEQ ID NO: 7187 - DNA, 505 bp, Homo sapiens
  MAP TO AL157836.3; EXPRESSED IN PLACENTA, SIGNAL = 1.8; EXPRESSED IN ADULT LIVER, SIGNAL = 2.1; EXPRESSED IN HEART, SIGNAL = 1.9; EXPRESSED IN FETAL LIVER, SIGNAL = 1.9; EXPRESSED IN BRAIN, SIGNAL = 1.7; EXPRESSED IN LUNG, SIGNAL = 2.1; EXPRESSED IN BONE MARROW, SIGNAL = 1.9
tacaagccaagacatgccagtaaatattcacattcaactaacgtttattgagtgcctgctgcacaacagggcctatgctaagtatttcacatacatcagctcctttcttcttcacaatggtcctgcaaacaaagaaaagagatgaagtttttacagagaaaaaaactgatatgtctagaagttaaatgaaagacttcaaggtttcacagctggcaagtctaactgggtttcaaattggagttttctaactctgccctaggtagtgttctcccagaagtagatcctggtccaaggacctgagtgcaagtgattaagatggaaatgctctcaggcaaaaccagtaaaggagtagggaagcaggctagggacaggcaggaaagcaggcaagggcacattttgcaatgaagcctcagatttagattttgctttggggcaaagaagctaacattttgtgctccatcataagtcagtctgtgactggcccagtcactttcctctctccgga

SEQ ID NO: 7188 - DNA, 597 bp, Homo sapiens
  MAP TO AL133227.7; EXPRESSED IN BONE MARROW, SIGNAL = 1.6; EXPRESSED IN LUNG, SIGNAL = 1.5; EXPRESSED IN ADULT LIVER, SIGNAL = 1.6; EXPRESSED IN HEART, SIGNAL = 1.7; EXPRESSED IN BRAIN, SIGNAL = 1.6; EXPRESSED IN PLACENTA, SIGNAL = 1.7; EXPRESSED IN FETAL LIVER, SIGNAL = 1.6
gtaagaaagcctttgcccagcgcatggatcttgctcgccaccaacaaatccatactggaaggaaaccttttatttgcagtagttgtaaaaaaacctttgtccgtctgtcagatctaacacaacataaaggaactcatacaggagagagaccttaccaatgtacaacttgtgaaaaagcctttaaatatcagtcaaactttactaaacatcagaaaacccattctatagggaggccctttacatgtaatgaatgtggaaagacctttcgccttaactggaaacttaatcaacacaaaaaaattcatactggagagaaaccctatgaatgtggtgaatgtggaaaatgttttaacaataattcaaatcttagtaaacacaagaaaatccatacaggagagaaacactttgtatgtaatcaatgtggaaaagcttttagcttaaactcaaagctttctcgacatcagataactcacaataaaaagaaaccctaaaaaaagaggaaggtgaagaaggatatttagagatgacttaccctttgctaaactcgagatcaatgtagaaagaatcttagtcgaagcctaattcttcgtggattca

SEQ ID NO: 7189 - DNA, 510 bp, Homo sapiens
  MAP TO AC015600.4; EXPRESSED IN BONE MARROW, SIGNAL = 2.5; EXPRESSED IN PLACENTA, SIGNAL =   3; EXPRESSED IN ADULT LIVER, SIGNAL =   3; EXPRESSED IN FETAL LIVER, SIGNAL = 2.3; EXPRESSED IN BRAIN, SIGNAL = 2.7; EXPRESSED IN LUNG, SIGNAL = 3.3; EXPRESSED IN HEART, SIGNAL = 2.6
atccccacacaataagcctgaatccttgtcatctgcccaatatgtcagctaaagtcatgtgcctaactgggatgccattgctcaacagcctggcgtgggctcacaaagccatctctggcaagagaggccagattatctgatagacatagagccactgagccaatcatccagcacacacgtgctgcacaaggggaaacagacccagtggattcaagagaccaacctgccagtccacaaaaattcgttatttactaaagtcctatttgatcaattagaaaaaaatgaattcctccatttccaagtggattttgttctgaagttcctgtccctcaccttgccccgttagcttttatcttgaagtatgaatagggcataggaggcatagaatgcattttcccagtgaagaaatatatttgccatgtgcccaaattaactcttggtatatttaaaccatttatagtggaagtatttaagctgggaatgcacttttccctcctttcccagtaaacc

SEQ ID NO: 7190 - DNA, 528 bp, Homo sapiens
  MAP TO AC020719.3; EXPRESSED IN LUNG, SIGNAL = 3.2; EXPRESSED IN PLACENTA, SIGNAL = 4.4; EXPRESSED IN ADULT LIVER, SIGNAL = 3.8; EXPRESSED IN FETAL LIVER, SIGNAL = 3.7; EXPRESSED IN BRAIN, SIGNAL = 3.8; EXPRESSED IN HEART, SIGNAL = 4.1; EXPRESSED IN HELA, SIGNAL =   5; EXPRESSED IN BONE MARROW, SIGNAL = 3.4
actcttccacaggcatccacacaggggtgttgacacatgtctcagaatttaaaacactgatactaaaggctttaatttagataaattaactacactgaaatactgacattgtgaaaatatctatgtccaataccccatatagggcaccattttgtgaacttataaaacatttaaagaaagaaaacaagaatgagaaaccagagtccttgataagatgggtgaacgtgtcgataatgcccagagtcacagcttcccattctcctcactactttccttctcctctatggcttccaggctgcgcttgctcttggcctcagcactgctgctgggggctttactcagtccacaggacaggcatgccagctggatctgcttcatgttttctatagcttcattcttggcattcttcaacagatctccttggccctacaaacagaaaaaaacaggcatcaaagaagacagttatgggccaggcatgtgctgagtgacatcactctatgttcttactgcccattgctgaataaggaa

SEQ ID NO: 7191 - DNA, 597 bp, Homo sapiens
  MAP TO AC011815.2; EXPRESSED IN LUNG, SIGNAL = 5.3; EXPRESSED IN PLACENTA, SIGNAL = 4.9; EXPRESSED IN ADULT LIVER, SIGNAL = 4.9; EXPRESSED IN HELA, SIGNAL = 6.7; EXPRESSED IN HEART, SIGNAL = 5.1; EXPRESSED IN FETAL LIVER, SIGNAL = 5.5; EXPRESSED IN BRAIN, SIGNAL = 5.6; EXPRESSED IN BONE MARROW, SIGNAL = 5.8
tctccagggatgaaggacaggggaaaaagaccattcaagggtatagacaagtatggctctattagtcacttcaggttagggttcagtagagacataaaaatttttatcctactgttatgataccattacatgctccaggctgtaaattccttttcccacatcacttttctccgttcccacctgctgccctgggtcatcaaactccctctctaaatcctccaacagggtcacagcttcctcgccgctttctggattatgttgctgaacccagatctgcagctcctcaggcagaatgctcaggaactgctccagtaccagcagttctaagatctgctcctttgtgtgcaactctggcattagccactgatagcaaagttcctggagtcggctcagagcctcccggggcccaggtgtctcctggtagcaaaattttctgaattgctgacgaaacaattcttggcaggattgagtactcccattctgcttaaatttctcatcccaggaaaagttatcttctactttcactagtattagttcttgttccggaggatcctgaggtatcagggttgaaatcactccagattccacagccattct

SEQ ID NO: 7192 - DNA, 513 bp, Homo sapiens
  MAP TO AC023296.2; EXPRESSED IN ADULT LIVER, SIGNAL = 3.7; EXPRESSED IN BRAIN, SIGNAL = 2.7; EXPRESSED IN LUNG, SIGNAL = 3.7; EXPRESSED IN HEART, SIGNAL = 2.8; EXPRESSED IN PLACENTA, SIGNAL = 3.3; EXPRESSED IN FETAL LIVER, SIGNAL = 2.5; EXPRESSED IN BONE MARROW, SIGNAL = 2.5
atgatggcatttgagtgcaggtacattctcagcactcttgcaagattgcctttatggcacttaaggcaatatatgactttcattcattgctcggattaaaaacaaatccctgtagatactcaaagaaaaaatcacactgggaggtgcagcatttccaccccaggtaggatttaaggcattatagcaagaagtcatatgtgttacacagctgtaatctatttctaaggtttatctgcattaagtaagtgccagaacacagatgaatttacccagacatcgagtttcgctgccgctccagagcccatttgccaagcactctctgacatgagaccccacaagcgtgtagccggtgttgcacgtaaatatagctgtggccccataaactgtcaacgttccaatcttgttgccatttgggggaaaggaaaggcttccacacgagataactagaaggaaaaacaataaaatgaacatcaattcagttatgcagattactcctgtgctccaaacaaacaa

SEQ ID NO: 7193 - DNA, 533 bp, Homo sapiens
  MAP TO AL121712.19; EXPRESSED IN LUNG, SIGNAL = 1.5; EXPRESSED IN PLACENTA, SIGNAL = 1.3; EXPRESSED IN HEART, SIGNAL = 1.2; EXPRESSED IN FETAL LIVER, SIGNAL = 1.2; EXPRESSED IN ADULT LIVER, SIGNAL = 1.4; EXPRESSED IN BRAIN, SIGNAL = 1.2; EXPRESSED IN BONE MARROW, SIGNAL = 1.2
attccatggcagtgagaaggatgtggggtccttcctgctggagctggggaaggctgtcaggcaggggcaggtatggagaggaagagggagcctcgagggtcagcggggacatcctgagcagccggactcttggtgcttgtggagcagggacattcgggagaaggtccgagcacacgcctggcactggtacttcttgacatctgagtgggtctggaggtgggcccgcaggttggagcggtcagcgaaggcacggctgcagtggggacaggagaagggcttctcgcctggggagagaacgccagaaaggccgagtgagccgtgggacaacggctggcagtgatgggaatccctccccgcataccccaaaccctgaaagaatcccatgatcccaggaaagccaggcctccgtcaaacacacagccagggtccaaaggccgggacctgacggagctctgctgcttcccactgtgcaactctgagcaagttgtctggcttctctgagcctccattttcccacctgtaaaatggggcta

SEQ ID NO: 7194 - DNA, 508 bp, Homo sapiens
  MAP TO AL161642.2; EXPRESSED IN BONE MARROW, SIGNAL = 2.3; EXPRESSED IN HELA, SIGNAL = 2.9; EXPRESSED IN LUNG, SIGNAL = 1.2; EXPRESSED IN PLACENTA, SIGNAL = 1.7; EXPRESSED IN ADULT LIVER, SIGNAL = 1.7; EXPRESSED IN HEART, SIGNAL = 1.9; EXPRESSED IN FETAL LIVER, SIGNAL = 1.9; EXPRESSED IN BRAIN, SIGNAL = 2.3
ctttctgcgcatgtatccaggaacttaaagtaaaattaaaacaaacaaaaaaagaagtaaagcctgaagatgtgactgaatcactacagtctcatgataaaactttagcaaataaggagttgcttcttatggatgagcaaagaaataagtttattgaaatggaatctattcctggtgaagatgctgtgaacattattgaaatgataacaaaattctagaatatttgataaactttatcagcagcatcagaatttgaaaaatttgacttgaattttgaaagaggttctactgtaggtaaaatgctatcaaacagcatcacatgctatggagaaatctttcatgaaaggaagagtcagtagatgtggcagacttcattgttgtcttattttagaaattgccacagccaccccatccttcagcaaccaccaccttgatcagtcagtagctatcattgtcaaggcaaggtcctccatcagcaaacagattaagactggcttgaaagcgaaag

SEQ ID NO: 7195 - DNA, 597 bp, Homo sapiens
  MAP TO AC013705.3; EXPRESSED IN PLACENTA, SIGNAL = 2.1; EXPRESSED IN HEART, SIGNAL = 1.8; EXPRESSED IN FETAL LIVER, SIGNAL = 1.2; EXPRESSED IN BONE MARROW, SIGNAL = 1.3; EXPRESSED IN LUNG, SIGNAL = 2.1; EXPRESSED IN ADULT LIVER, SIGNAL = 2.4; EXPRESSED IN BRAIN, SIGNAL = 1.1
agaggaatggaaagcagcactgtagtaggcaaaagaagaaggaaacagactgagctctcaatacagagcagggcaacacgtcttaatcacagctgcaatgaagggccatcaagatgtttcacaagaacctgaaacgaactgcacagtggccacagatgcactccagggtactaccaccacttgagcctgtgggagtaatagggaggacatggaattcaggagggagcgaggtctcaacaccaacgccagaagaaatggacccagaagtcccagaccacagcattcttaccaggttctaaataggcgtcatcagtacttcaacactcaaatcacatttgtctggcttactcacaaacagctgtatctgtttaactctcaagtcaacatggttataactatctgtattgtgcatattgagtctcttttaaaaaaaaaatctcttctcattttaagtccaagtaagacccttaactaggtatcatttaaacagaaatacctaaatccaggtatacttatgataaccagctggcatggtcaagtatactctactttccaaagttgctatcatatacatcttcgcatttgaattcactcctg

SEQ ID NO: 7196 - DNA, 589 bp, Homo sapiens
  MAP TO AL121901.10; EXPRESSED IN HELA, SIGNAL = 3.3; EXPRESSED IN LUNG, SIGNAL = 2.6; EXPRESSED IN HEART, SIGNAL = 3.1; EXPRESSED IN BONE MARROW, SIGNAL = 2.6; EXPRESSED IN PLACENTA, SIGNAL = 2.5; EXPRESSED IN ADULT LIVER, SIGNAL = 3.1; EXPRESSED IN FETAL LIVER, SIGNAL = 2.8; EXPRESSED IN BRAIN, SIGNAL = 2.6
aatgaatgacagcaaagcccaccatctgaacagccacgcgcaagctcactccaggaccatcacaccctcactgccatctcagcctctctatcattcctgcctgccttctggagttgcatttcattcgtgaaagtacttgatagaggtggctcctgcattcattgcacacgtgtcccaggaaccatcttgggattctcatgctccatgtcactgactccatcagcttccctggtttacaggtgaggaaggctcagaggcgtaaggacaaggaggaggatcatcataataacatggttttggaggactggcccaagcatgattcgctttaatcctcactatagctctgaggtctgcactgtgatccttttacagacctgggagctgagtctgccaagagacagagtcagcagttgaaccccggtctgcgtgaccctaaagcacatactctggactgcatgtgatcctgcaccgagttggcttcaaatccagtccccagcccctgagcagggccctctcatccctccaaatctgctctctcttgtcatgcatcaagctctgaaaatctataccctccatgctgtcctttcat

SEQ ID NO: 7197 - DNA, 557 bp, Homo sapiens
  MAP TO AC016057.3; EXPRESSED IN LUNG, SIGNAL =   2; EXPRESSED IN PLACENTA, SIGNAL =   2; EXPRESSED IN HEART, SIGNAL = 1.4; EXPRESSED IN FETAL LIVER, SIGNAL = 1.5; EXPRESSED IN BONE MARROW, SIGNAL = 1.8; EXPRESSED IN ADULT LIVER, SIGNAL =   2; EXPRESSED IN BRAIN, SIGNAL = 1.5
agtccaacagggacatcacctacctagctgctctagccagaaatgtgtgtatcctctgtcccactctctcacttaccagcccccacatccaactggtcacaaattccttccaaattctttcctccttctgcacccctccagctatttcctggtgcctctcaggatcacacttcagctcctgcaaggctgctcttacacactgtgctgtctccctcatccctgcaaccactgctattacatctctttagcttcagctgcactaagttttcatctttcccagaacatttctggccctttcacaactttatgaccttctcttcctggatataattttcttctgtttaggctagaaaaagtcttcttaccaacgaatattcatctcaaatgctaccacgtctctgaggccttccctgattgtctcttctgtgctctgactgcacatctcttacagcaggaccatattttggtagaattgttttttaaccaacaccaagaccactataccaagctgctggtgagcaggggtggcctcttactcatctgggtcactgtcagga

SEQ ID NO: 7198 - DNA, 550 bp, Homo sapiens
  MAP TO AL136528.9; EXPRESSED IN HELA, SIGNAL =   6; EXPRESSED IN LUNG, SIGNAL = 3.3; EXPRESSED IN ADULT LIVER, SIGNAL = 4.1; EXPRESSED IN BRAIN, SIGNAL =   4; EXPRESSED IN BONE MARROW, SIGNAL = 4.8; EXPRESSED IN PLACENTA, SIGNAL = 2.8; EXPRESSED IN HEART, SIGNAL =   4; EXPRESSED IN FETAL LIVER, SIGNAL = 6.2
ctcctgaggcagttttggacacacaggaaggagaggggaggcagcttgggtctctgggcggtggcgcaggctgcagccaggcgaggccctcagtggatctcggcctccgtgaactcctccttgatgggctgcttgcgggccttgcagtcgggcaggtcgaagccgaagtccgcccactcgtcagggccgccgcctgggccgccgcggttggggatggtgatggtgtggcgcacgcggaagtgcacggcctccatgacccgctggcgctgcagttcccctgagccgccgatggagatggtggccgcgttgctagagcggagcagctgctgcgcggtgctgtagtcgtggccctgcttcaggtcctgcaggccccgccagatggtcatgcggtactgctcggggatcttcagggcccccaggtcctgcgagaggccggcgcattaggggcagggggcagtggagcagggagagcagggggggtcgccctgggcctggaggtctggccacaccacaccctggcccctacacccccaaccagagtaggcaggag

SEQ ID NO: 7199 - DNA, 510 bp, Homo sapiens
  MAP TO AC021880.2; EXPRESSED IN PLACENTA, SIGNAL =  11; EXPRESSED IN ADULT LIVER, SIGNAL =  12; EXPRESSED IN FETAL LIVER, SIGNAL =  13; EXPRESSED IN BRAIN, SIGNAL =  11; EXPRESSED IN BONE MARROW, SIGNAL =  10; EXPRESSED IN LUNG, SIGNAL =  11; EXPRESSED IN HELA, SIGNAL =  10; EXPRESSED IN HEART, SIGNAL = 8.5
gcccatgcacaaaattaaggaaatcaaaaggatgacaacaacatctaggaagactgacacagcaagcttggtgagtcatcagcagtatcaggcactgtgccaatctcgaccccacgttccactgccaggtaaccaccgacatgctgccagtcgctacagataggagttttgtctgtgctagaatgaaacatgtattgagtcataaacagcatgtgctttccaacctgcttctgctcagcacaaggtttctgagattcatccacactgttgtttgcatctgtcattcatttctgtttatttctaagcagtactccatcatacggatgtaccagaatttgttggtttttcagacagggcctcccgagtgcagtggcacaattatggttcactgcagcctcaacctaccagttcaggtgatcctcccaccccagccttccaagtagctgagattacaggtgtgcaccaccacattcagctaattcctgtgtgtgtgtgtgtgtatgcgtgtgc

SEQ ID NO: 7200 - DNA, 515 bp, Homo sapiens
  MAP TO AL121747.19; EXPRESSED IN LUNG, SIGNAL = 1.4; EXPRESSED IN PLACENTA, SIGNAL = 1.5; EXPRESSED IN ADULT LIVER, SIGNAL = 1.4; EXPRESSED IN FETAL LIVER, SIGNAL = 1.3; EXPRESSED IN BRAIN, SIGNAL = 1.3; EXPRESSED IN HEART, SIGNAL = 1.2; EXPRESSED IN BONE MARROW, SIGNAL = 1.1
cccaccatgaggtccagtagactgggcccgaaatgaatagtgcatctggctgtgagactttatgccagcaggcagtcttagagctaagaggagatacttacctgtacctcatatcaaaaaggagcttgagtcctaggcagaaaatatgcacgtgctgaatgtgcgcctaattcttccctatccttatcttcagactttaacgccaaaaggaaaaagaaagtggcagagatacaccaggctctgaacagtgatcccactgatgtggctgcccttagacgcatggctatcagtgaaggagggctcctgactgatgagatcagacgaaaagtgtggcccaagctcctcaatgtcaatgccaatgacccacctcctatatcaggtaaggggagtgggggaggctgtgaggggagcttatctaggagacagggggaaaagaattccaggatctttaatttttatggtcctttcaaaccaagggtatatgaataaatctagggtgttttgggaaatgcttg

SEQ ID NO: 7201 - DNA, 598 bp, Homo sapiens
  MAP TO AC009416.2; EXPRESSED IN LUNG, SIGNAL = 1.1; EXPRESSED IN PLACENTA, SIGNAL = 1.1; EXPRESSED IN ADULT LIVER, SIGNAL = 1.3; EXPRESSED IN HEART, SIGNAL = 1.2; EXPRESSED IN FETAL LIVER, SIGNAL = 0.92; EXPRESSED IN BRAIN, SIGNAL =   1; EXPRESSED IN BONE MARROW, SIGNAL = 0.98
acctcactgtgcaaaacagcatacagcattataaccccggtgctctaaaataagatgtcagcgtaagatgattgaatatcacaagtctgggtcactttgtaacttacagaaagaccaggtagtaaaatatattactctttccaagagaataacttttgaagatcccagtggtcccaaaccaacacaacagtaaaatggacaagaaacaaaagtcaagggaagctttaactccaagtggagtcccttcattcagagaagctgacaaatcatgacccattttgagatttcataccaggtttcatgaaaattaaacctaaaatcaagaaaagaagttgaaaactcagtgtgcataaaacaccaaattctggttataatttacaactgttacttacactgactggatccagaattttcactgcagccaggctcccatctctcttgttagttaccttgtagactttgccataggtgcctttaccaatggtctctataatttcccaggtgtctgtgggatctggaagtgattcaagtccaagcatcataggattatagtgaaataatccatacagatgtttcctggttgggggaaaaatttgtt

SEQ ID NO: 7202 - DNA, 576 bp, Homo sapiens
  MAP TO AL139352.8; EXPRESSED IN LUNG, SIGNAL = 0.92; EXPRESSED IN PLACENTA, SIGNAL = 1.3; EXPRESSED IN ADULT LIVER, SIGNAL = 1.1; EXPRESSED IN FETAL LIVER, SIGNAL = 1.1; EXPRESSED IN BRAIN, SIGNAL = 1.2; EXPRESSED IN HEART, SIGNAL = 1.3; EXPRESSED IN BONE MARROW, SIGNAL = 1.1
ggctgtgagaaggaagttggagaaacctttgagagacagggtggcatgtagggggccagagacacctcgcagacacgtgcaggaatggacttattcagcctgggatttaagaacaacctgaagagagtgtgcaagacttcatagctgctgcacacacctttctggggagagggttgacagctttcactggattctttaaaggcactcaacccaagcaaaggatcaaaaacctggtcctaggtcaggacgtcaacacaaagatgtcttctctgtggaaagtgtctaggttgggcttgtcttggactgttgaggcagactcactccctctctccaaagattccaggccccggactggacctgtagataccatactcccaaacccgagtcaaggccagtatggctcacacccactcaccagccttttaaactcctcttcagtaaagcccatgtcccgtttggtcatctggtaatcagtgtccagggtggacttgaagatgagcgggtcatctgtgttgagcgagtagttagcctggtcatttttgagcctgcagaagagggaggaggagagaatcagcc

SEQ ID NO: 7203 - DNA, 509 bp, Homo sapiens
  MAP TO AL136089.8; EXPRESSED IN LUNG, SIGNAL = 0.94; EXPRESSED IN PLACENTA, SIGNAL = 0.59; EXPRESSED IN ADULT LIVER, SIGNAL = 0.72; EXPRESSED IN HEART, SIGNAL = 1.4; EXPRESSED IN FETAL LIVER, SIGNAL = 8.3; EXPRESSED IN BRAIN, SIGNAL = 2.7; EXPRESSED IN HELA, SIGNAL = 3.6; EXPRESSED IN BONE MARROW, SIGNAL = 5.3
acagggatatgaaccccctcgtctcagcaaccatgaacagtgtcatcacctgcctctgtttccctggccagctcaatgccgacctccacaagttggcagtcaacatggtccccttcccacatctccatttctttatgcctggctcttcccctctcaccagccatggaagccagcagtatcaagctcacagtgtctgaattcacccagcatgtcttcaatgccaagaacatgatggctgcctgtgaaccccgccatggcttatacttcaccttggctgctgtcttcactggtcagatatccatgaaggacgtcaatgacaaaatgttaaatatgcaaaacaaaaacagcagctactttgtggaatggatctccaacaacgtcaagaacagtctgacatcccatctcatggcctgaaaatgtcattcactggtattgtcaacatggtcatccagaagctcttcaagtacatcgcagatcagagaaagggatcaagtggggaaaagagacca

SEQ ID NO: 7204 - DNA, 506 bp, Homo sapiens
  MAP TO AL161450.2; EXPRESSED IN LUNG, SIGNAL = 1.1; EXPRESSED IN ADULT LIVER, SIGNAL = 1.3; EXPRESSED IN HEART, SIGNAL = 1.3; EXPRESSED IN BRAIN, SIGNAL = 1.2; EXPRESSED IN BONE MARROW, SIGNAL = 1.4; EXPRESSED IN PLACENTA, SIGNAL = 1.6; EXPRESSED IN FETAL LIVER, SIGNAL = 1.2
agcaggcactgtttattgggggtggcttcctggggtcattgcaacagtggacagaaggtctggccagcccttcccaccacacagctggacagagccctagtggggaggaaggcaggaggacatttaatgggatttacagacaacagttacttgacggtctgtgagccagtcgctgtctcatggaccacagagcagatgaactcgtttttctgttcccattcagccctggtaacctccaggcagctgaagactaagacgccagagcccttggttttgcggggctgcgtcatgctgtgccaagtgtccgggagctgcacctcgttgtacagccactgcaccaagatgtccttgggccagaagttctggatcaggcaggtgagggtgcgcttgtcctggttcctcggctcttctagcgttgcaaacacgtagacctgtgggggagcacatgggccgctgatcttggtcgtggactgcaggtgggtgtgggtcaccctgcactggtaggt

SEQ ID NO: 7205 - DNA, 537 bp, Homo sapiens
  MAP TO AC024259.5; EXPRESSED IN PLACENTA, SIGNAL =   3; EXPRESSED IN HELA, SIGNAL =   5; EXPRESSED IN HEART, SIGNAL = 3.4; EXPRESSED IN FETAL LIVER, SIGNAL = 3.1; EXPRESSED IN BONE MARROW, SIGNAL = 2.8; EXPRESSED IN LUNG, SIGNAL = 2.8; EXPRESSED IN ADULT LIVER, SIGNAL = 3.2; EXPRESSED IN BRAIN, SIGNAL = 2.7
gagaagtccaggtccacagccatgttttgggtggcttcagtggcacctgaaagctctcacctcatcttggaaggggtggggctcccgtttgttcctggtggctccacaggcagctgccgtgataaacatcatgaatatgaataatatcagcaacgaagtcagaaaagtgtaggcatcataacattgaggaaattccacattccatggttgaagtgactaaaggaagtcagtaaaatggaaaaaaaaaggagcttacagagaaaaataaccaaaaaaagtaaaagtgcaattacataagtcactgagagtaattaaaaaaataaaataaaataaaataaattttaaaaaaagaaagaaaaaagaaagaagaaagaaggaaggaaaaaagagagaaagataaaattgtttattgtattatcaacatttaagtcactggtgatttctcttttgaagtgtagtgttatgatgaatgagtatgaagtgaataaatggatctgataatataaaacgtactttgagaagcttggatgtgtaccg

SEQ ID NO: 7206 - DNA, 513 bp, Homo sapiens
  MAP TO AL158138.1; EXPRESSED IN HELA, SIGNAL = 3.2; EXPRESSED IN LUNG, SIGNAL = 2.9; EXPRESSED IN BONE MARROW, SIGNAL = 3.1; EXPRESSED IN PLACENTA, SIGNAL =   3; EXPRESSED IN ADULT LIVER, SIGNAL = 3.4; EXPRESSED IN HEART, SIGNAL =   3; EXPRESSED IN FETAL LIVER, SIGNAL = 3.5; EXPRESSED IN BRAIN, SIGNAL = 3.1
aagaggaaaggggagagctgtgctaaaaagatgagtcattgcttcaagattgaggaagcaaggttttatatctcggggacttttcaggaggaggatcagtgtttcttgatggtgaaaacaaggaagtggaggaagggaagaaagcacacccaagtatttattttcccttctgtctttgaatgcacattcttcctattatattttctatttgccacatctcttactcattttaacaactttttgttaagaatacctattggttaaaaattattttttatttcttaacattgctgtttgctttctatactatgtccttaattgactacctctgtataagtagctggtacacatgtattttttttcaggaatcctttcttacttatattcagatgtggcttaattggacaaaccccactgaggttcatcacttttcttttccttttctgcttgactgtcctctttctcctccagccatccatccacctgcgagaaagggctataaaaggcgtcctt

SEQ ID NO: 7207 - DNA, 556 bp, Homo sapiens
  MAP TO AL121889.3; EXPRESSED IN BONE MARROW, SIGNAL = 4.2; EXPRESSED IN ADULT LIVER, SIGNAL = 7.5; EXPRESSED IN HELA, SIGNAL =   7; EXPRESSED IN HEART, SIGNAL = 2.7; EXPRESSED IN BRAIN, SIGNAL = 4.3; EXPRESSED IN LUNG, SIGNAL = 5.3; EXPRESSED IN PLACENTA, SIGNAL = 5.3; EXPRESSED IN FETAL LIVER, SIGNAL = 4.1
gttcagatcttccagccagctggtaatgttgtccttctcactcgcagaaccccaggctggagaagcccgtgctactctccgaatttcctaccaagatcccacgaggtgaactggacatgcctgttgagaatggcctccgggctccggtcagtgcctaccagtatgcgctggccaacggggatgtctggaaggtgcatgaggtgcctgactacagcatggcctatggcaaccctggcgtggccgacgccaccccgccctggagcagctacaaggaacagagccctcagacgcttctggagctgaagcggcagcgggctgcagccaagctgctcagccaccccttccttagcacacacctgggcagcagcatggccaggacgggcgagagtagcagtgaaggcaaggcccccttgatcggaggcagaacttcaccgtacagcagcaatgggacctcggtatattacacggtcaccagcggagatcccccactcttaaagttcaaggcccccatagaggagatggaggagaaggtgcatggctgttgccgtatctccta

SEQ ID NO: 7208 - DNA, 565 bp, Homo sapiens
  MAP TO AL158049.2; EXPRESSED IN LUNG, SIGNAL =   1; EXPRESSED IN PLACENTA, SIGNAL = 1.1; EXPRESSED IN ADULT LIVER, SIGNAL = 1.2; EXPRESSED IN HEART, SIGNAL = 1.2; EXPRESSED IN FETAL LIVER, SIGNAL = 1.5; EXPRESSED IN BRAIN, SIGNAL = 1.1; EXPRESSED IN BONE MARROW, SIGNAL = 0.93
ttctctccatccctcaaagcctggtgacttgagctaatttataaggaaaccaaacggcattacactctagacctggaggcttgaagagttcagagaaactaggacagagaaggccagccccgctgggagaggggcgcgtctctgtggcaacccttacacacacccacaccacaggaggacgtggtgggtgcattggatgagccggcccccgtgtggcagcacccagacgtggcctggctgcctagacactcacctttgtactgtggggtgaaccgcttcatggccagtggcagggattcatagaacctctgctcccgggagacgaggggcttgcacaccgtatgctcgtcatacttcatcacgctcatgtgccccccgacctggtgcaggaagggctccagctgcacgcctgccctcatgtccccggcatctgcgctgttttgcacaaccatggcggcagatggtggtggtggggggtccctgcacagtctgctagaggaaggtttgaagtagaaagggcagctcccaacagcacacggggctgtcagcggtcctcaactttctc

SEQ ID NO: 7209 - DNA, 546 bp, Homo sapiens
  MAP TO AC019222.3; EXPRESSED IN PLACENTA, SIGNAL = 4.6; EXPRESSED IN BONE MARROW, SIGNAL = 4.2; EXPRESSED IN ADULT LIVER, SIGNAL = 4.7; EXPRESSED IN HELA, SIGNAL =   5; EXPRESSED IN HEART, SIGNAL = 4.3; EXPRESSED IN BRAIN, SIGNAL = 3.5; EXPRESSED IN LUNG, SIGNAL = 4.9; EXPRESSED IN FETAL LIVER, SIGNAL = 4.2
cgatatcattttgccatgaccaataactgttgacctgtacaaaaaaaaaaaaaaaaaacccagcttttggagtaaaactgcattttgtgtaatataatttgtgtaatataatttgtgtaatataattgagtcatcattaatcatttgcaatccttttccttcatcacatttattaatccttaaaagattcagagaatgattctattccaatgttctacacataccatctgttcaagcacattccttatattcttactaggttttcacagatgcctcttttgaaatcagcaaatctcctcaggagcatcatctggctcctgtcacccctactccagggagccctcgtcactgcagtaatgccagtgtcagagcagatgttccataatctctggcacatttgccttccttggtagagcttttgaatgcaaattttgaggtgaaaaaaaatcctctgagtgaaagcattatctgcaaatggtttctctctgcatcaaacgcagcactcaggcatcttatttctgctcttctggaggcttggtcagagag

SEQ ID NO: 7210 - DNA, 552 bp, Homo sapiens
  MAP TO AL162387.2; EXPRESSED IN PLACENTA, SIGNAL = 1.8; EXPRESSED IN ADULT LIVER, SIGNAL = 1.5; EXPRESSED IN FETAL LIVER, SIGNAL = 1.6; EXPRESSED IN BRAIN, SIGNAL = 1.8; EXPRESSED IN LUNG, SIGNAL = 2.1; EXPRESSED IN HEART, SIGNAL =   2; EXPRESSED IN BONE MARROW, SIGNAL = 1.7
gactatgagagtggcggctgctgacctgttcatatttctccagttctgtgtgatagatttgtctgatctgggtcaatttggctctgtaatctgagtgttcaatagagttatctgaagaacctccagaggctgccgcggctgcagctgctgccgccgatcccccacctttctcaggacctgaaaccccttctgccaaaagcatattgtccagtctcattagctggggatcgggagggtcctcctcctgggctcctctgatgctgagaccttcaaggaaagagagagagagacagagagagaagaagcgagaaacagaggacaaatagtgtgagtattttgtttattcgagaaaatgatcaaacaacatcagtgtactacaattcatgctgagaacttcattgttcacatttgatcggtaagtttgaataagtatgaaaattatttttaagatagtgtttacatgcaccctagaattttaaatacccccccaccgcctcaatttaccacagactagatccttagaaaaaggtaaccctggcttcctggaatatt

SEQ ID NO: 7211 - DNA, 545 bp, Homo sapiens
  MAP TO AL132874.14; EXPRESSED IN LUNG, SIGNAL = 1.7; EXPRESSED IN ADULT LIVER, SIGNAL = 1.9; EXPRESSED IN HEART, SIGNAL = 1.5; EXPRESSED IN BRAIN, SIGNAL =   2; EXPRESSED IN PLACENTA, SIGNAL = 1.9; EXPRESSED IN FETAL LIVER, SIGNAL = 1.4; EXPRESSED IN BONE MARROW, SIGNAL = 1.6
caattcccttaccctaatgccaaatttaaattttaaaaattactttattcataaacatttcaatgaactttcaatcacaatgcacatgttctgtgttttctattttcacttagcattacttaaaaagattgtcccatattttcccaatcaatatctattgattactaacatggttagactaaaaccaaaatatcttacaattagtttctttatgatctggtctctttctgtaagcatggcttttaattctgtaatcatctgtatatcttctggttttgattctctcattagatatttttcttccatttcttctaatctgaaaacaagaaagactttagctcattgatatcactcagatacattcttctgtaatacctacattaaaaaaattagtctagttgaacacacacaaaaatctgaaacaaaacttcttttttccttaaaacttttaagcataatgacatgactgcttcaagagcagtagttgcattaaaggagttaaaggggtagatggtactatgaaaggctttgcaggttacttctga

SEQ ID NO: 7212 - DNA, 552 bp, Homo sapiens
  MAP TO AL121579.2; EXPRESSED IN PLACENTA, SIGNAL = 1.7; EXPRESSED IN HEART, SIGNAL = 1.3; EXPRESSED IN FETAL LIVER, SIGNAL =   1; EXPRESSED IN BONE MARROW, SIGNAL = 1.1; EXPRESSED IN LUNG, SIGNAL = 1.3; EXPRESSED IN ADULT LIVER, SIGNAL = 1.7; EXPRESSED IN BRAIN, SIGNAL = 0.98
cgctattagcagggctgtgcccgtgtgtgtttccccttcaggcagccccagagccacctgtgcagcctctgtccaaggctggcctccttccataccctcatggcttacttgtgctgtctgagacatctccgttctcacctgagtctcttcattgtctccaagcttgggggtccttatccggcttacactctctaatttggtgtcatcccactcatcacttaaggcagaggcagctggaacagctgtgctgacactcactgtgacttctggggctcccagcagactatcagtttctggctcaacactcagggtgtactcggaagtttcgagtggttgcttggtggcagcagcctgggtgttatcagctgtcatctgcgaaggcttctccttatcaggggtgaggcttccaggctcactgcctgctgtggactcagcaccaggaaaagaagttgtcctgtggtctgtgtctgcttcaaatttctcagtctttggattggtggttagcatttccttagtattcacataggatgaaggtgaatgtcccaaaccaac

SEQ ID NO: 7213 - DNA, 514 bp, Homo sapiens
  MAP TO AL139819.2; EXPRESSED IN LUNG, SIGNAL = 3.8; EXPRESSED IN ADULT LIVER, SIGNAL = 4.1; EXPRESSED IN HELA, SIGNAL = 4.5; EXPRESSED IN HEART, SIGNAL = 3.4; EXPRESSED IN BRAIN, SIGNAL = 2.9; EXPRESSED IN BONE MARROW, SIGNAL = 3.1; EXPRESSED IN PLACENTA, SIGNAL = 3.4; EXPRESSED IN FETAL LIVER, SIGNAL = 3.4
gacaagctggggagtcagaggatgagggcaaaggtcattctaaaggtagggggtcaggaggaggctgggtaaggttcaagccagcttgtggttcagtttgcccagggcccactactggacagtttgtattggaccaaatggtacaacaaccagagcctgggccatggctcccactccttcatctactatgagaacatgctgctgggggttccgaggctgcggcagctaaaggtccgcaatgactcctgtgtggtgcatgaagacttccgggaggacattctgagctgctatgatgtctactctccagacaaagaagaacaactcccctttgggcccttcaatggcacagcgtgagtgagcctgtcctaccaatatcacagggcttgcccctctaaacctgacaccatcccaaggtctgggaaccacttccactgaggcttaaagagcctcagagctctttaagggacttctgggggcatctccctgaatcccagctgtgactgtttggggacct

SEQ ID NO: 7214 - DNA, 567 bp, Homo sapiens
  MAP TO AP001505.1; EXPRESSED IN BONE MARROW, SIGNAL = 1.6; EXPRESSED IN LUNG, SIGNAL = 1.8; EXPRESSED IN PLACENTA, SIGNAL = 1.6; EXPRESSED IN FETAL LIVER, SIGNAL = 1.6; EXPRESSED IN ADULT LIVER, SIGNAL = 1.8; EXPRESSED IN HEART, SIGNAL = 1.7; EXPRESSED IN BRAIN, SIGNAL = 1.5
ccccaacctgttatccactgcctcaggcacctgcaatgttaaataattgcctggttttttttttcttcttctttttaacaaatgcccctgggctgttcctacgggttaagctccgagtcaatcaggcaaagatagtcttgcaagtagagtcttccacggaacagagaggcagctcagataatgacagttctccgggaagaggctttgggggagctcggcttcagttctccaccccagtggctgctaggatattgcttttcactgaaatttcattcctcactgcaaatctttggttaatttccagaggtctgaaaaagccgattctgatcatttttgccagcgttctcattgctttcatcaatgaggctttttggacgtccttatcctgccattttgcagtcgtcattatctagaattttaaaaacagaggtaatactgacgtgaaataaacacacttctaaagcatgcaatttggcaagttttgacatgtgtacacttatgaaaacatcatcacaatcaagataacgaacctatgcagcacccccaacattccctcttgtccctctg

SEQ ID NO: 7215 - DNA, 596 bp, Homo sapiens
  MAP TO AL157375.1; EXPRESSED IN HELA, SIGNAL = 2.7; EXPRESSED IN LUNG, SIGNAL = 1.7; EXPRESSED IN ADULT LIVER, SIGNAL =   2; EXPRESSED IN BRAIN, SIGNAL = 2.6; EXPRESSED IN BONE MARROW, SIGNAL = 2.3; EXPRESSED IN PLACENTA, SIGNAL = 1.3; EXPRESSED IN HEART, SIGNAL = 1.6; EXPRESSED IN FETAL LIVER, SIGNAL = 2.9
ttttccagttttccctctgctattgatctcttgcttcattccattgtgatagaaaaaggtactttgcatgattttcatgtttaaaatgtattagggagcaaaatcaacatgtaactcagagcagcagtcaccgaaatgtccctggccagcatccttccacctgtccacaagcatggggagcatctttgtcaacctcttcgaaagcatttttggcaaaaaagaaatgcacatcctcatcgtggtcctcagtgctgcagggaaaacaacaatcctatataagctgaagctgagtgacatcatgaccaccatccctaccataggcttcaatgtggaaaccatggagtacaggaacatcagcttaaccatgtggaacatgggcagccaagaaaacatctggcctctgtggcaccactacttccagaatacacaaggactgatcttcgtagtggacagcaatgatagaaagtgtggaaaggaggcctgggaggagctctttaggatgctggctgaggatgagctctgggtgcagtcctcctggtgtttgccaacaagcagggcctccccaatgccaggaatgcagccaagatcacagacaa

SEQ ID NO: 7216 - DNA, 583 bp, Homo sapiens
  MAP TO AC015452.4; EXPRESSED IN PLACENTA, SIGNAL =   4; EXPRESSED IN ADULT LIVER, SIGNAL = 3.1; EXPRESSED IN HEART, SIGNAL = 3.7; EXPRESSED IN FETAL LIVER, SIGNAL = 3.2; EXPRESSED IN BRAIN, SIGNAL = 3.8; EXPRESSED IN BONE MARROW, SIGNAL = 3.7; EXPRESSED IN LUNG, SIGNAL = 3.8
tttttcctggtggactgacccaaaccttcattcctgaggggtctggaccatttgtagttctgcctggattgggctgttgttgcttcccactgaccttaatcacaaggcatagtaatactaagaaactccctaatggatcttctgtattccatgcatactcttccttacctctgttatagagtagtagactgatttcaccttgatagtctgggtcagccaccccagccaacactgtaacacccttcttagactgttgacttaaaggtaggagaagccaaaactgtccaggtggcaatcttaacttccagtttaatggaatcattgttgtgtctcctggtggcagtgttcctccctctggaactaagacctctaggccagctgaacttaatgctgtgggaacaggaagcaaaaattttgctagtggatcactaaggatgatgatgagtgttgccacttccacttccatcccttgatttctagacccacgaatcctgactatgggagaaacagtaccatgtattggatgttaattcagggcatacatggccttctggagaactttgccccagcccttcaaagtatt

SEQ ID NO: 7217 - DNA, 554 bp, Homo sapiens
  MAP TO AL121908.7; EXPRESSED IN LUNG, SIGNAL = 3.1; EXPRESSED IN PLACENTA, SIGNAL = 2.9; EXPRESSED IN ADULT LIVER, SIGNAL =   3; EXPRESSED IN HELA, SIGNAL = 2.7; EXPRESSED IN HEART, SIGNAL = 2.3; EXPRESSED IN FETAL LIVER, SIGNAL = 3.1; EXPRESSED IN BRAIN, SIGNAL = 4.3; EXPRESSED IN BONE MARROW, SIGNAL = 3.9
aagagtggccaatagcatggagctggggcctaactgcccacgtgtggtcttggtccctagtatttattagccaagtgtccttggccaacttcattttatgccacaaaacctcagtctcctcatctatacaatgggaataataataataccttttctagagttggagggaggattaaatgagtcagttatgtttaaagtcctggaacagtgccaatgcccaccacatagtaatttccatgtaaatgtgagctgccatgatgatggtgatgatcatggttgtgatgatggtggtgatgattgtgatgttgatggtgatgatgatggtcgtgatgatgatggtgatgatgatggtcgtgatgattgtgatcatgatggtgatgatcatggtggtcctgatgatggttgtgatgattgtcatcatggtggtcatgatccatggtggtcatgatgatggtgatcatcatggtgatgatgatgattgtcatgatggtggtgatggcggcggtgatgatcatggtgcgtgatgatggtcacgctgatggtgatgatgatgg

SEQ ID NO: 7218 - DNA, 600 bp, Homo sapiens
  MAP TO AC013726.3; EXPRESSED IN LUNG, SIGNAL = 2.1; EXPRESSED IN ADULT LIVER, SIGNAL = 2.3; EXPRESSED IN HEART, SIGNAL = 1.7; EXPRESSED IN BRAIN, SIGNAL = 1.9; EXPRESSED IN FETAL LIVER, SIGNAL =   2; EXPRESSED IN PLACENTA, SIGNAL = 1.8; EXPRESSED IN HELA, SIGNAL = 2.5; EXPRESSED IN BONE MARROW, SIGNAL = 1.9
tactgcccatcaggaaaaccttccgttatgatcaacatttctctttaaggctgtgggattttaaaacatacctgcaaggtcttcgacatttcacccatcaaaaggtggagtctaattccctcacccttgaatgtgggcttgcttcaagtagaaagcagcagaaatgattcagcacaacttcagaggctaggtcataagaggtgatatggcttccagctggtgcactctctcattttctcattctctctctctctcatttctctgtctctctatctctctctgtctctctctctctctctctctcatttctctctctctctctctctctcatttctctttctatctctctgtctctctctctctctcatttttctctctctctctctctcccccctggctcttagaacccagccaagggtgttgtgaagaagccagagagtcatccaggaaaaccatacatcaatgtcattggtgctccaggcacagcccagctcaactgaggtccccaatgacgccatcattaaccaccagacttgggagtgaatgaagcttcagatggttccagcccccaactttcaagcacacccagtgatgctgagt

SEQ ID NO: 7219 - DNA, 526 bp, Homo sapiens
  MAP TO AC019214.2; EXPRESSED IN PLACENTA, SIGNAL = 1.2; EXPRESSED IN ADULT LIVER, SIGNAL = 1.4; EXPRESSED IN HEART, SIGNAL = 1.3; EXPRESSED IN BRAIN, SIGNAL = 1.2; EXPRESSED IN BONE MARROW, SIGNAL = 1.2; EXPRESSED IN LUNG, SIGNAL = 1.5; EXPRESSED IN FETAL LIVER, SIGNAL = 1.4
ctagtgctccctcgcagttctccgcttaaggcccatccagtctggccgtggccacaacacccctggccacccttcccgtccgtgcagtgcccggggccccgacacccacccagcccggctcaaacaccttggccatatttggtgaagacgcaggaggcgatgccactgacgtcctcccggcggatgcagctgtagcgcacctggggcttgagcaggggcagcgagaccacctggatgtcgcccaggttggtaaggactgccaggtggtgctccccgtagtcctcggctcgacgactgccgaagtgggccacgctgacccgccgcactcttgagccctccaggcgcgtcagcttcaacttcagcttggcactcaccttgggcagcgtgaacacctgggggcgtggggtggttgttcatgcccatggccaaaccagttctcctgccctgtgctgctgctgctgggccctcccctccccgcatgcctcccggtgtcctgacaaactcttggctctcagatgcacagaca

SEQ ID NO: 7220 - DNA, 523 bp, Homo sapiens
  MAP TO AL117334.29; EXPRESSED IN LUNG, SIGNAL =   3; EXPRESSED IN ADULT LIVER, SIGNAL = 2.6; EXPRESSED IN HEART, SIGNAL = 2.8; EXPRESSED IN BRAIN, SIGNAL = 2.7; EXPRESSED IN PLACENTA, SIGNAL = 3.3; EXPRESSED IN FETAL LIVER, SIGNAL = 2.9; EXPRESSED IN BONE MARROW, SIGNAL = 2.7
ctctcagtgccttgattcccccacttccaatggtggtgtcctccatcctacttcagctattcccttccacattgccacatccaagcagctcaacacagctgcaggaaaagtgtacaactatgctaagtagggtctcacctaggtttacaactacaaacatcaaatgggcactaggtgctgcctggaaatcctaaaacttttccttattttcaactcattcttccccattctcttggatgaatccaacacctctcttcatttttagctgaagaccttccttcttatttacctgagaatacagaagtaatcagaagagaacttccactttctcccaccaacaagctaccagcatttgggttcacataatctgccaccaatgaattgttggcattgctcctgtctaacttgaggccaacatccccatttacatactagatcccattccatcttacctactcaaggacttcacccttgcaagtgtcacttctctttaatcatcaattgtccctccctactgcatcag

SEQ ID NO: 7221 - DNA, 588 bp, Homo sapiens
  MAP TO AC011440.5; EXPRESSED IN LUNG, SIGNAL = 6.3; EXPRESSED IN HELA, SIGNAL = 9.1; EXPRESSED IN PLACENTA, SIGNAL = 5.3; EXPRESSED IN FETAL LIVER, SIGNAL = 4.8; EXPRESSED IN BRAIN, SIGNAL = 4.5; EXPRESSED IN ADULT LIVER, SIGNAL = 6.5; EXPRESSED IN HEART, SIGNAL = 6.3; EXPRESSED IN BONE MARROW, SIGNAL = 4.8
ttctccttacctgtgccacctcctctcatgatgagccattctgtgatggtgcttcagcctgtaaaattgtttgtggtttcaaaaatattgcacttcatttcatgcctccataccttttcctcttcttgtaatgccttttcatattcatctccaacagggtaagttctgcacataattcagtgtcccttttccagtttgatgttgcagctcttccttcatctcaaatatccactggattaggtacatctgtgtgtacttcatcttatccatcctgttaaagaaaaaattatagaaggacaattgttaaagcatggtagggaaagttttatttaggaccatcatgataaatatatgggccactgcaatggaattgtttgcagtgtaggagagagaatgggctcaactctgtatatagcatgaacaagtgagaatttttaaccaaggaacagagtagaggtcagcagacagacaatgactaagaggtaacatcaggagtaatgggaattctggctaaactgacctaacagaattcttgctgaagacaaaccaatgtgatcaggtatcacctgggagttggtggagaatgaa

SEQ ID NO: 7222 - DNA, 580 bp, Homo sapiens
  MAP TO AC018501.5; EXPRESSED IN PLACENTA, SIGNAL = 2.8; EXPRESSED IN ADULT LIVER, SIGNAL = 3.4; EXPRESSED IN HEART, SIGNAL = 2.8; EXPRESSED IN FETAL LIVER, SIGNAL = 2.5; EXPRESSED IN BONE MARROW, SIGNAL = 2.5; EXPRESSED IN LUNG, SIGNAL = 3.2; EXPRESSED IN HELA, SIGNAL = 4.1; EXPRESSED IN BRAIN, SIGNAL = 2.4
tgcaagtcctagccttcctgctgcttctaataggatttttgaagttaaagatatgggtacctcctcggactcccttaaacgggtagaaaaacgccaccagcaggttcatcaggacggccaggttaaacgaaatgctgctccagaaagacatgttgcgggcacaccagtacaacacgggctgggctgcagagacaaaggcaaagccgcgtgaggctggagaccccaagccggaacgccaggaatgcaatgtggcccttccgccagctctgccccacaagtccacttttgttcccggtttttaccacaagagtaaaaatgatcatttgtttggaacttggtacataatgacatcagattggtttatttctgtgtggagtacttactggaacagaagatgtattgggggtggagtaaggagagagcaaaaagagaaaagttggagcatctataaaccctgcataccccagccgcaggcatcagttgcggaatctgggggttatccagagttcacacattgagtcctcggttccccctagggctctggacccagatgagatgcccggagagacccaaaaattca

SEQ ID NO: 7223 - DNA, 515 bp, Homo sapiens
  MAP TO AC019214.2; EXPRESSED IN LUNG, SIGNAL =   5; EXPRESSED IN ADULT LIVER, SIGNAL = 3.6; EXPRESSED IN HEART, SIGNAL = 5.7; EXPRESSED IN BRAIN, SIGNAL =   5; EXPRESSED IN PLACENTA, SIGNAL = 5.1; EXPRESSED IN HELA, SIGNAL = 3.2; EXPRESSED IN FETAL LIVER, SIGNAL = 5.3; EXPRESSED IN BONE MARROW, SIGNAL = 5.1
tgtagtggggagagccaaacgatgcctggtgcagcttggatgagatgaggggtgtggggctccggcatggtgcggacgcgcagtgctcgctcagctagcgattcaggctcgggtgaacagacgctggccgactgggctctccgcccctcacctctgcggtgctgcctgctccaggtgccgccatgccgccattgccaagtacttcggggatgcgctgcctgcctgcgccaaaggctgcgaccactgccagaaccccacggccgtgcggaggcggctggaggccttggagcgcagcagcagctggagcaagacctgcatcgggccctcccaggggaacggctttgaccccgagctgtatgagggaggccgcaagggctacggggacttcagcaggtaaggggccgagaagccagggctccaacccgctggaattgcctggcattcccttggcgccagggccagaccagaggtggcacgatgccgcaatccccccttgagctggtaggacatcaggg

SEQ ID NO: 7224 - DNA, 552 bp, Homo sapiens
  MAP TO AL121988.10; EXPRESSED IN PLACENTA, SIGNAL = 6.7; EXPRESSED IN FETAL LIVER, SIGNAL = 5.9; EXPRESSED IN HEART, SIGNAL = 5.9; EXPRESSED IN BONE MARROW, SIGNAL = 6.1; EXPRESSED IN ADULT LIVER, SIGNAL = 6.8; EXPRESSED IN BRAIN, SIGNAL = 5.6; EXPRESSED IN LUNG, SIGNAL = 6.9; EXPRESSED IN HELA, SIGNAL = 5.8
tttctcaaggtcacacagccatgtggcagatccgggcctggactccggcatccctgcttcacaaccaggccctggcacctgctgattacggagtgtcctgcccctgccctctggctgtggaggcagctggggagcagggctgagttgcctggtgcagctcatgatgttttcccctctttcccggaaggggtttcctgaaggtggaagtgagacctgaaggcatagagagtgtgcattgttcagctgcacctggcggtgagctcatgtcagcagacagaacagggaaggcagcaccagaccaggaattggaaactgcctgagcagtttccttggcccaggtccctacatccatctttgcttcctctttctgggaactggtcccttccttgagtcccgagctgactctcatgaggccagggacctggtgaggccaggaaagtccctcagtttccctgtctgaaaatgaggggtttaggttagatcagtttgcctaagtgtgatctgctgaacatgagtcctacaaaatactccacaagaatcgagttggatggc

SEQ ID NO: 7225 - DNA, 500 bp, Homo sapiens
  MAP TO AC019221.3; EXPRESSED IN PLACENTA, SIGNAL = 5.6; EXPRESSED IN FETAL LIVER, SIGNAL =   5; EXPRESSED IN HEART, SIGNAL = 5.4; EXPRESSED IN BONE MARROW, SIGNAL = 5.9; EXPRESSED IN LUNG, SIGNAL = 6.8; EXPRESSED IN ADULT LIVER, SIGNAL = 6.1; EXPRESSED IN HELA, SIGNAL = 5.7; EXPRESSED IN BRAIN, SIGNAL =   5
aagaatcgtgatgctgggacatggccaggtcgggggagaggatggaagagaagggagctgcgtgcaagcccaagtgcaggttccagggagacgcctatggaagtaccttgaggtccctccgctccaggtgcaggagctcagagccccggatgtcgtgccgtgtgaagatgtccttatactcacagagactgaggtgctccagccaggcagcaacctcctctgtcccccagaggtgaactgtcggagatggaaaagcacgagtgcagtgagtgcccagagcccagtgcaaggtaggcagcagctggcacccagcacccgagagcccagtgccaggacaggagacgtcccaacagccagcacccgagacagcccagcagcagccagcgcctgagatagcccagcagccggcacccgagatagcccagcagccagtgcctgagatagcccagcagctggcacctgagccatctctggcagccggtatccatcacccagccaac

SEQ ID NO: 7226 - DNA, 578 bp, Homo sapiens
  MAP TO AC008474.4; EXPRESSED IN ADULT LIVER, SIGNAL = 1.8; EXPRESSED IN HELA, SIGNAL = 2.3; EXPRESSED IN LUNG, SIGNAL = 1.7; EXPRESSED IN PLACENTA, SIGNAL = 1.5; EXPRESSED IN FETAL LIVER, SIGNAL = 1.8; EXPRESSED IN BONE MARROW, SIGNAL = 1.3; EXPRESSED IN HEART, SIGNAL = 1.7; EXPRESSED IN BRAIN, SIGNAL =   2
gccctacactgagggacaagcttgtgaagtgctttggaaaggtcaatgcatagttttaaggtataacataagtgcatttgattttaatggattttttgcatatgtattttttctttttagtaagtaacttagcacttgtaaagcctgaaaaaactaaagcagtagagaattaccttatacagatggcaagatatggacaactaagtgagaaggtaagcttagacagccttgaggaactttactgttacctgctttatcaaaacatggcttcaaaaggtcagctgcatcttcactggattacagaattcttgctgactctcagaagaaattgttggagagaatagtcatacctactttaaaagagaataaattgcctttcctaaattcctctgcttcgctcctttcctggcgttgctctggaaccttgttggtgtctgtgacccaatgactgttagggtcagctagcttcaattgcccctgcactggaagcaaggtttgtcagtaacaccaattaaaatactaccagtgtaagtagaaggtgtgttttgcagatgagaaggtgctaagatgccttgctt

SEQ ID NO: 7227 - DNA, 597 bp, Homo sapiens
  MAP TO AL121777.16; EXPRESSED IN HELA, SIGNAL = 2.9; EXPRESSED IN LUNG, SIGNAL = 1.2; EXPRESSED IN PLACENTA, SIGNAL = 0.96; EXPRESSED IN ADULT LIVER, SIGNAL = 1.4; EXPRESSED IN FETAL LIVER, SIGNAL =   2; EXPRESSED IN BONE MARROW, SIGNAL = 1.5; EXPRESSED IN HEART, SIGNAL = 1.4; EXPRESSED IN BRAIN, SIGNAL = 1.8
gctcagctcacaccattcagggccttgcaggcaaacctgggcagcacaaaggctgtgcggtgtgtgtctgggctgtggcatttcagctgcatctgccccacctgctgctgtgtcaggtgctgcaccagctcccggtcacgggtgatcatgttctgccgcacagcatgaagccagtctggctgcaggggtagatggggaccatgcagtaggtgtagcccaccacggctactggcagaactgccacatctccttatgaggtgaaggtgcagccactggtgctctccctggcagcagagaatgctgtcctccgcgagggccaccttcaccttcatctgctgacaataggcttccttgaagaggctttcagccgggcccatgtggtctgagaagtcagtgatacatcaaaggcatcctggttctgcttcatgaactcaaaactgtcacccacatgaaggatcagctttgaactagagtagcaactggccatgcctagcaggaacttcttagagacttggatgacatccttgtcaatgtcacactggaccacagactccatggagaggtgcttccccaccttgtgcaagacacccatctctg

SEQ ID NO: 7228 - DNA, 508 bp, Homo sapiens
  MAP TO AL132866.21; EXPRESSED IN LUNG, SIGNAL = 2.7; EXPRESSED IN HELA, SIGNAL =   3; EXPRESSED IN BRAIN, SIGNAL =   2; EXPRESSED IN PLACENTA, SIGNAL = 2.3; EXPRESSED IN ADULT LIVER, SIGNAL = 2.8; EXPRESSED IN FETAL LIVER, SIGNAL = 2.2; EXPRESSED IN HEART, SIGNAL = 2.2; EXPRESSED IN BONE MARROW, SIGNAL = 2.3
caactagctccctggctctgtgtgtcctgcgggggcgtaggttggaaactggcctgcatcagattactcagctttgaaacttaaattgtttgaagagaattttttgttttgttttgctggacgattttcttggaacggtctgatggcagaggctcccatcacctgtccagaggacaaattgattttttagaaaggacgcgtgggtggtggaattccctctttcccactgagtcatcatatcctgacatgagtcattttattacttggaggtccccaaaggttgtattttgagctttgtttaataaatataaatgcatatgcttaaaataattttttttttttctaaattaagtatttttccgtgaatttgtgccctggaacaatcggaaccatcttagagcagacacctgctcttcccacctgtttctctccctgggtttggttgtacccggcgtgatgttctctgaaacaatagacctggtatgggagtctctagatggggcttccc

SEQ ID NO: 7229 - DNA, 564 bp, Homo sapiens
  MAP TO AL121905.10; EXPRESSED IN LUNG, SIGNAL = 2.6; EXPRESSED IN PLACENTA, SIGNAL = 2.3; EXPRESSED IN HEART, SIGNAL = 2.1; EXPRESSED IN FETAL LIVER, SIGNAL = 2.4; EXPRESSED IN BRAIN, SIGNAL = 3.5; EXPRESSED IN ADULT LIVER, SIGNAL = 2.8; EXPRESSED IN HELA, SIGNAL = 2.3; EXPRESSED IN BONE MARROW, SIGNAL = 2.6
agaggggctaggttctcagggtacctgactgaccttctcccttgtgtactgcagagccccagagtgtgccacttctggccagatccccaagcaccaacaggaaatacccacccctgcccgtggacaagctggaagaggaaattaaccggagaatggcagacgacaataagctcttcagggaggaattcaacgtgagtactttgttgaggctggtgtatcagcagggaagaaggcagacctaaagtcagacctttcagatctttggagtcatgaagtaaaaaatgggcttttaatgtttaagaggtgagaaatgttttaccaagtttatctgactccctgtatgatcatggataggaaatgaagtgagatttgcctcacctccctaatctacccatccattcagtcatcatcacatctcttacttcttttgtttaataaatacttagcaagcatctaatatttgtcaggtaatattctagttgccagtgatatgatgaggagcagaaacagatccaatccctattctcaaggaactcactgtccaggagggaaacctcacaaaca

SEQ ID NO: 7230 - DNA, 539 bp, Homo sapiens
  MAP TO AL133419.11; EXPRESSED IN LUNG, SIGNAL =   4; EXPRESSED IN PLACENTA, SIGNAL = 4.3; EXPRESSED IN ADULT LIVER, SIGNAL = 4.3; EXPRESSED IN HELA, SIGNAL = 3.3; EXPRESSED IN FETAL LIVER, SIGNAL = 4.4; EXPRESSED IN BRAIN, SIGNAL =   4; EXPRESSED IN BONE MARROW, SIGNAL =   4; EXPRESSED IN HEART, SIGNAL = 4.1
tatagaccctgggcttgtggatttagcaagttaaattggatcaatacaaaattgttctccacacaagtggaaactgttgctgttaataatgaatagaactactgggtaaagagaaatggatgccatctgcttcaagttaccttctacctcctcctttgcctttttctggatcttgaaaatccccatgtatctctgctttttctacagtaaaccttccctggagagactccattctgaaggcaattttccaagaccatttgcagaattggctgggccttctgctgagacataaaagggcatttattctgggacttaaaaatggagttggagggttggaggagacattgctgaacttgtttcagaaataggtactatatgcatcagttatattgcttcatgtataaatgctaaacctaatatgttccacttaaagaatatgcatttgcatgtgtgcatgtgtacactttgagtttcgtgttgtttacctaagtttctggagatattttaacacttccacgtgcaagctagggatttagtgc

SEQ ID NO: 7231 - DNA, 573 bp, Homo sapiens
  MAP TO AC022262.3; EXPRESSED IN LUNG, SIGNAL = 4.8; EXPRESSED IN PLACENTA, SIGNAL = 4.2; EXPRESSED IN HEART, SIGNAL = 3.9; EXPRESSED IN FETAL LIVER, SIGNAL = 4.5; EXPRESSED IN BRAIN, SIGNAL = 4.6; EXPRESSED IN BONE MARROW, SIGNAL = 4.2; EXPRESSED IN ADULT LIVER, SIGNAL = 4.1; EXPRESSED IN HELA, SIGNAL = 3.2
tacagactggaggctggagggtaaacaactggcctgaggtctccagtggccacggtgggctggagtccaggtcttctatctcctgggcagggctcttgcaggtggcagtggtcccaggaggttgtggtctccttctgcctggactagatgcggacggtgttgatccgcagcggctgaacgttcttgccattggcgtggctctggccagggctgaagtaagagcagagcttgccagggaacttctcgcggaaggtgtagagccaggacatgtcatcagcattgtagaagatgagcaagccttggtcatagtccaggaagacacccaccttgtcaagcttgtcccggacgttaagccgcgtccagggctccgtgcaggcgctgtactggttgccatcgtgcatcacgatgcagtagaagccgcggctgggctggatctggatgctgcccttgcggcttgcggcttcgtgtgccagcccgatcacccactgggtcttctccgccaccaccacctcccagtagtggacgccactactgaaggcttcagaacccagcaccgacacctccacatcgaag

SEQ ID NO: 7232 - DNA, 560 bp, Homo sapiens
  MAP TO AC017086.3; EXPRESSED IN ADULT LIVER, SIGNAL = 1.3; EXPRESSED IN PLACENTA, SIGNAL = 1.5; EXPRESSED IN FETAL LIVER, SIGNAL = 1.4; EXPRESSED IN BRAIN, SIGNAL = 1.9; EXPRESSED IN BONE MARROW, SIGNAL = 1.2; EXPRESSED IN LUNG, SIGNAL = 1.4; EXPRESSED IN HEART, SIGNAL = 1.3
cccttcatcctgcagtcttcttccagcactctctactgagaaagcttaacatcacacttactgtaggggagaaattcttaaaggattcacattcattattacagagcatgcatggagctgagaggcaacacagtgctaagtggcacagagggagatctaatctggtcatgctactttgtaatgtggctaatcctgttttcccaaggacctttcaccttgtgagtaaccctgaccttgtgctggcagtgtctatgaccaagactagaaatgaagtttgtggctatccagttattgttcaggtaagatatgtatggctaaagattagtcatggccttttaattaaatttaagtaaagctttgtgcttccttgtagtggaggaaaaaaaaaaaactgtcatagaatcctatttgaatgttgttaaaatatttacaatagtctgcctagattttaaattgaacatgttcatgtacctcttaatttagtttaatccaacagatggtgattgtgggcttgctgcatgtcaggcactatgctagttactgaaatcaaacccaatggc

SEQ ID NO: 7233 - DNA, 560 bp, Homo sapiens
  MAP TO AC008379.3; EXPRESSED IN ADULT LIVER, SIGNAL = 1.7; EXPRESSED IN HELA, SIGNAL = 2.3; EXPRESSED IN BONE MARROW, SIGNAL = 1.8; EXPRESSED IN LUNG, SIGNAL = 1.8; EXPRESSED IN PLACENTA, SIGNAL = 1.5; EXPRESSED IN HEART, SIGNAL = 1.5; EXPRESSED IN FETAL LIVER, SIGNAL = 1.6; EXPRESSED IN BRAIN, SIGNAL = 1.6
agaatgggttgcaaaactcgtgtgacatattcaacctgctcaatgaactcaatctgtcacttcaggggacaacgaccactatgttcaagttggcagataaagtggctgcattcaaagccgaactggaattatgggggcgacgagtgagcattgggatttctgataggtttcaagcattagcagagatttttgaaagaaagagactgagccagtgccttctttctctcagctggtgcatgatcacctatctcagctttcaaaagagtttgagcattacttttcaaccacaaaagacccccgaactgggaaggaatggatccgcgacccatttgtgaataagccaagtgacttgacattgtccatgctagaagcggatcaactgcttgagagggcaaatgacggtggccttaaaagtatgtttgggacttcaaatctccatacgttctggattaaagtcaaggcagaatatcctgagactgccacaaaagcactgaaaagcctgcttccttctgtttccaacagcatatccttgtgaagcagggttttctgcagtgtcagca

SEQ ID NO: 7234 - DNA, 532 bp, Homo sapiens
  MAP TO AL136528.9; EXPRESSED IN HELA, SIGNAL =   4; EXPRESSED IN LUNG, SIGNAL = 3.1; EXPRESSED IN PLACENTA, SIGNAL = 2.5; EXPRESSED IN HEART, SIGNAL =   3; EXPRESSED IN FETAL LIVER, SIGNAL = 2.9; EXPRESSED IN BONE MARROW, SIGNAL = 3.2; EXPRESSED IN ADULT LIVER, SIGNAL = 3.2; EXPRESSED IN BRAIN, SIGNAL = 2.8
tgtcaacagcagagcagaggggcagggccaacacagaggagccaggcagggatgacaccggtgccctgtccttccttcctcagacaacattcccaatgccgtctgggtctgggacattcagaagctgaggctgttcgcggtgctcgagcagctgtccccagtgcgcgcgtttcagtgggacccgcagcagccgcggctggccatctgcacgggaggcagcaggctctacctgtggtccccagcgggctgcatgtcggtgcaggtgcctggggaaggtaagcacatccccgaggccacggacgtggcagccttgctgtgtgcagtctggcatcacacgggctgaactgttgaagcccagctgctgtctccggcagcactccagggaaactgccctcagagtctttgcgtaaacctcaagacggacacacaggggacccgctgccctcagctttatgggctagaagcagcctctccctgacttgaggcagctctggggctccaccctggctctgcctatgtgggtcactccagg

SEQ ID NO: 7235 - DNA, 569 bp, Homo sapiens
  MAP TO AL121747.19; EXPRESSED IN PLACENTA, SIGNAL = 4.9; EXPRESSED IN LUNG, SIGNAL = 5.4; EXPRESSED IN HELA, SIGNAL = 3.1; EXPRESSED IN HEART, SIGNAL = 5.3; EXPRESSED IN FETAL LIVER, SIGNAL = 5.4; EXPRESSED IN BONE MARROW, SIGNAL = 5.5; EXPRESSED IN ADULT LIVER, SIGNAL = 4.8; EXPRESSED IN BRAIN, SIGNAL = 5.4
gtgtgtgtgattctcgtgcctcagcctcccaagtagctggtgatggcagtggcagcccatctggagtggacgctgccatcaagccagctgcagcagggagggacagctggggctgcacattccacagagctgcagagctggggacaatgagagccccacaccttccaagctggtgcagcaggagctccccaggtgcaactgcagccactcaagtcacggctgtgaaccccggcctccctgtgttcttgtgggtgctgggagcaggcaggggtcctgcacttttgggtgcagctgcaggcgcccaaaccatggctgcggaaccagacatctctacactcttgagggtcagggaagtccccactgccctcacaagcttagaagtgcctgctcccacagcctggcgcctccctgctgtcggtgcccgctctaatcttggagcaaagttgaggccaagcccaggtgctgtcatagcctgttgggtgtgcacacgcttggggcagtgctgacataccagccccctgccgcctcggacccctacagacctcgggtgctgacgagcataggaggaa

SEQ ID NO: 7236 - DNA, 581 bp, Homo sapiens
  MAP TO AC021878.2; EXPRESSED IN ADULT LIVER, SIGNAL = 0.84; EXPRESSED IN LUNG, SIGNAL = 0.9; EXPRESSED IN PLACENTA, SIGNAL = 0.8; EXPRESSED IN FETAL LIVER, SIGNAL = 0.83; EXPRESSED IN BONE MARROW, SIGNAL = 0.66; EXPRESSED IN HEART, SIGNAL = 2.1; EXPRESSED IN BRAIN, SIGNAL = 0.79
cccgaatagagttttggcagactagtaaatatcataaacatcatggagaagataggaagacagcattctacacattttagaaggcatgggggcttaaggacataatgcatgcttgaggaattagaaatcttctgaagaaggagaagaaatggtaaatgagatatcaaaactcagtaggccccagcttatgttggataaacttggagtttatcctgaaggtgctgaggagtcattaaataatttttgaaagggagtgaggcagcatcatatttatgttttaggatgttcctgctgacagtagaatgcagaatgaactggagagagcacagagtttgaggttagaggccacactggagacttttgcaatatttcatctgagagatgatagtggaaataacactggaaacagagaggagtgggtaagtaaaaggtatttaatgggaagaagtggtggaaggtaataatttgtttggtataggaggtggaaaagagtataaaagcaaggactatttcaaattttctgacttgggtaactgctgtattgtggtgggacatcattaggattgcccacaaatagctcc

SEQ ID NO: 7237 - DNA, 585 bp, Homo sapiens
  MAP TO AC021115.3; EXPRESSED IN LUNG, SIGNAL = 6.1; EXPRESSED IN ADULT LIVER, SIGNAL = 5.7; EXPRESSED IN HELA, SIGNAL = 2.7; EXPRESSED IN FETAL LIVER, SIGNAL = 3.9; EXPRESSED IN BRAIN, SIGNAL = 5.2; EXPRESSED IN BONE MARROW, SIGNAL = 5.5; EXPRESSED IN PLACENTA, SIGNAL = 5.8; EXPRESSED IN HEART, SIGNAL = 4.9
ttggactaggagatggtggcagaggcccagcaacagggtatctaccaggggagaggcatcagctgtttgggcagggatttgcattttttcttccctttctttaccataacttgaaaaggtaaaattggaaggcaaggtaagtcagtgaacacctgagtgactttttataaaatatggctcaccaacaaggggcgcatggctctctcacctgaggcgtgaagcacagatctgtagcaataagccccatatacaaaaggtgaccaatgatacgctcttccttttcatttcccattgagtaggttacctggggcaactggggcaacaggtgacactacagcaaacagacattgggtgatctaggtactaatcctgcctctgcattcacaggctatgagatgtggggctggcttaacctctctgaatgccagtttcctcatctgtaagataagccccatgacacctgtgtcttgacagcctcctgaatcagctgcaaagtgtgatggatgatgcttctcacagggccttgcaaagtgtttagtaagcgctgttcacccaagcaatgaaccgactcaaccatcaatccct

SEQ ID NO: 7238 - DNA, 501 bp, Homo sapiens
  MAP TO AL133458.11; EXPRESSED IN PLACENTA, SIGNAL = 9.8; EXPRESSED IN HEART, SIGNAL = 8.6; EXPRESSED IN BONE MARROW, SIGNAL = 9.5; EXPRESSED IN LUNG, SIGNAL = 9.9; EXPRESSED IN ADULT LIVER, SIGNAL =  11; EXPRESSED IN HELA, SIGNAL = 8.9; EXPRESSED IN FETAL LIVER, SIGNAL = 7.1; EXPRESSED IN BRAIN, SIGNAL = 8.4
cagaacccaagagcaaaagcagccttcacttactgtcccatgaaacaaaaattggatcttttctaagcaacagaactttagatggcaaagacaaagctggcctttgtccagatgaagatgatatggaaggagattctttctttgatgatcccattcctaagccagagaaaacttacggtttgtgagtaaatggtttttgagctatgagactaggggtttaaaaataagataaatgttttcattttatagttaaaaaataatgaactatggaaggtttataattattggatccataaatctgactatgcgttgttaatgcctttcatgttgtaaaacaatcccagattttagaaaaacctagacatgatttattccaacaagtaagtgtagattgagtgtcagccacttgccagggctgttccagggtggggtgcagcaatgatagaagagggaagactcctgccctcaggaagctcatgctctggtgacagagtcaggcaa

SEQ ID NO: 7239 - DNA, 583 bp, Homo sapiens
  MAP TO AC011599.8; EXPRESSED IN PLACENTA, SIGNAL = 1.6; EXPRESSED IN ADULT LIVER, SIGNAL = 1.8; EXPRESSED IN FETAL LIVER, SIGNAL = 1.6; EXPRESSED IN BONE MARROW, SIGNAL = 1.8; EXPRESSED IN LUNG, SIGNAL =   2; EXPRESSED IN HEART, SIGNAL = 1.5; EXPRESSED IN BRAIN, SIGNAL = 2.1
cttgtggatgaatgcagagcttggggggaattagaggaagagcattcagaatcctgatgtgaacagccagaatcctagcagtcgcaatcataacctctttcaacttcagtttcctcatcttcacaattaaaataatcggtacagtcttctccacccccaccacctcacaatggctgaaaggagcccgacacagtgcctggaacgtaggaggagccagtacgatcacccccaaagcaacattcagggacacctggccctgtctagggatggtggggatgcagtctttggtccatcctcgggccctgaagctgggggacaccattcttccctgatgcagcagccccagccagcccgggccccacctgaacgcctctatgagccgctccactttctgagcctccccttggacacggatgtgcgcctggaatttcctgagggcctcatccagctccatggtagagaagtccatctcgtccacgacgcagctggaatagagacagacagccccgcataagcaccccttgcaggtgcgacacgcccagcccacccccaggtggtggtgcctgaagccctgggaatggac

SEQ ID NO: 7240 - DNA, 578 bp, Homo sapiens
  MAP TO AC023340.2; EXPRESSED IN PLACENTA, SIGNAL = 2.6; EXPRESSED IN LUNG, SIGNAL = 2.6; EXPRESSED IN HELA, SIGNAL = 2.5; EXPRESSED IN HEART, SIGNAL = 2.5; EXPRESSED IN FETAL LIVER, SIGNAL = 2.2; EXPRESSED IN BONE MARROW, SIGNAL = 2.2; EXPRESSED IN ADULT LIVER, SIGNAL = 2.8; EXPRESSED IN BRAIN, SIGNAL =   3
atttgcaaaccaggaagagggccctcacccagatgccaaatcactggcatcttgatcttggccttccgagcctcctgaactgggagcaacaaaagtcttgtgtttaagccactcagttggtagcattttgttatggaaacctgaactaagccagaatcgctctttactttggtggtgcttttccttcaagaaagaggaccttccccacactgcagcaattataaagccagccatttcgatagcaaagtagggtgaggacagctaatgaaggtattggatatttcaaaatagttagaagagaggacttgaaatattcccaatacatagaagtgataaacactcgagataatggataccccaaattccctgacttgatcattacacactctatgcctgtaacaaaatatcacatgcaccccataaatatgtacaaatattatgtagcagttaaaaaaatgttaaatgaaaggaaaataaatacacccaccagaagaagagagctaggtctgtactggataaggtacaaggcaggaaaaagtataattagaaaaaataaaggggttggcaaagagattcct

SEQ ID NO: 7241 - DNA, 596 bp, Homo sapiens
  MAP TO AC021079.2; EXPRESSED IN ADULT LIVER, SIGNAL = 1.9; EXPRESSED IN BRAIN, SIGNAL = 3.7; EXPRESSED IN LUNG, SIGNAL = 1.9; EXPRESSED IN BONE MARROW, SIGNAL = 1.7; EXPRESSED IN FETAL LIVER, SIGNAL = 1.8; EXPRESSED IN HEART, SIGNAL = 1.9; EXPRESSED IN HELA, SIGNAL = 2.4; EXPRESSED IN PLACENTA, SIGNAL = 1.7
aaataagggccaccttgctcagcaacttataattttgcttctcactgtttactaaacaaaatgcattgctctttctttctacagccaaagaaagtaaaggatcctcttattaagaaaaacaacacttacgctccaacagcaaccagctacacccctaatttggccaggggcgacccgggcttagccaccattgctaaaagtgcaaccatagaacctaaagaggtcaagcccgaaacaaaaccaccagaacccaagaaaacctttaacagtgtcagcaaaattgaccgactgtcaagaatagccttcccgctgctatttggaatctttaacttagtctactgggctacgtatttaaacagagagcctcagctaaaagcccccacaccacatcaatagatcttttactcacattctgttgttcagtcctctgcactgggaatttatttatgttctcaacgcagtaattcccatctgctttattgcctctgtcttaaagaatttgaaagtttccttattttcataattcatttaagaacaagagacccctgtctggcagtctggagcaaagcagactatgcagcttggagacaggattc

SEQ ID NO: 7242 - DNA, 586 bp, Homo sapiens
  MAP TO AL138807.7; EXPRESSED IN PLACENTA, SIGNAL = 2.5; EXPRESSED IN HEART, SIGNAL = 2.6; EXPRESSED IN FETAL LIVER, SIGNAL = 2.5; EXPRESSED IN BRAIN, SIGNAL = 2.8; EXPRESSED IN BONE MARROW, SIGNAL = 2.5; EXPRESSED IN LUNG, SIGNAL =   3; EXPRESSED IN ADULT LIVER, SIGNAL =   3; EXPRESSED IN HELA, SIGNAL = 3.3
actcctggtgtcctctgctgctcctcccaccctttccccctgtgatctccctgcactgctgagggataactggcattgccctggagtgcccttccctgcgggcagcccgccctaccttgatgccagcattcctcagggtctccagcgtgggccgcacatctgcctgcagctggtcctccacgcccgtcaggcacagcagttccatctccatctccaggctctcgatcaccgtggccactttgagggagcggtcgtgcacactcagcttggcctggacgtagcgggcctgggacacaccagcagatgcagtcactgcttagggtgaggagaggccaggctgactggccagtgccaagagtggaagggccacacccgatccccaccacacggggtgggggaccccagcaggtgagctggaccccacaggggtgacataggcttccagcttcctcacaagtcctccatgtagacactgcacagacctgagtcccaccctacactccacactcacctgctgggagacttccagcaagtcacttaacctctctgagccgtggccacgaaatggcaataacagcaccaacct

SEQ ID NO: 7243 - DNA, 586 bp, Homo sapiens
  MAP TO AL121747.19; EXPRESSED IN LUNG, SIGNAL =   6; EXPRESSED IN ADULT LIVER, SIGNAL = 6.5; EXPRESSED IN HELA, SIGNAL = 4.9; EXPRESSED IN BONE MARROW, SIGNAL = 5.5; EXPRESSED IN PLACENTA, SIGNAL = 4.8; EXPRESSED IN HEART, SIGNAL =   5; EXPRESSED IN FETAL LIVER, SIGNAL = 7.1; EXPRESSED IN BRAIN, SIGNAL = 5.1
tttctcatgccctcttttggtcctgcagacactctcgaaagcgatgggaacgctttgtccacagtgaaaatcagcaccttgtcagccctgaggccttggatttcctggacaaactgctgcgatatgaccaccagtcacggcttactgcaagagaggcaatggagcacccctatttctgtgagtccagatatctagcccacagagtttgtgcaggcgcagagtcctatagaacagagtcgtaatcccagctcctgtcagcttgctgcaaagttaattcacccacactgagcctcagattcttccagtggggatagtgatggcaactacattgcagaattactggaagaattcttctgtaacagaatacatgacacaagagcattcctaaataaactcttttcatactgtgaggatgacacttctcagtgcctcagtctggaatggttgaattagaatacacagccctgtatctttcctgtccctagtaatcattcgttggaaagagctaatgaggcttacaaatcttaaaattgtatgaacaccttgacttagatttgtgagtatagccacctgtgccatcctaagt

SEQ ID NO: 7244 - DNA, 599 bp, Homo sapiens
  MAP TO AC008757.4; EXPRESSED IN BONE MARROW, SIGNAL = 4.7; EXPRESSED IN LUNG, SIGNAL = 7.6; EXPRESSED IN ADULT LIVER, SIGNAL = 7.9; EXPRESSED IN HELA, SIGNAL = 9.7; EXPRESSED IN PLACENTA, SIGNAL =  10; EXPRESSED IN HEART, SIGNAL = 8.9; EXPRESSED IN FETAL LIVER, SIGNAL =   7; EXPRESSED IN BRAIN, SIGNAL = 6.4
ttcctgctccactgagcttcgagatttcggtgttgggggtttggtcaaacatgctttctttctttatttatgtacagcttctcttcttctagtctccattccacgttttcccaccctgctgctgaccaggctcccctgccttccccactgccagaccacaggtcccagcagctcctggccttgagcggagggagggagggagggagcacgtgcaactcgctcctggtcttttctctgctgctgctgctgctgctgccgccgccgccgccgccgccgatactgctgctcattctgtcaggggctggggaggctgctcagcatcctcccagcctgagacccggggagctgggaaagccaggatgcagagaggaggggaggagtggcagtccatgcaggtgcctcctgcctgttcaaaggcctatttataggaagaaccagcaggcagggctctggggtttggctgctcctgggcagctttcttggtgcacgtgggcacagagccagagcatgcagtttagaggaaatgtttaataaagacatgggagcctcaaagtgtttatttattctcacagaaaggtggagatagggtgtgcctggaa

SEQ ID NO: 7245 - DNA, 561 bp, Homo sapiens
  MAP TO AL121575.24; EXPRESSED IN LUNG, SIGNAL = 2.7; EXPRESSED IN PLACENTA, SIGNAL = 2.9; EXPRESSED IN HELA, SIGNAL = 4.1; EXPRESSED IN FETAL LIVER, SIGNAL = 3.8; EXPRESSED IN BRAIN, SIGNAL =   5; EXPRESSED IN BONE MARROW, SIGNAL = 3.6; EXPRESSED IN ADULT LIVER, SIGNAL = 2.7; EXPRESSED IN HEART, SIGNAL =   2
tgatgtgtagggaagggagggggcctgaataatccctgaggagtagtagaatagcagatggaacactgagaagttatttccttgaggatagatttccacaatggaaaggaaatgagaggttctgagaggcgggctagtggcttgtactatagcatagcctgcctttgctggtgtgtggcgattaggcctggtggaaccgccatcaataaatcaaccgtgatcagggtgaggaacaggaaagaaggaaatttggggaaatggggtgaatgtcaggtggatcagagagatacagtcatgggggtcaggtgtggtatccagaataatgtgagaggccggattgaagtctgggccaggaacaacggtaattgtgggagactcaacaaagagtgagtacagctgaaggagccgggaagcagaaagtatatgggtcaggtatgaggaagaaaataggttttggaagttatgagaactgtagagagtgagttgagcatagtttgtgatttttagggcctctaaaagtattaaagcagcggcagctgctgcacacagacatgagggcta

SEQ ID NO: 7246 - DNA, 538 bp, Homo sapiens
  MAP TO AL078646.29; EXPRESSED IN ADULT LIVER, SIGNAL = 1.9; EXPRESSED IN BRAIN, SIGNAL = 2.1; EXPRESSED IN LUNG, SIGNAL =   2; EXPRESSED IN PLACENTA, SIGNAL = 1.5; EXPRESSED IN HELA, SIGNAL = 2.3; EXPRESSED IN HEART, SIGNAL = 1.8; EXPRESSED IN FETAL LIVER, SIGNAL = 2.3; EXPRESSED IN BONE MARROW, SIGNAL = 2.7
gcatctcctccctagcaatgatagtcctagatggcatcttcttccaatagaaggctgctgtagggtagccaccttcatcagggatctcagttagatcttctgggtaacttgctgcagcttctccatcagcacttgctgcttcaccttgcacgtttatggtatggaggtggcttcttcccttaaacctcatgagtcaacctctcctagctttcagctcctcttctgcagcttcctcacacacggttagctttcatagaattgaggagagtaagggccttgctctggattaggctttggcttaagggaatgctgcagctcatttgatcttctatccagactgctcacaccttctccgtatcagcaataaggctgtttggctttcttatcgttcatgtgttcactggagtagcacttttaatttccttcaagaacttttcctttgcattcacactcagctaactggccttcctcactaagcttaatcattatcagcttttgatttaaggtgagagatgtgccgctcctcctttcacttgaa

SEQ ID NO: 7247 - DNA, 597 bp, Homo sapiens
  MAP TO AC015649.5; EXPRESSED IN LUNG, SIGNAL = 2.9; EXPRESSED IN BONE MARROW, SIGNAL = 2.3; EXPRESSED IN HEART, SIGNAL = 2.2; EXPRESSED IN PLACENTA, SIGNAL = 2.5; EXPRESSED IN ADULT LIVER, SIGNAL = 2.4; EXPRESSED IN HELA, SIGNAL = 2.6; EXPRESSED IN FETAL LIVER, SIGNAL = 2.1; EXPRESSED IN BRAIN, SIGNAL = 2.2
actgcagcttgtggtctgtgggtatccctgggatggcgtcaaaggtatgggcctgagggacctgctggcctcctttcctggcgctcccaggcctctcagagggcttgttgccttgcagaattgcaggctgagcggagctgcaggtccgcggaaggccagctcgctgacaagccttccagtgtgtgtcctgagggacgccaacgcgctgtctgctggggacaggacgctgcacgcacacagcagattagatgttcagaagttgtgtgttggcggggggtgtttttttctttcagtattatttttcttttataaaaattttttatttttaattattatggatacataatagaaaaaaaggagttcctttgacatggccgcactctccttcaaccgcacatctcagtgtcacctgcccccttcctgcgccactccaatcacaccagccagtgctggtggtcttctttttaaatgtttttctttttatagattgagggggtatgagtgcagctttgttccatggatacattgtgtagtggtgaagcctgggctgttagtgtggccatcacccgaagagtgggcatcccatccaaaggataa

SEQ ID NO: 7248 - DNA, 513 bp, Homo sapiens
  MAP TO AC018761.2; EXPRESSED IN PLACENTA, SIGNAL =   7; EXPRESSED IN FETAL LIVER, SIGNAL = 6.9; EXPRESSED IN BONE MARROW, SIGNAL = 6.8; EXPRESSED IN HEART, SIGNAL = 6.5; EXPRESSED IN ADULT LIVER, SIGNAL = 7.1; EXPRESSED IN LUNG, SIGNAL = 7.9; EXPRESSED IN HELA, SIGNAL = 8.1; EXPRESSED IN BRAIN, SIGNAL = 6.8
tttgagctgctaagtgtgtggtcatttgttatagaatgaccacaatagaacaatagaaaacaaagacagcactgagagctatgcacataacccaaggcccccggatgcaagcgcacatgtgcacaagggtaccacagggtaggcgcactgacctgcgcatttaccagccggatgagcttgtcaaggttcttgaaccacatgttggcattctcatattggaagtccgagcccatggtcatcacagtgtggttggtgcggtaataccggccctgcaggcaagaggggagtcctgaagccagaggatcctgggccatccctgtgtatagctgtgttttgatgtatatggggtcaaggatgttgggtgcacaggcatgggtgggggtatggcacttgggagcgtggggacacagataaaagtagccaccagttgttgagcagttctcttggacccactacctagaagagggcatccagtcaccatgccatgctatctcttgcccagcctatgctatc

SEQ ID NO: 7249 - DNA, 542 bp, Homo sapiens
  MAP TO AL138811.1; EXPRESSED IN ADULT LIVER, SIGNAL = 3.5; EXPRESSED IN LUNG, SIGNAL = 3.5; EXPRESSED IN HELA, SIGNAL = 5.6; EXPRESSED IN BRAIN, SIGNAL = 3.3; EXPRESSED IN PLACENTA, SIGNAL = 2.9; EXPRESSED IN HEART, SIGNAL = 3.8; EXPRESSED IN FETAL LIVER, SIGNAL = 3.6; EXPRESSED IN BONE MARROW, SIGNAL = 3.5
tggacctcatggaggaaaacctgtggctcttgtgggattgccaagatggatgaggtgagggaggggtcttcaacattatttgaaatagttgttgaatacagtatttccgttttagtttttcagaaagaggacagaatttgagattgtgctttgtcattcgtagtcagttttataatagagcaatcctcaacaggctgctgagcttcgtgcttatctgaaatctaaaggagctgagatttcagaagagaactcggaaggtggacttcatgttgatttagctcaaattattgaagcctgtgatgtgtgtctgaaggaggatgataaaggtttgtttttaatttttttctaatatttcctaataaaatcttttaaatttttcttgtgaattatagagtcgtccctcattatctgaggcaaggaggatttggaaccctcagatacagaaggctgactgtatttatatgttttgaatttcagactacaggacttttaaatagataggtagtggttgtatgtattttgggggcacaggtgatattttg

SEQ ID NO: 7250 - DNA, 580 bp, Homo sapiens
  MAP TO AC005297.1; EXPRESSED IN PLACENTA, SIGNAL =   2; EXPRESSED IN FETAL LIVER, SIGNAL = 1.8; EXPRESSED IN BRAIN, SIGNAL =   2; EXPRESSED IN BONE MARROW, SIGNAL =   2; EXPRESSED IN HEART, SIGNAL = 2.1; EXPRESSED IN LUNG, SIGNAL = 2.1; EXPRESSED IN ADULT LIVER, SIGNAL = 2.3; EXPRESSED IN HELA, SIGNAL = 2.9
ttgtgatgagaaggcacctggagcaatatcattgaccttggccaaatattccaggactttcatcttgctggtttcagtataggctcttggaccccaaaggaattgatagtgtgcaggataactgcagggcacctggtggtactccaggtacgttagcctcacgaaatcctgagtgatgagcttcctgggctctccatagatgtagtacttcttcccatcatatatttgcatcatatccagaaatttccaggtatcttccttgttggcacagttgcctttcaggaagatcacaaccaggaaagtcatgaggagaccagtcttgggtaacactttgccaacatgaatcctcccattgttggggagtttcagcttgctgacaaggtcatataagtgacaagttgggttgacttccttcaagtcaactgcaaagacaacctcaatgtgctcagaagctcttctgtgaatctcagcaaactggttttggtatcttgggttgacaatcttcagcatatcttccttcaaaatacgctgtttcattttgaacttgtagagcaggaactgctccaacaaacccacctta

SEQ ID NO: 7251 - DNA, 503 bp, Homo sapiens
  MAP TO AC016549.4; EXPRESSED IN ADULT LIVER, SIGNAL = 3.4; EXPRESSED IN LUNG, SIGNAL = 3.6; EXPRESSED IN HELA, SIGNAL = 4.6; EXPRESSED IN BRAIN, SIGNAL = 2.8; EXPRESSED IN PLACENTA, SIGNAL = 3.4; EXPRESSED IN HEART, SIGNAL = 3.3; EXPRESSED IN FETAL LIVER, SIGNAL =   3; EXPRESSED IN BONE MARROW, SIGNAL = 2.9
ttttgcatcatttggctttgtgatgtcattggatagctgatggattgttttaaattttatcctatataaaactgcctctgagtaaaactgtggtgtgtgaatgaatgtctgggcatgtgtgtaatgtgtgtacatgtacgtgtgtgcctgtatgtgcacacacatgtatccaaggacagcatctgtggcacagcctaggccaaacctcagatcgtgaagaatcactcatttcttttgtgggcaggtcagccaagatgggaagtcgctccttgacaagctccagcggcccttgactcccggcagctccgattccctgacagcctctgccaactactccaaggccgtgcaccatgtcctggatgtcatccacgaggtgctgcaccaccagcggcagctggagaacatctggcaacaccgcaaggtccggctgcatcagaggctgcagctgtgtgttttccagcaggacgttcagcaggtcagtttcgcctcatgcccttctgcat

SEQ ID NO: 7252 - DNA, 566 bp, Homo sapiens
  MAP TO AC019278.3; EXPRESSED IN BONE MARROW, SIGNAL =  13; EXPRESSED IN LUNG, SIGNAL = 4.4; EXPRESSED IN ADULT LIVER, SIGNAL = 6.4; EXPRESSED IN HELA, SIGNAL =  13; EXPRESSED IN PLACENTA, SIGNAL = 4.7; EXPRESSED IN HEART, SIGNAL = 5.1; EXPRESSED IN FETAL LIVER, SIGNAL =  15; EXPRESSED IN BRAIN, SIGNAL = 5.9
aaaccaccgataagtgcctgaggaatcattttgagcaatggggaacgctcaagaactgtgtggtaatgagatccaaacaccaggtattccagaggctttgggtttgtctcatatgccaccgtggaggaggcagatgcagccatgaatgcaaggccacacaaggtggatgaagagttgtggaaccaaagagagctgtctaagaagattctcaaagaccaggtgcccactcaactgtgaaaaagacatttgttgctggcattaaagaagacacagaagaacatcacctaagagattattttcaacagtatggaaaaatggaagtgattgaaatcatgactgaccgaggcagtggcaagaaaaggggctttgcctttgtaacctttgacaaccatgactctgtggataagactgtcgttcagaaataccacactgcaaatgaccacaactgtgaaggtaggaaagccctgtcaaagcaagagatggctagtgcttcatccagccaaagaggacatagtagttctggaaactttcgtggtggccatggaggtggttttggtgggaatgac

SEQ ID NO: 7253 - DNA, 580 bp, Homo sapiens
  MAP TO AC023114.3; EXPRESSED IN ADULT LIVER, SIGNAL = 1.3; EXPRESSED IN BONE MARROW, SIGNAL = 1.4; EXPRESSED IN LUNG, SIGNAL = 1.8; EXPRESSED IN BRAIN, SIGNAL = 1.4; EXPRESSED IN PLACENTA, SIGNAL = 1.5; EXPRESSED IN HEART, SIGNAL = 1.2; EXPRESSED IN FETAL LIVER, SIGNAL = 1.3
tttcagatggggaaatggaggcataaaagggggaggcatgtggcctgagactcttacaggcatgggacacgtccttttctggatcctgcagcccagtcttttctccacatcccagggacttgctactcttcataacatctcctgtgttcacagcagcatacgtgtacctgctgctgtcgtcatttgtgataactgcacaccgctggccgcagcccggctcagagagactcatgacctgattctgagggactggtaggagcagacgctgtggagcgtgtttgcaaggggccaggctctcctctgtgtgcggtgaattcagttgctcctcgtgactcccgtgaggaaggcattgctattatccccatgtcacagacgaggactctctggcacacgaagggagaagagtttggtccacatcacacaccccagagtggcagaaccaggataggaacccacacagtcgggctttgacaaggtgttcttagcttctatgtgatgtggcttccgagtcagctcagctggtgttcctgaatcaggtctattgcgaaggagcatgtaaggttccaggagagtgcaggag

SEQ ID NO: 7254 - DNA, 589 bp, Homo sapiens
  MAP TO AC008468.4; EXPRESSED IN LUNG, SIGNAL = 5.3; EXPRESSED IN PLACENTA, SIGNAL = 5.7; EXPRESSED IN FETAL LIVER, SIGNAL = 4.6; EXPRESSED IN BRAIN, SIGNAL = 4.6; EXPRESSED IN HEART, SIGNAL = 4.5; EXPRESSED IN ADULT LIVER, SIGNAL = 5.3; EXPRESSED IN HELA, SIGNAL = 5.7; EXPRESSED IN BONE MARROW, SIGNAL = 4.1
tgctggacgagaatgacaacgcgccggcactgctggagcctcgggtgggtggcactggtggcgcagcgagcaagctggtgccgcggtctgtgggcgcgggccacgtggtagcgaaggtgcgcgcagtggacgccgactcgggctacaacgcgtggctttcgtatgagctgcagccagctgcaagcagccctcgcatcccgttccgcgtggggctgtacacgggcgagatcagcaccactcgtgtcctggacgaagcggactctccgcgccaccgtctgctggtcctggtgaaggatcatggtgaacctgcgctgaccgccacggccacggttctggtgtcgctggtggagagcggccaggctccaaaagcgtcatcgaggcagtcggctggcgttttgggtccggaagcggcgctggtggatgtcaacgtgtacctgatcatcgccatctgcgcggtatccagcctgctggtgctcacgctgctgctgtacactgcgctgcggtgctcagcactgcccactgagggcgggtgccgggcgggcaagcccactctggtgtgctccagtgcggtggggagctggtcatactc

SEQ ID NO: 7255 - DNA, 549 bp, Homo sapiens
  MAP TO AC015493.4; EXPRESSED IN PLACENTA, SIGNAL = 5.3; EXPRESSED IN ADULT LIVER, SIGNAL = 4.4; EXPRESSED IN HEART, SIGNAL = 5.6; EXPRESSED IN FETAL LIVER, SIGNAL = 4.6; EXPRESSED IN BRAIN, SIGNAL = 5.3; EXPRESSED IN LUNG, SIGNAL =   5; EXPRESSED IN BONE MARROW, SIGNAL = 5.6
tgcaataaatctcgctgctgcttactctttgggtccatactgcctttatgagctgtaacactcactgcgaaggtctgcagcttcactcctgaagccagcgagaccatgaaccccccgggaggaatgaacaactccagatatgccaccttaagagctgtaacactcaccgcaaaggtctgcatcttcattcctgagccagcgagaccacaaacccaccagaaggaagaaactccgaacacatccgaacatcagaaggaacaaactccggacacgccacctttaagaactgtaacactcaccacgagggtccacggcttcattcttgaagtcagtgagaccaagaacccaccaattccagacacactagcttccagaggacatttctagacacactttgggccagaagggacccactgccttgaagttaagaacccagtcctggaaggattcatcatctgctaactaaagtacccttgggcccgaaataaccaacagcggtagacaggctgtactcaccttgatgagtactgggtctcacctttggtcaga

SEQ ID NO: 7256 - DNA, 600 bp, Homo sapiens
  MAP TO AC020919.3; EXPRESSED IN LUNG, SIGNAL =   2; EXPRESSED IN PLACENTA, SIGNAL = 1.7; EXPRESSED IN FETAL LIVER, SIGNAL = 2.1; EXPRESSED IN BRAIN, SIGNAL = 1.7; EXPRESSED IN HEART, SIGNAL = 1.9; EXPRESSED IN ADULT LIVER, SIGNAL = 1.6; EXPRESSED IN BONE MARROW, SIGNAL = 1.6
ctacctggcttccagctcactgttttctcagaccttcattcttttgttgcttccacagataattctatcacctggcttttagaacaaggccattcctgctctagtatgctgacctgctcaaagccacattttacccagagtctagcccatcctcacacctaacatctatccagactcttatccaggcctggatttcacaggcccagtgccaacacaacatgcacaaccagtggccgtctgtgtctgcagggtgacactagtcttttccacttctaccaatagtctgattagtcaacaaggctctaagacacttccaaccccatatgtcttacacagtaatttgttctattttcatagatactctgcttagaattagtattatttataccttgtcaattagtgtgtttatcatcacttctctgataacaatagaaatgtatccccgtgaagagaatatgtttacaaggtattaaagaattgtttttaaatttgttttcaactctctatgatatatattccattaaaattctctgatgccatacttgttcctcttcctaaaaataagacatcaacttggcatgagaccataacccaactgcc

SEQ ID NO: 7257 - DNA, 542 bp, Homo sapiens
  MAP TO AC018761.2; EXPRESSED IN ADULT LIVER, SIGNAL = 3.1; EXPRESSED IN HELA, SIGNAL = 3.6; EXPRESSED IN LUNG, SIGNAL = 3.3; EXPRESSED IN HEART, SIGNAL =   3; EXPRESSED IN BRAIN, SIGNAL = 3.1; EXPRESSED IN BONE MARROW, SIGNAL = 2.9; EXPRESSED IN PLACENTA, SIGNAL = 2.9; EXPRESSED IN FETAL LIVER, SIGNAL =   3
tcctccaactattgggcaactcaaataaaagacatatcccctccactggaaacgctgcccccgtctagtaccgcgttggttctacaagccacgcccctccgcgtccctagaaattccgcccggtcctcaccatggcattgacttgctgtacagcgcgcccgaagttggttgcttggaagccggtggtgccgaaggcctccagcagtgcgcggtaattcacaccgcggttgaagtcgtagccccggacctgggtgctttcgggcggcaacgtcgagctgtgctttagcacggcggccagcgcccccgctggcgcctcccgttccagggaaccttccatgcgcctatagccggctctcgagtcaaagctgcccctaggccgggcttacggcggcccagaaacgcgttaaaccccgacgcgcgcgtctccgcaagagcacaggaagtagggaacgtgctttgggcgaaagaccggaagttggtttatcacgtgaccatttttagcccctgtaaaccaggtcgccgccatttttgtgcgtgtgttc

SEQ ID NO: 7258 - DNA, 541 bp, Homo sapiens
  MAP TO AC018684.2; EXPRESSED IN LUNG, SIGNAL =   8; EXPRESSED IN HEART, SIGNAL = 7.2; EXPRESSED IN BRAIN, SIGNAL =   7; EXPRESSED IN PLACENTA, SIGNAL = 6.9; EXPRESSED IN FETAL LIVER, SIGNAL = 7.2; EXPRESSED IN ADULT LIVER, SIGNAL = 7.4; EXPRESSED IN HELA, SIGNAL = 9.9; EXPRESSED IN BONE MARROW, SIGNAL = 7.1
actgatgtcctgcaccacccaccagattgggagctgcagcctggttcatcgaagccagccatggtgaggtttctgctgaagatcttcatggttatccacagaatctctttctcaatgtctgaagaacatcttacctatttaatcagcacttgtacaacattaacaacaacttcatccttgtgtactgatcataagtgcacacacatcacaactgttgtccttcaagtcttaccatcagctttccaacctttcagaagaatttctccaatacttcccagccaaagccattgttccaaacccgcaggtggcttggcactcagcacccagcggaattctagattcttcagctcacttccttcccttggccgcactcttgacccaagcctaagcagaaagcacctcgaggcagagattgtattcatctttggcacaatttcatccattgtgcttggccctagatgtctcttcccttagataaatattaaataataacaagacaatgactgttctttcctctggagggaaggggatgttttccact

SEQ ID NO: 7259 - DNA, 523 bp, Homo sapiens
  MAP TO AC006054.2; EXPRESSED IN ADULT LIVER, SIGNAL = 1.2; EXPRESSED IN LUNG, SIGNAL = 1.3; EXPRESSED IN PLACENTA, SIGNAL = 1.2; EXPRESSED IN BRAIN, SIGNAL = 1.3; EXPRESSED IN BONE MARROW, SIGNAL = 1.2; EXPRESSED IN HEART, SIGNAL = 1.2; EXPRESSED IN FETAL LIVER, SIGNAL = 1.4
gtgacttggactggagggaggaggagagcactgcatacggtcattcaactcaatattttctcaatgattaaatataaatttcacacaaagtaaaatgccatatttttccaccctttattcctcttattttctcacaccaggatctcgttcaacgagaaatgctagaatagggagtttcttttatgaggcaacaaaagcaccaaaatcaagagaggcacagagattagagcattttgtgaaagccacaacatgcaaaaatgcagaagtgagaggaacatctagaaggaaaaatggcaaaaccaaaggtggccagagaaacgtatggaggcagggtacagaatgagggagagaagagccaccatcaagatcaaatgaggagcaggcaagtagaaggcctaggcaacaactggaatatcaagaatcctctaagcttttccacaatttcaggatatggggcatgcaggtgggttacctgagtttgaagggccagggccaaaacaaaagaggtgcatgtgtatgtgca

SEQ ID NO: 7260 - DNA, 553 bp, Homo sapiens
  MAP TO AF241728.1; EXPRESSED IN PLACENTA, SIGNAL = 2.4; EXPRESSED IN ADULT LIVER, SIGNAL = 4.3; EXPRESSED IN HELA, SIGNAL = 6.6; EXPRESSED IN FETAL LIVER, SIGNAL = 2.8; EXPRESSED IN BRAIN, SIGNAL = 1.6; EXPRESSED IN BONE MARROW, SIGNAL = 2.9; EXPRESSED IN LUNG, SIGNAL = 2.5; EXPRESSED IN HEART, SIGNAL =   2
aggcagttcaggtctcatggtgacttgatgacccatagtcaaacgttcagtttccaccaaatcccagtaacaggccaagaactgtctctcaaaaggagagtagttatttgcagaagatggcagggccttgctccaaaatcctagagacctccgctgtgattcacctatgggagcctgccaaaggctccaaacagcaaccctatctgccactgacacctcaagcaccattggatctactgggtcatatggcccaagtggcagagcagcttgcacagcagcctggacctgttgcagagccttctcctgttctggaccccactcaaaactggtagcctttcagctcacttgataaatggactggagtaacacagtcagcaaacaaagaaaaaatcatttcagaaacaaagattcagagtaacacaagaatgaatataaaccatgtaaagtacagtaagggaaagagaagataggaaaaaatgaaacaaacagaaataaaattcctctgtgaaaaagcaaatttcctcatctccatcctcttgaatcttgcttgacg

SEQ ID NO: 7261 - DNA, 552 bp, Homo sapiens
  MAP TO AL161670.1; EXPRESSED IN HEART, SIGNAL = 1.8; EXPRESSED IN BONE MARROW, SIGNAL = 2.3; EXPRESSED IN LUNG, SIGNAL = 2.1; EXPRESSED IN ADULT LIVER, SIGNAL = 1.8; EXPRESSED IN BRAIN, SIGNAL = 2.2; EXPRESSED IN PLACENTA, SIGNAL = 2.1; EXPRESSED IN FETAL LIVER, SIGNAL = 2.6
gagctttctggtaagcaccgtaaagtctgatgggcaaattctaaaagagttgtagcacttagaatattccattctgattgagaatttacactagtatattcattactataaacatcaaaatattaggggcaagtcaacacttaccaagatgtctaaatggtgaatgtgcagatgggattggagatttcaagacctgagaacttaaaaaaaaaatatttcgaaccagtacgacatctatatttccaatcattgttggggggaaaaaggcatcaatcagatttttttcactgttataataactttaatttatcttgcattttacagaagtctatgaacaattttaaaaaagcacctccttatcccatagcacgtttctctgatagttgttaaagtaggcaaggagtatgtcaacagcttcagcatcagcgtcttgcaaggatttcagaccaaccaaccactctccaaacaacttggcagcttttttatcttgtttttaatacaatggtatatccactctaatggcaaacctgtccagccacatctccacaacat

SEQ ID NO: 7262 - DNA, 593 bp, Homo sapiens
  MAP TO AC022470.3; EXPRESSED IN PLACENTA, SIGNAL = 1.9; EXPRESSED IN HELA, SIGNAL = 2.4; EXPRESSED IN LUNG, SIGNAL = 2.1; EXPRESSED IN ADULT LIVER, SIGNAL = 2.3; EXPRESSED IN FETAL LIVER, SIGNAL = 2.4; EXPRESSED IN BRAIN, SIGNAL =   2; EXPRESSED IN BONE MARROW, SIGNAL =   2; EXPRESSED IN HEART, SIGNAL = 1.8
cccaagctgctggtttactctgcggtgagtgcctgcgctccctagcgtgctgtgtcaggcaaggagctggatttcttctctgttcggttcctgcgggtgtggggaacaatgctgacgggcagcccctctcccccgcagcacgacactaccctggttgccctgcaaatggcactggatgtctacaatggtgaacaagccccctacgcctcctgccacatatttgaactgtaccaggaagattctgggtgagtggagctagcagtgtcctctggaggggggccctcgggaggtggctcggggcagcccaaggaccccatgatgggcaggctgagcagctcccatgttgcctcctgtcgaccctcaggaatttctcagtggagatgtactttcggaacgagagtgacaaggccccctggccgctcagcctgcctggctgccctcaccgctgcccactgcaggacttccttcgcctcacagagcccgtcgtgcccaaggattggcagcaggagtgccagctggcaagcggtcctgcagacacaggtgagctgtcaccggcctccttgctagtcatgccctagaccagcctgcagttc

SEQ ID NO: 7263 - DNA, 505 bp, Homo sapiens
  MAP TO AC007957.34; EXPRESSED IN PLACENTA, SIGNAL = 2.7; EXPRESSED IN ADULT LIVER, SIGNAL = 1.6; EXPRESSED IN HELA, SIGNAL = 2.8; EXPRESSED IN BRAIN, SIGNAL = 1.4; EXPRESSED IN BONE MARROW, SIGNAL = 1.2; EXPRESSED IN LUNG, SIGNAL = 2.2; EXPRESSED IN HEART, SIGNAL = 1.5; EXPRESSED IN FETAL LIVER, SIGNAL = 2.1
tgatgtctgccaacctcaaggctgcagaggaggagctggtcttccagaaaaggcagttgctaagagtgtggggctctcaggacacccatgatttctacctcagcgagtgcaacaggcaagtgggcaatatccccgggcgcctagtggctgagatggaggtggggacagagcagactgataggaggtggcgttctccggcccaagggcacctgccttctgtggcccacctcgaggactttcaggggctcaccatcccccagggttcctccctggtgctccaggggaactccaagagactcccactgtggactccaaagatcatgatagcagctctggactatgatcctggggatgggcaaatggggggccaggggaagggcaggctggcgctgagggcaggagacgtggtcatggtttacgggcccatggatgaccaaggattctattatggagagttgggcggccacaggggcctggttcctgcccacctgctggatcacatgtc

SEQ ID NO: 7264 - DNA, 596 bp, Homo sapiens
  MAP TO AC016575.4; EXPRESSED IN LUNG, SIGNAL = 1.9; EXPRESSED IN PLACENTA, SIGNAL = 1.5; EXPRESSED IN HEART, SIGNAL = 1.7; EXPRESSED IN BRAIN, SIGNAL = 1.5; EXPRESSED IN FETAL LIVER, SIGNAL = 1.7; EXPRESSED IN ADULT LIVER, SIGNAL = 1.6; EXPRESSED IN BONE MARROW, SIGNAL = 1.5
aggtaacccacgtcaagcacccagcatagtatggcacatagcatataagtgataagtactacctgttgctgtgcttgttcttatttttattactaattattatttgtccaggaactttacacatcctgcctttcgtcctggcccttcacctgttttagctctttcactgccaagcccaatcttctccactgggactctaagaacaataagaagaaagaaatagagattactatggcaagaaagaatgtcactggctaggcctcctacattgttactgagtctgcttctgccagatacacataaaacgtggggtgaatgttggactcaatggacgccaggatctccatcaaatgacctgaatgtacttttggggcagccacaattcaaataatgtgttctgtgatcttttaatagaccagcccaaacttaaatatttctgcctccaattacacctcccagactgactctaaaaagtagcaaaaattgtactttttgttcagaaaacacaatcaaccttctctgtaatgactattatgctgttttggagactgaacacatttaaatatatgaaattttgtgggaaaaaggtaagccct

SEQ ID NO: 7265 - DNA, 548 bp, Homo sapiens
  MAP TO AL132866.21; EXPRESSED IN LUNG, SIGNAL =   3; EXPRESSED IN PLACENTA, SIGNAL = 2.6; EXPRESSED IN HELA, SIGNAL = 2.5; EXPRESSED IN HEART, SIGNAL = 2.5; EXPRESSED IN BRAIN, SIGNAL = 2.9; EXPRESSED IN FETAL LIVER, SIGNAL = 2.5; EXPRESSED IN ADULT LIVER, SIGNAL = 2.6; EXPRESSED IN BONE MARROW, SIGNAL = 3.1
aaacaccctacaatgcctggggcagcccccgacaagaaagacttatttggcccccaaatcaatagtccacactggccaatagtgcgaaggttgagaaatcctgatttactggtttcttactccaatgtcttaaattctgggattatgataatcccacatgttaccatccatccagagaagcacccgattcttcaccaaaggaatgtgtattaataatcctgaaggacagccttcagcttaatcttctttcctgagaggcactttgctgcgtgaatgactaaacggaggagtgaatgaacttgggaacggccccgatgaagaggtgagtcagactggctcagcccacaggcttccatcatgtttatggaagccaggccccatacgctccacataagaacgggccccttgttcctgaatgatgcgttttgttgatctgccagtgggtcccgcctctccccaggtcaccgacagagcccgtctcagcgccgtctcgccgtgctgagtctaagagttatgcagagagccctccaaaaacccaccctttgaaa

SEQ ID NO: 7266 - DNA, 584 bp, Homo sapiens
  MAP TO AC022392.3; EXPRESSED IN PLACENTA, SIGNAL =   1; EXPRESSED IN ADULT LIVER, SIGNAL = 1.2; EXPRESSED IN BONE MARROW, SIGNAL = 1.1; EXPRESSED IN LUNG, SIGNAL = 1.3; EXPRESSED IN HEART, SIGNAL = 1.2; EXPRESSED IN FETAL LIVER, SIGNAL = 1.1; EXPRESSED IN BRAIN, SIGNAL =   1
ttcgccttttactcccagagttttattttgtatttcttagactttgctgattttccctgtaggaatttatccaatggaattaatcagaaatatggggacaaatatctatatgaagatcccgattacagtattgtatataacagtaaatactggcggcagtctaaatggtcatcaaaatcaaattgatggaaaataaactgtagaacatctgtagaatagagaatactgtgggttgactaaacattatatcttgggaaagtattcactgtagattattatgtgttaaaaagagattacaaagcaatttgtatactgacttctatctcaaaagtgggaagagagagcaatagaagaataagtcagcctggatacataaacaatttaccagtcgttatttgtggataacaagtaatttttttcttttagcttgtctgatatatatctatatatatctgtatatctatatctctatgtctatatctatatctatctatctatctatctatctatctatctatctatctatctatctataaacaatttgatgttatacttggtatacttggtcagctccaggttagtgg

SEQ ID NO: 7267 - DNA, 576 bp, Homo sapiens
  MAP TO AC016549.4; EXPRESSED IN ADULT LIVER, SIGNAL = 3.5; EXPRESSED IN HELA, SIGNAL = 3.8; EXPRESSED IN LUNG, SIGNAL = 3.6; EXPRESSED IN PLACENTA, SIGNAL = 3.2; EXPRESSED IN BRAIN, SIGNAL = 2.9; EXPRESSED IN BONE MARROW, SIGNAL = 2.9; EXPRESSED IN HEART, SIGNAL = 3.1; EXPRESSED IN FETAL LIVER, SIGNAL = 2.8
gcccaccagagggatagaactcaaagaataaagccatgaggaatcgcaaaatgtttttgaacaaaggaaaatatatgtaaagtggtgtgttaggaagaattatcctctgtaggatgggtcagtggcgtcgagtcaggatcagatgggaaactcttatctagggttggccgatgggcatttttaaaattgttgaaaatactaataatgctttcttgtgcatcagtttttatttttcttttaaattgatttgcctcccttttttcatgttgtagggtttgatgaaaacattgagtctcagggagaactcatcctacaggaatccttccaagtgtgggacccaaaaaccttaattcgaaagggtcgagaacggcatctcttcctttttgaaatgtccttagtatttagtaaagaagtgaaagattccagtgggagaagcaagtacctttataaaagcaaattgtttgtaagtataggcgttcagaattgtaagtctaaaggtaacacaattgcagtctttttgtaggtagagaagaattgttcattgtcttcagtttaacctcccaatctgtcctgaaa

SEQ ID NO: 7268 - DNA, 586 bp, Homo sapiens
  MAP TO AL121828.6; EXPRESSED IN BONE MARROW, SIGNAL = 2.8; EXPRESSED IN PLACENTA, SIGNAL = 2.5; EXPRESSED IN ADULT LIVER, SIGNAL = 2.5; EXPRESSED IN HEART, SIGNAL = 2.1; EXPRESSED IN FETAL LIVER, SIGNAL = 2.4; EXPRESSED IN LUNG, SIGNAL = 2.7; EXPRESSED IN HELA, SIGNAL =   3; EXPRESSED IN BRAIN, SIGNAL = 2.9
tgccactgcatgtgtagaccaatttgagcttctcattcatctgttgatggacacatgagttgcttctaccttttagctattgtgagtaatgctgctatgaacatgtgaacatggctgaacacatacatctttgagactctgttttcaaatcttttggatatatacccagaattgaaatttctgaatcatatggtaattctatttttaattgtttgaggaaccactgtatggtttttccatagcagctgcacaattttacattcctaccaacagtgcaaatgggttccagtttctccacattttctccaacatttgttattctcctcctcctcctccctcctcctcctcctcctgctcctcctcctcctcctcctcctcctctgctgactgatcagggtgatggttgctgaaggttggagtgagtgtggcaattcctgaaaacaatgaaatttgctacatgaattgactcttcctttcatggaagatttcttggtaacatgtgacactgtttggtaacattttactcacagtacaacttcttttaaaagtgaagtcatttctctcaaaccctgctgctgctttatca

SEQ ID NO: 7269 - DNA, 556 bp, Homo sapiens
  MAP TO AL138934.2; EXPRESSED IN PLACENTA, SIGNAL = 1.3; EXPRESSED IN ADULT LIVER, SIGNAL =   3; EXPRESSED IN BRAIN, SIGNAL = 2.5; EXPRESSED IN BONE MARROW, SIGNAL = 4.7; EXPRESSED IN LUNG, SIGNAL = 2.9; EXPRESSED IN HEART, SIGNAL = 1.5; EXPRESSED IN FETAL LIVER, SIGNAL = 2.8
attagagagtgcccaagggggttcagcgtaattacttgcttggttggcaagtttttgggctctatccttgagtttttttatgttgtcatacaccaggccagattgatttaggtaaaaacaacactcctcatttaagaatatgcagagtcctcctttttcagcattgagtaagtcaaggcctcggcggttttggaggacaactgcagctaaagagtcaacttgggcctggaggactgataaagtttgtgatatgtgtgtgatgctagcagagaagtcattagacaggctacagaaggtcatgacagacgttgaaatgcctgctattccagtaccgagagcaatcatggaggcagaaagtcctaaaccgaccatcaagggaattagtggaataactcttttttgtcatgtcggtgtcatgaggggaacagggagctcttcggtcccatttgcaaattgaattttgggggtaaggaagactagtgtacatgtggctgtccaattggcaggtagacacatgtaggtagaggatccacagaggaagaagagaccttgtgcg

SEQ ID NO: 7270 - DNA, 500 bp, Homo sapiens
  MAP TO AL162263.1; EXPRESSED IN LUNG, SIGNAL = 1.8; EXPRESSED IN PLACENTA, SIGNAL =   2; EXPRESSED IN HEART, SIGNAL = 1.7; EXPRESSED IN FETAL LIVER, SIGNAL = 1.8; EXPRESSED IN BRAIN, SIGNAL = 1.5; EXPRESSED IN BONE MARROW, SIGNAL = 1.4; EXPRESSED IN ADULT LIVER, SIGNAL = 2.6; EXPRESSED IN HELA, SIGNAL = 2.2
cacccaatctcaacatgcagaactcaggatctttacccctcgtgcctgttgttcctccttcattccctccctaagtaaatggcaccagcctcttcctacgtacacctggcaccaacctgggggaggtgccccaacatcaccccttccctctcctcacccaatggattctctctctggccactcaactctgacccctcctctccatctccatgggcaccatcgtctctcgttccctgattactgcaagatgctcttaattcttatctccaccaaaatgtcttctatagagcagccaaactgatctgaaaaacccaagtctgatcctgcttttctctgctttaaaagacttatcactccatctctgctgtccagatgaagccccaaaacctcaacgtgacttacaaggccctccaagatctggccctgcttcctgccacggccccgtctctcattcctcggacacttgctcccgtgttttggccattctggtgaagcacaga

SEQ ID NO: 7271 - DNA, 524 bp, Homo sapiens
  MAP TO AP001442.1; EXPRESSED IN PLACENTA, SIGNAL = 1.8; EXPRESSED IN FETAL LIVER, SIGNAL =   2; EXPRESSED IN ADULT LIVER, SIGNAL = 4.3; EXPRESSED IN BRAIN, SIGNAL = 6.3; EXPRESSED IN BONE MARROW, SIGNAL =   2; EXPRESSED IN LUNG, SIGNAL = 3.3; EXPRESSED IN HEART, SIGNAL = 2.8
ttcgttttctgtgttggctggcacagagtcagccccaaaagaatgccacggctggagatcgtccaggctgaactctccattcacgggaaggagctccacggtggttttcgtttcggtcaaagatggcatgagagcatcgtttccgtaactgatccttggttcactaatcatgttggccaagacgtcatctgaatagttttgctctttctgaagcagctcatctaaaccaaacaaaaccatctctttggtgagtaacaacaatcacaacagcagcagcagcagcagccaccatttacttctgccaggcaagacttcaactgctttcacgtgcatgatcgcgtttagagccatgacataggtaccattatcatctcccttttacagatgtgaaaactgaggcacatggcattcaagctacttatgcaaagtcgcagctcacaagagctgctggcaggactgcaggcaggagcatggcagccggccaatgtgctgcagcgtggcactgctagaggtgaaaggccaca

SEQ ID NO: 7272 - DNA, 512 bp, Homo sapiens
  MAP TO AL138796.2; EXPRESSED IN LUNG, SIGNAL =  12; EXPRESSED IN BONE MARROW, SIGNAL =  13; EXPRESSED IN HEART, SIGNAL = 4.3; EXPRESSED IN ADULT LIVER, SIGNAL = 8.8; EXPRESSED IN PLACENTA, SIGNAL = 4.2; EXPRESSED IN HELA, SIGNAL =  12; EXPRESSED IN FETAL LIVER, SIGNAL = 9.6; EXPRESSED IN BRAIN, SIGNAL = 6.8
ttttacatctgcctgggtccaatgtgctgagagcgggctcaggttgccacaggcatggctggagactaggaatagagccttgctcactgacccatttcatgtctaggcttccaactgagactacagtttcattacaacctatatgcgcccataggtcctgcctgtggcaatgacatctctcaggtcagtaagggccacttggaacaggaatatcacccctatctggaagaccaggtggaggcttatcaccttcatagtaaggtactcactgtccaagtcaagagccaagccaaggtactgttcctccaatgagtaaacagcactgctgtagggctggcctaagtcaggcagttcaagataacctgaaggagtcgaataccatctacccagtgagtcctgcaagacttcaggctctttctcatccagcagctccctgctgagcctggaaaagtaggaaaaagtaaagaataagccagggggaatcagaaaccacacagccccagctagatttc

SEQ ID NO: 7273 - DNA, 568 bp, Homo sapiens
  MAP TO AC022658.3; EXPRESSED IN HELA, SIGNAL =   3; EXPRESSED IN HEART, SIGNAL = 4.3; EXPRESSED IN FETAL LIVER, SIGNAL = 3.4; EXPRESSED IN BRAIN, SIGNAL = 3.7; EXPRESSED IN PLACENTA, SIGNAL = 3.9; EXPRESSED IN ADULT LIVER, SIGNAL = 3.1; EXPRESSED IN BONE MARROW, SIGNAL = 3.7; EXPRESSED IN LUNG, SIGNAL = 3.4
ttttagttgaggcctggtgcccctgagcaaaaaaaaaaaaaaaaaaaaaaaattattaaaactttggaatatttcaaacatacagagaagcataaggaacagaaaaatgaacacttgtgttctcagcacccagtttggacaaatcttaacattttgctcaactgcttcatattcaacgaaataaaacaagaaaatgttacgtacacagttgaagtcacctaactacctctccctaattccatgtgctctcctttcttctcagaggtaaactctatcctgtattgtgtttccaattcccaagcaatttgtatacttttactgcagataaacaacatagagttgtatcgttttgtgtgttttcaaactatgcaattatattattttgcacacatcctataacttgttttttgtcctcgatgtttttagattgatgtagtttatatatgttactctagttaaatccattaatttttttgctatataatatttcattgtatgaatacatttgtttaaccattaacaatttttttaaccattcttcttttattggcatttgggttgcatctaa

SEQ ID NO: 7274 - DNA, 589 bp, Homo sapiens
  MAP TO AL121772.12; EXPRESSED IN LUNG, SIGNAL = 4.6; EXPRESSED IN ADULT LIVER, SIGNAL = 4.7; EXPRESSED IN BRAIN, SIGNAL = 5.1; EXPRESSED IN BONE MARROW, SIGNAL = 4.8; EXPRESSED IN PLACENTA, SIGNAL = 3.9; EXPRESSED IN HELA, SIGNAL = 4.3; EXPRESSED IN HEART, SIGNAL = 5.2; EXPRESSED IN FETAL LIVER, SIGNAL = 4.1
cacgtgggatgaaatgactgaatggcaccccttgtgcgaccttcaggtggccatccagctgaacgacacccaccccgccctctccatccctgagctcatgcggatcctggtggacgtggagaaggtggactgggacaaggtgagcatggaggaaaagggcggcacctccccagagcctggagcccgtgcagaccagggctacaaggagctgagctggggggcctcttccctggccttgggagagctgtgtggtcatcatgcccaggagagacgcgagctgtgggaggggtctggttccaggagacggaggttccgggggccagagtatggggtcagggcgcgggggagatgataaggatagggctgtgacacttctcagggtttcccgttggtgcattctcatcttgaaatttggtgacagctccccaaagcgttaagtgtttagaggtctgtgctctattcatgcacctgccctcgcgattcagtgtattttggacttaaatatgtttgtgtggtaggattttcttaatctaaccgttaccaaatcaacatgtggaaccataaaacaggccaatgtggtgactcacac

SEQ ID NO: 7275 - DNA, 509 bp, Homo sapiens
  MAP TO AL109976.21; EXPRESSED IN LUNG, SIGNAL = 1.9; EXPRESSED IN HEART, SIGNAL = 1.5; EXPRESSED IN PLACENTA, SIGNAL = 1.6; EXPRESSED IN FETAL LIVER, SIGNAL = 2.2; EXPRESSED IN BONE MARROW, SIGNAL = 1.9; EXPRESSED IN ADULT LIVER, SIGNAL = 1.8; EXPRESSED IN BRAIN, SIGNAL = 2.1
tgagatgaggtagggttgggagggggtgcacttccttcctgaatctgggctccctgagctgctactgtcacccctcaggtacgcagagatgcctaaggcggagaagaacgctgtctcccatcgcttccgggccctgctggagctgcaggagtactttggcagtttggcagcttgacttctgcagctggaggaggcccctcaggccggggatctggggagggctagcccaaaacctcccgcatcgggcaggcaccccctgaagtacttccttcagggtttcccctttgtgagggtgtcgagtagcctcaccggcctgtctggaggagcagctggctctgctctgagaaactctggcaagtggacgccattctcttgcccttaggattcactgctctctcctacagccgccaggcctggggtcctgaaaggaccttgggtggtaaagctgtacttggtgggagtgagggcgtggggaggaaccatgcaaatcgccttccatggtttttaaa

SEQ ID NO: 7276 - DNA, 549 bp, Homo sapiens
  MAP TO AL158175.6; EXPRESSED IN ADULT LIVER, SIGNAL = 1.9; EXPRESSED IN LUNG, SIGNAL = 1.7; EXPRESSED IN PLACENTA, SIGNAL = 1.7; EXPRESSED IN HEART, SIGNAL = 1.8; EXPRESSED IN FETAL LIVER, SIGNAL = 1.8; EXPRESSED IN BRAIN, SIGNAL = 1.6; EXPRESSED IN BONE MARROW, SIGNAL = 2.1
ggcctgctgtggtaaagatgtaaaagtttgccattttgaagaataaaaatatgactttatggtttatatcctgaaatcatatgctctattacaccatcagtttctttctcactgagatgagtgctctttttccttacaataagtacatttttctttttatttttactaggatccaagacttcaaagaaaacctataaatttaataaagtttctcctgaaacctacaacaaagaaaacaatgacaaaggaattgcccacaattctgtgactcccagtgaataccacagaagagatggccacactgggctctgctaccagtttttagaatcgtgagacaatgcagtagtagaaagaaaactaagaaaatcaagtttctgggctgctatctgcctgtttcaagcctcagattttgcaaatatctattttatagaatcagcagaagcaagccaataatgtctttatgcagtctacttgaaagcaaaaataacaaagacgccagtcaatactttgaaaatgatgtttatactagcctgggactcattgtttgct

SEQ ID NO: 7277 - DNA, 592 bp, Homo sapiens
  MAP TO AC023296.2; EXPRESSED IN LUNG, SIGNAL = 1.7; EXPRESSED IN HEART, SIGNAL = 1.5; EXPRESSED IN PLACENTA, SIGNAL = 1.6; EXPRESSED IN FETAL LIVER, SIGNAL = 1.1; EXPRESSED IN ADULT LIVER, SIGNAL = 1.5; EXPRESSED IN BRAIN, SIGNAL = 1.3; EXPRESSED IN BONE MARROW, SIGNAL = 1.4
taaacctgcctgacctttgctctggaggagactatctctgagcactttctgctgtgtaacaatctttgaatgattgtctgaaacaaatgccaatccacgcccctattgtctagacacgcagcaagacaggaaatcatggagacctggctcccagcagccacgtgatgccttctgtcaagaattacaaccctgcactcattggcatctgttgcttctacatggctgtttatatcctctatccaggttttactatagtttcaacagagtctgcatttaatatcagcgaatttttcatgctcaggactagaagaccctgagctaagttttaataaaatttattgagcctctgctacatgtcggagcagagaccaagatacaattaagataaaagatctcctcattgagttcttgagttcttcgcagaaacatgcatatgcgtatataagcagcatgcaatccaagaagtggtgtaaaagaaagtgaccccagtgctaatctataagagcagagttaaatctagacaggatttgtcaaggagtaaatcctagagaagggattacttgagctgagtcctgaaggctcggtagcagtt

SEQ ID NO: 7278 - DNA, 531 bp, Homo sapiens
  MAP TO AF241726.1; EXPRESSED IN ADULT LIVER, SIGNAL = 0.84; EXPRESSED IN BRAIN, SIGNAL =   1; EXPRESSED IN PLACENTA, SIGNAL = 1.1; EXPRESSED IN FETAL LIVER, SIGNAL = 0.92; EXPRESSED IN BONE MARROW, SIGNAL = 1.3; EXPRESSED IN LUNG, SIGNAL = 1.2; EXPRESSED IN HEART, SIGNAL = 1.4
tctggtgttggctcagtcaggtggttgctctccctggaggactccccagggctgatgtctctgaggctgtagaatcctgatttggactcctccagccccatattcccaccatattttgtgaggtgagctcctgggctctcactggctgcctgagggtggggctgatctcagttggagtcagaatctgaggagtcccttgaagaggaagagctggtggattcattatcttcatcctcactgccatcctcctcatcatctttatccttgtcatcctccttattcttgtccctatctttgatctcatcctcaatgctggacttggaggagtccccaccatcagaggagtcactagtctcatcatcttcctcttcttcctcttcatccttgctgtccttctcctcagacttctaattggacttcagggtagtccagctggacttggagttcaggtctcaaagcttagtcatgctcttatgttcattggagatgtactctttgtaaattacatggtcctggggagacagactcttg

SEQ ID NO: 7279 - DNA, 594 bp, Homo sapiens
  MAP TO AC009416.2; EXPRESSED IN ADULT LIVER, SIGNAL = 1.6; EXPRESSED IN BRAIN, SIGNAL = 1.5; EXPRESSED IN LUNG, SIGNAL = 1.6; EXPRESSED IN PLACENTA, SIGNAL = 1.3; EXPRESSED IN FETAL LIVER, SIGNAL = 1.9; EXPRESSED IN BONE MARROW, SIGNAL = 2.2; EXPRESSED IN HEART, SIGNAL = 1.4
gaacctgagaatgcgacctcatttggaataagaatttttgcagatgtaattaaggcaaggatccccagatgaaattatcctgaattaggataagccctaagtctatgtccttatatgagaccagaaaagaagacccaaagacgtgggaaaggcggccatgtgaaaacgaagccagagattggaatcatactgccacaagccaaggaaaagctggagccaccagaagctggcagaggcaaagacggattcttacttagagtcttcaaagggagtgtggccctgctgacccgctgatgtggggcttctgacctccagaactgtgagagaataaatgtctgttgctttaatccaccgagtttgtggtcattcgctgtagcagccctaagaaacaaatacagctgggtccaggtgactttggaacaacctagatttagtgagggaaacaagccgaaatgcaaattggtgatgatcatgagctgtcctttttttgaattgtgtactgcagggaaattctctttaggaagggataatcaccagcttcagggactggaatgttcaggccagcctgtgctgtccatttccagccaaagacat

SEQ ID NO: 7280 - DNA, 567 bp, Homo sapiens
  MAP TO AC022470.3; EXPRESSED IN BONE MARROW, SIGNAL = 1.5; EXPRESSED IN LUNG, SIGNAL = 1.2; EXPRESSED IN HEART, SIGNAL = 6.9; EXPRESSED IN PLACENTA, SIGNAL =   1; EXPRESSED IN ADULT LIVER, SIGNAL = 1.3; EXPRESSED IN FETAL LIVER, SIGNAL = 1.2; EXPRESSED IN BRAIN, SIGNAL = 1.8
acacctgctgtttaccaggcatcatgttacctcctgaagacaaaaaggtgaaaaatatgtagtccctgtcctctaagagctcgtggtctggccactggcatatttaagagtttctcccctagaaaggtctaggaagcttgcctctcaccttgtgctctaacagaatgcaggttagcacctggagacaggcgtccacacctagaagttccaagggaaggtgcagtgggaaatccactagggtgaatcgagatgggtctggaagagcaaaggtcagagctggctggagctcttggggtaggacctcgatgtctactcgcttctgcccagagacgggtactggggagcgcagcaatcgatagatccaggcctcaatctctcgaaggtcatgcagaagggcacttgacttctcctctaccagcagcgatccagtaaagatccgccacatggtgtccctgagaagcagacagcaggaatcagacacattagcatcagaagctgataccctactgcaactcagtatcaccacagaggctctaatgatgacaatgggaaacggagcatcattaa

SEQ ID NO: 7281 - DNA, 567 bp, Homo sapiens
  MAP TO AC026156.2; EXPRESSED IN BONE MARROW, SIGNAL = 2.5; EXPRESSED IN ADULT LIVER, SIGNAL = 2.9; EXPRESSED IN BRAIN, SIGNAL = 3.3; EXPRESSED IN LUNG, SIGNAL = 2.7; EXPRESSED IN HELA, SIGNAL = 2.4; EXPRESSED IN HEART, SIGNAL = 1.9; EXPRESSED IN PLACENTA, SIGNAL = 2.3; EXPRESSED IN FETAL LIVER, SIGNAL =   2
tcagtgcaagtgtcgtctccacaaaggcgctccttcttgcttcctcctagtataagtagctgttatgccacttatgaagaaatgtttgttagacaaatgaatcacagtcactagactgggataatttcctattttaaaattcttccctcttgatttttctttcttttctatattgtagaagaacccagcaagtccctataaccttgcatataagtataattttgaatattccgtggttttcaacatggtactttggataatgatcgccttggccttggctgtgattatcacctcttacaatatttggaacatggatcctggatatgatagcatcatttataggatgacaaaccagaagattcgaatggattgaatgttacctgtgccagaattagaaaagggggttggaaattggctgttttgttaaaatatatcttttagtgtgctttaaagtagatagtatactttacatttataaaaaaaaatcaaattttgttctttattttgtgtgtgcctgtgatgtttttctagagtgaattatagtattgacgtgaatcccactgtggt

SEQ ID NO: 7282 - DNA, 594 bp, Homo sapiens
  MAP TO AL133395.14; EXPRESSED IN BONE MARROW, SIGNAL = 2.4; EXPRESSED IN PLACENTA, SIGNAL = 2.4; EXPRESSED IN HELA, SIGNAL =   4; EXPRESSED IN HEART, SIGNAL = 2.1; EXPRESSED IN LUNG, SIGNAL = 1.6; EXPRESSED IN ADULT LIVER, SIGNAL = 1.8; EXPRESSED IN FETAL LIVER, SIGNAL = 2.2; EXPRESSED IN BRAIN, SIGNAL = 2.2
aggaggctgagagggaagtctttggctatttccgaagtagagagaggatttaaaacagttagtcccaagtggcagcgctaactgcctagtgtgaaacatttccttaggggaatgctcgagacactcctgaaggacatttcctttttggctgtaactttgaagcatatggagtgtacacagagagacctggctcagttctcttggtagatccagatgtcttggaagagcatcccaaagacatcaccagtaatgaggactgtgccacatgtggccgtgttaaactctgcgatgaatttctcaccaagggttgagttccaccacacccgttttctcattacagctttctctgggcccagccacctgtattgtgtatcgttctaatgagagcacaatctactctctcagcttgagagtgtttaaatggaatgaccagttgtgtaggatattttcctgaataattaattgatagatattctatgaaaaaagttctatttttgagaagtcattgattcagggaatgcttgtgttttttttttttgtttttatttttgtttgttatgactaattgattagtgtggaacttggctgtggact

SEQ ID NO: 7283 - DNA, 598 bp, Homo sapiens
  MAP TO AL162387.2; EXPRESSED IN LUNG, SIGNAL = 4.6; EXPRESSED IN PLACENTA, SIGNAL = 5.6; EXPRESSED IN HEART, SIGNAL = 3.7; EXPRESSED IN FETAL LIVER, SIGNAL =   4; EXPRESSED IN ADULT LIVER, SIGNAL = 4.1; EXPRESSED IN BRAIN, SIGNAL = 3.8; EXPRESSED IN BONE MARROW, SIGNAL = 2.8
tccagcttcctcacacacagcaactgctgcatttcccacttctgctatttcactctccacagaccactactgaccctaaagtggtatctggaaagaaatagctaaaatagtcatgagcgatagcactctgcctaattactgaactgaaagccactactaattgtaaaacttccataatctactagtgagtggcattcactgtgaagagtgggtttacaggctctgaccttccactcattcacccatctcaagaacaagcctgcatttgaacataaatcttcctttttaagtccactctgtcctcagtatggctcttgtttcctggcctgtgggacagggcattgtggcataaggctgcctgggccagttggggagcgagcccccagtacgcaccggaatttggtgtggtgggcgaattggtctggttgttctgcacagctgctgctactgcgtgtgcagctgtcacggccgtctttgcagcatagaggttggcttcttcctgaaacttgccaatgttcttcttgtacctgattcgtttgttgccaaaccaattggatacctacaaattgcagggacatggaggtgaaggggaagagag

SEQ ID NO: 7284 - DNA, 512 bp, Homo sapiens
  MAP TO AC016080.3; EXPRESSED IN LUNG, SIGNAL =   5; EXPRESSED IN PLACENTA, SIGNAL = 4.3; EXPRESSED IN ADULT LIVER, SIGNAL = 5.6; EXPRESSED IN HELA, SIGNAL = 2.8; EXPRESSED IN FETAL LIVER, SIGNAL = 3.8; EXPRESSED IN BRAIN, SIGNAL = 6.2; EXPRESSED IN BONE MARROW, SIGNAL = 6.2; EXPRESSED IN HEART, SIGNAL = 4.3
tttggaactgggtaacaggcagaggttggaacagtttggaggggtcagaagaagacagaaaaatgtgggaaagttttgaactctctagagacttgttgaatgactttgacaaaaatgctgaaaatgatatggacaatgaagtccaggctgaggtggtctcagatagagatgaggaacttgttgggaactggagcaaaggtgactcttgttgtgttttagcaaagagactggcagcattctgctcctgtgctatgtggaactttgaacttgagagagatgatttagggtatctggcagaagaaatttctaagcagcaaagtgttcaaaatgtgacttaggtgctgttaaaagcattcagttttataagggaagcagagcatagaagttcagaaagtttgcagcctcacaatgcgatagaaaataaaatcccattttctgaggataaattcaagtcagctgcagcacataagtgataaggagccaaatgttaatccccaagacaatggagaaaa

SEQ ID NO: 7285 - DNA, 513 bp, Homo sapiens
  MAP TO AC022882.3; EXPRESSED IN ADULT LIVER, SIGNAL = 2.4; EXPRESSED IN BRAIN, SIGNAL =   2; EXPRESSED IN LUNG, SIGNAL = 2.6; EXPRESSED IN PLACENTA, SIGNAL = 2.1; EXPRESSED IN HELA, SIGNAL = 2.8; EXPRESSED IN FETAL LIVER, SIGNAL = 2.5; EXPRESSED IN HEART, SIGNAL = 2.4; EXPRESSED IN BONE MARROW, SIGNAL = 2.2
aaagacggagcagtgacaggtacggcggggggtgctgggtcctgctgaggcgacaatggcagaggggcccgaggaagcccaaggccgccctcctgggcacgacgagggtggagggggccacgagtccctccctaccctgagaggccctcctgccgccaccgtcccatgcccccatgacgacccccaggccaaaccccatgcccctggccagcccacagcccgggcctcatggctgtgcctgacaaatcagagccgccccggtgagctcaggaagcgcggggaggctgcttccggctccgtgctgggctgccgaagtgcccaaggcacagccccgcgggagagaccgagtgctcccggcaagtgcgcgagtggctgtatcagtcctgctgtggctacctcacctggcaccgctggccaggccgccttcccggcttgctgcagtccccagcagtccccgcagagcttcccttcggacagcgctgctgtcccagtggctgggctattacaacccct

SEQ ID NO: 7286 - DNA, 585 bp, Homo sapiens
  MAP TO AL162171.1; EXPRESSED IN BONE MARROW, SIGNAL = 3.4; EXPRESSED IN LUNG, SIGNAL = 3.7; EXPRESSED IN PLACENTA, SIGNAL = 3.2; EXPRESSED IN HEART, SIGNAL =   4; EXPRESSED IN ADULT LIVER, SIGNAL =   3; EXPRESSED IN FETAL LIVER, SIGNAL = 4.2; EXPRESSED IN BRAIN, SIGNAL = 3.8
agtagccgccactacattccagtgtctaggtcgtgaatgtatttttttggttcagagttcagtaaatgatatgcaagagcaattgagtttttgcctctgtttcctgaatatgagtagctagttacagataggtcttacctcctttttttccttcagtttttgctgttgttcttctctgagaagaaaggcaataagagactgctgtcatttggtcacaggtcagggattagtgcgactgaagtcattgaaatccttttgtatgttattgcctccttcaatgaccttctgtctttccaggtcacttacttcagcctctggtactacaacaagcaaaatcagcgccggtgggtagatttggaaaaacctttgaagaagcagctggataaatatgcattggaacctaccgtctattttggagtggtgttttatgtgccttcagtttctcagctgcagcaggagattaccaggtgagaaattacatgccgtttgtttttaggaaatagtctagtgagatgtaaaaagtgaaactaaggttgaagtcagaagataagtttgaaactttgccctctcgccccacatttttag

SEQ ID NO: 7287 - DNA, 542 bp, Homo sapiens
  MAP TO AL133229.19; EXPRESSED IN FETAL LIVER, SIGNAL = 2.3; EXPRESSED IN PLACENTA, SIGNAL = 2.8; EXPRESSED IN ADULT LIVER, SIGNAL = 4.4; EXPRESSED IN HELA, SIGNAL = 4.2; EXPRESSED IN HEART, SIGNAL = 2.5; EXPRESSED IN BONE MARROW, SIGNAL = 2.1; EXPRESSED IN LUNG, SIGNAL = 2.6; EXPRESSED IN BRAIN, SIGNAL =   2
actgcagcaaaacaccacagaaaagaaccatggcccaaccccacccatgccaccaagggtcagctttggcctagccttcccttctggcaaggctgtgatgaggcaccccaatatccctgctggagtggtgtcagagaaggccgagtagtaatctgggcctttgatctctgttggctgataatgagtccactcacccctccctccacagtttcagtggagaccatatatggagtgcggacttacaccctcacctggcagcagcaaggtttttcttcctctctctgctggggtggtgtctgaagggttgagtggagagtcaggactttcaccattacccaggactaacaaggccacccctactgcagtttcagtggagaccatgtggagatccagtattcctactactactcagcaagcagtatcaagaagttccctacctttggtgtcaacagaagctgagtagaaacctgaacgtccatctacagctagcaataatgagaggtatgggatggagtgcccctccttttgcacctgctggagtg

SEQ ID NO: 7288 - DNA, 597 bp, Homo sapiens
  MAP TO AL161644.1; EXPRESSED IN PLACENTA, SIGNAL = 2.4; EXPRESSED IN HEART, SIGNAL = 2.2; EXPRESSED IN FETAL LIVER, SIGNAL = 2.6; EXPRESSED IN BONE MARROW, SIGNAL = 3.6; EXPRESSED IN LUNG, SIGNAL = 2.7; EXPRESSED IN ADULT LIVER, SIGNAL = 2.7; EXPRESSED IN BRAIN, SIGNAL = 5.2
tggagttccggttttctttgttttttctctttattcgtcctttctcaaagatgggatactgatcagaattgctctgtatatgcttgggactggatggaaagactttggagcagctgtggggggtggggggacaccgacaaccaaacagacgtgctggctccagtcctgtttttactttcaaaaaccaacaagcccgacagtggagcctgtcccctcccgggagggtgctcatggccccactcacctcatcaccccacggaaacctttgtgtcttgccctggaagacacccgaattctttgtacattgacatgcccttctccttcctccctcccctgtagctggtctttgttttactccctccctttctgatccatgtatatcatattatgtgagatatcatctgcctgaaaaaagactttgtgcggattattgggaacattgtagctgtttctgtgttttttcttaccttgtagtctggttctgaattaagagaggaaaaaaaagtaattatgatacattgtagtttgtgtacgatatatgttgataacgttttattaaagggacatcttttttccgcagcccttcctgacatgttt

SEQ ID NO: 7289 - DNA, 597 bp, Homo sapiens
  MAP TO AC007009.2; EXPRESSED IN LUNG, SIGNAL = 1.5; EXPRESSED IN HEART, SIGNAL = 1.8; EXPRESSED IN FETAL LIVER, SIGNAL = 1.8; EXPRESSED IN ADULT LIVER, SIGNAL = 1.7; EXPRESSED IN BRAIN, SIGNAL = 1.8; EXPRESSED IN PLACENTA, SIGNAL = 1.7; EXPRESSED IN BONE MARROW, SIGNAL =   2
acttgtccaaggccactcagctagtaagggacacacatagacactgggctccagacacgaggactatttgtattagcattctctcccttacttgttgacttttgtacacacatacacatggttgggagtggggaacgctctttctccccactcccaacccttatttacctgctgaattcctactggttgtttcaggctcaactcaagggcaatctcctccatgaagcatctcagggtttctctgccctttctcctgttggggtgggatgcccccgccctgggctgcattaccacctgtgtctctatctccttcttgctttccctgaaaggcaattggttagttgactcctctctttccctcttttactcagctgtacgctcctccagagcatggtggggtctgagtcttgggattctgagtgtttagcacagtgtgtagctcatggcacatatacaaccaatgcttgttcaatactaagtcatcccacttctctgatttggtcaaaggcctgatggatgatgtcatctgacttagcaagagagacagatgattcccatcatgagtgatgcaggccatcatttccccaccttttcatg

SEQ ID NO: 7290 - DNA, 513 bp, Homo sapiens
  MAP TO AC009234.3; EXPRESSED IN LUNG, SIGNAL = 1.6; EXPRESSED IN FETAL LIVER, SIGNAL = 0.83; EXPRESSED IN BONE MARROW, SIGNAL = 1.3; EXPRESSED IN HEART, SIGNAL = 1.4; EXPRESSED IN PLACENTA, SIGNAL = 1.6; EXPRESSED IN ADULT LIVER, SIGNAL = 1.5; EXPRESSED IN BRAIN, SIGNAL = 1.1
caagtgactctgaggagccctgtatcatgttgttagagtatttaagtaccacacacacagctatagcgagaaacaaagccagttactctcttatccactgcgctgttacctgacgcagattcctggtgactttcacatcatgccaggcattatcattaaactttccattcacaggctccactagtgcttcaaaggcccctgatcccaaattaatgaccagagagacagctccatttttcagggcaagattgacataatcagccgatttcccagtgtgaagcatcagtccattcctctgaagggttttaaatgacagagttatttcatcactgctgctttgaatggggttttgagacaagtcgtagcagaagtattcagatcctttgaacgtggcaatatattcttcttttcctagaggaaaacagatgatacatacataagtaaacaaatacactatgcaaatcagcaggtcttaacagaaacaatagctaatcactccccaaattaacctgc

SEQ ID NO: 7291 - DNA, 596 bp, Homo sapiens
  MAP TO AC021880.2; EXPRESSED IN BRAIN, SIGNAL = 7.7; EXPRESSED IN BONE MARROW, SIGNAL = 4.9; EXPRESSED IN LUNG, SIGNAL = 5.1; EXPRESSED IN HELA, SIGNAL = 3.1; EXPRESSED IN PLACENTA, SIGNAL = 3.4; EXPRESSED IN ADULT LIVER, SIGNAL = 4.6; EXPRESSED IN HEART, SIGNAL = 2.6; EXPRESSED IN FETAL LIVER, SIGNAL = 7.2
atgccacggcttcttcatacaatggatctcatatacagaaagtaagcaaactaaaaaggcaagttgcacaagaaggcccaagtaatgatactatttatatgaaactttacaatctaggaaacatggccactctgcagacaccggcgccgtcgggaaacctgttctatcagccatggtcaaccccactgtgttctctgacatcgctgtcaacggcgagcccttgggccgcatctccttcgagctgtttgcaaacaagtttccaaagacagcagaaaactttcacgctctgagcactggagagaaaggagttggttataagggttcctgctttcacaggaacattccagggtttatgtatcagggtggtgacttcacacgccgtaatggcactggtggcaagtccatctatggggagaaatttgaagatgagaacttcatcctaaagcatacaggtcccggcatcttgtccatggcaaatgctggacccaacacaaacggttcccagttttccacacgcactgccaagactgagtggttgaacgcaagcacgtggtctccggcaaggtgaaagaagacgtgaagactgtggaggccat

SEQ ID NO: 7292 - DNA, 585 bp, Homo sapiens
  MAP TO AL162458.1; EXPRESSED IN LUNG, SIGNAL = 3.1; EXPRESSED IN HEART, SIGNAL = 2.6; EXPRESSED IN FETAL LIVER, SIGNAL = 2.4; EXPRESSED IN PLACENTA, SIGNAL = 2.8; EXPRESSED IN ADULT LIVER, SIGNAL = 2.9; EXPRESSED IN BRAIN, SIGNAL = 3.5; EXPRESSED IN BONE MARROW, SIGNAL = 3.1
caggaacacatcatcgttgcccaggaacagacagtgaccaatcaggtaagagtcaggactgggggccctctggccagcgacaggcaggggttggggtagagaaatgaggctagagctgtcttggtcctggcaggaggaagccgcctacatccaagagatcaccacggcagatggccagaccgtacagcacctggtgacctccgacaaccaggtgagctactagctactgttaatcccctcagctgtgacctcctaccctcccaaagacctaccttggggaggaatgatactttccaaaccacccctcctggggtccatgcttgccaacaactgcattgttgctggtggctgttcctagtcttccactctgccttcttagctaagctcctggcgagtggggcctcagcacctgcctcgccatgcccgccccccccaccaacaggtgcagtatatcatctcccaggatggtgtccagcacctgctcccccaggaatatgttgtggtccctgaaggccatcacatccaggtaggccagacctgggatgagggtgctgtgtggtgaagggctgcatgacctctccctag

SEQ ID NO: 7293 - DNA, 552 bp, Homo sapiens
  MAP TO AC024736.2; EXPRESSED IN ADULT LIVER, SIGNAL = 0.81; EXPRESSED IN HEART, SIGNAL = 1.2; EXPRESSED IN BRAIN, SIGNAL = 0.77; EXPRESSED IN PLACENTA, SIGNAL = 0.78; EXPRESSED IN FETAL LIVER, SIGNAL = 0.63; EXPRESSED IN BONE MARROW, SIGNAL = 0.66
accaaacaaaataagcccccaggatgaacctgctttgcagtcctcagatttgtaaacttctgcctcataacaagatacagctctctgcatgtactcttttgaaattttcacgaagtcaaagcttattagcaatgttttcacagtgatattatccaatatgtcacactgacataatcagaaatcatgtgttaggcctatttggcagaaatattcaggagttatttagtatgctcctataagaaaatattctacttctggctgagatgaattgacagaaacaagatatacactcttctaaccttaaagagtaaaatatggggaatcaaacaattttgataacattaaagatagaaaccaaataagttaatccttacgactgccctaattttttgctaagagcgattttccagtatgcagagaaaaatgaggaaaacaggtgaagcctggcacactctaaatttaggagatttgagaccccaaagagcctgtagttcacaggagaaaatactggtgtaacacaaacagagaactccgaggatctgcagagggtac

SEQ ID NO: 7294 - DNA, 589 bp, Homo sapiens
  MAP TO AC022860.3; EXPRESSED IN HELA, SIGNAL = 2.7; EXPRESSED IN LUNG, SIGNAL = 2.5; EXPRESSED IN PLACENTA, SIGNAL = 2.2; EXPRESSED IN ADULT LIVER, SIGNAL = 2.7; EXPRESSED IN FETAL LIVER, SIGNAL = 2.4; EXPRESSED IN BRAIN, SIGNAL =   2; EXPRESSED IN BONE MARROW, SIGNAL = 2.1; EXPRESSED IN HEART, SIGNAL = 2.3
ggtggaagggaagagaaaggaagggtactgcctaggtggtaggtgctccctgctgggagatgaccttatttcctgatgggtcccaggccagctgggagcactctggacctctcagaaggagcagccttttgggggaattagaggtgggggacacacatctcagtgctgagaatgttgggggcaggcttacaaggtgtcaaggcccctgggagcctcattcagcccaggtaggggtccttgaaacactctccctacacagtagggaaaagaggctgaggtattagcaggggcagcctcagaagatggattgggtcaaatgggcctctgcttcctgccttcatgtaccttatggccttcatgtgcaccttcactgggaagggctccttgctggacttgaggacaagaagcagcaaaactcttcattttcaccgcctgtctaccagcaatcccacttcctccatctcctggctgaagaagggcaaggagttccattgacagcatcacatcagggaatcaaggtgggcctggtgggggaggttggggagtggggtctgccattgctcactcgcccttccacagtgagctgtga

SEQ ID NO: 7295 - DNA, 591 bp, Homo sapiens
  MAP TO AC015599.3; EXPRESSED IN PLACENTA, SIGNAL = 3.2; EXPRESSED IN ADULT LIVER, SIGNAL = 2.8; EXPRESSED IN HEART, SIGNAL = 2.4; EXPRESSED IN BRAIN, SIGNAL = 3.1; EXPRESSED IN BONE MARROW, SIGNAL = 2.8; EXPRESSED IN LUNG, SIGNAL = 3.6; EXPRESSED IN FETAL LIVER, SIGNAL = 2.9
gaaatcctcctggcttctccggctacccccatgcatcctactagctcaatttactaatggcgccttaggcactgagagctgttttcatcagagatgtgtctcaatggtccacatcatgctcattttcactctgggactctttgaaagaaaatgaatggagagtttccagaatttttttttttaatatactatatctctcccccaaacacctcccacatatagagctattgaagaagcactcccatgagatcagaggtagaataagaaaaggtatgagactagaccaatttcattccaagttctacctcaggtaagttaaagacttagaaacacagggagaaggagagaacctgactgtgagacacacagagatgaatagttacagaaggagggtccctacctgcttaaccacagtcaccgtccctggtgccatggcaaccaccgaggcaagggcagtggcgtcatgggtctcggcgcccagctcaatgatctgctgcaggatgttcacagccgtggggtccagtcggtcgccttaagaggaagaagcaaagaggacaccattcaggccactggtgctgaaggacatggaat

SEQ ID NO: 7296 - DNA, 587 bp, Homo sapiens
  MAP TO AC018938.3; EXPRESSED IN ADULT LIVER, SIGNAL = 8.1; EXPRESSED IN HELA, SIGNAL = 6.6; EXPRESSED IN BRAIN, SIGNAL =   7; EXPRESSED IN LUNG, SIGNAL = 7.7; EXPRESSED IN PLACENTA, SIGNAL =   7; EXPRESSED IN FETAL LIVER, SIGNAL = 7.2; EXPRESSED IN BONE MARROW, SIGNAL = 7.2; EXPRESSED IN HEART, SIGNAL = 8.3
ctgtagcaatggggaagcagcttccacctctaggcccctggagactcagggaaacttcacttcctcctggtacaatcccaggcccttggagggaaatgtccacctcaagagcttgacagaaaacaaccagactgacaaggcccaggtgcctgcagtgagtttctactccaacggccatggagtcgccagttcacacagccctgctggaggcatccttccctttgggaagcgtgacccacttccaacagtgctccctgccccagttccaggctgctccctgtggccagagaaggcggccttgaaggtgctgggtaaagaccacctgcccagctctccaggcttgctgatggtgggggaggacatgcagcccaaggatcctgcagctcttgggtcaagtaggtcttctccacacagagctgccggccacagttcccacaaaagaaaactgtcggggccaccgctgcagctgcaaccgacccctcccctgcaactgaggtgggatagagacgaggggcccccaccggctaagcttccatgtctatctcctgaggcactgttggtgggtcaggcttcccaaagagaaggac

SEQ ID NO: 7297 - DNA, 572 bp, Homo sapiens
  MAP TO AC008572.6; EXPRESSED IN BRAIN, SIGNAL = 1.3; EXPRESSED IN LUNG, SIGNAL = 1.6; EXPRESSED IN PLACENTA, SIGNAL = 1.3; EXPRESSED IN ADULT LIVER, SIGNAL = 1.6; EXPRESSED IN HEART, SIGNAL = 1.3; EXPRESSED IN FETAL LIVER, SIGNAL = 1.3; EXPRESSED IN BONE MARROW, SIGNAL = 1.2
ctctggagcatcagggagactccaacttaaggcaacagcatgggtgaataagggcttcctgtggactggcaatgagaggcaaaacctggtgcttgagcactggcccctaaggcaggccttacagatctcttacactcgtggtgggaagagtttagtgtgaaactggggtggaattgggtgtccacgtatgttcccttttgccttactatatgttctgtcagtttctttcaggaaaatcttcatcttacaacttgtagggctggtgttaacttacgacttcactaactgtgactttgagaagattaaagcagcctatctcagtactatttctaaagacctgattacatatatgagtggggtaagtgaagaagcttttttaaaacaaatgtattttcatcagaggagtcggcatacacacactctacaatttaactttgtaggaaagaaaaataatttagaaaaaatcatggccccacattttgtcaaggattcttacaagtgatattcaaatatctaatctaaaatgattatctagaaattggcacattctaagtgtgcagatgctgatgagg

SEQ ID NO: 7298 - DNA, 575 bp, Homo sapiens
  MAP TO AL162458.1; EXPRESSED IN PLACENTA, SIGNAL = 1.2; EXPRESSED IN BONE MARROW, SIGNAL = 1.4; EXPRESSED IN ADULT LIVER, SIGNAL = 1.2; EXPRESSED IN HEART, SIGNAL = 1.2; EXPRESSED IN BRAIN, SIGNAL = 1.3; EXPRESSED IN LUNG, SIGNAL = 1.3; EXPRESSED IN FETAL LIVER, SIGNAL = 1.2
caacagagcctggggattagagaaatgcagagtcagaacttcacctcggccctgccacgtagctcaccaggcagagagtcggtgctgctcctcatcagccgctccttccgctctcgcaggtagttgatgatcttgtcagtctcttcagcagtgaggtacctgttgtctgccagcaggttgatgaggctctggatggctggagggtggcccccacgcactccctcctcagggcctcctctctctctttcctgcaggatggcttcatcggccatcttggctgcctgtctggcaatctcctcacgttccttctcccggcactcattcttgtaacgctcataatttctggccaccagcaccatggcatctgcttggggcatgttgcgatgctctgtaggaggaaatgacatgagttattttcttccatgacatatttaagtgcccacctgctgcactctgtcaagtctttcctaacctcataccagcaagaaaatcattttggtgacaaaaagccttgagattgagagtggggtggtgtggggggagagatgaaggccaggaagggaagtgaacgaaca

SEQ ID NO: 7299 - DNA, 571 bp, Homo sapiens
  MAP TO AL121941.13; EXPRESSED IN BONE MARROW, SIGNAL = 1.2; EXPRESSED IN PLACENTA, SIGNAL = 1.1; EXPRESSED IN ADULT LIVER, SIGNAL = 1.2; EXPRESSED IN FETAL LIVER, SIGNAL = 1.1; EXPRESSED IN BRAIN, SIGNAL =   1; EXPRESSED IN LUNG, SIGNAL = 1.1; EXPRESSED IN HEART, SIGNAL = 1.2
tgctctgtgtcctccctttcagctggaaatggcctgcagggtgtggaatttggaccagggaagggaattcggcagagagaggaaggaagcaattgggaaacagggtaccacattcctcatcccccacattggccttgaccacaaggacagcatcttccacatgataatgcacctctcaggcatgcttctcaccagggatgatcaatggaagcaacctggaaactaaagagctctgttcctaagtctgatcccagttctgccactcacactgtgatcttgagcaaaacacatttcaactctgggttcccctaggaaatgagggggctgagtttcctctggctgtcaagttctgctatttatcatcatgtgggggcagagccaggtctccacatcgcttttctttgccattaagcccacattcccatcataactttgcagtagaagtaccgttcattgttagtgggacctcttaataattaaaagaaagagaaaaaatgatttattcttatccccataccttttaaagttgtggttttctgaagcaaaggctgccatgcagtgaggaaaggat

SEQ ID NO: 7300 - DNA, 549 bp, Homo sapiens
  MAP TO AC022796.3; EXPRESSED IN LUNG, SIGNAL =  10; EXPRESSED IN PLACENTA, SIGNAL = 8.5; EXPRESSED IN FETAL LIVER, SIGNAL = 8.5; EXPRESSED IN HEART, SIGNAL = 8.1; EXPRESSED IN ADULT LIVER, SIGNAL = 8.8; EXPRESSED IN HELA, SIGNAL = 9.3; EXPRESSED IN BRAIN, SIGNAL = 8.8; EXPRESSED IN BONE MARROW, SIGNAL = 9.2
acataaaaagcttgcccaggcaatgagcatgaagcaagaacaagcacagatcagtggacagataatcaggacacagaggaaaactgagaggcaacaataaagctctatgagataactcagtgggaaatagtgactctcaaatttccagtataattagaatgtttatttcacctatacatacactttcttaagttaaaaaaacacaaacaaaaaatcttaactagaacataggcttagtaccacctgaacgaggtgtccctgccctttcagggacaagactttggctttgttttggttgtcttctaccgtggtcaaggagtccaaggaaccacaaggttacgggtactcagtgtgcatgcctgcctttctagactatgctctgatcacccaggtctggaattctgccacgtgctccaaatacacttccaagtctgtgaggtcctgctctgtagagcagatttcattgtatatatgggaaaattctaggaccatgagggtgccaagtggaggcatttttcagcggtggggtggtggtgggtggatagtgtc

SEQ ID NO: 7301 - DNA, 587 bp, Homo sapiens
  MAP TO AL139352.8; EXPRESSED IN PLACENTA, SIGNAL = 2.7; EXPRESSED IN ADULT LIVER, SIGNAL = 1.5; EXPRESSED IN HELA, SIGNAL = 8.6; EXPRESSED IN FETAL LIVER, SIGNAL = 5.3; EXPRESSED IN BONE MARROW, SIGNAL = 7.6; EXPRESSED IN LUNG, SIGNAL = 0.89; EXPRESSED IN HEART, SIGNAL = 2.9; EXPRESSED IN BRAIN, SIGNAL = 8.6
ttcactggatgggtagaggcctttcccacagggtctgagaaggccatcatggtcatttcttcccttctgtcagacataattcctcagtttggccttcccacctctatacagtctgataacggattggcctttattagtcaaatcacccaagccgtttctcaggctcttggtattcagtagaaacttcataccccttaccgtcctcaatcttcaggaaagatggaacggactaatggtcttttcaagacacacctcaccaagctcagcctccaacttaaaaaggaggactctgtcaaggatacagcccaaaaactcaacaaccaagcaagtaattacgctgaacagccttgggcactctctaattggatgtcctgggtcctcccacttcttagtcctttaatacctatttctctccttttattcagaccttgtgtctttcatttagtttctcaattcacacaaaaccgcatccaggccatcaccaataattctgtatgacaaatgctccttctaacaaccccacaataccaccccttaccccaaaatctttcttcagttgaatctctcccactgtaggttcccatgct

SEQ ID NO: 7302 - DNA, 580 bp, Homo sapiens
  MAP TO AL161450.2; EXPRESSED IN LUNG, SIGNAL = 1.2; EXPRESSED IN PLACENTA, SIGNAL = 1.2; EXPRESSED IN FETAL LIVER, SIGNAL = 1.3; EXPRESSED IN BONE MARROW, SIGNAL = 1.1; EXPRESSED IN HEART, SIGNAL = 1.4; EXPRESSED IN ADULT LIVER, SIGNAL = 1.5; EXPRESSED IN BRAIN, SIGNAL = 1.2
gaaggagcccacactctcaggaaacagatgagttgcacaggcttgcaggctggtatggggcctaggtgtacctccttccacagggctggtcctgtaagggtatggcctatttccctaactggcctctccccaagggagccctgtggccccgaaatacctaataatattgacagcaaaattgtgagcacagtgccagtgatcagagatggctcccccaaagtccatgagccgaccgggtgaggggggtcacctctctctccctcacatggcagaatacagctgcaaaagccaggaacttggtaactaagaacctactgctctcaagcaccatctcctggatcacagccgaaactataacaccaaaaatcattaattctcctctctacgtaaccatgtgcaaaaattcaacaaagaccctgtactgacccttagtcctgtgaaaacttccagaaatgaagtcagtggactatactcagtttataccacaattgaaggaataccagctctcccagatgagaaagaatcagcataaaaactctgacaattaaaaaatagtatccccttaacctccaaaggagcc

SEQ ID NO: 7303 - DNA, 567 bp, Homo sapiens
  MAP TO AC011292.2; EXPRESSED IN ADULT LIVER, SIGNAL = 3.1; EXPRESSED IN PLACENTA, SIGNAL = 3.8; EXPRESSED IN HELA, SIGNAL = 5.9; EXPRESSED IN FETAL LIVER, SIGNAL = 3.7; EXPRESSED IN BRAIN, SIGNAL = 4.6; EXPRESSED IN BONE MARROW, SIGNAL = 3.5; EXPRESSED IN LUNG, SIGNAL = 1.7; EXPRESSED IN HEART, SIGNAL = 3.4
tcaccaacaaatcacatcaccatgactatcaccaccacatcatcactatcaccaacatcatcatcaccattcacatcatcatccccatcaccatcagcagcatcatcacatcaccatgactatcatcacatcaccatgactatcatcacatcactaccatcaccatcatcattacatcaccatcactatcaccatcacataaccaccatcaccaacatcaccatcaccattaccatcaccattatatcatcatcacatcaccatcaacatcatatcaccatcaccatcaccatcaccaccaccattatcaccatttctcccatggcagcaccagccgtggtcaacaggttgaccatgcaacctttaggagagagctcagacatggtcttcccacatatcctcatctaaagtagatttcccatcctcaatcataattcactagcttagtaataattttcatttcctttctggtgcataccacaaattgagattctccttttattttttacttgtttctcatctgtttgcttgtctacaatgcaagctaggtgagaacagggaccacag

SEQ ID NO: 7304 - DNA, 500 bp, Homo sapiens
  MAP TO AC021498.4; EXPRESSED IN ADULT LIVER, SIGNAL = 1.5; EXPRESSED IN HELA, SIGNAL = 3.1; EXPRESSED IN BRAIN, SIGNAL =   1; EXPRESSED IN LUNG, SIGNAL = 1.5; EXPRESSED IN PLACENTA, SIGNAL = 1.1; EXPRESSED IN FETAL LIVER, SIGNAL =   2; EXPRESSED IN BONE MARROW, SIGNAL = 1.4; EXPRESSED IN HEART, SIGNAL = 1.4
agtcacatccccgatacctgtggtgatattgaggacccttatctgtccagtatcctctggtcatgtcagtatcattgatcacaaaaaatggttataattctgagtcttcaatttcattgcaccaggatacaacacaatcatgaatagatcctacaaatacacctttggttctaagtttactttattcttaggatactaccaagagaacctgagtcacagcaacagtggcttctgcatcagcaccattacctgtttattatctaaaacctcagatcccccatccatgaatctctcttcctttgtgaggtcctgtgggggctcacacatcctgtggcccttacatttctcctctgaagctagtgttgaggtaattgagtgtggtggttgtggtagatcaaattattggtcccaatttttccatcttttctaataaaattatatatttatggcctcatgatgatggtctgtctcttggctctgggctcagacatgtgaagtgc

SEQ ID NO: 7305 - DNA, 562 bp, Homo sapiens
  MAP TO AL121883.13; EXPRESSED IN ADULT LIVER, SIGNAL = 1.1; EXPRESSED IN LUNG, SIGNAL = 1.3; EXPRESSED IN PLACENTA, SIGNAL = 0.75; EXPRESSED IN HEART, SIGNAL = 1.2; EXPRESSED IN FETAL LIVER, SIGNAL =   1; EXPRESSED IN BONE MARROW, SIGNAL = 0.86; EXPRESSED IN BRAIN, SIGNAL = 1.5
gtagccttggtcactctgggtaacaatgcagcatattcatttaaccagaatgccatacgtgaattgggtggtgtcccaattattgcaaaactgataaaaacaaaagaccccataattagggaaaagacttacaatgcccttaataacttgagtgtgaacgcagaaaatcagggcaagattaagacgtacatcagtcaagtgtgtgatgacaccatggtctgtcgcttggactcagctgtgcagatggctgggctaagactgttaaccaacatgactgtgactaatcattaccaacatttgctttcctattcttttccagacttttttgctttgttattcctgggaaatcacttcaccaagatacagattatgaaactaattataaactttactgaaaatccagccatgacaagagagctggtcagttgtaaagtaccatcagaattgatttccctctttaataaagaatgggatagagagattcttcttaatatccttaccctatttgagaatataaatgacaacataaaaaatgaagggctcgcatcatccaggaaagaat

SEQ ID NO: 7306 - DNA, 562 bp, Homo sapiens
  MAP TO AC016109.3; EXPRESSED IN BONE MARROW, SIGNAL = 2.7; EXPRESSED IN PLACENTA, SIGNAL = 2.5; EXPRESSED IN ADULT LIVER, SIGNAL = 2.4; EXPRESSED IN HELA, SIGNAL = 3.1; EXPRESSED IN BRAIN, SIGNAL = 2.3; EXPRESSED IN LUNG, SIGNAL = 2.5; EXPRESSED IN HEART, SIGNAL =   3; EXPRESSED IN FETAL LIVER, SIGNAL = 2.6
ggagatacatggaggaggagcattaaaagaaagccaacattttaacatacactgctgattatatgtcaaacactgagctgagcatttacataaaacatagaaagtactgtggtatctattacttgaaagaaacagaattcaatacactatatatccatcattattacaactttaaccaactctttatgttcagagtcaaggactgtaagagaattggggagaaaaagcagccttaattttctgacatggagaggtgaattgtattctgtctttcttcagtttcttttttgtttctttgatactggttttgcaataaagggaaattacacccaactctcaaaataaatttgtaataagacatcataatttccagtctaaacgagtacaagcaaagtgcttcccagtttccaaaaatgcctcataaacaggttgttgaaaataaactgttttatattaaacattctttctgttgctgttatttttaaaaaaattaatagaaatgcaccaatttcaagactccaaatagaaactaaaaattgcaacagcctaccattttccaagc

SEQ ID NO: 7307 - DNA, 571 bp, Homo sapiens
  MAP TO AL158046.1; EXPRESSED IN PLACENTA, SIGNAL = 1.3; EXPRESSED IN ADULT LIVER, SIGNAL = 1.7; EXPRESSED IN HEART, SIGNAL = 1.5; EXPRESSED IN FETAL LIVER, SIGNAL = 1.5; EXPRESSED IN BONE MARROW, SIGNAL = 3.8; EXPRESSED IN LUNG, SIGNAL = 2.3; EXPRESSED IN BRAIN, SIGNAL = 1.3
cagctcaaggaggaaaggtgaaggagagcgcacgtgcttcctcctttcgtaacaatgactgttcttttccttgctatttcagatgaccatgtaagccgcacttttaccttcttcagtaaatcactcgattactcagtgaatctttactgagaattcctcaagcacaggcagcacgtgctagagctggtgtacacagacgagtgggttcacaccatgcagcttactgtctggggggataaagtgtactccattcaaagaaccacccaagtggaagaacagctgcctctaaatgtccacccactgatgaagggagaacaaaatatgatcagtccatgccagagaatatgattcagccttaaaaaggaaagaaattctgacacaagctaccatggggatgagccctgaggacactatgcttaagagaataaaccaaacacaaaaggccacacagcataggattccatgcatgtaaaatgcccagaataggaaaatctacagaaacagaaagtgcattagtgtttgccaagggttttccggggagggggagaatggggagtgactttggaggtga

SEQ ID NO: 7308 - DNA, 569 bp, Homo sapiens
  MAP TO AL158049.2; EXPRESSED IN LUNG, SIGNAL = 1.7; EXPRESSED IN PLACENTA, SIGNAL = 1.4; EXPRESSED IN HEART, SIGNAL = 1.6; EXPRESSED IN FETAL LIVER, SIGNAL = 1.6; EXPRESSED IN BRAIN, SIGNAL = 1.4; EXPRESSED IN ADULT LIVER, SIGNAL = 1.9; EXPRESSED IN BONE MARROW, SIGNAL = 3.5
aatccagataagcccaggaagtttcattctccctcttggatatcctgcaggatcctgatgaggttttccaggccaaaaatatagccagggtctggtccatcgtaggtggtgtgctcattccagtagcccttgtatgtggtatgagcaaagtcaatcatgcggatgtcaaccttggtgagaccaccgggagagctaccgtgggctgcctggggagcctcgtgaggatgcgggctgcctggggctctttctggtggttcctgcccatcatagatgacaaggagagagctggaatagaagcggtatgaactctggctcctaatgacagagaggagggcccggagctggtgcaggatgggctccaggagctccctccggaggtggcttccattatgtaggaactgatagagggcttgtctgaacccctccactgagagttttcttccatagtacttgtctttgcagagaaagtacttcttatctgtttgataaaccttacattaaaaagaataaagaaaatgtgaagattggaaacttaaacaaattgtatctggtacggttgcagcatcata

SEQ ID NO: 7309 - DNA, 557 bp, Homo sapiens
  MAP TO AL160492.1; EXPRESSED IN LUNG, SIGNAL = 3.5; EXPRESSED IN ADULT LIVER, SIGNAL = 3.5; EXPRESSED IN FETAL LIVER, SIGNAL = 3.7; EXPRESSED IN BRAIN, SIGNAL = 3.6; EXPRESSED IN HEART, SIGNAL =   4; EXPRESSED IN PLACENTA, SIGNAL = 3.5; EXPRESSED IN HELA, SIGNAL = 4.7; EXPRESSED IN BONE MARROW, SIGNAL = 4.1
gacagctgagaaaacagccctcccaactgcctgctgaaggtaaggggaggagccgcagcagcttggctctgctctgaatccagccgtctgtgtcactgtcctcacagggtctggaggaggggatctcacagatcacatccaagagccaagatgggcggcaagcactggtgtggaacttccccattgatgtcacctttaaaagcaccaacccctacggctgtgagtctgcaggggccctgtggggtagggtggcagagctttcacacagcacccccaagacagcctctgcctcatccagcccatgactgttcacattcagattgtcacctgggctcttgaagcagccctcaacgttctctctcgccatctgtccctttccctcctcttcttcctcatccccactcacccccttcatctgctacaggctgtgcagctggccttctggaagttcagagtgcatcagggctagtggccacgcctgtaaaaggcaggctccccaccctggcatgcaggactgtggctgtttggcctggaggcctgactctgtgcctgctgac

SEQ ID NO: 7310 - DNA, 520 bp, Homo sapiens
  MAP TO AC010135.3; EXPRESSED IN LUNG, SIGNAL = 1.7; EXPRESSED IN ADULT LIVER, SIGNAL = 1.7; EXPRESSED IN FETAL LIVER, SIGNAL = 1.4; EXPRESSED IN BRAIN, SIGNAL = 1.5; EXPRESSED IN HEART, SIGNAL = 1.7; EXPRESSED IN PLACENTA, SIGNAL = 1.6; EXPRESSED IN BONE MARROW, SIGNAL = 1.4
ttccaacaccctagtgaccctacaaagccagcttacttctctagctgcagtggtcctccaaaaccaaagatccctggacctattaacagctaaaagaagaggaaccttcatcttcttgggagaagaaggttgctgtttcattaaccagtcagcaatcattactgaaaagtttaaataaataagagaacggaaaaaagtaggaaaaaggagcttgatcactctgaaccctgaaatatgtttaaccaatggataccttggctactcccctttctaggtcctgtgacacccatcctatttttactcacctttaggccttgcatttttaacctctgtgtcaaatttgtttcctccaggatcgaggccatcatgctacaaatggtcgtacaaatggaacctcaaatcagctcaaatcacagcttctactgaggacacctggattgacacattggaaccttgactggcctagaaagttcccctctgaagaacaccacaactacagggtcccttctttgcccctaac

SEQ ID NO: 7311 - DNA, 509 bp, Homo sapiens
  MAP TO AL121579.2; EXPRESSED IN HEART, SIGNAL = 1.3
accacctgttcttgtttgccagatagagtgtctggcattaaactcttccacatcttaatggtatcaacagtatgtgacattatgtcacaaatagaaataaaatcggatgaaagacattatttaaggaaaattctacaattaaaggaaagattccctatttattattctttctacactgtaatgtcaggtgataacttttttggggaatgcaactatggttgatcaggcacccatacgagattcaaggatctatttgggggagggggttaacaaatctagtatttgttcttatgttcttgccaatgatcatcaacgatacaaaatctgtggcaacttagcaggtaaaaatggtttgaagagcagcacagaggataacaatgaaattaaccacatcaatttctagggccagctgatgacttcagaaaataccacatcagccaagctgcccctccagagtaaatagattcatcttttctcagcagcttcaggctcctaagaatggggaggct

SEQ ID NO: 7312 - DNA, 570 bp, Homo sapiens; identical to SEQ ID NO: 7186
  MAP TO AC015638.4; EXPRESSED IN LUNG, SIGNAL = 1.7; EXPRESSED IN PLACENTA, SIGNAL = 1.6; EXPRESSED IN ADULT LIVER, SIGNAL = 1.8; EXPRESSED IN HEART, SIGNAL = 1.5; EXPRESSED IN FETAL LIVER, SIGNAL = 1.6; EXPRESSED IN BRAIN, SIGNAL = 1.4; EXPRESSED IN BONE MARROW, SIGNAL = 1.3

SEQ ID NO: 7313 - DNA, 592 bp, Homo sapiens
  MAP TO AC021880.2; EXPRESSED IN HELA, SIGNAL = 5.5; EXPRESSED IN LUNG, SIGNAL = 4.1; EXPRESSED IN BRAIN, SIGNAL = 4.4; EXPRESSED IN BONE MARROW, SIGNAL = 4.4; EXPRESSED IN PLACENTA, SIGNAL = 4.1; EXPRESSED IN ADULT LIVER, SIGNAL = 4.3; EXPRESSED IN HEART, SIGNAL = 3.9; EXPRESSED IN FETAL LIVER, SIGNAL = 3.9
ataaccacagtggccagaggcttcctatgtgctaagaattttgtacgcacacatcattctcttctcacaccctatgacataggtgctgtcctcatcctcaaccacaaagcatggaggtcagagtccagaacagtaacagacattgtgcttggtgctccaggaacagaaagggggatgtctaacccagtgtgggggaccagggtactctaagagttctttaggaatcaagtaaagaaggggataggtgctccaagaagacgaactggctcctaccaaggcaaagagatgggaggatgctcagcttgttcaggaaactgaactcacttgccatggggtgcaaggtccctggaggaggtggagcagagatgtaggcggtgagcaagcagcaccctgaaatgcaaacccagggactagagcagtggggagacaccacatgggccatgcaaaggagtgacttgtacatggcttcttcaaaaggctgcagtgtggcacagatgagcattgcagaggagaaacctagaggcaaggaggccagtgaggagactttcatgctcacctaccccccacagaaggaagcaacaagggctagcac

SEQ ID NO: 7314 - DNA, 537 bp, Homo sapiens
  MAP TO AL132654.12; EXPRESSED IN LUNG, SIGNAL = 1.8; EXPRESSED IN PLACENTA, SIGNAL = 1.8; EXPRESSED IN HEART, SIGNAL = 1.6; EXPRESSED IN FETAL LIVER, SIGNAL =   2; EXPRESSED IN BRAIN, SIGNAL = 1.6; EXPRESSED IN BONE MARROW, SIGNAL = 1.7; EXPRESSED IN ADULT LIVER, SIGNAL = 1.6; EXPRESSED IN HELA, SIGNAL = 2.4
tttgaaatggcaagacctcctggctcatttctccaggctgtaagcagattaagcgccattaatgagttagtaactatctagttctacagaagatggagggcatcttataatgagagaaaataaagcaggacaaccgaaatagagataaaagatccacaaattattttgcgtctgaggaagaagggtttgtttctcagtgtagaaaggtaaatgtttttaatctaatgacctcaatacccaccaagattcccgcctgaagtgtctgctccttcaaaaagatgaggtccatccctccttcaacatgtttccgcctccctctccgcctcctcgtggctgcatcatctcttctgaggcttccattgacaatctgtccagtcacaggatggatcaggccagcttgcagaatcccagacaagtccatgccaagggctccctgaagtgaactgatagccccaatcttaggggtgctggcgctcactgggaaaggggatgtggctcctggggacccctctgatgagcaggagaggtccatagctg

SEQ ID NO: 7315 - DNA, 557 bp, Homo sapiens
  MAP TO AC008739.5; EXPRESSED IN HEART, SIGNAL = 1.6; EXPRESSED IN BONE MARROW, SIGNAL = 2.2; EXPRESSED IN LUNG, SIGNAL = 1.6; EXPRESSED IN PLACENTA, SIGNAL = 1.7; EXPRESSED IN ADULT LIVER, SIGNAL = 1.7; EXPRESSED IN FETAL LIVER, SIGNAL = 1.9; EXPRESSED IN BRAIN, SIGNAL = 2.2
taatcaaaaattggtggcggcaaatagattttaagatatgggcaacaatattttatgccactaaatttctggaattgccactaatctagagtgaaggatacagatcagcccaggaatgtggaaagtttaagtcaagataaaacttcttgaaaaaattctttcctatatggaaaaatcctcaaggttttcttaagaacaagtatcagaaactcatttatgcaaagcataaattaccaaaaattattctcaaaaaatgagaaatgaaacctttagggtatactagtaattgtgtactaaagttattctcacccaagaagaccaggtttctgtagttctctaacatcacttttctatacaaatcctgctgagcagtgtccaggcattgccactcctccagagaaaattctatggccacatccctaaatgtcaatggcccctgaaaaacacaagcacacaagacacacgtatatttaccaagtggccacgggcagaatttattatttgaattaaagtgaaatgacagaataaagagaattggttctgatttgcaggaatga

SEQ ID NO: 7316 - DNA, 519 bp, Homo sapiens
  MAP TO AC012428.4; EXPRESSED IN PLACENTA, SIGNAL = 1.4; EXPRESSED IN ADULT LIVER, SIGNAL = 1.6; EXPRESSED IN BRAIN, SIGNAL = 1.1; EXPRESSED IN BONE MARROW, SIGNAL =   1; EXPRESSED IN LUNG, SIGNAL = 1.3; EXPRESSED IN HEART, SIGNAL = 1.5; EXPRESSED IN FETAL LIVER, SIGNAL = 0.89
tgtgcctgttctccagattgctgtgtttataaattagaaaactctagcggttcttttcaagtgtaacacacctcctcacaggtcacactgtcaacctcacctccaggggtctgccgggactttagtttagttacaggtctagaagcaaacaggaatgttgagagtggcttccgaggagaatcaacatgagtttgcttggcaaccacctcaggggaggccagcactgttgcctcaggcagtacagggtttatgtcctcagacaaaggtggaaaggctgatggtagcatgggtctgggaggggatactgccactactggggatggggaagctgttccttctagcaaaaaggattcatcagagtttacaaactcagtgtccccagtttcatcagggtcctcctacacatccccagtccaagaacgtagggtcccattcttttcaatcagtgccctcactttaacagtagacagcaggcaaggatgtgcatgcaccttttgttgcaggtcagccactcacata

SEQ ID NO: 7317 - DNA, 543 bp, Homo sapiens
  MAP TO AC020906.3; EXPRESSED IN LUNG, SIGNAL = 4.7; EXPRESSED IN PLACENTA, SIGNAL = 4.4; EXPRESSED IN ADULT LIVER, SIGNAL = 3.9; EXPRESSED IN HELA, SIGNAL = 4.1; EXPRESSED IN FETAL LIVER, SIGNAL = 4.6; EXPRESSED IN BRAIN, SIGNAL = 4.3; EXPRESSED IN BONE MARROW, SIGNAL = 4.4; EXPRESSED IN HEART, SIGNAL = 4.6
atgggggtctcactatgctgcccaggctggactcaaattcctgggctcaagcaatcctcctgcctcaccctcccaaagtactgggattgcaggcatgagtccccacgcagtgtataccactcctctttgctccctccgcagggacttttgagtctctagaagtgcccagagcaggcaggggccactggttggcagaagcagtggggctgcaggcccaagtcagcacaggccatgggatggcaggggccggcgcccaaggacatgcggtctcaaaggccacagtgagtgggaacctggatgaggaggggctatgtggccgcaggagccaggaagcggcctgagccaccaggaggaaggagccaggagcagagggagctacagggcagtgccagccactgcaaacaggagccaagggcgcttgggcagccagagggcaggaggaacagggagcagggacaggaggactccggcaagagccgtggcctaggagccagagcagaggggagcacgaggcagcacgagccgagaagcaacacaaaccag

SEQ ID NO: 7318 - DNA, 515 bp, Homo sapiens
  MAP TO AL136962.6; EXPRESSED IN ADULT LIVER, SIGNAL = 1.9; EXPRESSED IN LUNG, SIGNAL = 0.98; EXPRESSED IN PLACENTA, SIGNAL = 1.4; EXPRESSED IN HELA, SIGNAL = 2.2; EXPRESSED IN FETAL LIVER, SIGNAL = 1.3; EXPRESSED IN BRAIN, SIGNAL = 1.1; EXPRESSED IN BONE MARROW, SIGNAL = 1.3; EXPRESSED IN HEART, SIGNAL = 1.4
tgcagccttcatcaaacaacaaaagcaatttctggagaaaaggtagaatcttattttcagaattaccacattacaatattcaaaatgttcacttttcaacaaaaattacaatacatacaaataaacaggaaattatagatttataggaaaaaagagaaattaagtaagaccaactgagatatctgacttactagacaaagactttaaattaacggtcttattcaaaaattgaaagaaaccatggataaagaactaaaagaaatcaagaaaacaatatatgaaaaaatagagaatatcaataaagaaacagaaattatttttaaaaagaaccaaatagaaattctggagcttaaagtaaaacaactgaaataaaatatttactaaaggagttaaattgcacattcaagcagacagaagaatcagtgaacttaaagagaatgtaattaaaattagtctgacaagcagaaagaaaaatatgaagaaaaattaagagcctaagggtcctatggcacact

SEQ ID NO: 7319 - DNA, 569 bp, Homo sapiens
  MAP TO AC019281.4; EXPRESSED IN LUNG, SIGNAL = 1.3; EXPRESSED IN PLACENTA, SIGNAL = 1.1; EXPRESSED IN ADULT LIVER, SIGNAL = 5.7; EXPRESSED IN FETAL LIVER, SIGNAL = 1.9; EXPRESSED IN BRAIN, SIGNAL = 1.5; EXPRESSED IN BONE MARROW, SIGNAL = 1.4; EXPRESSED IN HEART, SIGNAL = 2.4
tctgttcactgtcaggctgctttcagatttactgacatgccatagagagtgagatgtcacagaagctttcaattcacagtggcattcaaatgggctgagaaagggctatgcttgattctgttctactctgacagtgtagcaaatttgagaatgggaagaatgctatgtctctgggtagtgtccttttcttaccccaagacattattaaaatgatggtattgaatttattttacaatgtttatgatttaacaaataataaggtgcttcgtcgttaatgtttcaggccaaagaacagacaggagcaacggcttctgtcatttatgttcctccgccttttgctgctgctgccattaatgaagctattgaggcagaaattcccttggttgtgtgtatcactgaaggaattccccagcaggacatggtacgagtcaagcacaaactgctgcgccaggaaaagacaaggctaattgggcccaactgccctggagtcatcaatgtgagtgcaaaaaaacaaaaagaaactcagattaagcctctcacaaggctaaacagctttgagtgaatgcgag

SEQ ID NO: 7320 - DNA, 513 bp, Homo sapiens
  MAP TO AC015914.3; EXPRESSED IN BONE MARROW, SIGNAL = 3.8; EXPRESSED IN PLACENTA, SIGNAL = 3.4; EXPRESSED IN ADULT LIVER, SIGNAL = 3.2; EXPRESSED IN HELA, SIGNAL = 3.6; EXPRESSED IN HEART, SIGNAL = 5.6; EXPRESSED IN BRAIN, SIGNAL = 6.1; EXPRESSED IN LUNG, SIGNAL = 4.3; EXPRESSED IN FETAL LIVER, SIGNAL = 4.8
agtccgtaatccccatttccacctactttcccttagttatttgattccctgtctgtcgtactcagcttaagtggagcatcccctttcctgggagacacgaagcaggaaacactggcaaatatcacagcagtgagttacgactttgatgaggaattcttcagccagacgagcgagctggccaaggactttattcggaagcttctggttaaagagacccggtaagaggacagagaagccactggtttctcaggtactgatcccttcctgtcgcctctgtcaaagacctgtcagtatgtccccactttgacatagctgtcatctgcactgttgtggtctaatccgggcaggtgctggaaagtgtggcctagccaagacgtggcattcatcttgtttgctcaagtctttctgctttcttctcctgttgaaatgtaaataatgtgtgtgtgtgtgtgtgtgtgtgtgtgtgtgtgtgtgtgtgtgcgctacaagtcagcctgggtttctttagggctc

SEQ ID NO: 7321 - DNA, 528 bp, Homo sapiens; identical to SEQ ID NO: 6800
  MAP TO AC013726.3; EXPRESSED IN BONE MARROW, SIGNAL = 7.9; EXPRESSED IN LUNG, SIGNAL = 7.9; EXPRESSED IN ADULT LIVER, SIGNAL = 8.7; EXPRESSED IN HEART, SIGNAL = 7.4; EXPRESSED IN FETAL LIVER, SIGNAL = 6.9; EXPRESSED IN BRAIN, SIGNAL = 6.9; EXPRESSED IN PLACENTA, SIGNAL = 7.7; EXPRESSED IN HELA, SIGNAL =  13

SEQ ID NO: 7322 - DNA, 569 bp, Homo sapiens
  MAP TO AC015599.3; EXPRESSED IN ADULT LIVER, SIGNAL = 3.5; EXPRESSED IN HEART, SIGNAL = 3.2; EXPRESSED IN BRAIN, SIGNAL = 3.5; EXPRESSED IN BONE MARROW, SIGNAL = 3.3; EXPRESSED IN HELA, SIGNAL = 2.5; EXPRESSED IN LUNG, SIGNAL = 3.1; EXPRESSED IN PLACENTA, SIGNAL = 3.9; EXPRESSED IN FETAL LIVER, SIGNAL = 3.4
caggagaagagctgggtgaggggacgaagaaaactaactgctcccggaaccactactccagcaggagcagcacggcggagctgtgggactacagcaagagcagcggccctcacagcagccctcacagcttctcctccatccattaaccacaacacctgggcagtaagtaagtctcatcctctcaaattagtgggtgattaaatggagagccccaccaatgcaccagctctgtgttctgactcagactgtgacatcaggctgcccttggcacagacttgccaagggtcttgccttttcctttcccgcttggtgcagtcacctggaattgcttcgtgtgcagttaaaaccacacttatgatgggtttcttcgccccagaaagctgtctggcctcctttcctgagatcttctggactttctctgttttctgtgaccgtggtcttttcgaggctttttcccgatcatcttccttacacttcttttctagttcaaggtcagactcgttacctaaggagcaaataccaagatgcataaggtatccttttatatcagtggcagagttggagggtaa

SEQ ID NO: 7323 - DNA, 520 bp, Homo sapiens
  MAP TO AC021115.3; EXPRESSED IN LUNG, SIGNAL = 1.6; EXPRESSED IN ADULT LIVER, SIGNAL = 1.4; EXPRESSED IN FETAL LIVER, SIGNAL =   1; EXPRESSED IN BRAIN, SIGNAL = 1.3; EXPRESSED IN PLACENTA, SIGNAL = 1.5; EXPRESSED IN HEART, SIGNAL = 1.3; EXPRESSED IN BONE MARROW, SIGNAL = 1.3
gaaaaagagcttgccgacagacaagaggaagaggggcgttctagacacacagcactgcccaagccaaatgaagcaggcgtgaagccaggcacgcccagggggtgactcatctgctgtgcccagagctcaggccaggtaggagggagatccaggggaagggtagggcctggagatcacagaagttctgcctcctgttacctgtaagatccctgctggcatagtactgtgaaggactcaatgaaacatccctgaaatcctcatgatcatcagggctggcattcctgtagcgcttaccatgtatggggtcttgtctcagggccttacccgcattaacatgtttttctttctaacttaaaaaaataataattatagactcacaggaggttgccaagatagcagagttctgcactccctcacccagcttcccccaatggtgacatcttatgtaactgcagtgcaatattaaaaccaggcaattcacatcagtacaatactgttaacgggactgcagattttgttt

SEQ ID NO: 7324 - DNA, 574 bp, Homo sapiens
  MAP TO AC025812.4; EXPRESSED IN BONE MARROW, SIGNAL = 1.4; EXPRESSED IN LUNG, SIGNAL = 1.7; EXPRESSED IN PLACENTA, SIGNAL = 1.7; EXPRESSED IN ADULT LIVER, SIGNAL = 1.9; EXPRESSED IN HEART, SIGNAL = 1.5; EXPRESSED IN FETAL LIVER, SIGNAL = 1.2; EXPRESSED IN BRAIN, SIGNAL = 1.3
tgagcagacatggtagtggcaacaactcggaaataaaataatcttatgaggtttggtcaaatacgccaataaagctcctctgccatcttgcctctgagccatgctcatatttgtgaaatgggaggaaaaatttttctccttctttgcagatatattattctccttctttgcagatatatatgtgtgtatatatgtgtgtatatgtacacatacacatacacagaagcgcacacatatccaatagaagttggtatctatcatccagtacttcagtttttaagtataactgacacacatatacatataaattcaattaattattttacagtctgaacactttcatgtaaccaacgcccagatccagaaatacagtattaccaacacctcagagtctacctgccgcagccttccaggtaccctcaagggtaaccaacaacctgacttctagcaccactggtgaactttgacagtttccacatcttacatatgtggcactcttttgtgtctagcttttatcactgaacaagacaccatctagttttgacagatcttcgccacaaggcagccatttaat

SEQ ID NO: 7325 - DNA, 520 bp, Homo sapiens
  MAP TO AL121772.12; EXPRESSED IN LUNG, SIGNAL = 1.6; EXPRESSED IN PLACENTA, SIGNAL = 1.2; EXPRESSED IN FETAL LIVER, SIGNAL = 1.2; EXPRESSED IN BRAIN, SIGNAL = 1.4; EXPRESSED IN BONE MARROW, SIGNAL = 1.2; EXPRESSED IN ADULT LIVER, SIGNAL = 1.5; EXPRESSED IN HEART, SIGNAL = 1.3
ttggtgttttctttccccagaaagcttaggttttatgcagcttgacacctgggagaggtgtccagggtcttagatgtagaaatgtggcttgggagacattggcccatgaccctaacaccaggcgtgcaaatccccttggagcccagacccagtggcagccggggttgccgcccacctgcctgtgctgtgcactgggtgccttctgcgctcagctgcggccttgtctgtgaatccggagtgcggagccagcgggtgcctgtagtgggtggaattggggtctgcacttgcccctccgcccccaggtgggagtcacctggagcgtgaagggacgtgtctcatccccagtgtgtcggaccctggagacacagccgcagagcagccccttctcatgcatggacctcacctacgtcagcctgctactccaggagttcggctttcccaggagcaaagtgctgaaggtaagggtgccctcaggtcacgccccagcccctttatggagtgaggggcctagaaccacttc

SEQ ID NO: 7326 - DNA, 556 bp, Homo sapiens
  MAP TO AL162458.1; EXPRESSED IN LUNG, SIGNAL = 1.6; EXPRESSED IN PLACENTA, SIGNAL = 1.7; EXPRESSED IN ADULT LIVER, SIGNAL = 1.3; EXPRESSED IN HEART, SIGNAL =   2; EXPRESSED IN FETAL LIVER, SIGNAL = 1.8; EXPRESSED IN BRAIN, SIGNAL = 1.9; EXPRESSED IN BONE MARROW, SIGNAL = 1.8
ttcccattggagagatgagggaattaaggccaggagaagctaagtaacatgtccaaggtctcacacaagccagtatgttaggactagatcccagactcactgaccctgagggtggtgcccttttttctcatctgtctggtctcctgtggccctggcttgagtcctagctgcacttctgttttgcagggatcatggctggttctaaccgctctggggacctgagggatgcccagaagtcaatccccactggcaccatcctggccatcgccaccacctctgctgtctgtatcctgcacagctgtgctgggaccaccctcgggggagggcaagagggagggcagctgaacttgctgccttacctgctggtgcaggaagggtggggagggggaggactgaaccgtggggattctcctttatcctctgctgcagacatcagctccgttgttctgtttggggcctgcattgagggggtcgtcctgcgggacaagtaagataattggggttgatcctattctgggggaggggtgggtatagaaggctgagttctgggaaacag

SEQ ID NO: 7327 - DNA, 512 bp, Homo sapiens
  MAP TO AL121890.13; EXPRESSED IN ADULT LIVER, SIGNAL = 2.8; EXPRESSED IN LUNG, SIGNAL = 2.4; EXPRESSED IN PLACENTA, SIGNAL = 1.5; EXPRESSED IN FETAL LIVER, SIGNAL = 2.5; EXPRESSED IN BRAIN, SIGNAL = 2.8; EXPRESSED IN BONE MARROW, SIGNAL = 2.3; EXPRESSED IN HEART, SIGNAL =   2
gtggaaaaacttgtcagggcccagggatgaaaaatagagcttgtcctaattagctaactgtaggttcacttaacatctttgggaaggacccaaaaaatctggccattattttcttaaacatctgcaagctgcagaattccttagtcctcagctatagtttctgctagatatcttaaagctgggacagttccactgtgactcctcctcagctatggggtgggtgctagtcatcaaagtctggaatgtcatcataggagtaaccacggtagcctttggatgcatagtaagcgatgcgcaggtggtaaaatccgggtaggaacaccagaatgccaatgatcagcactggaacggcccggtctgccccctggtggcagaaggaggcaaacacattagtaccgtaagagttacacattttaaaataaaacgtcacagacctaatccttagatcagtattttatactcttcagtactttttctttgagttgtataccaccaagggaaaaggtttcctc

SEQ ID NO: 7328 - DNA, 595 bp, Homo sapiens
  MAP TO AL162390.2; EXPRESSED IN ADULT LIVER, SIGNAL = 1.2; EXPRESSED IN PLACENTA, SIGNAL = 1.1; EXPRESSED IN HEART, SIGNAL = 1.2; EXPRESSED IN BRAIN, SIGNAL = 1.2; EXPRESSED IN BONE MARROW, SIGNAL = 1.4; EXPRESSED IN LUNG, SIGNAL = 1.2; EXPRESSED IN FETAL LIVER, SIGNAL = 1.2
ctccgttcattgattgggtccattccctaaacaatggcaacaataatgattacatttattcctgttacaggatataagaagatccaagtaacagaacaatcaccatacctgattgatttcatcaactactctgaatggacatctatttagctcctgaagtgccatcaagtataacatggtagaaacacttctttcacctccactttgatgatgaggagttaattcatgcagttgagtactacttcgaaatttgactctaattcgaattccatatttatcataatcttcctataaaacatttaaaaagtgatgaaaaatgagtttcctctggtaatgtcattctattatttgaaaatggattgaattaactgagtaagagtaaagaactcaaaatttagtgacactagtttaaatatgtaacaataaatatatatgtatttttaaaaataataaatattaagcaaacagttactatctaaaagctttaagggttttcaaagaactatttagataaggaaattattcagattaaattaacattttcctcctctataccattctattcaagtttagtaggcttccccaagagttttta

SEQ ID NO: 7329 - DNA, 537 bp, Homo sapiens
  MAP TO AL133258.13; EXPRESSED IN LUNG, SIGNAL = 2.9; EXPRESSED IN PLACENTA, SIGNAL = 3.7; EXPRESSED IN HELA, SIGNAL = 4.4; EXPRESSED IN HEART, SIGNAL = 3.6; EXPRESSED IN FETAL LIVER, SIGNAL = 2.7; EXPRESSED IN BRAIN, SIGNAL =   3; EXPRESSED IN BONE MARROW, SIGNAL = 2.7; EXPRESSED IN ADULT LIVER, SIGNAL = 3.7
ttttaaaaattcccccaccctttttggagaggccctccagcaggatcctataccattccaagctagtcaccttaactgtactcttcttcagtaggtggacaaccttttattagctactgaaactaaagacagttgcctgcaacatactagggacctactttacctccttcaggagctcgggtatcgagtctcagccaagaaggtccagctttgtcttcccacagtgtcctacctaggatacgacataagccaaggaaaaagggcactcaccagtgcccggaaagaagccatcctacgaatccccactcccaccaccaagagacaggtacgtgaattcctgggggccgtaggatactgtcgcctatggatgtcggggttcgcggagattgcgaagcccctgtacactgctacaggagggaatagccggctagtttagatggacacagaagaacaggcttttcaaaatctgaaaaaggcattaactgaagcccctgctccagccctcccaaatatcccagagccgtttcacctgtttgt

SEQ ID NO: 7330 - DNA, 580 bp, Homo sapiens
  MAP TO AC019042.3; EXPRESSED IN ADULT LIVER, SIGNAL = 1.7; EXPRESSED IN FETAL LIVER, SIGNAL = 1.1; EXPRESSED IN BRAIN, SIGNAL = 1.2; EXPRESSED IN LUNG, SIGNAL = 1.4; EXPRESSED IN HEART, SIGNAL = 1.4; EXPRESSED IN PLACENTA, SIGNAL = 1.6; EXPRESSED IN BONE MARROW, SIGNAL = 1.1
tcctcctcctaaattttgcctttaatcaatttatatttttgtcccaggttttgaactctcacactgtgaagatcctggcattccacaatttggatacaagatcagtgaccaaggccactttgctggtagcaccatcatttatggatgcaatccaggctacactctccacggaagtagccttctcaagtgcatgacaggggagagaagggcatgggactatcctctgccttcctgtattggtaggatactgtcatagattttcattgaatatttctgtgaaaactttatcaaattctttgcatttttaagaaattctttctgtcctcatagaactaacactttatatcgagaaattaatgaactcatagcttgaatttgtcaaaagaaaattaatggaaaatgaaaaggtccttttcataactttattcattattcctcccataatcttctagtttgtgggggacaatatggtctctttgaagtcattttatttctgctacctcgacataaaatggaactcattactaaaatgttaagacttttaattatacacatttattgaattgcattggccagattt

SEQ ID NO: 7331 - DNA, 571 bp, Homo sapiens
  MAP TO AL161781.2; EXPRESSED IN PLACENTA, SIGNAL = 2.2; EXPRESSED IN ADULT LIVER, SIGNAL = 2.3; EXPRESSED IN BONE MARROW, SIGNAL = 2.6; EXPRESSED IN LUNG, SIGNAL = 2.3; EXPRESSED IN HEART, SIGNAL = 1.9; EXPRESSED IN FETAL LIVER, SIGNAL = 2.3; EXPRESSED IN BRAIN, SIGNAL = 2.8
atttccaccatcaccctgactgacaagatactgacccaagaccaccttacgtggcccgaaagatcattacacccttctgtccaaagagcccttggaaaggacaccagagcagccagagaagtcacccaccccctggctggccagcgacagaggcaccagggcaagaagccactggaggcccagacaagccctcccgaccttataggatgtagcgactgcccaagtttggccaagaacactgaagagacctctctgagcagaacctggtgtgccctcacccacaccccgccagatgcctctgccttcaggaacctggctgggccggtgtggcggtggcaggtgtggtgggcgtgcatcacgaggcgtacctgctcgggcttgatgggctctgtggtggtgaagatgtctgagtagtgctgcctctcaaacacgcggtccagcacctccagctgctgctgtgtgaacaagtctccccgcatctgcttccggaggaagtctctgcccggaagcgagtggccgttcggcaccggagactcctgaatacctttgatgagcaggagagaggaagggt

SEQ ID NO: 7332 - DNA, 591 bp, Homo sapiens
  MAP TO AC027341.1; EXPRESSED IN LUNG, SIGNAL = 1.6; EXPRESSED IN ADULT LIVER, SIGNAL = 1.9; EXPRESSED IN HELA, SIGNAL = 2.5; EXPRESSED IN BRAIN, SIGNAL = 0.98; EXPRESSED IN PLACENTA, SIGNAL = 1.4; EXPRESSED IN FETAL LIVER, SIGNAL = 1.1; EXPRESSED IN BONE MARROW, SIGNAL = 1.2; EXPRESSED IN HEART, SIGNAL = 1.5
ttcctcccatttggtttgaggattaagacatctccttatttatccataaacatttattaatttacctttgattcccattgccaatctgtgttctggccacattgaattatttatttggagtttctttttctaatatttctggttccctggtttttctcatgttctcattgcaccaaattctatttgctttctctccacacagagtaaatctgctcagcagcaaggctaatcttacgttttatatcttctgtgaagtcttctctgcaccccagagcaataagtgggctcctccttctctgaagtttctgagctctctagctagagcttatccatttagtcacatacaacctgctggactgcagacgccgcaggttagagttctagctgattaacctttctacctccaatagtaatcccaaagtctaatgctttttcttcattcattcatctactcattcattcacccattcaactaataactgctttaaaatcctctgggtaataggcactgtctgattaatgagtagttactcaataaccattttgttaaatgaacaagagtaagctaacaaaggtcagtttgaaaggacc

SEQ ID NO: 7333 - DNA, 589 bp, Homo sapiens
  MAP TO AL161781.2; EXPRESSED IN HEART, SIGNAL = 7.5; EXPRESSED IN FETAL LIVER, SIGNAL =  16; EXPRESSED IN BRAIN, SIGNAL = 8.8; EXPRESSED IN BONE MARROW, SIGNAL =  15; EXPRESSED IN ADULT LIVER, SIGNAL =  11; EXPRESSED IN HELA, SIGNAL = 8.8; EXPRESSED IN LUNG, SIGNAL =  13; EXPRESSED IN PLACENTA, SIGNAL =   5
ggcagcaacctcctactcacatcatggctgccctcagacccctcatgaagcccaagattttcaaaaagaggaacaagacattcatccggcagcagtcagactgatatgtcaaaattaagtgtaactggcagacacctagaggtattgacaacaggattcagagaaggttcaagagccagctcttgatgtccaacattggttatgggagcaacaaaaagacaaagcacatgctgcccagtagcttacagaagttcctggtccacaacgtcaaggagctggaagtgctgctgaggtgcaacaaatcttactgtgctgagatcgcttacaatgtttcctccaagaaccacaaagcaattgtggaaagagcagcccagctggccatcagactcaccagtcacaaagcaaggctatgcagcaaagaaaatgaatagacagcccatgtgcccattttatttctgtttaaataaaaactgcaaaaggaaaagaaaaagaaaagaaaaggacattgctacaagaaccactgtgaaatcataggcccatatgctaaaacggctgtgggagacagctgagtccatcccttctcccattt

SEQ ID NO: 7334 - DNA, 582 bp, Homo sapiens
  MAP TO AL135924.5; EXPRESSED IN HELA, SIGNAL = 3.7; EXPRESSED IN LUNG, SIGNAL = 4.2; EXPRESSED IN ADULT LIVER, SIGNAL = 4.5; EXPRESSED IN BONE MARROW, SIGNAL = 3.9; EXPRESSED IN PLACENTA, SIGNAL = 3.7; EXPRESSED IN HEART, SIGNAL = 3.8; EXPRESSED IN FETAL LIVER, SIGNAL = 3.8; EXPRESSED IN BRAIN, SIGNAL = 3.8
ttaacaagcttgagccaccctacatgtaaccatctctattattatcaatgcttataattaaagctagaaagagaagttttctaaagcggttatggggacaaaacctctcagaagcatatgcaattggacagaggataaaggtaagaagggttctttgggaaactaaaaagtgctcgattttttttttaccatttctgtcatctcaataaggttccaaaaagaagaagtatgaagtaaactcataagacattctggtctaggtttattgatataacactaggttgaactctacaatcatagttattagaaatgtcataataatcatcatggatataataactgtttacaatgacaattacgggttggaccagtgcatcctccaggcacagattgtggagcagcatgatcctcaccacaactgttcaaatggcttggaaacttggttttcaaaaggcagtttcaggatctaaaactcttttcctccattaaaaacaaaatgtgtttgagaaagccatctagagagctaccgactaattcatgtagcagctatttctttaaacatctactgggtgcctggtatgg

SEQ ID NO: 7335 - DNA, 594 bp, Homo sapiens
  MAP TO AC019058.3; EXPRESSED IN PLACENTA, SIGNAL = 2.9; EXPRESSED IN LUNG, SIGNAL = 2.7; EXPRESSED IN HEART, SIGNAL = 3.3; EXPRESSED IN FETAL LIVER, SIGNAL =   3; EXPRESSED IN BONE MARROW, SIGNAL = 3.1; EXPRESSED IN ADULT LIVER, SIGNAL =   3; EXPRESSED IN BRAIN, SIGNAL = 2.9
gatcctctcccttctcccaccctccaccttcaggtaggcctcagtgtctgctgtttccctctgtgtgtccatgtgttctcatcagttagctccaactcataaatgagaacatgtggtattttctttgcagccataaaaaggaatgagttcatatcatttacaggaacacggatggagctggaagtcatcatccttagcaaacacccaggaacagaaaaccaacgtaaaatcattgtatggaagtactgcactgccatctttgaaaatgcaaacataaattccatgacttcaaaaaatgttactcctgctgacatttcaaagacaatgtactgaaagtttgtaataccaaacatttattttgggatttaaaagggaatatattgtgtgaggtgctaacttatcggttaaacatgtagaccacttatgaagcatactagacagtaaatcaatatggccttgcccttatcaccataattattttgcaagaagtaaacatttacacatacctgagaagataaaatatatttgaaaggaatacagttgtaaaataggatattctttagcatagatcatgaccacgcttgtaggaaaaca

SEQ ID NO: 7336 - DNA, 577 bp, Homo sapiens
  MAP TO AC021557.3; EXPRESSED IN PLACENTA, SIGNAL = 1.7; EXPRESSED IN ADULT LIVER, SIGNAL = 1.8; EXPRESSED IN HEART, SIGNAL = 1.4; EXPRESSED IN FETAL LIVER, SIGNAL = 1.4; EXPRESSED IN BRAIN, SIGNAL = 1.4; EXPRESSED IN BONE MARROW, SIGNAL = 1.4; EXPRESSED IN LUNG, SIGNAL = 1.9
agctgcactcctctttcaggaagccttagctcctcacacctctcccccttcaccatgctcagtactccctctgcaacattgctcacattccctttctgcaggcacaagccagacctgtcctctttctgaccactcataacatccttatttctacctttgctttggcacttgattatattttacttaacattttgttatacactgactctcacttttgtttcttttatcacaagcatgtaaggaaaggcacaatatgtgtagaaatctccctggtttccatagaatgtccagtcagtcagcactgaatttgaattcgactgtgccatttgctagctgtgtgacctcagacaaggtacttactcataaaattgggatcttgataaccggcctcagtgggtcattaaatgagataatgcatgcaagtcacttggcagtgggtttgcatgtagtaaagattagagaaactgtggtagtggtcgttatccaagtcatcgaagttattgttacaattattagagactggggcttacatatgctagtactttgtatgatattcagcctttctaagcctcggtct

SEQ ID NO: 7337 - DNA, 547 bp, Homo sapiens
  MAP TO AC013627.3; EXPRESSED IN HEART, SIGNAL = 5.7; EXPRESSED IN FETAL LIVER, SIGNAL =   6; EXPRESSED IN BRAIN, SIGNAL = 6.4; EXPRESSED IN LUNG, SIGNAL = 8.2; EXPRESSED IN HELA, SIGNAL = 6.8; EXPRESSED IN PLACENTA, SIGNAL = 6.8; EXPRESSED IN ADULT LIVER, SIGNAL = 7.1; EXPRESSED IN BONE MARROW, SIGNAL = 7.1
ccacagacatttccccaaacatgttctgaccttctgcttggaggtctccttgaggacattctcagagaaacctctgttgcggtattagaactgatcactcatccctttccattattaaatgttctctactatctcaccttaggcagtataaagccctggttcactctcaggcaaaagagctgacccagttacgggagaagttacgggaagggagagatgcctcccgctggctgaacaagcatctgaaaaccctcctcactcctgatgaccctgacaagtcccagggtcaggacctccgagagcagctggctgaggggcacaggctggcagagcaccttgttcacaagctgagcccaggtaaggtggccatgggccctgatgacacacagcttcaggcttatgaaagtccccagacctccacacctccacaatgacaattgtatgggtagtgtttctttccagtaaacttttgtggccacgacatgatcagaatttcttgggtgggagcagagatgggaaacccatggggtggaggttacagaatggc

SEQ ID NO: 7338 - DNA, 515 bp, Homo sapiens
  MAP TO AL133372.2; EXPRESSED IN PLACENTA, SIGNAL = 2.6; EXPRESSED IN ADULT LIVER, SIGNAL = 2.5; EXPRESSED IN HEART, SIGNAL = 2.3; EXPRESSED IN BRAIN, SIGNAL = 2.3; EXPRESSED IN BONE MARROW, SIGNAL = 2.6; EXPRESSED IN HELA, SIGNAL = 2.3; EXPRESSED IN LUNG, SIGNAL = 2.7; EXPRESSED IN FETAL LIVER, SIGNAL = 2.3
ccagacacatgcaacctagcaagattgaccatgaagcaatccaaaatctgaacagacctaccaagattgaccatgaagcaatccaaaatctgaacagaccaataacaagtaatgagattgaaaccataataaaaattctcccagtaaagaaaagcccaagacctgatggcttcattgctgaattctaataaacatttaaagaactaataccaatcctactcaaactattcaaagaaatagaggaggaggcaatacttccaagctcattctatgaggccagtattaccttgatatcaaaatcaaagatacattaaaaaaattacaggccaatatctctgatttgatattgatgcaaaaatcatcaacaaagtacgagcaaatggaattcagcaaggcattaaaaagatcttttattatgaccaagtggaatttacctccaggatgcaaagatggttcaacatacacaaatcaatcaatgtgatgcatcatatcagcagaataaaggacaaaaacca

SEQ ID NO: 7339 - DNA, 513 bp, Homo sapiens
  MAP TO AC021079.2; EXPRESSED IN LUNG, SIGNAL =   2; EXPRESSED IN HEART, SIGNAL = 1.8; EXPRESSED IN PLACENTA, SIGNAL = 1.9; EXPRESSED IN FETAL LIVER, SIGNAL =   2; EXPRESSED IN BONE MARROW, SIGNAL = 2.1; EXPRESSED IN ADULT LIVER, SIGNAL = 1.8; EXPRESSED IN BRAIN, SIGNAL = 2.4
ggagtagcaccctaaacccctacttccaggccacttcagatactggattggaaacttttctttagggaaattcaataactccagtgaaaaatctagagacgccatttttataacattctttaaacatggatattcatttctctcttttttggggtgggggtgtttggttttggtgttatttgtttgtttatttcttgacattgagagctgaatgaaagcctcaggctgaaaccccttccttttgaacatgcattgtcttttcttcaactggttgaagtctttctcctgttgtagctgttgcttggcctgctaacttttccccatccccaaaccctgcttagttcaggctgtcattattcctcacttacaactttatgatagcttccttacctgggctttctgccactagaattatcatttctgaagactttgcgttctgtagctattgattcattcaagacctgaatctgtatctgcaactgtgagatactgactaccattttcaaatcgccc

SEQ ID NO: 7340 - DNA, 520 bp, Homo sapiens
  MAP TO AL050342.42; EXPRESSED IN LUNG, SIGNAL = 0.94; EXPRESSED IN ADULT LIVER, SIGNAL = 0.8; EXPRESSED IN FETAL LIVER, SIGNAL = 1.1; EXPRESSED IN BRAIN, SIGNAL = 1.2; EXPRESSED IN HEART, SIGNAL = 1.2; EXPRESSED IN PLACENTA, SIGNAL = 1.3; EXPRESSED IN BONE MARROW, SIGNAL = 1.2
tggggtgtccctctagtcaggagtaagggagctttccatggtgaccttgtcctgtcccagcttcaccacccagggcctcaggacaaagggcttgaggtgcagaagctgaagctgagagccgatgacctgcctgaggtcacacagtcctgggaggtagagcagagtgtggtgagccccacccgtccagcaccaaaagtccccttgcagtgtgaagatagaactgagaaagatgtggctcaaacatggcccagtgtgagtcaagagttgtcccctcgttctcacccttcaaggtcagcaggaggaaatggccaaggagctaaggcagctgggccgccaacgatcaggccaatttaagagacgtctatggcaggggtggagcctgagaggggtcccaggctccctgaagcgggtgaggggagggcttagggagggagctgggggcagggcggagagggcatcggctggagtattctggaacttctcccctctgtgcctactttctttggtacccctcctagcc

SEQ ID NO: 7341 - DNA, 561 bp, Homo sapiens
  MAP TO AC007000.2; EXPRESSED IN PLACENTA, SIGNAL = 1.8; EXPRESSED IN ADULT LIVER, SIGNAL = 0.99; EXPRESSED IN FETAL LIVER, SIGNAL = 1.3; EXPRESSED IN BRAIN, SIGNAL = 3.2; EXPRESSED IN LUNG, SIGNAL = 1.2; EXPRESSED IN HELA, SIGNAL = 2.6; EXPRESSED IN BONE MARROW, SIGNAL = 2.7; EXPRESSED IN HEART, SIGNAL = 1.3
taccttctctcaggccgatgacctcaggcctccacggtccctggagctctaggaaaggcgagcgcgatctcgcgcccacacccagtgctctgggtcataagcctggatctggaaaaacaaacgccctttgagaagacggggactcgccaggatacccctctctcccctcatccagcctccagcccacccgattcctccccacctcctccacctccccaggccccactcacctcctccaactcctcccgggaaacccaagccctgccgctcatggaacagaagaactggaaccgaagtttctggaacagggctatctgagagcggttcttcctggccctcgggttcaagcaacggcataactggaaccgacggttacggaccaagggtatgcgagagcgggtcttcccatacaggaagtagaagatgttttgtttggggtcctcgtcgtcctcctccatgtcattggccaggtagctgaggacagaaatcaggttggtgctcaggggcaccaccaggagaggcctccggctgaggtcagcttcccagagaggaaggtaaggg

SEQ ID NO: 7342 - DNA, 501 bp, Homo sapiens; identical to SEQ ID NO: 7121
  MAP TO AL121903.13; EXPRESSED IN PLACENTA, SIGNAL = 1.8; EXPRESSED IN ADULT LIVER, SIGNAL = 2.3; EXPRESSED IN HELA, SIGNAL = 2.3; EXPRESSED IN HEART, SIGNAL = 1.7; EXPRESSED IN FETAL LIVER, SIGNAL = 1.8; EXPRESSED IN LUNG, SIGNAL = 1.7; EXPRESSED IN BRAIN, SIGNAL = 1.9; EXPRESSED IN BONE MARROW, SIGNAL = 1.7

SEQ ID NO: 7343 - DNA, 560 bp, Homo sapiens
  MAP TO AC011226.3; EXPRESSED IN BRAIN, SIGNAL = 1.2; EXPRESSED IN PLACENTA, SIGNAL = 1.7; EXPRESSED IN ADULT LIVER, SIGNAL = 1.4; EXPRESSED IN FETAL LIVER, SIGNAL = 1.1; EXPRESSED IN LUNG, SIGNAL = 1.4; EXPRESSED IN HEART, SIGNAL = 1.4; EXPRESSED IN BONE MARROW, SIGNAL = 1.2
gcagaacagtatgcaatgcctaccgtttccacagcagtgttcaggatggccagggggaagagagaaaaaggatctaccatgttaatctcttgcttaaaagtctccagtgataacttttttctaaagcagaggttttcaaactttttcaagcatctgaagcagaatttctcaaccttggtgctatacatatttgggcccagataatggtttatcagggcctgtactgtatattagggagagttagcagcatcattggtgtccacccactaaatgtcagcagcatttccacccctagtcgcacagtgactccaggacttttccttgggaaggcaaaattattcccagtggaaaactgctgaactaagactcgttcatatcctctcgacctcaaaagcatatcaattatatagcagaaaaaaaagcagagtagatttcaaatcactgtcacatatggactccttttactacctatgtgccctaagaaagatatatccccttctcttttctcattcaacatgtctattacaattcagctcagatcccagttcctctcaaagctg

SEQ ID NO: 7344 - DNA, 563 bp, Homo sapiens
  MAP TO AC018730.3; EXPRESSED IN HELA, SIGNAL = 5.3; EXPRESSED IN LUNG, SIGNAL = 6.9; EXPRESSED IN PLACENTA, SIGNAL = 6.8; EXPRESSED IN HEART, SIGNAL = 6.3; EXPRESSED IN ADULT LIVER, SIGNAL = 7.4; EXPRESSED IN FETAL LIVER, SIGNAL = 6.3; EXPRESSED IN BRAIN, SIGNAL = 6.8; EXPRESSED IN BONE MARROW, SIGNAL = 6.5
tacgttgggaaagggagttgtaataagagttgggagtttgaggttatcagtgacccagaaacaaggtgatgtgaaaaaagaagagttgtgctagactgaagaaaaaaaattagatgatctataaaatgactgtgagtggagaagccctttgtcctagtccagctactaacagcataagcaatcagcacaggtgttgttgtcgttgttgttgctgctgctgctgttgttgttgttgagtgacgcatgtgagaagcgtggggcaacctctcaggctctccaagttctgtaggtcggttggtcatctcagctcctcagggctgctggtctgagggcctgaagttcacccatgtgacctcctgggtgcaggatcctcacggtaggcttgacgttgatttcaataaggaaagcagaagcctctgcgtttgcatcctgaactttgcagcctaggaaaggaaatagtgcgcaggctggaggagctgggggtgggggcagcggagatagcaggaggggtacttgtgtaatcagattctttgattttgttagcctggctcatggcctattaa

SEQ ID NO: 7345 - DNA, 549 bp, Homo sapiens
  MAP TO AC022609.2; EXPRESSED IN PLACENTA, SIGNAL = 1.7; EXPRESSED IN ADULT LIVER, SIGNAL = 2.1; EXPRESSED IN FETAL LIVER, SIGNAL = 1.4; EXPRESSED IN BONE MARROW, SIGNAL = 1.6; EXPRESSED IN LUNG, SIGNAL = 1.7; EXPRESSED IN HEART, SIGNAL = 1.5; EXPRESSED IN BRAIN, SIGNAL = 1.4
tgctcaactggatcagcaacctgacctgccccacccttcctgtgcagagatcttggtgcaagggggccctgtctgctacatacccaagcagatctccaggaattcagagcacctgctcacttagatcagcagcctgagctgccccacaactcctgtgcagagattagctgcagggggctctctctgttccattctcagacagatgtccaagtatctggagaatatactctccttgattaggaatttagactaccccccatccccatgcagttaacttgaggccatggagatttctcacctccgtgcctaggcaaacctctgagcgcttggtggccagacactgtattctccctttggcactggtgtttcctcctgccatcagaggacctgtcggcagatttgcctgatccagctctactcatcttggcccctgccacctggggagtgagcagggagctcagaccactgtgcattccaagcatcagcccattgcctgaggtaacgtagacaatcactggtaaacaaggatcaagtgtacacccagccatg

SEQ ID NO: 7346 - DNA, 558 bp, Homo sapiens
  MAP TO AL139819.2; EXPRESSED IN LUNG, SIGNAL = 3.9; EXPRESSED IN ADULT LIVER, SIGNAL = 4.3; EXPRESSED IN HEART, SIGNAL = 2.6; EXPRESSED IN FETAL LIVER, SIGNAL = 4.7; EXPRESSED IN BRAIN, SIGNAL = 4.8; EXPRESSED IN PLACENTA, SIGNAL = 4.7; EXPRESSED IN BONE MARROW, SIGNAL = 4.5; EXPRESSED IN HELA, SIGNAL =   5
ctcccccaggatctttcttcaagtgctggaaatctggtcactgggccaaggaatgcctgcagcctgggattcctcctgagccatgtcccatctgtgccagaccctactggaaatcagactgtccaacttacccaggagccactcccagagctgctggaactctggcccaagactctctgactccttcccagatgttctcggcttagcggctgaaaactgatgctgcccaatcgcctcagaagcctcttggaccatcacagatgctttgggtaactcttacagtgaaggggaagtctgtccccttcttaatacagaggctacccactccacaataccttcttttcaagggcctgtttcccttgcctccataactgttgtgggtattgatggccaggctgctaaacctgtcaaaactccccaactctggtgccaacttggacaacattcttttatacactcttttttagttatccctacctgcccagctcccttattaggtcaagacattttaaccaaattatctgcttccctgactgttcctggactacagccacacct

SEQ ID NO: 7347 - DNA, 590 bp, Homo sapiens
  MAP TO AL139258.2; EXPRESSED IN PLACENTA, SIGNAL = 5.2; EXPRESSED IN ADULT LIVER, SIGNAL = 3.8; EXPRESSED IN HELA, SIGNAL = 7.5; EXPRESSED IN BRAIN, SIGNAL =   5; EXPRESSED IN BONE MARROW, SIGNAL = 5.2; EXPRESSED IN LUNG, SIGNAL = 3.7; EXPRESSED IN HEART, SIGNAL = 7.5; EXPRESSED IN FETAL LIVER, SIGNAL = 3.3
cggtagtggaggaacagagctgggtgcctaatcaactctaattgtggtcctctacgtagaatgttctctcccaagtgcagtggcaaggggagtgaattcagaacaattttaatgagtacctagaaagtatgaggcttcatgcctacagaaagcgtaaaggtcagaacgatagttatacaggcctgaagcaggttgctttcactgtgacagcaggaaatctctgaggctgcagcctcctggtaaatacaacagccctttccctccagagatcctctctctgtgtgtacatgcctctcctgacttgcccttgccccaggtcttgtgcagaggacagaggggaccctcatctttcatgtcgcttcccagcaagcccttgtgtgtcctgtgccaattgcagctgaagatatttcatttcctgatatttgccaaatcaccttttacctagttcctgatatttattctgtcaagatggggcacagccatgacccgagagaccagacagacccacacaggcaagaccgattaggcaaagcccagtaagatgcaacaaaccccagtggcatgtcccatgagggttggcagactgacag

SEQ ID NO: 7348 - DNA, 552 bp, Homo sapiens
  MAP TO AL137853.3; EXPRESSED IN BONE MARROW, SIGNAL = 2.9; EXPRESSED IN LUNG, SIGNAL =   3; EXPRESSED IN ADULT LIVER, SIGNAL = 3.2; EXPRESSED IN HEART, SIGNAL = 2.8; EXPRESSED IN FETAL LIVER, SIGNAL = 2.3; EXPRESSED IN BRAIN, SIGNAL = 2.7; EXPRESSED IN PLACENTA, SIGNAL = 2.8; EXPRESSED IN HELA, SIGNAL = 2.6
attctcaagtgcaacctggccgagggccacaaaaagtttagctaagggaggcttcagtgagaagcagcacccccttggggacacagcctgcactgtggaaatgccacctctctccccttgcctgagtgaagagctgttagatccagaattgcatgttctcataacccccagcctgagagagaaaacagagtctgagctaaagtttgaggaggatgagcgatggattatgatggaggctgagggagagtgggaggaagagaaactgtcagacagggaaaagacttttctgatggcagatgagaagaacagcctggcagatatttttgaagaaagagaacaagcaaacacagcagtggtggaggatggatccgattgcttagctgctgtcttgaggacttttggccacctatctcttggtcagatttgttgccctgatgacccacagccagccaaggaccagttggctactgttcccaaggatatacccctggattgcgattgtgttcttacaggtgaggatattctcggtgaggtggcaaacagaactgctca

SEQ ID NO: 7349 - DNA, 524 bp, Homo sapiens
  MAP TO AL137248.4; EXPRESSED IN PLACENTA, SIGNAL = 0.81; EXPRESSED IN ADULT LIVER, SIGNAL = 1.1; EXPRESSED IN HEART, SIGNAL = 1.3; EXPRESSED IN BRAIN, SIGNAL = 1.1; EXPRESSED IN BONE MARROW, SIGNAL = 1.1; EXPRESSED IN FETAL LIVER, SIGNAL = 1.1
aaacatgtccctggtgatccatgcctttttgttagcataataatgaactggtcataaattcactccttgaaagtagcaagaacaaaagcttttgcctatcatagcagaaatagtcattgtaatttgcctggtgcattagcacaaaccaacacagttatcatatcctggcattcttaatttttgtacaggcagtctcatcagctatagccagtgtctttctagtacaacaatgtcaaaatggtcatgtgccatcagtattatagacttcttctggcctcagatttttatcagtgatgaccctggcaaaatcaacaatgaatttctccactgcttcatgatcagcagatgctttatcactacaaatctttaaaaatttaatgttgaacttcttcttaaatttctgcaaccagcctgttaaatattcatggttctcttcaattttcaactcacactgacatatctttacttgtttcatgattagcataccattaattggcatgtgttcactgccactctgatggatg

SEQ ID NO: 7350 - DNA, 592 bp, Homo sapiens
  MAP TO AC008812.4; EXPRESSED IN PLACENTA, SIGNAL = 1.2; EXPRESSED IN ADULT LIVER, SIGNAL = 1.1; EXPRESSED IN HEART, SIGNAL = 1.2; EXPRESSED IN FETAL LIVER, SIGNAL = 1.8; EXPRESSED IN BONE MARROW, SIGNAL = 1.3; EXPRESSED IN LUNG, SIGNAL = 1.3; EXPRESSED IN BRAIN, SIGNAL = 1.2
gagaggaatggtctctccccattccaagcggtccacccaacatggacagtcaaggaagggccctgattttcaagggcttgaaggctgggcagatatgggaatatggacaacctaatctgagcccagccctgaccagcctcccccaacagaacgcctgtgccgccactgtcccaaggactggacattcttccaaggaaactgttacttcatgtctaactcccagcggaactggcacgactccgtcaccgcctgccaggaagtgagggcccagctcgtcgtaatcaaaactgctgaggagcaggtacacgtggtgggggtcctcgtcctggcctggggcatggcttctggccaactggggaggaggtgctcagagaggattttgcagaagaggggctttgctctatttggaaagatgggaagagaaggatatgaatgaaggggtcccaggtacccttcaagcaaatacaaaccagatctgaacacatgtgaatatttgggggaaacgtcaaatgtaagcaaaccaccacagcatgctgcaggtgtttaacggccagctctccggagagaaaattcctgatgtgttgtgtttgcc

SEQ ID NO: 7351 - DNA, 500 bp, Homo sapiens
  MAP TO AL138796.2; EXPRESSED IN LUNG, SIGNAL = 1.1; EXPRESSED IN PLACENTA, SIGNAL = 0.77; EXPRESSED IN HEART, SIGNAL = 2.8; EXPRESSED IN FETAL LIVER, SIGNAL =   2; EXPRESSED IN BRAIN, SIGNAL = 1.3; EXPRESSED IN ADULT LIVER, SIGNAL = 1.1; EXPRESSED IN BONE MARROW, SIGNAL = 1.6
gcaaatgcttcctatttgcagactataaatgcactacatgacacttgtctgatctgtgcattaatccttacttggctttcctgctccctggtgctcacagactgaagcaggccttgaatctccatttcatgttccagcacttgtttatttcgatcacttagaaggtcctgcagcatcctttcctttcgctgtagacgctggcacagctcctctgctatctcactctgccctggtccaagtttgcagagcagtgttgcactaagatcctaatgcagaaaggacactgtaagcttctggaggaaagaaatgcctctgctaaatatcaaagggcttataagaatctatcatagaagaaggaggtgtgagattcttgagaataagtatcatgttttactcatttttgttttaccagatctagcacaggcctgctacacagaagtctctaaatacatgtcccaggaatgaatacaaaccatacagaaaactatctctggtggcca

SEQ ID NO: 7352 - DNA, 512 bp, Homo sapiens
  MAP TO AC011207.3; EXPRESSED IN PLACENTA, SIGNAL =  12; EXPRESSED IN ADULT LIVER, SIGNAL =  13; EXPRESSED IN HELA, SIGNAL =  16; EXPRESSED IN BRAIN, SIGNAL =  12; EXPRESSED IN BONE MARROW, SIGNAL =  14; EXPRESSED IN LUNG, SIGNAL =  12; EXPRESSED IN HEART, SIGNAL =  12; EXPRESSED IN FETAL LIVER, SIGNAL =  14
gtctagcttgggtgacagggtgaaactgtccattcttctcataataaatgcccattctcttcacaataaattgaaaattagtttgcaacaaacttattcctgcccttttttgtattcagggtttggcaagaccttctgagttaatttaggacaacttagtgtttagcataactctttcacagatttgctgtattatcagtgtctgatgatgttgacaatgttgaagaagaagaaagaagaggagttggaggaggaggaagaaaacatccagagcattcaatttattctagttaaattactaaccagaaagagaatgccctcggaagtctactttataatgctgtttggttctaagtaaagagcatctaatagggagacatgtaaatcctgtttccaaaacacacttagaggattacagcatgtgaaagatttgctccctacctggctcagagctacgaaggtcacattggctgtcaaaggacatgtcttctggctagaagaagccctggtga

SEQ ID NO: 7353 - DNA, 535 bp, Homo sapiens
  MAP TO AC016535.3; EXPRESSED IN PLACENTA, SIGNAL = 1.4; EXPRESSED IN BRAIN, SIGNAL = 1.4; EXPRESSED IN BONE MARROW, SIGNAL = 1.3; EXPRESSED IN LUNG, SIGNAL = 1.8; EXPRESSED IN ADULT LIVER, SIGNAL = 1.5; EXPRESSED IN HEART, SIGNAL = 1.4; EXPRESSED IN FETAL LIVER, SIGNAL = 1.2
gtctcctgattctagccccctacttcttttacttacctcactcgttgatgttctgtagaatctttggtcataatcaggaggagtggttcctcccacagaatcacaagatagtagttatttattggtttaggatcaggaacaatattttaaccttaaaatactttccagtcttacttcatcttgtaccatcattcttctaaccaaaatagtttagcctaactacacacagcttaggaaggtctttaaagcagtattatgcccctttctctactctcatcacagactcctgacactcatcccttgatcttttatgactctgatctgagggctatgacagctgaattgctgcaaatcctagtgagtgataccaccaatattgctcattccatttgatacttcaagaaatattgtttaaccaaaataaaaagaataaaacaatttaaaaaagcaaaatatgtgaattaaaatatcttaaataaattgattgttgagaaaaattattcagtaaagcaaccgccagaaaatcagccaaaaa

SEQ ID NO: 7354 - DNA, 538 bp, Homo sapiens
  MAP TO AL136438.8; EXPRESSED IN LUNG, SIGNAL = 1.3; EXPRESSED IN PLACENTA, SIGNAL = 1.1; EXPRESSED IN FETAL LIVER, SIGNAL = 1.1; EXPRESSED IN BONE MARROW, SIGNAL = 1.2; EXPRESSED IN ADULT LIVER, SIGNAL = 1.3; EXPRESSED IN HEART, SIGNAL = 1.3; EXPRESSED IN BRAIN, SIGNAL = 1.2
aaggaacatgagttggctgctgcctgtctacaccgcagccttggtctgctcctaaggcaaagctgtcccactctttcttaaattcctcccatctcccttgccccaggaacagcctaagctctgtagctgctcactcaaggggctttctgactgcccccaccgagcacagcctcctgctctgacatcgatgtgacaatgcctgcgtcatgattccctgctgcctacaccccctcctcacccacattcccactgctctgcttttctccagacaaaacctgcaccgcaaactccctcgcatctggactcccctcggctaacttcagctctatcctgaagaccacctccagtgtcgtctccttcctggcggggtcctctgatgcttctcccatctccgtcaggccctccttcccctctgccagcttcacttccccctcctccactctcttcccatcagaatactcagcccatgcccagaaatcaccatttccaggcctgtcttcctggaaggactgattcctgcaaggcaaaggtctgttct

SEQ ID NO: 7355 - DNA, 556 bp, Homo sapiens
  MAP TO AC025738.1; EXPRESSED IN PLACENTA, SIGNAL = 1.6; EXPRESSED IN ADULT LIVER, SIGNAL = 1.6; EXPRESSED IN FETAL LIVER, SIGNAL = 1.5; EXPRESSED IN BRAIN, SIGNAL = 1.6; EXPRESSED IN BONE MARROW, SIGNAL = 1.5; EXPRESSED IN LUNG, SIGNAL = 1.5; EXPRESSED IN HEART, SIGNAL = 1.4
ttctatgccacttgtgtgccgaatacaattccaaaattaagaagattccattttttaaaaagttgctgaaaataaacgtttgggaacaaaaggagggaattctaaacacacctgttaccccacaaagaattatgtactgcatctttagctgttgtctgcaaggaccccactttaacccgggtattagaggatcctgaggaagcctgggaaggcgagtagtctgagtaagtgcctgaggaaacactgttattcagacagtgagttttgtcaacttcagactcatcagttgattctgaaatttaaaggggaaaatgttataatgctatgacactgacaattacacggaaaagcaagtatgaaaaatggaaaccataccgattaaggttagaaatgcatatttgtaaaacatttgtatagaatatggtgtatcataatttacaactggcgattcatcatgcacatgcatttgtagcatattttccacattgggttcacagtgttaccttttttgtccttccctagcagaacaagtttgggtgggtacagaggggtctca

SEQ ID NO: 7356 - DNA, 571 bp, Homo sapiens
  MAP TO AC015529.3; EXPRESSED IN LUNG, SIGNAL = 1.1; EXPRESSED IN ADULT LIVER, SIGNAL = 0.99; EXPRESSED IN BRAIN, SIGNAL = 0.96; EXPRESSED IN BONE MARROW, SIGNAL = 1.1; EXPRESSED IN PLACENTA, SIGNAL = 0.92; EXPRESSED IN HEART, SIGNAL = 1.2; EXPRESSED IN FETAL LIVER, SIGNAL = 0.97
ggaactttccctccctcatcaactagagggtgatggaccagataccctcaaagggcatgaaaggtgaaaaccggtgccattactccctttcagtgttcctgatcttaaaagcagagccattaatccacttctacaagctagacatccagtacccctacttgtcacatccctcttcctccaagtttctggcacagtgtgagcaaacattctttcttgaatgatgaatgagtgtctcaatgcagtcattaataagcatttcaagcaaaaagagtttgcttatttctatttaccagggtcattttgatcaaagtttaaaaaatgaaataaattatttcaaagttcataatgaacaaattaaatactttcattgaaaccatccagattttttagcatcccatagatgtgaccacaattgcagacatttattagagtattctttgaattattatagaaactcagaactttattgctaaattagacttcaacaattttctagtagagcttcctcattttatgagaaagacttttaggagatctgcgaaaggttatccagtcaggtggtgtatgagca

SEQ ID NO: 7357 - DNA, 554 bp, Homo sapiens
  MAP TO AL109824.21; EXPRESSED IN LUNG, SIGNAL =  13; EXPRESSED IN HELA, SIGNAL = 6.5; EXPRESSED IN BRAIN, SIGNAL =  16; EXPRESSED IN PLACENTA, SIGNAL = 8.4; EXPRESSED IN ADULT LIVER, SIGNAL =  13; EXPRESSED IN HEART, SIGNAL =  12; EXPRESSED IN FETAL LIVER, SIGNAL =  14; EXPRESSED IN BONE MARROW, SIGNAL =  16
agacttgttggtgaggtggggctgctgcaagggagttgggaccctagagggccctccctgcaaactcttcatctgaggagctgtgaactggcctgggttgctcatctgaggaaagtttgtgtgggcttgtgaggcttgctggctgccaaagggatatggagggggagggtgggaaggcgtctgtaccgtggctaaggatggtcttgcctggagttgctgttgcattgggccgggcaagggagccttcttccacccttggtttgcagtcattgtgcccagagaaccctgggctggaggaggttgaagggctccagaaggcagctggttccagcctggaggaacaggcacctgagttggggcagtaaactggggtcgaattccctgtggctgttgctgctgatgttgctgtgggggtcttgcctgcaactgttgttgctgctgttgctgttgttgctgctgctgctgctgctgctgctgttgttgttgttgctgctgctgctgcagctggggaaaattagctgggttcatttgtctgttcacagagacaggctgca

SEQ ID NO: 7358 - DNA, 544 bp, Homo sapiens
  MAP TO AP001435.1; EXPRESSED IN ADULT LIVER, SIGNAL = 0.86; EXPRESSED IN BONE MARROW, SIGNAL = 0.97; EXPRESSED IN PLACENTA, SIGNAL = 0.72; EXPRESSED IN HEART, SIGNAL = 1.2; EXPRESSED IN FETAL LIVER, SIGNAL = 1.4; EXPRESSED IN BRAIN, SIGNAL =   1
ggcgtcttggtcttcttcaccgctgcgaaatcgcgtcacctaccgctactggcggattcgggaggtgctgaagcacgccaagcacttccggcgggggagcggggtgcgggggaaattgctgctacaggttggcggtcagagccgggactggagcctttgtgaaatgcaccaaagccggaaacctgaagaagaggaccatgaggaccctctggattaatcgaattacagctgctacccaggaacacggcccgaagtacccagcgttcactggcaatttaattaagtgccaggtgaagcgccacaagaaagtcccagcgaatctggccatctacgaaccagagacttttaaatctttggctgccttggccaataggaggcgacaggaagaatttgctgctgccttaggagatgggaaggcagcatatttttccagaatggtacagtaccgctgaggaccgttgctgtattgactaggaaaagacacagagtaatttgcattttatttgatttgtgcttgtgtttatccacattcgagtaacaggca

SEQ ID NO: 7359 - DNA, 520 bp, Homo sapiens
  MAP TO AL137026.10; EXPRESSED IN ADULT LIVER, SIGNAL = 2.1; EXPRESSED IN HELA, SIGNAL = 2.7; EXPRESSED IN BRAIN, SIGNAL =   2; EXPRESSED IN LUNG, SIGNAL = 2.4; EXPRESSED IN PLACENTA, SIGNAL = 2.2; EXPRESSED IN BONE MARROW, SIGNAL = 2.6; EXPRESSED IN HEART, SIGNAL = 2.2; EXPRESSED IN FETAL LIVER, SIGNAL = 2.2
tcccagtgtaaggatccagggggggccgagacccaaaagcttgtctgcatggagtgaagcatcgtggaagcatctaagcagaaatgtgagcacaatgaggccagagaagggtggtttagagaacgatggtttggagaacagtggtttagagaagggtggtttagagaatgatggtttagggaacagtggtttagagatcagtggtttagagaagggtggcttagaaaacgatggtttagggaacggtggtttagagaacagtggtttagagataagtgatttagagaagggtggtttagagaatggtggtttagagaagggtggtttagagaacagtggtttagaaaagggtgttttggaggatgatggtttagggaatggtggtttagagaatgatgatttggcagggaacactggaagcagggagagagtaagatgcaggggcatgtggacaaaaccttgagtcaagtgacacagggagaacacgtccattcaggtgactttccacctgagcttctgg

SEQ ID NO: 7360 - DNA, 600 bp, Homo sapiens
  MAP TO AL117381.9; EXPRESSED IN PLACENTA, SIGNAL = 0.99; EXPRESSED IN FETAL LIVER, SIGNAL = 3.5; EXPRESSED IN LUNG, SIGNAL =   2; EXPRESSED IN BRAIN, SIGNAL = 1.6; EXPRESSED IN BONE MARROW, SIGNAL = 4.7; EXPRESSED IN ADULT LIVER, SIGNAL = 1.7; EXPRESSED IN HEART, SIGNAL = 1.4
caaggggcttggttcttacccagccgccgttctcctggatccaaggctctaggtggtcattcaggtaagtggccatccaagctgcgatccgactcaccaatacctgcatctccttgtctacgctttccacgcacagtgccccgccgaaggagaaaaaggccacaatgcgaccccagtttaccccatcccggaagagttcattcactacctgttcaaagctctgatatgctgtccctggggtgatgtggagctgggatgtcaggtcactgaatgcccgccggtaccgcagttcaaactcgtcgcctgcctccctcagcgcttgctttactgctgccatggggatcacctcccgggcatccaaactgctgctgtggccagtggctccattcaccgcggggctgtctgccaggtgccaggatgggttgccattgatggcactgggggtctccatctccgattcagtcccttctggggcctcagtcctgttctcttccacatcactaaactgactccagctgtatcctttctgggaaagcttgtaggagagaaagtcaaccaccagctcccggttgctctgagacatttttataatagggatgg

SEQ ID NO: 7361 - DNA, 580 bp, Homo sapiens
  MAP TO AC019222.3; EXPRESSED IN LUNG, SIGNAL = 1.4; EXPRESSED IN PLACENTA, SIGNAL = 1.7; EXPRESSED IN FETAL LIVER, SIGNAL = 1.7; EXPRESSED IN BONE MARROW, SIGNAL = 1.6; EXPRESSED IN ADULT LIVER, SIGNAL = 1.5; EXPRESSED IN HEART, SIGNAL = 2.3; EXPRESSED IN BRAIN, SIGNAL = 2.2
ttgagtggtgagctgtggtgttaactggatttctttctgaacaaagtcattgaccattttgtaagcaaaaagtccattctccaagctctaattgtgtcaaactcttaaatttcttgtgacctattctgtttcagtgcctcaattgatgacaaggttggtagacatgttaaaatgatcgacaatgtctataatcctgcagccattgctgttgattgggtgtacaagaccatctactggactgatgcggcttctaagactatttcagtagctaccctagatggaaccaagaggaagttcctgtttaactctgacttgcgagagcctgcctccatagctgtggacccactgtctgggtttgtagtctgttttccatcacagactttggaatggtatctgtgtaggtcaggagctttctcatacctgaattagtactcaaatctcaaggtttatgagccttctgcaacaaagaattagaattctaatttaagatatcagttttgccccaggtgagtgaccctgggatgtccttatctatatgacaggtcctcctgtctgactctcgtatgactgattgctggct

SEQ ID NO: 7362 - DNA, 516 bp, Homo sapiens
  MAP TO AC008166.2; EXPRESSED IN ADULT LIVER, SIGNAL = 1.4; EXPRESSED IN PLACENTA, SIGNAL = 1.2; EXPRESSED IN HELA, SIGNAL = 2.6; EXPRESSED IN HEART, SIGNAL = 1.6; EXPRESSED IN BRAIN, SIGNAL = 1.7; EXPRESSED IN BONE MARROW, SIGNAL =   2; EXPRESSED IN LUNG, SIGNAL = 1.2; EXPRESSED IN FETAL LIVER, SIGNAL = 1.9
ctcacacactcgcaatgtcccacagtaggccagctgcaagctgaggagcaaggagagcctatccaagtcccaaaactgaagaactcagagtccgatgttcaagggcaggaagcatccagcatgggagaaaaatgtaagctgggaggctaggccagtttattcttttcacatttttctgcctgctttatattctagccacactggcaactgattagatggcacccaccgagattaagtttggttcacctttcccagcccactgactcaaatgttaatctcctttggcaacaccctcacagacacactcagcatcaatactttgcatccttcaatccaatcaagttgacactcagtcaacacttaatcatcacaaggtggtatttggttacatgaataagttatttagtggtgatttgtgagattttggtgcacccatctctggagcagtatacgctgaacccaatttgtagtcttttttccctcaccctcctctcaccctttaccctgcatctccaa

SEQ ID NO: 7363 - DNA, 581 bp, Homo sapiens
  MAP TO AC010458.2; EXPRESSED IN HEART, SIGNAL =  26; EXPRESSED IN BONE MARROW, SIGNAL = 0.99; EXPRESSED IN ADULT LIVER, SIGNAL =   1; EXPRESSED IN BRAIN, SIGNAL = 1.1; EXPRESSED IN LUNG, SIGNAL = 1.7; EXPRESSED IN PLACENTA, SIGNAL = 0.93; EXPRESSED IN FETAL LIVER, SIGNAL =   1
gaagaccagtgaggctggagcctcctgaatgaggctgagagagagggctagagaggtaggcagggtccagatcatatgggaccctgaaggacacagatgaagtttagtttggattccaagtgcgataggagagccagggaggcagtttaattagggtggtgaccgattcagtttatatggtaaaacatctcactctctctctctctctctgagcatggattaggggtgggtgtgtaaacttagaagttgggagcagttgagaagctaatggtcctggtgacagataatggcagtttaaggttgggtaccagaatggatatgggagggaagtggatggactctggaaacctggagatggatgaagaagaattacacctggattggatgtggagagtaaggagaatcagagatgacatcaaaggttccagcttctgcaacctggtagatggaggggtgttctcaggggaggagaacaaggtaggatgaaggggatcttccccttttctctggtctggacagacggggtccttcacattgccaagcctggctcctgtctcctatccccaccatctctttgctaa

SEQ ID NO: 7364 - DNA, 504 bp, Homo sapiens
  MAP TO AC022995.2; EXPRESSED IN PLACENTA, SIGNAL =   5; EXPRESSED IN BONE MARROW, SIGNAL =   4; EXPRESSED IN ADULT LIVER, SIGNAL = 4.3; EXPRESSED IN HEART, SIGNAL = 3.1; EXPRESSED IN BRAIN, SIGNAL = 4.1; EXPRESSED IN LUNG, SIGNAL = 4.6; EXPRESSED IN HELA, SIGNAL =   4; EXPRESSED IN FETAL LIVER, SIGNAL =   4
acccaagcatacacatcagcctaggcctacacaaggtcaagatcctcaatatcactgtcttccacctccacatcttgtcccattaaagggtcttcaggggcaatatcacccaaggaactgtcatctcctatgataacaacgcctacttcaggaataccccctgaagaacctgcctgttttacacttagctttttttgcaaataaataggagtatactctaaaataacaaaaaatatatagtatggtaaatacagaaaccactaacctagtcatttttgttatttattattaattattatttattatcaagtattatgtactatacataattgtatgtgttagacttttatatgactggcagcacagcagatttgttaactctagcatcaccacacatccatgagtaatgcattgcactgcgatgttatgatggctacaacatcactaaatagtagacatttttcagctttattataatattctgggacagttctcatgtatgcg

SEQ ID NO: 7365 - DNA, 517 bp, Homo sapiens
  MAP TO AC022392.3; EXPRESSED IN ADULT LIVER, SIGNAL = 4.4; EXPRESSED IN BRAIN, SIGNAL = 2.9; EXPRESSED IN LUNG, SIGNAL = 4.4; EXPRESSED IN HEART, SIGNAL =   3; EXPRESSED IN BONE MARROW, SIGNAL = 4.5; EXPRESSED IN PLACENTA, SIGNAL = 3.5; EXPRESSED IN HELA, SIGNAL = 3.1; EXPRESSED IN FETAL LIVER, SIGNAL = 3.7
aaaccaaccacaacattcccttaagccaaaacctaaaccagagcatgtccctaactctcttcaattctaggaaagctgagagagacaaggaagctgcagaaaatttggaagctgctagcgttggttggttcatgaggtttaaggaaagaagacatctccataacataaaagtgcaaggtaaagcaggaagtgctgatggagaattggcagcaagttatcccaaggatctagctaagatcactgacgaaggtggctacaataatcaacaggttttcgatgtagaccaaacagccttctattgaaagaagataccatctaggacttccatagctagagaggagaagtcaatgcttggcttcaaagcttcaaaggacagactgattctcttgttaggggctaaggtagctggtgactttaagctgaagccaatgctcgttgacccttctaaaactcctagggaccttaacaattaagcaagatgtactctgcctgtgcttgtaaatggaacaggcctgga

SEQ ID NO: 7366 - DNA, 527 bp, Homo sapiens
  MAP TO AL161781.2; EXPRESSED IN LUNG, SIGNAL =  14; EXPRESSED IN ADULT LIVER, SIGNAL =  17; EXPRESSED IN HEART, SIGNAL =  13; EXPRESSED IN FETAL LIVER, SIGNAL =  14; EXPRESSED IN BRAIN, SIGNAL =  13; EXPRESSED IN BONE MARROW, SIGNAL =  16; EXPRESSED IN PLACENTA, SIGNAL =  15; EXPRESSED IN HELA, SIGNAL =  23
taaagtctccgcctcacagggctgttgagagaatttaatgagttaatacaggcaaactgcccagatcagtgcctggcacatcatttgtactctattgttacaaaacagcatggtcaggggctagaaagtgttcagctttgagttctctacaccaagatgcacacatatacctccccctaaaggaacagcacgcaggaaactctgcagtgctccatcaggaagcgactccctgaggagtgctccgtcaggatgcagtgctccatcaggaagcgactccctgaggagtgctctgtcaggatgcagtgctccatcaggaagcgactccctgaggagtgctccgtcaggatgcagtgctccatcaggaagtgactccctgaggctcgcagaggggccatggcccagctgcccctgagcttcaggaactccgcaatgccaagcagcgctgcctcgagcatttccgtgtgtttctcccggtgcacagatggacagctcgaatttgtaaatcagggaacttttcatgggaacca

SEQ ID NO: 7367 - DNA, 585 bp, Homo sapiens
  MAP TO AL078591.18; EXPRESSED IN LUNG, SIGNAL = 1.8; EXPRESSED IN BONE MARROW, SIGNAL = 1.6; EXPRESSED IN HEART, SIGNAL = 1.7; EXPRESSED IN PLACENTA, SIGNAL = 1.9; EXPRESSED IN ADULT LIVER, SIGNAL =   2; EXPRESSED IN FETAL LIVER, SIGNAL = 2.2; EXPRESSED IN BRAIN, SIGNAL = 1.8
attgtgaccaaaaacccaccacatacatggtatccacctggcctgcctccatgtcactcccatgggacttggaagagtgaatacaagggaaactaacatgaacaggaagctcatgctgcttgctatgctgtgcataatcaaaccttttgtctttgacccaagagtcttgtgtcttctgccaacatatatgaaactgtggcagactagcttgttaggttgcaagtttggtaaaatctaagattttacagttcttgaaatgacatagaagactcttgtctgtctccttcctagagagtaagaatctagctgacagccttctaggagcccagtagagaacaattctgatctctgcacttagtattcaatatgcctatgctcgtatattcatgctctctcagttttgccaggtgatttttagttcagaggacttctattctcttcagagaataaacttccagacttctgctagggtgaaggaggggacagcgacctagtggcctgtagtaggggaaagaacacaggaatcagttttcttctttgctgataggttcccttctcaagaaagcattgcctggcttttctgtt

SEQ ID NO: 7368 - DNA, 600 bp, Homo sapiens
  MAP TO AL139389.3; EXPRESSED IN ADULT LIVER, SIGNAL = 1.9; EXPRESSED IN FETAL LIVER, SIGNAL = 2.4; EXPRESSED IN BRAIN, SIGNAL = 1.6; EXPRESSED IN LUNG, SIGNAL = 1.8; EXPRESSED IN PLACENTA, SIGNAL = 1.9; EXPRESSED IN HEART, SIGNAL = 2.7; EXPRESSED IN BONE MARROW, SIGNAL = 1.8
gacagcaggaacacaaaacctacctgcccatgcttttgctgaggggccatcccatgaagcatttcaggatgtgatgaggtcttgagatcagtcccctgtgttttgggacgcactacatcagagaccagactggacgagatagctagagacttgggccggacagctgcggtgccaatcccccctggggggccttgttcaacttttctgcttgcagcctcatcttccccttcggagtccacaataaggacatattcagctttgaagaggtcactttgctgcatcccttgaagtttgtttgcttcgaattccctttcttgtaaaatcgttccactgacctctgaaggacaagtcaatttcgcttggtctctctcttgttggctcccagcattcaaggtcaagtagtcattggatttagactgtaatagatgtagagagataaaagcattgacattagtttaataaatgcttcttttttggcatgtacactgaaaagcttaacctccttatattttcaaaaatatattaaattaggttgacataagaaagagattgggttgaagttagcagtttatttttactagcccactagcccacctgttt

SEQ ID NO: 7369 - DNA, 578 bp, Homo sapiens
  MAP TO AL161747.1; EXPRESSED IN ADULT LIVER, SIGNAL = 1.7; EXPRESSED IN HEART, SIGNAL = 1.5; EXPRESSED IN BONE MARROW, SIGNAL = 2.4; EXPRESSED IN LUNG, SIGNAL = 1.9; EXPRESSED IN BRAIN, SIGNAL = 2.8; EXPRESSED IN PLACENTA, SIGNAL = 1.6; EXPRESSED IN FETAL LIVER, SIGNAL =   2
tccaagggccagagtaaatgaaaatacagcagccgcccaagcaatggggcccatgctggggcttcagtcatcagcatcttcactggagtctgagttagctggcatcataggatcatcaatgagtgagaagtccctttctgagctatcatagccctgagataagtcatcatcatcttcttcatcctcatcgtcatcctcctcaggttgcagtggtggcaaccgcaaggtagtaccagaggcggtagtcactggtgaagaggggtagccagggggctctcaagcctggatggtgatggtggtgatggtgggggtgggggtggtggtggtggtgatgaagcatggtgctggagtctacatgaggggatgatggtgcaccacccatcacaaatggcataaaaggcaaagatgcagaagtggcactgctgtgacccaaagatgacacagactgtaggccactactgctgtgttggaacgtgttatgcagagatagagacccagtgcttccaccctgcatgagggccatcatcttagaaaggtctggtcgcatcctacgggcccgcttcttgctgctctctggt

SEQ ID NO: 7370 - DNA, 588 bp, Homo sapiens
  MAP TO AC016549.4; EXPRESSED IN BONE MARROW, SIGNAL = 4.6; EXPRESSED IN PLACENTA, SIGNAL =   5; EXPRESSED IN ADULT LIVER, SIGNAL = 5.4; EXPRESSED IN FETAL LIVER, SIGNAL = 4.7; EXPRESSED IN BRAIN, SIGNAL = 4.3; EXPRESSED IN LUNG, SIGNAL = 5.4; EXPRESSED IN HELA, SIGNAL = 7.2; EXPRESSED IN HEART, SIGNAL = 4.7
tgagtcacaagacagccagcaattgcctgcagatagtccatcactaccttcaatacaagggttttgatatggggttcaaagtttaacaatctaaaacaacagcgggaaaggaattctgcatagaattcccaaaatcatctctccccatcatatttttctgtttgattcatgtaagtgatcaaaaatatcacaaattgactgtgttgctatatattatggcgcccagcctggctggtctgcttttcacttaccttctgtttctctgggatgttctcttgtgcagaacacatacaccaatgcggataaattactggaagcagcagaacagctggctcagactggggaatgtgaccccgaagagatttatcaggctgcccatcagctggaagaccggattcaagatttcgttcggcgtgttgagcagcgaaagatcctactggacatgtcagtgtcctttcacacccatgtgaaagaggtaaggtgccaggagaccaaaatatgatctgtgcttgaaagggtctttgaactcttttggaggaacctaaatttagtcataatgtgagaaagtggacaaaggtggcaagttgt

SEQ ID NO: 7371 - DNA, 518 bp, Homo sapiens
  MAP TO AL133227.7; EXPRESSED IN HELA, SIGNAL = 2.4; EXPRESSED IN BONE MARROW, SIGNAL = 1.4; EXPRESSED IN LUNG, SIGNAL = 1.3; EXPRESSED IN PLACENTA, SIGNAL = 1.4; EXPRESSED IN ADULT LIVER, SIGNAL = 1.6; EXPRESSED IN FETAL LIVER, SIGNAL = 1.3; EXPRESSED IN HEART, SIGNAL = 1.7; EXPRESSED IN BRAIN, SIGNAL = 1.5
ctctctggaggatgagtggcacgtgctcaccgagttcagccttctgcaggagcatctgggtgagggtccagcgaatgccaccgatgaacgaggcccccagcaccaaggcgaagccctccacgttgaactgtgtggacttgtaggtgaacatgaagagacccccggcgatgaggaggaccaccaggaccagtgccgcgcgctggtaggatggggagcagtggcagctaactcgggggtcttgagggtcaagggttcatcacatttggagcctggggtcagcagccatcttggctgcccctggggcaagaaatccttccacccttcagctccatcccagggggtcctggacagtccttgcccaccaatgtcagcatgtagggctgacggtcagctggtatgccaacagccctgcttgctctgccacactgacggctgtcctaggcccccaagtggtcccacctcctccctgggcctaacacacagggctactgcctcccacagcagggtgcttcctagac

SEQ ID NO: 7372 - DNA, 598 bp, Homo sapiens
  MAP TO AL121903.13; EXPRESSED IN BONE MARROW, SIGNAL = 2.1; EXPRESSED IN LUNG, SIGNAL = 1.9; EXPRESSED IN PLACENTA, SIGNAL =   2; EXPRESSED IN ADULT LIVER, SIGNAL = 1.7; EXPRESSED IN HEART, SIGNAL =   2; EXPRESSED IN FETAL LIVER, SIGNAL = 2.1; EXPRESSED IN BRAIN, SIGNAL = 1.9
gctgatagctattgggtggccctttgtttttcgttcttttttttccgttttacaatcgtagccaaattattccaggcaatttgttttcttataaattggatcagcttgttggtggttgttttttttccccataatatattttcttttcatttcatagatattgatactagacgcagggctgcttgtgatctggtacgaggattatgcaagttttttgagggacctgtgacaggaatcttctctggttatgttaattccatgctgcaggaatacgcaaaaaatccatctgtcaactggaaacacaaagatgcagccatctacctagtgacatctttggcatcaaaagcccaaacacagaaggtaaatatttttaatgtggttttgtttctaaaacagacatcagtgacacccacacaagtcaaaaagaaataacgtctctgataatagagcttactctgccagataacctattctgattaagatttatataatctctgaagatggctttatgttgatgtattgagcacttaagtttcttatagaccagaaaattgatagatggccacacttgttaccttagctgagacccgctgtatca

SEQ ID NO: 7373 - DNA, 541 bp, Homo sapiens
  MAP TO AL121881.25; EXPRESSED IN BONE MARROW, SIGNAL = 1.2; EXPRESSED IN LUNG, SIGNAL = 1.4; EXPRESSED IN PLACENTA, SIGNAL = 1.4; EXPRESSED IN ADULT LIVER, SIGNAL = 1.7; EXPRESSED IN FETAL LIVER, SIGNAL = 1.3; EXPRESSED IN BRAIN, SIGNAL = 1.2; EXPRESSED IN HEART, SIGNAL = 1.3
gcggtatcactgaaagaggcactgaagagttagaagaaacagtcttaaatcgctgaccccaccccttccctatcctaggcagtggcagtatggtgtaaagagcatctctggaagctggacgagcaagagcagagcagttgtgggtcgctgacctcggtgctgtctcttacaggagaaaggaaaaccagaccaaacttagctgactcccatctgggaagggagcattgaaaccacctctagccagagggaaattacccatcccaggaatcagaacttgagtttctgcaaaccttgccaccaagggctaagaaacggttccaggtttctcagacaaccttaaaggcagtctaggccataagatctctaactcgtaggtgagttctagcatagaattgggcccagaggcagtggattgtggcgggtatgtggaggggtgcacatgacctcctgagataccagctggggcagccaagtgagtgctggtgtcacccctgccctagccccagactgcccagctagcggctccataaaagaccccctc

SEQ ID NO: 7374 - DNA, 592 bp, Homo sapiens
  MAP TO AC011815.2; EXPRESSED IN LUNG, SIGNAL = 1.8; EXPRESSED IN PLACENTA, SIGNAL =   2; EXPRESSED IN FETAL LIVER, SIGNAL = 2.1; EXPRESSED IN BRAIN, SIGNAL = 2.3; EXPRESSED IN HEART, SIGNAL = 1.5; EXPRESSED IN ADULT LIVER, SIGNAL = 2.2; EXPRESSED IN HELA, SIGNAL = 2.7; EXPRESSED IN BONE MARROW, SIGNAL = 2.1
agatacctccaagcctgctgaggtgggggtgccttcccaggcccctagagtgcagagatatccaggttggtccgcagccacaacctgggtggctacagctgcacaaaggaggtgggggatgcaggaagggctcatgcctgctccagcactcctgcctgctttggcactcctgcctgctcccagcctccaagaacacggtctgtagcaaggacttgggtggctgcagttgcacccaggagagcagggctcctgcctgctcctggtctccaagaacacagggaggctcagccagcagccatgacttgggcagctgcagctatgcctggggagctcccacccgccaacttggaaggagctgggctcctgcttgtccccgctccctctggctctgtgaagctcacagcatgggcagagcctcctggctgcagccagcatcttggcagtggccactccagatggtccagatggcccactgttgccatcaacaacactccagcctgggcaacagagtgagagactccatctcaaaaaaagagaaaaaggaaaaggaataacaatcctaaacatttatgcaaattgtgagcttcaaaat

SEQ ID NO: 7375 - DNA, 547 bp, Homo sapiens
  MAP TO AC019221.3; EXPRESSED IN LUNG, SIGNAL =   1; EXPRESSED IN ADULT LIVER, SIGNAL = 1.2; EXPRESSED IN HEART, SIGNAL = 1.2; EXPRESSED IN BRAIN, SIGNAL = 1.2; EXPRESSED IN PLACENTA, SIGNAL = 1.3; EXPRESSED IN FETAL LIVER, SIGNAL = 1.2; EXPRESSED IN BONE MARROW, SIGNAL = 1.2
gagttctgctgggtggtactgtaattaaaatgacttttagaaatcctttttctcttgttagcgagttacctgttatcatcatgagaatcctgaattaaaattgagcttccatttctgagcccttgctccctgaacgtcttcctcatgtcttccttggggatggccgtccaaccctccccacctggacatccagcactgttgatgaagatgacacctgctgggattgctaaggctgtgaggacagtgcccacttctgcattagctggaaagacatgtggagattctatcacctgacaacacttttctccatcactgcttgtgtctagatgaagaacatttaaaagtagaggttcgcagtcaataccagtttgaatgtggactccaccaacctgcaatcataccaagacaaccattagtacagctgatatttgccaacaccgtcaacataacatggtaaaagattactcttagagaacaaccctcattttttccaagtaaaataaaattttcacaaatgtctgttaagcatcagaggaacaacttcaga

SEQ ID NO: 7376 - DNA, 515 bp, Homo sapiens
  MAP TO AL133324.7; EXPRESSED IN PLACENTA, SIGNAL = 7.4; EXPRESSED IN ADULT LIVER, SIGNAL = 8.5; EXPRESSED IN FETAL LIVER, SIGNAL = 8.2; EXPRESSED IN HEART, SIGNAL = 7.8; EXPRESSED IN BRAIN, SIGNAL = 6.8; EXPRESSED IN HELA, SIGNAL = 8.5; EXPRESSED IN LUNG, SIGNAL = 8.3; EXPRESSED IN BONE MARROW, SIGNAL = 7.1
tagggtgggtcagtgctttcaccaagtaactagaggtctgtggttccccagggaaaatcatgaggcgagtgcttcggaagattgctcagaatgaccatgacctcggggacatgtctactgtggctgacccatctgtcatcagtcacctcttcagccaccgctgcctgaccatccagtgaacatgatcctgacctttacctaggattcctcctgctccaaactttgcccatcctctttgccccctcaggagtgctgagggccagtgttgacccacactaccctcccttgaccagctgtctgggaccggaaaccagctttgtctccaggtagagacaacatcctgtgactgccaggcagaaaggacagggcccaggtcagcctcagtctgctgtgcctccagactgcagagctctcagaacccagaacagagacgaaaaggctacctctcctacccaagttaagtgttcaaaggggatgtgagggcctccactgaagcagggaggcagctgtgtaat

SEQ ID NO: 7377 - DNA, 524 bp, Homo sapiens
  MAP TO AC009416.2; EXPRESSED IN LUNG, SIGNAL = 1.1; EXPRESSED IN PLACENTA, SIGNAL = 1.2; EXPRESSED IN ADULT LIVER, SIGNAL = 1.3; EXPRESSED IN FETAL LIVER, SIGNAL = 0.94; EXPRESSED IN BONE MARROW, SIGNAL = 0.78; EXPRESSED IN HEART, SIGNAL = 1.5; EXPRESSED IN BRAIN, SIGNAL =   1
ttgctaaatggatgctaaaaacactataaagttatcaaatctctaaaagacctaaaaatagactataagtctttgacataacaacaaaaaaagcacacttactcatatgaacacacatacaaacatcaaacaacaaaaagacaatctgtggagtaagagaggacgagtggaggtggtggtgagggggacattaaaaacagaggtaaatatctgttgtatcaattaagattctttaataaggtcaaaacatagaaaaaacagatctatagatatccacatctaaaacaaactgttcaagagtctataactcagaaactttaaaagtaaaaaaaagaagtcaaagataaaccaggtaaatgataacaaaaccaaaaagaatcataatattaatatcagaaaagagtaaagttaaaaactatcaaagaacataaagggttattttacattcaacaatagtaattgagcaattactaggcaccagatactattctatatactgttagaatgggcagactttaaatcaa

SEQ ID NO: 7378 - DNA, 529 bp, Homo sapiens
  MAP TO AL121673.27; EXPRESSED IN LUNG, SIGNAL =  11; EXPRESSED IN PLACENTA, SIGNAL =  11; EXPRESSED IN ADULT LIVER, SIGNAL = 9.8; EXPRESSED IN HEART, SIGNAL =  10; EXPRESSED IN FETAL LIVER, SIGNAL = 9.9; EXPRESSED IN BRAIN, SIGNAL =  10; EXPRESSED IN BONE MARROW, SIGNAL =  11; EXPRESSED IN HELA, SIGNAL = 3.3
acaggactaggtgggcagtgcggccgccccttgggctgcacagtcctgcaggaccaacattcctaggccctctggattctgtggagtttctgtcacttccttgcagagtgggggctggggaggccgtcatgtgggatgtgggggcgcaggcccaggcacggcaggcaggcccacccccttccctcccagcagcttctgggtgccacctccccggcctttcctcaggcagatgttggagcccgagtcagggagactgtgggtggtctgcttgttctccagctccagcagaggggatggtggggtctgcatgttgttgtctgctgcagacaggcccagatgccatctgcaccccgtggggcagctctgcaggatcgtggtgcaggagctgtgggagcccaaccccctggccccccagtctggaataaggtgcaccgcgggatggagctcctcagccgcagagtgagcgctgatggcagagcatgctcgtccattcgcccgtgtgctggctccttcttccaggagctgttcg

SEQ ID NO: 7379 - DNA, 509 bp, Homo sapiens
  MAP TO AC022308.7; EXPRESSED IN PLACENTA, SIGNAL = 2.7; EXPRESSED IN ADULT LIVER, SIGNAL = 2.8; EXPRESSED IN FETAL LIVER, SIGNAL =   2; EXPRESSED IN BONE MARROW, SIGNAL = 2.2; EXPRESSED IN HEART, SIGNAL = 2.2; EXPRESSED IN LUNG, SIGNAL = 2.7; EXPRESSED IN BRAIN, SIGNAL =   2
aggatccggtgtgaatgaagtttgctgacagtctatcatttagaggtagttaagctgcattactggatgtcaagttcagtcttctctttgcttccattttgattctcctcctacaaaattattgctttgaatacagggagctggccttttccttctttcttgtcccagtgcaggaagatggaattaatcctgttacatgaaattacaactataagttcaaagatcttaattcaaaatgtccctgtcttgattatgggatagtctctcagtggtttcttgttgcatttttttttcatttgtaaaatggtactaatgcctcttacctacaatatggacaaaatgaaaataaatgagcaaaatgtgtgctttaatttaaaattgcctttaactattctgccaaaccaatggaagcttcggattgatgttttacccaggccaatcatcagtaaaaataacaggatgctgtataacgtggtatgtaagtggagcggacccaggagtctgattga

SEQ ID NO: 7380 - DNA, 547 bp, Homo sapiens
  MAP TO AC018742.2; EXPRESSED IN LUNG, SIGNAL = 2.8; EXPRESSED IN ADULT LIVER, SIGNAL = 2.7; EXPRESSED IN HELA, SIGNAL = 3.9; EXPRESSED IN FETAL LIVER, SIGNAL = 2.3; EXPRESSED IN BRAIN, SIGNAL = 2.3; EXPRESSED IN PLACENTA, SIGNAL = 2.8; EXPRESSED IN HEART, SIGNAL = 2.5; EXPRESSED IN BONE MARROW, SIGNAL = 2.2
tttcctttttggccattttgtgtttattcagaagagttcatagaaacaatcttcaaattttaaagcaaatataaccatgagcatttccctgaagctaaatccaagaccacacgtctacacatcttcatttctcaattgcataattttggagatggtgttttctgtgtggaaaaggagtccagactcatctgtgacttttttggaaaaactacaaaaagattgagatggttactacaacatcttattcttattagtctgcattagcttgtttgggctaccataacaaaataccacacactagatggcctaaacaacagaaatttatttcctcacagttctggaatctgaactctgaaatcaaggtgccggtctggttgttttctggttggtctcttcctggcctgcagatggctggctgccttctagctatgtcctcttgtgacctttcactggtgcctgcatacagagagagaaagagtatgagctctctgatgcacattcttataaaggcatcaattctatgcaatcagggccccatctttatgat

SEQ ID NO: 7381 - DNA, 580 bp, Homo sapiens
  MAP TO AL121889.3; EXPRESSED IN LUNG, SIGNAL =  13; EXPRESSED IN PLACENTA, SIGNAL =  12; EXPRESSED IN HELA, SIGNAL =  20; EXPRESSED IN HEART, SIGNAL =  12; EXPRESSED IN FETAL LIVER, SIGNAL =  12; EXPRESSED IN BONE MARROW, SIGNAL =  11; EXPRESSED IN ADULT LIVER, SIGNAL =  14; EXPRESSED IN BRAIN, SIGNAL =  11
gctgaggtgcagagaggttcagagacttgctcaggtctcacagctccgagtgctcaagttgaattttgactcaatatcacatgaatgcccccgacacaaccctaccacctaaaaactaaaaggaagatatgaaagcaaatgtagagagaatatagctagtagtcagaggtaaagtgaagagtcccaaagactcagaaataaaatcactgtctgaccctttgtccagaaaattcctgacgtaatggatgggcctcatcatcccgagaaacccagagtcagagtcaggaataagcaggtccttgaggaaatgaggaatgggatgaagaagaatgttcaggagggagagcatggccacaagggtgactgtggcctgccctagggtggggagtgcaaaagcaagatcttggagctcttgggttccttccctgctctcctgcccactccagattccatcagttatggcctttggaggctgtctgatctctgccctgcttcctggctcacccagccactgcttgtcaccaattcagcttcctgggtgttctgatgttcgaaagagggtgtgtgaatggtggacgag

SEQ ID NO: 7382 - DNA, 531 bp, Homo sapiens
  MAP TO AC011790.4; EXPRESSED IN PLACENTA, SIGNAL = 1.6; EXPRESSED IN BONE MARROW, SIGNAL = 1.1; EXPRESSED IN LUNG, SIGNAL = 1.6; EXPRESSED IN ADULT LIVER, SIGNAL = 1.2; EXPRESSED IN HEART, SIGNAL = 1.7; EXPRESSED IN FETAL LIVER, SIGNAL = 1.1; EXPRESSED IN BRAIN, SIGNAL = 1.2
gatgaatatcccaactgcccttatttgatcattatacattgtatacacccatcaaaatatctcatgtaccccccaaattatgtacaacaattctatatcagttaattaactaattaatttttaaaaggacactatccgttctgtcaccaaacttatttccaagaaaactgtggagacttgtcagaagcccctgtctccctaagcctaccttctttctgtttcattcaggtttgccataagtgttcttgctgcgaatgggatgagaatggatttggttgtatgtgtggttgcagacaatctacaggctgtgaacaaaggtgggaagtcacatggggagatggggcggggggcgctgttctggagaaagaaggcagagaaaaggctccaaaacccttcagggaataggtgtttcagtggtgttgtgtggatgagaagcaggaacaccttgagtgactactatttggatagctacagatgaaataaaggctcaggtgaggaagaagtgtcatgagaagtcttgggcaactgagg

SEQ ID NO: 7383 - DNA, 563 bp, Homo sapiens
  MAP TO AL121988.10; EXPRESSED IN HELA, SIGNAL = 2.6; EXPRESSED IN LUNG, SIGNAL = 3.4; EXPRESSED IN PLACENTA, SIGNAL = 3.1; EXPRESSED IN ADULT LIVER, SIGNAL = 3.2; EXPRESSED IN FETAL LIVER, SIGNAL = 2.8; EXPRESSED IN BRAIN, SIGNAL = 2.8; EXPRESSED IN HEART, SIGNAL =   3; EXPRESSED IN BONE MARROW, SIGNAL = 2.9
ctgagcccagaaagatgaggtcacccgaaaggaggtcgtcttgtttgcaggaagaggtggtaccgtgggggtgatgacctgtgcacatggcttgagctttccttgctgccaggcactcgtggcatctcttgctcaccaggtagatgagctccacgaggttgagcaggatgcagatggcagctgtggccaccatgaagagggtgaaaatgttcttctctgagggcttggagatgaagcagtccactatattgggacatggatctgcgtggcacttgaccacaggagggaggatatatttggggtagaatgagtggaacacatagagaaaggcgatgtccacgctcgccttgaacactaggctgcagacatatgtccaccagagcccaccccgcttcttgccggggttcaggtagaggcgcccactgttctccccatgggcttctcggtgcctcttctcctgaacctcccggtaggccacgtgcatgaccacgagcagtgaggggcatgtcaccaggataagctgcagggcccagaggcgcacatgggacacagggaagaactca

SEQ ID NO: 7384 - DNA, 522 bp, Homo sapiens
  MAP TO AL121894.14; EXPRESSED IN LUNG, SIGNAL = 1.5; EXPRESSED IN ADULT LIVER, SIGNAL = 1.4; EXPRESSED IN HEART, SIGNAL = 1.5; EXPRESSED IN BRAIN, SIGNAL = 1.5; EXPRESSED IN PLACENTA, SIGNAL = 1.5; EXPRESSED IN FETAL LIVER, SIGNAL = 1.7; EXPRESSED IN BONE MARROW, SIGNAL = 1.5
ctctgctgtttcccaagctctaataagcaaaccattagcttccccaggaaaataattttggggggaattgttttcttgctttattttggagacagttaccattactttaaaattaaatactatgatgagagacagagagacagagatatcaaggtaagaaaacttccaaattaccccaaaacttctggacagaaaagagttgaagagggggaaggcaaaaaagacattcttggccttgagtagtcaatgacatgtttatttaccagagatgacaattgatattatgtattctttaatgatatatgatttttacattactcattgacaggtgacagatagtttggagtactatattgaggtcaaaattgcccgaacaatttgcaagaaaatttcagaagatgaaaactgtgcatttcaagaggatcccaaaatgcaaaaggtatgtagctgagacaaggagaaccccttgcactggtaagacttgtgtaccagatcatattcaggactgtggatgaccaggtt

SEQ ID NO: 7385 - DNA, 596 bp, Homo sapiens
  MAP TO AC010477.4; EXPRESSED IN LUNG, SIGNAL = 9.9; EXPRESSED IN PLACENTA, SIGNAL = 4.4; EXPRESSED IN ADULT LIVER, SIGNAL = 4.5; EXPRESSED IN HEART, SIGNAL =  16; EXPRESSED IN FETAL LIVER, SIGNAL = 5.4; EXPRESSED IN BRAIN, SIGNAL = 6.2; EXPRESSED IN BONE MARROW, SIGNAL = 7.2
ctaggtccagaggcaggatggcatgggggacaatgtagcccttgtagatgagcaccatgtgggtgaccccatctctacagttcatgacaatgccagtggtgtgcccagaggtgttgagggacagcactggcctggatggccacatacatggctggggtgttgaaggtctcaaacatgatctgagtcatcttctctgttggccttggggttcagaggggcctcagtcagcagcaacatgtgctcctccagggccatgcacagctccttgtagaaggtgtgatgccagatcttctccatgtcgtcccagttagtgacgatgccatgctcgatggggtacctcagggtcaggatgccatgcttgctctgggctttgtcattcacgtaggaatccttctggctcatgccccccttcacgtgctggtgccgggggcaccagatgatggaggggaaaacagctcccccagcaaagccagctttgcacatgctagagccattgtcaatgagtgccgccatctcttcttccattgcagcgggcagcggagctgggctcggagcggcagggggacatggtgtgtggggtggtgatagcgagtcat

SEQ ID NO: 7386 - DNA, 500 bp, Homo sapiens
  MAP TO AC021973.2; EXPRESSED IN LUNG, SIGNAL = 3.5; EXPRESSED IN PLACENTA, SIGNAL = 3.7; EXPRESSED IN ADULT LIVER, SIGNAL = 3.5; EXPRESSED IN HEART, SIGNAL = 2.8; EXPRESSED IN FETAL LIVER, SIGNAL = 3.9; EXPRESSED IN BRAIN, SIGNAL = 3.3; EXPRESSED IN HELA, SIGNAL = 2.5; EXPRESSED IN BONE MARROW, SIGNAL =   4
actgggacatggttagacgccatctacagggaagagaagataatctcactttagacatttccaaattaaaagaacaaattttcgaagcatcaaaagcccatttaaatttggtgccaggaactgaggcaattgcaggagttgctgatggcctcgcaaatcttaaccctgtcacttgggttaagaccattggaagtactacgattataaatctcatattaatccttgtgtgcctgttttgtctgttgttagtctgcaggtgtacccaacagctccgaagagacagcgaccatcgagaacgggccatgatgacgatggcggttttgttgaaaagaaaagggggaaatgtggggaaaagcaagagagatcagattgttactgtgtctgtgtagaaagaagtagacataggcgactccattttgttatgtactaagaaaaattcttctgccttgagattctgttaatctataaccttacccccaaccccatgctctctgaaacat

SEQ ID NO: 7387 - DNA, 565 bp, Homo sapiens
  MAP TO AC018672.2; EXPRESSED IN LUNG, SIGNAL = 1.1; EXPRESSED IN PLACENTA, SIGNAL = 1.6; EXPRESSED IN ADULT LIVER, SIGNAL = 1.3; EXPRESSED IN FETAL LIVER, SIGNAL = 1.5; EXPRESSED IN HEART, SIGNAL = 1.6; EXPRESSED IN BRAIN, SIGNAL = 1.5; EXPRESSED IN HELA, SIGNAL = 2.7; EXPRESSED IN BONE MARROW, SIGNAL = 1.4
cagaagcccaaggttgagacctagtggagcagagggctcacagttacctgactaaattttggtcaaagaggaagtctttgtcacagtgaaggcagagttctttcaaccacactaatatacttttaacaacgaggcctagagttttactcttcagcaccaggcctggaggtattccgtcagaaatagcatgatgctgttgaatacaagaaactatagtaaggttaagatcttctgatccaatatttgccttttctgactgcatgtgtgagacatactgtttataaaaaatacgcagaataaaatcttatgttagatctccctggtttaaaaatctttgttattcatttagtaaacaaatgcaatgttttcctatgcatggattaaaatgatcaccttggtgtactttccaagtatccatgtagaatagtttacacatttcagaagatactctactaagcagatgacagaataataagtagtcttttttctctctcaaatttctgtagtgttttaacttaatgggttgtgtctttcaagataattttccctcgctgaagtcagtgat

SEQ ID NO: 7388 - DNA, 517 bp, Homo sapiens
  MAP TO AC013726.3; EXPRESSED IN ADULT LIVER, SIGNAL = 1.4; EXPRESSED IN HEART, SIGNAL = 1.2; EXPRESSED IN FETAL LIVER, SIGNAL = 1.4; EXPRESSED IN BRAIN, SIGNAL = 1.2; EXPRESSED IN BONE MARROW, SIGNAL = 1.3; EXPRESSED IN LUNG, SIGNAL = 1.4; EXPRESSED IN PLACENTA, SIGNAL = 1.2
gacatttgggaatgtctgggggtgggttctagcgtctagtgggcagaggccagggatgccactaagcggtgcaccagccagcgccacaccgaagaatgacccagccccacatgtcagtagtgtctcggtccagaacccctgcctgtggggagcagttccgcatgggttagttcctccaggagttagcctgcaagatggaggcacacttgtcccaggtcccccattgctttgtgtgagtcatcggtggtcggacaggattccggtcctgtagaccggattgtagaaggcatccgaggatggggaatgagtgatggacctcaccggcacatgggtgctgggactgtggctgtgcttggtggctgtgctgctgcaggtgccgtgccgctcctggcagcacagggccttacttctcatgtcacaggtgtcacaaatggtgtggcctgcaggagtgacctggccaaggccctgccgcttgtcagatctgggccaggatcaggccctgagtccagaaacgaag

SEQ ID NO: 7389 - DNA, 549 bp, Homo sapiens
  MAP TO AC009301.3; EXPRESSED IN PLACENTA, SIGNAL = 0.9; EXPRESSED IN HEART, SIGNAL = 1.3; EXPRESSED IN BRAIN, SIGNAL = 1.1; EXPRESSED IN LUNG, SIGNAL = 1.2; EXPRESSED IN FETAL LIVER, SIGNAL = 1.1; EXPRESSED IN ADULT LIVER, SIGNAL = 1.1; EXPRESSED IN BONE MARROW, SIGNAL = 1.2
atccttgcttgtctgttggccagctctgggccagcacttggtgacagtgtgtctgctccccaggtgcccagcgctgtactaggagcaccagacacatctaactacgtgccaggcactattctatatgtcacatgtgtccactcagtcactcctcacattcctgtaagggaggctattatcccattttatagaaagacagaggcctgtggtgttaggtaacgtgcagaaggtcaaagagaataagtagaagaagcagcctcagagccctcggcctccccactctgccaggctgcctctagagcatgggttctgacttccacaaatgaggaaggggctgaggccctgaaaggctgagtgcacaccccagccccagcatcaggctgggtcagcacccagcaccctgattctctgccctcccacacacttgccaggggccatgcaaatcagaacggcctgcagcaatcactaaggcttgccttcctgaccatctacctgcagttccatccccgttcccctgggcttcagtccactcatcctctgggtcgtgtt

SEQ ID NO: 7390 - DNA, 597 bp, Homo sapiens
  MAP TO AC024575.1; EXPRESSED IN ADULT LIVER, SIGNAL = 4.5; EXPRESSED IN BRAIN, SIGNAL = 4.4; EXPRESSED IN LUNG, SIGNAL = 3.8; EXPRESSED IN HELA, SIGNAL =   5; EXPRESSED IN HEART, SIGNAL = 4.5; EXPRESSED IN PLACENTA, SIGNAL = 4.1; EXPRESSED IN FETAL LIVER, SIGNAL = 3.7; EXPRESSED IN BONE MARROW, SIGNAL = 4.2
atatgtagcccaagggggaggtgcatgaatatgcctggagtgcagctttgcctgcacttacggtttgggacacctagaactgaggagatccaactcttgtccagccctcaaaactgggttgaggtgagcaaggaggcagctcagggacaaatttctactcccatctcatctctcttccttagaagcccttggagaccagctcttccaaagtcaaaggtgagaaatctcctttccaacaaaactgtgtggggaagacctgctggtttctacctctaccctctgccccagcatcagctgtccccctgccatggtcacccattcactcctgcccaaggctgagtgggcccctgttctatatcttatcccctgtccctactgctactctgagcctttgctgacctctgccctgcccttgccccagaccccaccccttacagccctggctcaccctcttctctgcccacagccaagaccattgtgatgattcccgactcccagaagctcctgcgatgtgaacttgagtcactcaagagccagttacaggcccagaccaaggtgaaccaccttggccctgcccccagcaacctctgtttctcc

SEQ ID NO: 7391 - DNA, 573 bp, Homo sapiens
  MAP TO AL121897.15; EXPRESSED IN PLACENTA, SIGNAL =   2; EXPRESSED IN HELA, SIGNAL = 2.6; EXPRESSED IN BONE MARROW, SIGNAL =   2; EXPRESSED IN HEART, SIGNAL = 1.7; EXPRESSED IN FETAL LIVER, SIGNAL = 1.9; EXPRESSED IN LUNG, SIGNAL =   2; EXPRESSED IN ADULT LIVER, SIGNAL = 2.2; EXPRESSED IN BRAIN, SIGNAL =   2
gatgctgaggtgccttcttcactgggagtccagatcagggctggggtcagcctcaagagattctggccaggagccctgtggtgggggcagggagtgtgcttctgctgcacaagtcgcctctccttctgtggagcccagaaggtcccctcccccttgcgcagcccccatcccgggcatcagggcctcgtgggggcctcatggtgccatgtctacaggtgccctttcccaccatggtggctctgctgtgcatgtggttcgggatctccctgcccctcgtctacttgggctactacttcggcttccgaaagcagccatatgacaaccctgtgcgcaccaaccagattccccggcagatccccgagcagcggtggtacatgaaccgatttgtggggtgagtcctccagcagaggcaagagcaggggaacgtggaagagggtacgcccccctccgccaccagaagggtgcggcaaccagagttcctgccgcttcagccggctctaatagagtttatgaaagcttaacttcactccaagatcaaggtgaccaggttgtaggcagacttggtgtcatcct

SEQ ID NO: 7392 - DNA, 501 bp, Homo sapiens
  MAP TO AL138796.2; EXPRESSED IN BONE MARROW, SIGNAL =   2; EXPRESSED IN PLACENTA, SIGNAL = 2.1; EXPRESSED IN ADULT LIVER, SIGNAL = 1.5; EXPRESSED IN HELA, SIGNAL = 3.5; EXPRESSED IN BRAIN, SIGNAL = 2.4; EXPRESSED IN LUNG, SIGNAL = 1.6; EXPRESSED IN HEART, SIGNAL = 4.1; EXPRESSED IN FETAL LIVER, SIGNAL =   2
attatctgcaggcatggtccccttggcttacttggcttttcctatgagccatagtcaggacaggttggcttcggtgaccttggttttacccgttgtcccccttctccccaccaggctcagcagggagctgcaggagaaggagaaagtgattgaagtcctgcaggccaagctggatgctcggtccctcacaccctccagcagccatgccttgtctgactcccaccgctctcccagcagcacctctttcctgtctgatgaactggaagcctgctctgacatggacatagtcagcgagtacacacactatgaagagaagaaagcttctcccagtcactcaggtagcctccactttctgggtggtaccatctttgtctaggctgagtggagaactcaggaaacagggcttatagctccaccatggtgtgtatcaggctgaacatggctgtggggccaagtgccatgcacaggcaccagtggatcaggatctttgctctgctcctg

SEQ ID NO: 7393 - DNA, 574 bp, Homo sapiens
  MAP TO AC024038.3; EXPRESSED IN BRAIN, SIGNAL = 1.5; EXPRESSED IN BONE MARROW, SIGNAL = 1.4; EXPRESSED IN LUNG, SIGNAL = 1.2; EXPRESSED IN PLACENTA, SIGNAL = 1.1; EXPRESSED IN ADULT LIVER, SIGNAL = 1.5; EXPRESSED IN HEART, SIGNAL = 1.3; EXPRESSED IN FETAL LIVER, SIGNAL = 1.2
tttaatcagcaatggggaccactagagggtggactgttcccagattcaggtcactgggtccagagccaatctctcaaatggtccagcaggactgatgagactggagttcctctccctggctgcaatggttgagattgtcattactatccaggagtcctgggtgattctggaggttgaagggaggaaggtggacctcttcctcgacaattaagtggccatttctgttctcctttccattctgggcctccactcccttagcatgactgtgaggggaatctcaggaaagcctttaacctgacatttttcccaacctcttagttgtaactggggagacctcttgtttacttatgactttttaatcatgcctgaaagcccaattcttctgctgggcagggatatcttagcttatatgaaaaccaccattcttatggctccaggacagactctttgcatcccccttatggagaccaatattagcccagaagtttaggcaagtcaaggaatgattgactgagccacaaatgccatactggtctggatccaccttaaagatcccacctgctttcctaaccag

SEQ ID NO: 7394 - DNA, 531 bp, Homo sapiens
  MAP TO AC022262.3; EXPRESSED IN ADULT LIVER, SIGNAL = 2.3; EXPRESSED IN HEART, SIGNAL = 2.4; EXPRESSED IN BONE MARROW, SIGNAL = 2.6; EXPRESSED IN BRAIN, SIGNAL =   3; EXPRESSED IN LUNG, SIGNAL = 2.4; EXPRESSED IN PLACENTA, SIGNAL = 2.3; EXPRESSED IN FETAL LIVER, SIGNAL = 2.5
agtggtctgtacccactgcccctgctcactcagctcccttagcccttccaacctctccagtcaggtacctgttccatgatgccatggaagatgctcttgaaagtcacttccacgctgctagctcttccatatggctcttctgtcccagcagctggtcctcctctgttttcatgctcacctctcctggcttctgtggcaacatcctgggccttggctactcttctgctgttctcaccttgtctccttggcacttctcctgctcaccctttaagtgctgactgtctcaggcctcagtccttgatcttctctgtctatatgcgcttcctaggtaaatgcttccagactgaggctcttagtatcttccatactatcatcactcccaaatttctatctctatcctggatcacacccctgagctccagacttgcacatccaactacccgcttgagattcctactgggatttcacagacatctcaagtttaacttgttcagaactgaactcttgatttccaaccccaaacttctctca

SEQ ID NO: 7395 - DNA, 532 bp, Homo sapiens
  MAP TO AL118520.12; EXPRESSED IN PLACENTA, SIGNAL = 1.1; EXPRESSED IN FETAL LIVER, SIGNAL = 1.4; EXPRESSED IN BRAIN, SIGNAL = 1.5; EXPRESSED IN BONE MARROW, SIGNAL = 1.4; EXPRESSED IN LUNG, SIGNAL = 1.2; EXPRESSED IN ADULT LIVER, SIGNAL = 1.2; EXPRESSED IN HEART, SIGNAL = 1.2
ttcttggctcctccaatgaccttcgagaagagaggacctctgcaagcctctgtccctcatttgtaaagtagggctaacatgccctgtctcctaggcttgctgagaatacagcatggctatggttcagtgtggtgcccaatacatatctgccaggttcagccttacactgctcttacttccccgtcctcactgactgggagctacttgaggggagtaactgtgcctccttcacgtctgcaccccccggtatgcagaatccaaggccatcgttgaatgcttgaggctgcaaaatgaattcctgtccccaagctgacccccatgctgtccctcttacctgcccaacgttgaaggtcagtgtgatggcataaaagaaattagagttggcacttcctgcataaatccagaggtgccacaggacagggaagagcagggaacagacgatgatgatgcaggtgaggacaaagatgtttctcaggactgcaaagacagagggttacagttagcctgacacgctctctctggcatgctttcc

SEQ ID NO: 7396 - DNA, 553 bp, Homo sapiens
  MAP TO AC021288.3; EXPRESSED IN HEART, SIGNAL = 1.2; EXPRESSED IN FETAL LIVER, SIGNAL = 1.4; EXPRESSED IN BONE MARROW, SIGNAL = 1.4; EXPRESSED IN LUNG, SIGNAL = 1.6; EXPRESSED IN PLACENTA, SIGNAL = 1.5; EXPRESSED IN ADULT LIVER, SIGNAL = 1.8; EXPRESSED IN BRAIN, SIGNAL = 1.2
gtgccaagaaatatcgagcccaaagctggcttttgaaataagaggaaaccgaggcccagagaaagaaaatgacttactcagcaaattgggatgatggaggagatgaaactgactggattttgtcccatgatcaaggtttttgacatgaagtctaacctcagcaagattcacagcaaacagacctattctgaaacaaaagattaattttcaatccaattactttctcaaaaaatactagccctcaagtattcatgagatacgtcttgtattgctgttctcattgaggagaataaatagagagccatttggatttcgttagttgtttagtattcctttagcaatttcagacttatttgtgtctgaggaaggaagcctcttatatcaaaacatgacacacaaactaacagctggttttgacattgaacttcagatctagggttggtaagagtatttgcacttactgtttgtaatgtacaaatagatccttgtttaaatcctcagcaagaacagccttgtgtaaagctttatccaccgtgtttcccttccctctcct

SEQ ID NO: 7397 - DNA, 570 bp, Homo sapiens
  MAP TO AL158150.2; EXPRESSED IN LUNG, SIGNAL = 4.9; EXPRESSED IN PLACENTA, SIGNAL = 4.3; EXPRESSED IN ADULT LIVER, SIGNAL = 4.2; EXPRESSED IN HEART, SIGNAL =   4; EXPRESSED IN BRAIN, SIGNAL = 3.9; EXPRESSED IN FETAL LIVER, SIGNAL = 3.7; EXPRESSED IN BONE MARROW, SIGNAL = 4.4
tattaccagaggtggggagcctattattagaaaaatatgtttggtcagttattttcataaacaaatgaaaccattaatccattccaacaattcttattagccacttatttgccatcttgcctctttaaaattttttgctttctaagcttccatgttattacatagtctcagttttcctcttctctctcaaatcatttcttctcaggctcctttgatatctcttcttccttcttcaatcactgaattctagagttcttccagtgtttcgtcctgaggactgatctcttgtcattgattattttgtccacacatacctataagacaagttcccaaaatctgtgtctccagctcttatttctaactggcttccatctttatcatcctgatggattttttcatcttggggttccatcacaacctttaaatgaaagaaaattaaaactacatttttccatccacaggggtggtgataaggaagagcttctcttactgacttacctatttctgttcatggtctcactcgtgttccaaactctttagctcttatttgcatcctcccctttcttcctc

SEQ ID NO: 7398 - DNA, 552 bp, Homo sapiens
  MAP TO AL139008.3; EXPRESSED IN LUNG, SIGNAL = 6.1; EXPRESSED IN PLACENTA, SIGNAL = 5.3; EXPRESSED IN ADULT LIVER, SIGNAL = 6.1; EXPRESSED IN FETAL LIVER, SIGNAL = 7.8; EXPRESSED IN BRAIN, SIGNAL = 6.1; EXPRESSED IN BONE MARROW, SIGNAL = 8.1; EXPRESSED IN HELA, SIGNAL =  12; EXPRESSED IN HEART, SIGNAL = 6.5
tgaaaatgagagctccagggaattaaaaaatgtaaagtttccatttcctttctgtgttaacacagctaattataatctttacttaacatgcataagtcaacagaacaactcagtatttcaccaaattataaacaagaattatattagagaaatgaaacccaaaagagaaatggtcatataactaacctcagtcaaggagttcttgcagttatttgaagtctgtgggtttgaagtaggaattcttatggccattttgggaatatattttctgttgagttctatactattaagattttcaacacaaggtaactctgggtctggcctcataggaagagtgctgagaaaatattccatccgctctttctccataaagagcttggtgctgatcacagctattttcttatccgatctgtaaagagagcaaagacaaatgcttagtatttcattttaccttgaatgattcttaatgacttgcattttttaaacagttgccctgagagtaaaccaaattacccattaaacagtgttttcacacgaagatgtgtgagagca

SEQ ID NO: 7399 - DNA, 516 bp, Homo sapiens
  MAP TO AC027279.1; EXPRESSED IN PLACENTA, SIGNAL = 1.4; EXPRESSED IN ADULT LIVER, SIGNAL = 1.7; EXPRESSED IN HELA, SIGNAL = 2.3; EXPRESSED IN FETAL LIVER, SIGNAL = 1.9; EXPRESSED IN BRAIN, SIGNAL = 2.3; EXPRESSED IN HEART, SIGNAL = 2.6; EXPRESSED IN BONE MARROW, SIGNAL = 2.6
accagtagagtggggcattgctgaaaagatatctgaaaatgtggaagtgactttggaactgggtaacaggaagaagttagaaccgttgggaggtctcagaagaagacaggaaaatgtgggaaagtttggagcttcctagagacttgttgaatggctttgcccaaaatgctgatagcaatatggacaataatgtccaggctgaggtggtctcagatggagatgaggagctcgttgggaattggagcacaggtgactcttgttatgttttaacaaagagactggcagcattttgcccctgcgctagagatttgtggaactttgaacttgagaaagatgatttagggtatctggccgaagaaatttctcatcagcaaaacattcaagaggtgacttgggtgctgttaaaggcattcagttttataaaagaagcagagcatcaaggtttggaaaatttgcagtctgattgtgcgatagaaaagaaaaacccattttctggggagaaattcaagctggctg

SEQ ID NO: 7400 - DNA, 563 bp, Homo sapiens
  MAP TO U82670.2; EXPRESSED IN PLACENTA, SIGNAL = 0.88; EXPRESSED IN HEART, SIGNAL = 1.2; EXPRESSED IN BONE MARROW, SIGNAL = 0.85; EXPRESSED IN LUNG, SIGNAL =   1; EXPRESSED IN ADULT LIVER, SIGNAL = 0.83; EXPRESSED IN FETAL LIVER, SIGNAL = 1.2; EXPRESSED IN BRAIN, SIGNAL = 0.86
acacggcagagtatgaaccccagctgctgccttcctaccctccctctgcttctcttctggaggctgccaaggattggatgtccactgggcttggagttccaatcatccaggtggggaagctgagtttccatccaggaaagtgattgaatggaggtcccttggaaagacgagaggccaggtccatggcccagggatcctagtgcttgatcaggttctcttttcaggacttcttggagctgtggttaggcctccatgttagcaacagacacccactccagaccctcacctcttgaccctggcattactggcgctgcccctgcctcattctaaaatagatggaaagactgatgagccctgggaattctttcaggatttggtgacatttgatgatgtggcatggtacctcaccacaagggagtggtttaagctggaccctgaacagagggcactggaatattatgggaacgtgacctctgtgggtaaggatgtcccagcccttcctcaaattcaccaccttcttggagtggggcaggggacacatggctacccccacagaagctcac

SEQ ID NO: 7401 - DNA, 560 bp, Homo sapiens
  MAP TO AL136365.3; EXPRESSED IN PLACENTA, SIGNAL = 1.4; EXPRESSED IN ADULT LIVER, SIGNAL = 0.9; EXPRESSED IN BRAIN, SIGNAL = 1.1; EXPRESSED IN BONE MARROW, SIGNAL = 1.2; EXPRESSED IN FETAL LIVER, SIGNAL = 1.2; EXPRESSED IN HEART, SIGNAL = 1.5
agtcctttgctcccttcctctcctgcgctcaccttgctttctcttaggtggtcctgctatggaatgccctccacttccctcctagagggaggaaagaaccgaggcaggcagagacaggcacttgtgaggactcagcctttgtaagggattcccgcaaaggccaagaggatccttcaacgtgtgtggggtgaggggtggacaggggaggggtgaagctgctgtgctaagcgtggggctggggctgggcattcagatgctgaagaacccaagagtcctttttccaaacgaaagctctccctccaaatgcgcccaggagaggtgggaggggaaaacgggggaggagtggagaggaggacgctcacacaacagggcagagagaaccaaccatttcagaagtgattcatttaagatgttttaagttgcaaatcccaaatttcccactacacatgcaaaaacaaaagaaaaagtgtgggtggagttttcaaaaaaaaagaaccaaaggaaagtttgtattacagtagctccaaaaataaaaataaacaacagccctaaggtgaacc

SEQ ID NO: 7402 - DNA, 502 bp, Homo sapiens
  MAP TO AC011260.4; EXPRESSED IN HELA, SIGNAL = 3.4; EXPRESSED IN HEART, SIGNAL = 2.1; EXPRESSED IN BONE MARROW, SIGNAL = 1.8; EXPRESSED IN LUNG, SIGNAL = 2.2; EXPRESSED IN PLACENTA, SIGNAL = 2.2; EXPRESSED IN ADULT LIVER, SIGNAL = 2.5; EXPRESSED IN FETAL LIVER, SIGNAL = 1.9; EXPRESSED IN BRAIN, SIGNAL = 1.7
agagggaagagcaaagaggcaaaatgctacctatttgtagattgactagtaaaaatcctgacattgtaaaatgcttataaactcttgctttccattccaatagaatgtcaaagtgttttctgtggaagaaaaattctactgtgggcaaatgtatgggaagacatttaatggtacttctcaagctgttatccccctactcacaacttgcagcttcccagtgggcaccgtcttgggcatcaacctacctcctggtaaatcagccaagctcagcccctccaaatcttattataaacccatggcctgctgtgtcctttcctctggctgtagaggaggtggggtgagtgcagggaggggctgccagtgccaagaaaagccaggcaatggcccccttgttgaagctgggctaactaaagctgttttagctcaggatgaattttgctaaaattatccctgttgaaattatatattccagtttaatgtttcaaacccctgattgattgct

SEQ ID NO: 7403 - DNA, 583 bp, Homo sapiens
  MAP TO AL162387.2; EXPRESSED IN LUNG, SIGNAL = 2.4; EXPRESSED IN PLACENTA, SIGNAL = 6.3; EXPRESSED IN ADULT LIVER, SIGNAL = 8.2; EXPRESSED IN HELA, SIGNAL = 7.9; EXPRESSED IN HEART, SIGNAL = 4.7; EXPRESSED IN FETAL LIVER, SIGNAL = 4.3; EXPRESSED IN BRAIN, SIGNAL = 4.2; EXPRESSED IN BONE MARROW, SIGNAL = 4.2
gatctgagcagctctcacccagagatgccttccccttgttctcactgggtcccacctcggggcaccagggaaaggagccatggcagtggagggagcagtactcgctgttgactccgggaaaccctctccgcacaccagcagggtggcatctcctgcccagcttcctgaaacctgaggccccctagaaagccaagtcctgagacacagcgtggagaggccgggccactcacatctgggcaggagcaccaccccgcaccctgcaggcccaggtacaaaccctcagccacaaacagagaccctgtcttgcgcatgtggccaaatgcaggcatccaggccacatgtgtgtgcctgaatgtgtggcacaggcctgcccaggagcacagccaggcacacacatggacagtgtcctggggtagcttcttccgccggccccccattcctgggccagcggggctcttctctctggagagaatttccctattctcaaggtaggaagactccttccttctccagcgccagcaggagcagatgggacagacgggggatgtggccggacaagcatggactgtgccatctttgaggg

SEQ ID NO: 7404 - DNA, 539 bp, Homo sapiens
  MAP TO AL136968.3; EXPRESSED IN BRAIN, SIGNAL = 8.4; EXPRESSED IN LUNG, SIGNAL =  11; EXPRESSED IN PLACENTA, SIGNAL = 3.1; EXPRESSED IN ADULT LIVER, SIGNAL = 9.8; EXPRESSED IN HELA, SIGNAL = 6.4; EXPRESSED IN FETAL LIVER, SIGNAL =  17; EXPRESSED IN HEART, SIGNAL = 6.7; EXPRESSED IN BONE MARROW, SIGNAL =  20
atcaaagctcaccaattgcccaataatgcccactatagctttttggagattttcaagatgtcgatttctagtttaatttcactgtggtcagagaacatgctccccaaaatgtcaaccttttgagatttactacatctaattctctggttcctcccttgtctccccagcactccagctggctccttctggaagtttccctggactctctgccactcaggcatagctgagaggtcagttgaagacctgggggaatttctacacaggttttagggctccccccttgctcctttcttttttttaagtcttttcatttttattactcaaaaagtttcattttttatttagctttctgaccccgtgcatgtgccttcaacactttcacaacaattttctgctcctcgataaggaaagcgcccttgatcctgtcacagacacatttagcacacatcaaaccaccacaggccctgcggacatgtttccttgtgttggacaatctcataagaactttaggtcttacagcaagaacccctcgaagtctg

SEQ ID NO: 7405 - DNA, 513 bp, Homo sapiens
  MAP TO AC025738.1; EXPRESSED IN LUNG, SIGNAL = 1.6; EXPRESSED IN PLACENTA, SIGNAL = 1.6; EXPRESSED IN ADULT LIVER, SIGNAL = 1.9; EXPRESSED IN HEART, SIGNAL = 1.6; EXPRESSED IN FETAL LIVER, SIGNAL = 1.4; EXPRESSED IN BONE MARROW, SIGNAL = 1.7; EXPRESSED IN BRAIN, SIGNAL = 1.8
gaaaatcaatcagtgtaatgcaccatatgaatgggctacagaagaaaaatcgtgatcatatcaatggaagcagaagaagtatttgacaaaattcaacatccattcatgatgaaagtgttcagagaaataggaatagagggaaacttcctctactcaataaagaacatctacaaaaatgtatagctaatatacttaatgggaaaaaaccaaatgctttaccactaagatcaggagcagacgtaaatgtacactctcactactcttattcagcatagtgctgaaagttgtagtcagtgaaataatggaagaaaaggaagtaaaatgcatgaagattgaaaagaaaaaagaagctgttcttatttacgatgacactgtctagatagaaaattcaaaagaatcaacaaccaaaaaatctaaaactaatgagtgagtttagcaaggtcatgggatacaagataaacatacacaaatcaagtgtatttatgtatgctagcaatgaacacatggacacca

SEQ ID NO: 7406 - DNA, 597 bp, Homo sapiens
  MAP TO AC008103.27; EXPRESSED IN BONE MARROW, SIGNAL = 2.5; EXPRESSED IN LUNG, SIGNAL = 1.3; EXPRESSED IN PLACENTA, SIGNAL = 0.85; EXPRESSED IN ADULT LIVER, SIGNAL = 1.3; EXPRESSED IN BRAIN, SIGNAL = 1.5; EXPRESSED IN HEART, SIGNAL =  12; EXPRESSED IN FETAL LIVER, SIGNAL =   2
tcagccactgcactgagaacatggactctctgtggggcccaggagccgggagtcacccctttggggtccacaacacccggctgtccccagacttgtgtccagggaagatagtgttgagggccctcaaggagagcggggcagggatgcctgagcaggacaaggaccctagagtccaagagaatcctggtgatcagagaagggtccccgaggtcaccggggatgcaccgtctgcatttcggcccctgcgggacaatagaggcctctctccctttgtgcccgggcccgggcctctgcagacagacctccatgcccagaggtcagaaatcagatataaccagacatcccagacctcctggacgagctcctgcaccaaccgaaatgccatctccagctcctacagctccacgggaggcttgccggggctaaagcggaggagggggccagcctcatcccactgccagctgaccctcagttcctcaaagacagtgagtgaggacaggcctcaggctgtctcttcaggtcacacccagtgtgaaaaggcagcagatatagcaccagggcagacactcgccctcaggaatgactcctccacatccg

SEQ ID NO: 7407 - DNA, 542 bp, Homo sapiens
  MAP TO AC011930.3; EXPRESSED IN PLACENTA, SIGNAL = 3.8; EXPRESSED IN LUNG, SIGNAL = 2.7; EXPRESSED IN ADULT LIVER, SIGNAL = 3.1; EXPRESSED IN FETAL LIVER, SIGNAL = 2.9; EXPRESSED IN BRAIN, SIGNAL = 3.8; EXPRESSED IN BONE MARROW, SIGNAL = 3.6; EXPRESSED IN HELA, SIGNAL = 2.6; EXPRESSED IN HEART, SIGNAL = 3.1
atactagggcaagggttgggcccccaggcctgggcagccccactcccactgctttgctaggagcagcccatgtggcagctttcacacattgcagttgcatgcctatagctctcccaagctggagtcgtctgctggtggtgctacagttctggagtctcagaggcggccccaaccccatggctctgctggccattgccctaatagggggatctctgtggctgtgcatgcctgtggcagttcttcttgtgtgccctgaggttctctgaggtaacttttgagagctagaaagccatgtctccacaccttgtgtactctgtgtgcctacagagtcagcaccatgtggatgttgccaaggtttatcacttacaccctccagagtggtggcccaagctgtacctgggcccacttgaccacagcagggagctaaggagctctgtgctggaatgcatggagcagagacttgaggtgactctaggcagtgagcctgaggtcccaaatgtacctgggcacttcccttgaaaccattctgccctcaaggtcat

SEQ ID NO: 7408 - DNA, 501 bp, Homo sapiens
  MAP TO AL121935.12; EXPRESSED IN PLACENTA, SIGNAL = 1.7; EXPRESSED IN LUNG, SIGNAL = 2.4; EXPRESSED IN BONE MARROW, SIGNAL = 2.2; EXPRESSED IN BRAIN, SIGNAL = 2.3; EXPRESSED IN FETAL LIVER, SIGNAL = 2.5; EXPRESSED IN HEART, SIGNAL = 2.1; EXPRESSED IN HELA, SIGNAL =   3; EXPRESSED IN ADULT LIVER, SIGNAL = 2.3
cccctgtggtctctattccctcaatgtattcttccttcttaaaccctttagttaagctctcacttggacattcttaaagaaattttgtctcaaagagcactgagaacagtagtgatgaaacgcgcaggtcgcttttcagtgctcaaattcttcactctgcaggtttcctataagcacttttctgttttttttttttttttttctttaaagacactgtactaatattttaggacctatcctctggccacttctgaagtgtcacttttccagcttcagtctgtccttctgctttgtaaacatgagcccaacatcccagcagttccatcggcgtctctgggtttaattacaacctctccatgcaagaccgttcctgcatctcttgctaagccccctctttatgactcaatagtggtaacttccacccccatctctaccaccacgacaacaatcataattacaaagctgccactgtgcacctaatgctgtgtgaggcatgaactt

SEQ ID NO: 7409 - DNA, 504 bp, Homo sapiens
  MAP TO AC016549.4; EXPRESSED IN PLACENTA, SIGNAL = 2.2; EXPRESSED IN BONE MARROW, SIGNAL = 1.1; EXPRESSED IN LUNG, SIGNAL = 1.6; EXPRESSED IN ADULT LIVER, SIGNAL = 1.4; EXPRESSED IN HEART, SIGNAL = 1.2; EXPRESSED IN BRAIN, SIGNAL = 1.1; EXPRESSED IN FETAL LIVER, SIGNAL = 1.1
ctttccagggataccagtcggcagtggcagatgccaagtctgagcctcaaacttttcctgctcacaggtctgcagcgtcctcgagagcctggaacaggagtacaagagagaagaagactggtgtggcggggcggataagctgggcccaaactctgagacggaccacgtgacgcccatgatcagcaagcacctggagcagaaggaggcattcctgaaggtaggggcagcgctgcgggacagtgcacccatcagaggcttcctgcctgccaggtgcgcgtggcacagtcatcgcttcccaagggagcctgccccacacctcttgcctgctgtggaatgtaacggggcagtgtcgcatcagtgagaagtcagctgaagaaagaaaaccttaaaatccttttcatgtgcgattgccttgtctttctagttttcacagggaaatagctaaaaatctgtatgagtaaggattggttggaagtcacaataccaggtgatgctggagacaga

SEQ ID NO: 7410 - DNA, 562 bp, Homo sapiens
  MAP TO AC012207.5; EXPRESSED IN LUNG, SIGNAL = 1.2; EXPRESSED IN PLACENTA, SIGNAL = 1.2; EXPRESSED IN HEART, SIGNAL = 1.3; EXPRESSED IN BRAIN, SIGNAL = 1.2; EXPRESSED IN BONE MARROW, SIGNAL = 1.2; EXPRESSED IN ADULT LIVER, SIGNAL = 1.6; EXPRESSED IN FETAL LIVER, SIGNAL = 1.1
aacaggatctttctggctgcagccgactgtgagaggaccaagggtgaaagcaaaaagatcaactgggagactcctgaaataatcttgacaatgcctgagggtggcttagaccaaagtagaagcagtgaagataactgaaagttgttgaattgtggacagatttcaaaggtaaaatggataagatttgctaacatgttaaatgtagtacgagtgaaagagagaattcaaagatgactctaagatttttttgcctgaacaactgggagaatggaattcccagggaatgagatggaaaaaacttgaggtttggggtaacattgagtttaattttggacataataagtttgaaatgtctattagccatctgtgaagaaatatcaaatacaccgctatatatacaaacctgtgattctgggaatagttccatcctgagggtatacatttgggagtcagctatatggaggtggcatgaaattcttgagatcagaagagattatccagggagtgagcacagatagagaaaggagaggccacaggtctatgtcccacttttccagcagaa

SEQ ID NO: 7411 - DNA, 523 bp, Homo sapiens
  MAP TO AL133293.14; EXPRESSED IN PLACENTA, SIGNAL =   2; EXPRESSED IN HELA, SIGNAL = 3.1; EXPRESSED IN HEART, SIGNAL = 1.8; EXPRESSED IN BONE MARROW, SIGNAL =   2; EXPRESSED IN LUNG, SIGNAL = 1.8; EXPRESSED IN ADULT LIVER, SIGNAL = 1.9; EXPRESSED IN FETAL LIVER, SIGNAL =   2; EXPRESSED IN BRAIN, SIGNAL = 1.7
caccccaattggttttcatcattttttttttaaagattgaactgcatttcagacatttgcatttcatgtcagaaaatgtgaattcagcagccgccaggatgaatgccagtcgccaggtgctgagggtgaaggcgagggccggtgtctccagctgtggggcaggacaaagtccctgtgatgccagctgccaccaggacccagggacaggcgagagggccccagaagaatgccgagctcacgttacttggcagaaagaaaatgattcaattttgttctattcaccgaaacacatgttcttgtccaaagctaatttcctgctgcccccagcttgattgtgtctctgtttcgtctctcactctgaacaccgtcctcttcttaagaatcttgggattctgaactgcttttctatttccagaattccacattgcgattttcatttttctgtctctggaaggatgtgccagttgcctttacaaagggggcctgagaggctggaggagacgggcaggagggagacttttct

SEQ ID NO: 7412 - DNA, 600 bp, Homo sapiens
  MAP TO AC015473.3; EXPRESSED IN PLACENTA, SIGNAL = 4.2; EXPRESSED IN FETAL LIVER, SIGNAL = 3.6; EXPRESSED IN BONE MARROW, SIGNAL = 3.7; EXPRESSED IN LUNG, SIGNAL = 4.8; EXPRESSED IN ADULT LIVER, SIGNAL = 4.7; EXPRESSED IN HELA, SIGNAL = 3.6; EXPRESSED IN HEART, SIGNAL = 3.3; EXPRESSED IN BRAIN, SIGNAL =   4
cttggggaaattaaaaggggcccatgggcaatgattacttcccctttaaggaagctaaggaccaaagaaacttaccagaaaacactttaacttgcagactcatttcccaacaaggtagtctttgttccaaatagaagtctcatttgctttagataatgtagaccatcaaattgtgtgatttcttaattttacaggaatctcaatgtttcttgtaaaagagatgaagtttttctggctcctggtgtacaaggagggcagaggtcaaaacgaggacttctatctcccaaagcttttccttttggaaaccacctgccaccaacacagaacaaagccacagttgtgggagatgaagctaaaaccatgcatgctccatcccagcccattcaatggctttggagcaaatgttctgtctgatcagagattctgcaggtacagtttatattgagtcattaatccattcatcccttaagaccctttccaagccccagatgctggtgatgcaaatgtgaataaaactccatccctgtttgctttgctaacacttttcctcatagtccatacatattacacaattgttaatcacctctcccctcaatcaga

SEQ ID NO: 7413 - DNA, 515 bp, Homo sapiens
  MAP TO AL157405.2; EXPRESSED IN BRAIN, SIGNAL = 3.8; EXPRESSED IN PLACENTA, SIGNAL = 3.5; EXPRESSED IN ADULT LIVER, SIGNAL = 5.9; EXPRESSED IN HELA, SIGNAL = 6.1; EXPRESSED IN BONE MARROW, SIGNAL =  15; EXPRESSED IN LUNG, SIGNAL = 8.6; EXPRESSED IN HEART, SIGNAL = 5.6; EXPRESSED IN FETAL LIVER, SIGNAL =  18
tgtagaagcagcaatgtgggctccaagtagatgcagcagatccacatgtccctctgagggaaagccatggtgccaatgggcaagaacaccatgatgtgcaaggccatccaagggcacctggaaaacaacccagctctggaaaaactgttgcctcatatccagggaaatgtgggctttgcgttcaccaaggaagacctcactaagttcagggacatgctgctgaatagtaaggtgccagctgccacccatgctggtgccattgccccatgtgaagtcactgtcccaggccagaacaccggtctggagcctaagaagacctcctttttccaggctttaagcatcaccactgaaatcctgagtgatgtgcagctgatcaagactggtgacaaagtgggagccagtgaagccacactgctgaacatgctgaatgaacatctctcccttctcctttgggatgattatccagcagctgtttgacagtagcagtatctacaaccctgaagtgcttgacatca

SEQ ID NO: 7414 - DNA, 542 bp, Homo sapiens
  MAP TO AC008928.5; EXPRESSED IN HEART, SIGNAL = 6.2; EXPRESSED IN PLACENTA, SIGNAL = 6.3; EXPRESSED IN ADULT LIVER, SIGNAL = 6.2; EXPRESSED IN HELA, SIGNAL =   9; EXPRESSED IN BRAIN, SIGNAL = 5.1; EXPRESSED IN BONE MARROW, SIGNAL = 6.3; EXPRESSED IN LUNG, SIGNAL = 6.7; EXPRESSED IN FETAL LIVER, SIGNAL = 6.3
cattagcctggcctacacagggtcaggatcatcaatatccctgtcttccacctccacatcttgccccactggaaggtcctcagggacaacgacacgcatggagctgtcatctcctgtgataacaatgccttcttctggatacctcctgaaggacctgcatgaagctgttttacagttaactttcttttcataagtagaaggcgtatactctaaaataaccataaaacgtatagtacagtaaatacataaaccggtaaacatagtcatttattaagatgatcaagtactaggtactgtacgtagttgtgttatcccttcacacgacaggcagtgcaggaggtttgtttacaccagcatcaccgtaaacacaggagaaacgcgttgtgctgcattaccatggctatgatgtcactaagctataggaatttgtgggctccattacagtcttatggaccaccaacctacatggggcctgctgttggccaaaacattgttatttggtgcataactgtgcattaaaaaggtgacggagatgagatggt

SEQ ID NO: 7415 - DNA, 504 bp, Homo sapiens
  MAP TO AC007687.16; EXPRESSED IN HEART, SIGNAL = 3.6; EXPRESSED IN PLACENTA, SIGNAL = 3.1; EXPRESSED IN ADULT LIVER, SIGNAL = 3.6; EXPRESSED IN FETAL LIVER, SIGNAL = 3.3; EXPRESSED IN BRAIN, SIGNAL = 3.8; EXPRESSED IN BONE MARROW, SIGNAL = 3.9; EXPRESSED IN LUNG, SIGNAL = 3.5; EXPRESSED IN HELA, SIGNAL = 3.9
ctgtagaaggcaggccagagaaaaggtggcaaaatgtcctgaagcaataaagatgggcttcgcagcgcacactgagtggactggacctagatggggcagggaggtgccgcgtgccctggtctgcatggaaggcacttacgctctctggaattctgggatgctgaagatggcctgcatgacagagctgagatagcagctgttgcccaggttcttcagacccgtgtagccaggaccatacattggcttcagtttcgtgcccgactcctggatcacttcccactcactgaccctcagcttgatgtcattgtcctggagcccattctctgtctgagacaaagtcatcgaagaaaaacaactttaaatgtgattcccattcaaaggtcatgtcccgttaattatttctaacagcataggatgtttctgccatttttttccccaattacatagagaaataaacaatgcaaataaaaaagactgagagacggtgatggtggcacaacaaag

SEQ ID NO: 7416 - DNA, 576 bp, Homo sapiens
  MAP TO AF241726.1; EXPRESSED IN ADULT LIVER, SIGNAL = 2.8; EXPRESSED IN LUNG, SIGNAL = 3.1; EXPRESSED IN HELA, SIGNAL =   4; EXPRESSED IN HEART, SIGNAL = 3.8; EXPRESSED IN BRAIN, SIGNAL = 3.7; EXPRESSED IN BONE MARROW, SIGNAL = 3.8; EXPRESSED IN PLACENTA, SIGNAL = 3.3; EXPRESSED IN FETAL LIVER, SIGNAL = 3.5
tatggaacttcctggccttgttagaaatctctacccattcaagcttacacatgtctacagaaaagtccttaaatgctacattttcccactccgtatgtgacttggtagttttgaacttggagctgtcattgactgtaaagtaatttttcaagcattgtggcaaagtcatcatgtcttcctggtaccagcagtcttggcctttggggatggccattttcaggtctgtggggcagtcagtttttctctttatcctccaggtgtccagctacctcttccatggtgctggctggcaacccaggatcaaagccacctcaccctttagaagacataccaattcccactcaggcaggctgagaggtgagggactttctatccctctcccctctcaaagaggaggtgggcacaggtcccacactctcagagataaccagccaagaccctaatagacttaatgggttggtagatgtgggagcatgctcctccccttcttcctaacctctcccctatcccctgcagcctggctccgtggtgtgcacactcccctgcccactggaaactgctttctgcttccatgtg

SEQ ID NO: 7417 - DNA, 515 bp, Homo sapiens
  MAP TO AL161445.2; EXPRESSED IN BRAIN, SIGNAL =   1; EXPRESSED IN BONE MARROW, SIGNAL = 1.6; EXPRESSED IN LUNG, SIGNAL = 2.3; EXPRESSED IN PLACENTA, SIGNAL = 1.7; EXPRESSED IN ADULT LIVER, SIGNAL = 1.5; EXPRESSED IN HEART, SIGNAL = 1.5; EXPRESSED IN FETAL LIVER, SIGNAL = 1.8
ggcctagagggaaattgaggtggtcaggttacagtggagagggaggaggaagtacgtgtgatgatttcttcttaagatttttgttttaagacaatctccttgtgctcttttccttgtaggtttgaccgaattgcacacacaaaggagacaatgctctctgatggtttgaactcactcacctaccaggtgctggatgtacagagatacccattgtatacccaaatcacagtggacatcgggacaccgagctagcgttttggtacacggataagagacctgaaattagccagggacctctgctgtgtgtctctgccaatctgctgggctggtccctctcatttttaccagtctgagtgacaggtccccttcgctcatcattcagatggctttccagatgaccaggacgagtgggatattttgcccccaacttggctcggcatgtgaattcttagctctgcaaggtgtttatgcctttgcgggtttcttgatgtgttcgcagtgtcacccaagagtca

SEQ ID NO: 7418 - DNA, 550 bp, Homo sapiens
  MAP TO AL136306.2; EXPRESSED IN HELA, SIGNAL =  11; EXPRESSED IN LUNG, SIGNAL = 4.2; EXPRESSED IN PLACENTA, SIGNAL = 1.3; EXPRESSED IN HEART, SIGNAL = 3.8; EXPRESSED IN FETAL LIVER, SIGNAL =  18; EXPRESSED IN BONE MARROW, SIGNAL =  14; EXPRESSED IN ADULT LIVER, SIGNAL = 2.4; EXPRESSED IN BRAIN, SIGNAL = 6.8
tttgtgctacccagagaggggtccatatggcgatgttctagattcctgttgtaacttaaagggaaacttttacagtgtacagagcccttgatgtcctgcaaatggaggaggaggatgtccttaagttccttgcagcaggaatccacttaggtggcaccaaccttgacttccaaatgaaacaatacatttataaaaagaaatgtgacggcgtctatatcataaatctgaagaggacctgggagaagcttctgttggcagcttgtgccattgttgccattgaaaaccctgctgatgtccgcgtcatatcctccaggaatactggccagagggccatactgaagtttgctgctgccactggagccactccaattgctggccgcttcactcctggaatcttcactaaccagatccaggcaaccttccaggagccacagcatcttttctttactgattccagggctgaccactgcctctcacagaggcatcttatgttaacttacataccattgctccacgtaatacagattctccgctgtgctatgtggacatt

SEQ ID NO: 7419 - DNA, 571 bp, Homo sapiens
  MAP TO AC019184.2; EXPRESSED IN LUNG, SIGNAL =  24; EXPRESSED IN ADULT LIVER, SIGNAL =  24; EXPRESSED IN HEART, SIGNAL =  19; EXPRESSED IN BONE MARROW, SIGNAL =  23; EXPRESSED IN BRAIN, SIGNAL =  19; EXPRESSED IN PLACENTA, SIGNAL =  20; EXPRESSED IN HELA, SIGNAL =  26; EXPRESSED IN FETAL LIVER, SIGNAL =  19
ccatattgcccaggctagagtgcagtggctattcacaggtgtgatcattgtgcacaatagctttgaattcttgggctcaagtgatcctcctacctcagcctctgcctcttggaaaaataacatttttagcatgcgcctgtgtcctagctacctgggagtttaaggcagaaagattacttgagcccagaagttcagggttacggtgatgactgtgccactgcactccaggctgggtgacagagcgagactgtcttttaacaacaacattgggttaaaatcaagatgtatgcaaattactatctgttctagaggcctagaggagaatctatttccttgccattacaagcttctagaagctgcgaacatcctttggctcactgctgccttctttcctcttccagatgggggaataggaggccaccactagaactgctgagttcaagaatacatacctgagatttagggatcaggaagctgccatcgtaccttccactttcacccatgaagctaatgaccaaacactggaatgcttttgtagaaacattcaacatgtccatcactgtgctttcca

SEQ ID NO: 7420 - DNA, 501 bp, Homo sapiens
  MAP TO AC022943.4; EXPRESSED IN LUNG, SIGNAL = 1.6; EXPRESSED IN HEART, SIGNAL = 1.8; EXPRESSED IN FETAL LIVER, SIGNAL = 1.8; EXPRESSED IN BONE MARROW, SIGNAL = 1.7; EXPRESSED IN PLACENTA, SIGNAL = 1.6; EXPRESSED IN ADULT LIVER, SIGNAL = 1.7; EXPRESSED IN BRAIN, SIGNAL = 1.7
gatctcctgaagtccccctcacctcaccccatttgactgatccccaggcaagttgattggtgccaacttaagtaaggagtatctggccagtaactttccataatgctgtcaatcaaggatccagatgctgccaccacggctgttactcttgctggggaaaaacaaagcaaatgtgtcaactaagttactcagacctgcagctgtgctattccctatgcatccattgtacttttattttacgtctgaagaaaagtaaaaagaatcagagtttcaaaaatcatgtcgaaaacatgggacagtcaaaagtgcatttacttaccaattacatctcttagcttaaaacaatattttcagcccttgctagtgctcagtgtatttgaccagcatgtatgatactgttttattgttgtgaaggtcatgtttcttcttttgtggtcttaacagcatttcccaacgtcatatttagtgaaatgcaaagccagacctaatgcatcctcaggc

SEQ ID NO: 7421 - DNA, 577 bp, Homo sapiens
  MAP TO AC018389.3; EXPRESSED IN LUNG, SIGNAL = 3.3; EXPRESSED IN PLACENTA, SIGNAL = 3.1; EXPRESSED IN HELA, SIGNAL = 4.5; EXPRESSED IN HEART, SIGNAL = 2.7; EXPRESSED IN FETAL LIVER, SIGNAL = 2.9; EXPRESSED IN BRAIN, SIGNAL = 2.4; EXPRESSED IN ADULT LIVER, SIGNAL = 3.7; EXPRESSED IN BONE MARROW, SIGNAL = 2.9
cagagatggcaaaatcccagaactcatgcaataaggatgttgcagaatcaaatacaaaaattaggaaatgtaaagggcaagtttgtgttacctttagacaataaagtttgactctacagagttttgttcaatagctattaaataaccaggcactcactctatgtaaactaaacaaagggctctggggaagaaagcagagtctgtcagaggcaatcactggccctaaactgcttgctggtgagttggatagatactaagtgcatagaacatagtccaaggaggtatgtgaggaaaagctgatgaaatactgagactggagtgagttcaatacaggaggcgatgcctgactttgacatgataggaggtacaagtgggactgagtcaaggagacagtaatgggtacagcatgctggggaaacagagaataggtaactccagatgaattaaaaatattaatagaacttgaatgccaatctagacatcatcctacacatggtgggagccacagaaggattgggagcacaggagtgccatcaagcaggtagtatttcgccaaggtgagtctggcagggctaaa

SEQ ID NO: 7422 - DNA, 570 bp, Homo sapiens
  MAP TO AC018367.3; EXPRESSED IN PLACENTA, SIGNAL = 1.1; EXPRESSED IN FETAL LIVER, SIGNAL = 1.2; EXPRESSED IN ADULT LIVER, SIGNAL = 1.8; EXPRESSED IN HEART, SIGNAL = 1.3; EXPRESSED IN BRAIN, SIGNAL = 1.5; EXPRESSED IN BONE MARROW, SIGNAL = 1.5
gctgaggcaaagttctccagaaggctgtgtatgctctgaatcagcattcagtacatggtactgtttctctcatagccaggattcacgggtccaggaatcaaggggtggaagtggaagtgacaccactcaccatcacccctagtgatcctctagcaaaatttttgcttcttgttcccatgacattacattctgctggcctagaggtcttagttccagagggaggaatgctgccacgaggagactcaacaacaatcccatcaaactggatgttaagattgccacctggacacttcgtgctcttcctacatttaagtcaacaggctaaaaagggagttacagtgttggctaaggtgattgacccagactatcatgatgaaatcagcctactactccacaatgaaggtaaggaagagtacgcatggaatacaggagatccattagggcatctcttagtattaccatgccctgtgattaaggtcaatgggaagctacaacagcccaacccagacgggactacaaatgacccatacccttcaggaataaaggtttaggtcactccaccaggaaaaa

SEQ ID NO: 7423 - DNA, 517 bp, Homo sapiens
  MAP TO AC007326.28; EXPRESSED IN BONE MARROW, SIGNAL =   4; EXPRESSED IN ADULT LIVER, SIGNAL = 3.9; EXPRESSED IN HELA, SIGNAL = 5.1; EXPRESSED IN BRAIN, SIGNAL = 3.7; EXPRESSED IN LUNG, SIGNAL = 4.5; EXPRESSED IN PLACENTA, SIGNAL =   4; EXPRESSED IN HEART, SIGNAL = 3.7; EXPRESSED IN FETAL LIVER, SIGNAL = 4.1
gtccagccagtgtcagtgtgacagttgtggtcattttgataacagcaagggttcaagaaagccctgggagtgatgtctgattaaatgaactgtccccccagttcttgctgtcgacatctttgacaagttcaacttcacgggagccagagtcccatggttcgacgccattcatgaagaattccccagggagctggagtcctccatctccttcccagccaacttcttcaaaccacctgaagaaaaaggtagaaccgcttagaaacctgctacttcccttggagtccccagcgttcagggaggggagggctccccctgcgggcatcccaggaggatgaacacgccatactccctgcgcactgaagatccggggccggagtgttccgagtgttcgctggcaccaagtcctattggtgacagcaggttgttttgtccaagtgcttaggtagaggttgagcatcctaatcctgaaatctgaaatgctccagaatctgaaccttcttgagcaccaacctgacac

SEQ ID NO: 7424 - DNA, 585 bp, Homo sapiens
  MAP TO AL158091.7; EXPRESSED IN PLACENTA, SIGNAL = 1.9; EXPRESSED IN FETAL LIVER, SIGNAL = 1.5; EXPRESSED IN ADULT LIVER, SIGNAL =   2; EXPRESSED IN HEART, SIGNAL = 1.9; EXPRESSED IN BONE MARROW, SIGNAL = 1.8; EXPRESSED IN BRAIN, SIGNAL = 1.8; EXPRESSED IN LUNG, SIGNAL = 1.7
aggaaatgcccaagacactggcaggtgggcaagtaagtgtccagatgggaccccgcagctctgtctccactcagcagtgtctgcacgccccaggccagcaggccggcccctcctcgggcaacactggtcttcctgagggcagcccgtgctggggtcccacgcttcgtccatagtgcttgtggggtctctagaactcagtcatcttcttgtgggtgtctgccttcctctgctcctgctgcaggccggcttcctgagcccggagctgccccagctggcgctgggctcctgccagcttctcctgcagctgggctgacgccacgctatgcctgcggaggggctcactagtcagcgtggggtcctgggccatgccaccaaccccagtctgccgtacccactgcctgtgtgcccgctgcccgtcctccaacatgcagacccctcctggactcagcccgctatgcttgggtcaggtgacctccagcatgtatcccgggggcagggccaccctgggtcgccctttgccctgagctgggccccacacgtaccggccagcgttgcgggcgagagcctcctggatgctcctgatgt

SEQ ID NO: 7425 - DNA, 586 bp, Homo sapiens
  MAP TO AC026407.1; EXPRESSED IN HEART, SIGNAL = 1.3; EXPRESSED IN ADULT LIVER, SIGNAL = 1.9; EXPRESSED IN BRAIN, SIGNAL = 1.3; EXPRESSED IN BONE MARROW, SIGNAL = 2.4; EXPRESSED IN LUNG, SIGNAL = 1.7; EXPRESSED IN PLACENTA, SIGNAL = 1.3; EXPRESSED IN FETAL LIVER, SIGNAL = 2.2
gcattttccatcccaacatcacctatctgcacagctaaaaattcttcattcaatctgcttcttttacaatctcttatttgctaaaattggcgaaatttgcaaaggcatcttgcttgggttgcacagttccagaagtcatggctatgttgggcatgcccattcccattgtgcctgtcaagcccatcccagcagcggacatccctatgttcatgttcatgcccatcatgctctggttcatcatcggagtatttccaagaggggccattcccatggtgccagtcatcacattgggcatgctcataggcatgggtccccctatcaaagcattagtttggggccggacaggaagcatgttcgatggagaactgaggttcacagctccaaaactttgagtcatcacattcataggctgctgcatatctaccagacgaaaacagacagaagaactttaccacaataaatttttaggttcatagaacagagaactaataacttctgaccatctatctatacattctttagccccaataaaattccttaacagtgattttattagaaatcaattactctgcactggttcctcttg

SEQ ID NO: 7426 - DNA, 598 bp, Homo sapiens
  MAP TO AC012629.4; EXPRESSED IN BONE MARROW, SIGNAL =   2; EXPRESSED IN PLACENTA, SIGNAL = 2.3; EXPRESSED IN ADULT LIVER, SIGNAL = 2.4; EXPRESSED IN HEART, SIGNAL = 1.7; EXPRESSED IN BRAIN, SIGNAL = 1.8; EXPRESSED IN LUNG, SIGNAL = 1.7; EXPRESSED IN FETAL LIVER, SIGNAL = 1.7
aagcaatcaaggtctctccgaataagattatgacacaaagccagagagttgatataccccctgaggtaggacagtaaatgtgtattgctggtcttgccagatgaaggcaaattgcttctggtgggccttatggacagaaatggagaaaaaggcatttgccaagtcaatggctgcataccaggtaccaggagatgtgttaatttgctcaagcaatgaaactacatctggcacagcagctgcacttagagtcaccactaggttaagcttatgataatccactgttattccccaagatccacctgtcttctgcacaggccaaatgggagagttgaacagggatgtcatgggagtcaccacccctgcgtctttcaagtccttgatggtggcactgactccgcagtccctccaggaatgcaatattgtttttgatttactattttcctagatagagacaactctaatggcttccatttggcctttcccaccataatagccctcacctcattagtcagggagtcaatgttggggttctgccacctgctaagtatgtttatgccaattatgcagcctggcactgggggattgaccacaggatgag

SEQ ID NO: 7427 - DNA, 553 bp, Homo sapiens
  MAP TO AP001426.1; EXPRESSED IN PLACENTA, SIGNAL = 2.1; EXPRESSED IN BONE MARROW, SIGNAL = 2.1; EXPRESSED IN LUNG, SIGNAL = 1.3; EXPRESSED IN ADULT LIVER, SIGNAL = 0.76; EXPRESSED IN HEART, SIGNAL = 2.1; EXPRESSED IN FETAL LIVER, SIGNAL = 2.1; EXPRESSED IN BRAIN, SIGNAL =   2
gacttccactttgcctttgcaaaggataggaaaatgggaggtcagggagagaaaggggcggaagtctccttaccttgagccattcacctggctagggttacattccattttgatggtgaccctggctgggggttgagacagccaatcctgctgagggacgcgtgggctcatcttggaagtctgtccatagtcgctggaggaggacgcggtcatctctgtcttagccaggtgtggcgttccgtaggcacactcaaacaacgactggtcctcactcacaactgataaggcttcctgaatgcccaaagaaacacataattcaagacactccaacagacagtcatgtttcaaaaagttgttgatttcagagtcctttctaactgggaccacattttagatcgtttttatggtctccatttctacctttcagaagaaaaaagtagcttgtttttctttcctcgggacagtaagagttagaaatgccagcctagaaaaacttttatgcaggtctcgaagcatcccaggcttgactgtggcagggcagcagaatatccac

SEQ ID NO: 7428 - DNA, 556 bp, Homo sapiens
  MAP TO AC015999.3; EXPRESSED IN LUNG, SIGNAL = 1.4; EXPRESSED IN PLACENTA, SIGNAL = 2.9; EXPRESSED IN ADULT LIVER, SIGNAL = 5.5; EXPRESSED IN HELA, SIGNAL = 6.5; EXPRESSED IN FETAL LIVER, SIGNAL = 3.8; EXPRESSED IN BRAIN, SIGNAL = 3.4; EXPRESSED IN BONE MARROW, SIGNAL = 3.5; EXPRESSED IN HEART, SIGNAL = 3.1
accaaaaacttctgcatggcaaaggaaacaatcaacgaaatgaaatggcaacctatagattggaaaaatatatatctgcaaatcatgttctcagaaaagggttgagtttccaagatttataaagaacttatacaactcaatagcaagaaaacatataacccaatttaaaaatgggaaatggacttgaatagacacttcttcaaaaatgacataaaaatagccaacaggtatatgaaaatgtgcccagcatcactattcatcagaaaaatgcaaatcaaaatcactatgagatactacgtcatacctgttaggattggtattatcaaaaagacaagagataacaagtgtcggcaagggtgtagagaaaagagaatccttgtacactgtaggtgggaatgtaggctggtgcagccgttatggaaaacagtacggaggttcctacagaaattaaaagtagaactaccatatgacccagaaatccctcttctgggtatataccaaaagcaaatgaaatcaccgtctcctgaagatagccgcactcccatgttcattgcag

SEQ ID NO: 7429 - DNA, 578 bp, Homo sapiens
  MAP TO AL162458.1; EXPRESSED IN LUNG, SIGNAL = 1.2; EXPRESSED IN PLACENTA, SIGNAL = 2.3; EXPRESSED IN ADULT LIVER, SIGNAL =   4; EXPRESSED IN HELA, SIGNAL = 3.6; EXPRESSED IN HEART, SIGNAL = 2.1; EXPRESSED IN FETAL LIVER, SIGNAL = 2.3; EXPRESSED IN BRAIN, SIGNAL = 2.5; EXPRESSED IN BONE MARROW, SIGNAL = 2.6
atctgggacactgagatgggggaggcgtcttgcatacccgctcctctgccaccagtgcctcccatcccgccccctggtgccgttgcaggtggctgtggtgaagtcggaagatgtggaagcagggttagcatcccctggtgggcagccctcccctgaaggtgccactccacaggtggtcaccctccacgtggcagagccagggggcggtgcagcagccgagagccagctaggccctcctgacctaccgcagatcaccctggcacctggtccatttggtgggactggctacagtgtcatcacagcaccccctatggaggagggaacatcagctcctggcacaccttacaggtgagacctgctgcctgcaaggcccctttcagctttttgtaggtgtggtcggtcggtccgatttgggccccacccaagcctagttggcaggaggcaaaaatcccaatacacatcaagtgattagtggtggagtctacccttctcaggaggtcaagagctaccattttttagccacttagatattccaagcacttggcactcatgatgggacctaagccattcccatgaga

SEQ ID NO: 7430 - DNA, 505 bp, Homo sapiens
  MAP TO AC024575.1; EXPRESSED IN HELA, SIGNAL = 5.5; EXPRESSED IN LUNG, SIGNAL = 4.8; EXPRESSED IN PLACENTA, SIGNAL = 4.1; EXPRESSED IN ADULT LIVER, SIGNAL = 5.2; EXPRESSED IN HEART, SIGNAL = 3.8; EXPRESSED IN FETAL LIVER, SIGNAL = 4.6; EXPRESSED IN BRAIN, SIGNAL = 4.4; EXPRESSED IN BONE MARROW, SIGNAL =   5
cccattgtaaagatgaagaaattgaggcttagagtttaaaatcttgcttaagttttgtagctctgagaggggagagaaagcctgtgtgggaagaagcagacaggaaaggccttctcagaacacgactggatctgaaaacccctcacctgtccacacctgaggcggctcctcttcctgctctcgctcagcctcctccaaaaaatcttccagaagcttctctgctttttgagcctcagcactccctggggccgcccagcccagaaaggttcggacactgcccaggtccgaatgggcaggggggtctcggaaatcctgagggtggtcctgcagccaggagcccagcactgacaccacagccctggccagagaggcagggtctcagagctgggtccagagtgggggacatagaatatgactcctggtaccttttttttttttttttttgagatagagtcttactgtgtcaccaaggctgcagtgcaatggcctgatcttgactcactgc

SEQ ID NO: 7431 - DNA, 597 bp, Homo sapiens
  MAP TO AC022918.2; EXPRESSED IN PLACENTA, SIGNAL = 6.5; EXPRESSED IN LUNG, SIGNAL = 9.7; EXPRESSED IN ADULT LIVER, SIGNAL = 8.8; EXPRESSED IN FETAL LIVER, SIGNAL =  19; EXPRESSED IN BRAIN, SIGNAL = 9.9; EXPRESSED IN BONE MARROW, SIGNAL =  21; EXPRESSED IN HELA, SIGNAL =  12; EXPRESSED IN HEART, SIGNAL = 8.9
tcaagaggtgcaaagagagaaactaattatttaaaataaacaaatatccttttcacaagatggtgccaaaagcgaagaaggaagttcctgcccctcctaaagctgaagcccaagggaaggctttaaatgccaagaaagcggtgttgaaaggtgtccacagccacaaaaaaaaagaagatccacacgtcactcaccttctggaggcccaagacactgggactctggaggccgttcaaatatccttggaagagcgctcacaggagaaacaagtttgaccactatgctatcatgaagtttcctctgatcactgagttggccataaagaagatagaagacaacaacacacttgtgttcactgtggatgttaaagccaacaagcaccagatcaaacaggctgtgaagaagctctatgacattgatgtggccaaggtcaacaccctgattcgacctgatggagagaagaaggcatatgttcaactggctcctgattatgatgctttggatgttgcaaacaaaattgggatcatctaaactgagtccagctggctaattctaaatatatgtatatcttttcaccaaatacatgcctttctgtca

SEQ ID NO: 7432 - DNA, 524 bp, Homo sapiens
  MAP TO AC013611.3; EXPRESSED IN ADULT LIVER, SIGNAL = 1.4; EXPRESSED IN LUNG, SIGNAL = 3.6; EXPRESSED IN HEART, SIGNAL = 1.7; EXPRESSED IN BRAIN, SIGNAL =   2; EXPRESSED IN BONE MARROW, SIGNAL = 3.6; EXPRESSED IN PLACENTA, SIGNAL = 2.1; EXPRESSED IN FETAL LIVER, SIGNAL = 6.6
ggtggggagaatggtctaggcaaggatgcagactggccagtaaggtgggtccatgcaggaagctgagggaggtggaaggcccgtgggtctcgagcgcatctgcccgccctagtcggggaagagcaggaagccggagaagacgctgtcagagccctggatgcccaccatgtcgtagtagtcattgacagccagccacacctcctcgcccacctgcaacctcagcagcacaccgcccgagttgacctgattggttttggacgtgtggccacagaaggtgaccactttgacgccgctgcggtacagcagcacgcacaggttggctgtatgcgacgcgtggtagacaaagtagtagaggccggggactttgcaggtgaacttgccagtgctcgtgtcataatctccctgcgggttggtgaggaccgcgttgaatctgatcaggctgttgggtgcagggggctggtgggtctgccgagtgaccgtgaacactgactggaatttctgcttgtatctgccctcctcacctg

SEQ ID NO: 7433 - DNA, 553 bp, Homo sapiens
  MAP TO AC015908.4; EXPRESSED IN LUNG, SIGNAL = 5.6; EXPRESSED IN HEART, SIGNAL = 4.2; EXPRESSED IN HELA, SIGNAL = 8.5; EXPRESSED IN BONE MARROW, SIGNAL =   6; EXPRESSED IN BRAIN, SIGNAL = 4.7; EXPRESSED IN FETAL LIVER, SIGNAL = 4.8; EXPRESSED IN ADULT LIVER, SIGNAL = 5.7; EXPRESSED IN PLACENTA, SIGNAL = 4.7
gttacatgctgggatttgggcaaaacactttatatcacccttagtatattgagagagaggtactctaggtcctcccagtcactggtagtcctttcccaagcagaagactcacctgggcgagcttataaatcccagaggttaaggagaatacgatttcacaggagtggccactaggtggtggtgtgacaccatcatcacctcgccgtgggctagtgggcaacttggaccaattgcgcggggccggtggagtggctgggggcctcttgggaatcaagatggccaagatgggggtctgtgcaccaaactctgtagttgaagttgagggctttccagtttatgctgcccatgagcagatgaatggagaggactcttactaagccagggtgcattttcttcttgttgaaatctgaaaattattcacttcatttcaactcagttgaacaagacattattgagtctcagctctcactaacaccccctctgtcttcacaccctctattttagactggattggggtgtggggacaggaaggccaccagtcccagttctcaca

SEQ ID NO: 7434 - DNA, 546 bp, Homo sapiens
  MAP TO AC019250.3; EXPRESSED IN LUNG, SIGNAL = 7.1; EXPRESSED IN PLACENTA, SIGNAL =  39; EXPRESSED IN ADULT LIVER, SIGNAL =  50; EXPRESSED IN HELA, SIGNAL =  68; EXPRESSED IN HEART, SIGNAL =  61; EXPRESSED IN FETAL LIVER, SIGNAL =  37; EXPRESSED IN BRAIN, SIGNAL =  15; EXPRESSED IN BONE MARROW, SIGNAL =  21
tcaccctgaggaatagtgccatatcaaaggtgcagtgttggtttctgctgctggcaaattgggcactctgtagtggcagtagccaggtcagctttccaccggcccatcttgttttctgcactgggaagttggggcatgagcacaaatgttaggacctgaaaggtggtgaactctgcctgggcagggcaaagccagaggaaactctggtggaggtccgtagcagtcctgatgtgcaaatcggtcatccaacctgggtgtaggggcgaaagactaattgaaccatctagtagctggttccctccaaagtttccctcgggatagttggcactctggcaaaaaccccactcttggtaccaatttactgtattagtccattttcacgctgctgataaagatatccccgagaccggaaagaaaagaggtttaattggacttacagttccatatggctggggaggcctccgaattatggtgggaggcaaaaggcacttctttcgtggtggtggcaagagaaaattaggaagaagcaaaagcagaaaccctgag

SEQ ID NO: 7435 - DNA, 585 bp, Homo sapiens
  MAP TO AC019276.3; EXPRESSED IN LUNG, SIGNAL = 1.8; EXPRESSED IN PLACENTA, SIGNAL = 1.5; EXPRESSED IN HEART, SIGNAL = 1.7; EXPRESSED IN BRAIN, SIGNAL = 1.6; EXPRESSED IN BONE MARROW, SIGNAL = 1.9; EXPRESSED IN ADULT LIVER, SIGNAL = 1.7; EXPRESSED IN FETAL LIVER, SIGNAL = 1.8
caaaacatggaaatggggactccaagctctaccaaaataaaagtgagtcctgagcccgtgcgttccacattgggggtgccatggggggttgggtagcatggtgagtgcccctgcccactggcccccaacccccacagggctgaccaggatgcccactcagggcttctgcctaggtctgcccctggaagccttctggcttctgaaccagcgacacaagggcacacactcttgggagaggctgagacgctccaacgccaagcggggacagagcagctcagagggccacgtccagactcagagccccttgccggtgggaccttgggcaagtgagtgatgcttcctcctcctgtcgccctcatctggaaagtgggattctcgtaagggctgtgcatagcaacacgcggctcgtggggcccactgggagtgccaactaggtggtggctggctggggacagggaggctgaacaactgctagaggacgtccactcagggaggccacaggcagcctttccagctgctcccaagccagggctcagcttccagactcatcactatgactccctcccaccagaaaggccactagga

SEQ ID NO: 7436 - DNA, 512 bp, Homo sapiens
  MAP TO AC019194.2; EXPRESSED IN BRAIN, SIGNAL =   2; EXPRESSED IN LUNG, SIGNAL = 1.8; EXPRESSED IN PLACENTA, SIGNAL = 1.8; EXPRESSED IN ADULT LIVER, SIGNAL = 1.6; EXPRESSED IN BONE MARROW, SIGNAL = 2.1; EXPRESSED IN HEART, SIGNAL =   2; EXPRESSED IN FETAL LIVER, SIGNAL =   2
agttcggaggaaccactcacaggttcttaaaggcatcctcgcgcaggtcccgagggagccgctctgtgatgtctggctggagaaagctccctgaggaccccctcagcaccttgcccaggatctccacacactccagggagttcagcatctggaaacacctctccagtgtgatgagaaacaggctgcggttcacgccagggctctgcaaggctcgttctcgaatctctcctaagtcgatgatgatgtctttcaggtcctaaagcaatgacagaagccagggtcagtttgagagctgcctctcaatttggaagccctgggagggaccacacattgcaacagtggggaaagtcaggatcactgtttaacaccatgctgctatgttgaaacttctagaactttccattccctgcagaacaaagtcaaggcctttacctgctccactcactgtggagcctccccactctccagatacacctgaccagcatacatcaggcccttggtctacctggaat

SEQ ID NO: 7437 - DNA, 591 bp, Homo sapiens
  MAP TO AC015599.3; EXPRESSED IN LUNG, SIGNAL = 1.2; EXPRESSED IN PLACENTA, SIGNAL =   2; EXPRESSED IN ADULT LIVER, SIGNAL = 2.5; EXPRESSED IN HELA, SIGNAL = 2.8; EXPRESSED IN HEART, SIGNAL = 1.8; EXPRESSED IN FETAL LIVER, SIGNAL = 1.6; EXPRESSED IN BRAIN, SIGNAL = 1.8; EXPRESSED IN BONE MARROW, SIGNAL = 1.9
ctccttctaacgggcaagtgctctttcctgcctctggtacagcaagtttctgacaaactggaacatcagcttcaaaccacacatttagaggggaaagttcaccttgggccatttactcaccatctgcagtgtgaaggagtttgtgacttttcagtgtcccttttgatttgaatttcttgccacacatgtcacataggtgggttttctcagtgctgtgacgattcatatgagccttgaggttactcttgctacgagttgcatactcacacaaagaacacttgaagggcttcacacctgccaagggaaaaatgtatatatctctatatatttacatacgtttatgcatatgtgtgaatctgaaggaatatatatatccatatctaaatacacttatagatatgtatatataaaacatccgttttgaacacagcagtatacttgcttggccctaacacaccacacactttccacgccaggttcttccccaggctatgccttcgtcctgggatgcccttgcctcctggtataccaggtgcctccaccctgcagctttctctgaccttccctggtagatttccctgcctccctatc

SEQ ID NO: 7438 - DNA, 563 bp, Homo sapiens
  MAP TO AL132981.5; EXPRESSED IN LUNG, SIGNAL = 6.9; EXPRESSED IN ADULT LIVER, SIGNAL = 7.3; EXPRESSED IN HELA, SIGNAL = 7.6; EXPRESSED IN FETAL LIVER, SIGNAL = 7.2; EXPRESSED IN BRAIN, SIGNAL = 7.3; EXPRESSED IN PLACENTA, SIGNAL = 6.7; EXPRESSED IN HEART, SIGNAL = 6.6; EXPRESSED IN BONE MARROW, SIGNAL = 6.9
agcacagaggtcagtcacccttctgacctctgtgactaagtgttactgaagggtaaagatccagactacatagcctttgcttttctgtagcccccgacttccaagttggcaaagataccactctcccagctaaagagccttcacaggagggtgctcaggatggagaggtgtgactgggacaatggtaagcaatgaatgagccagggactggagatactgattctggagaagaggggcctaagatggcatggtagcgaagggaggaaaaagatttgtttttaattaacttaaggggtaggaccaaaatgatgaaggaaagaaacctatagaagacaaactctgtctcagtaaaacgaataggaaaagtaaaaggaacagtaataggaacagtaaaagtaaaaggaataactaaagatctgagcatacccaaagaagtacagtagggagcaagtttcctgtgaccagagaaattcagccagaaaatcgatgtctatttggagaaaatcatcaaagaggaggcactggcaaaaacatctaattctggcgaaatcccccattatttt

SEQ ID NO: 7439 - DNA, 598 bp, Homo sapiens
  MAP TO AC016487.4; EXPRESSED IN PLACENTA, SIGNAL = 2.1; EXPRESSED IN ADULT LIVER, SIGNAL = 4.1; EXPRESSED IN HELA, SIGNAL = 2.8; EXPRESSED IN HEART, SIGNAL = 3.7; EXPRESSED IN BRAIN, SIGNAL = 3.6; EXPRESSED IN BONE MARROW, SIGNAL = 3.6; EXPRESSED IN LUNG, SIGNAL = 3.7; EXPRESSED IN FETAL LIVER, SIGNAL = 3.8
aaaccgtgcagaactgtgagtcaataaaacctgtttcctttataaattacccagtctcaggtatttcttcatagccacatgataacaaactaatacactctgtgatctttgaaaaatggacagctcaattgcttcctaagccagtgtcaacagaagctaccttattcaattcactttttttggatgttggtaatgaagcaaaaccaaaaatctagaaaaggtgagcagtatgggatgaagctatttggctcttcttcttcttcttcttcttcttcttcttcttcttcttcttcttcttcttcttcttcttctttctcttcctcttcctcttcttcttttcttgttcttcctccttcttcttcctccttcttcttcatccttcttcttccttttcttcctcttcttcttctccacatattgggtagaagggggagcactggaatcaagcacagtttaaaaagtaagctcaagatatatcttattgtttattttttccaattaataatatagttaaaaaatattaattataggtgaacctaggaaacataaatatatcatgagttataacttgatgtttagccactggagaatttgcaac

SEQ ID NO: 7440 - DNA, 563 bp, Homo sapiens
  MAP TO AC016549.4; EXPRESSED IN PLACENTA, SIGNAL = 1.1; EXPRESSED IN HEART, SIGNAL = 1.2; EXPRESSED IN ADULT LIVER, SIGNAL = 1.2; EXPRESSED IN FETAL LIVER, SIGNAL = 1.3; EXPRESSED IN BRAIN, SIGNAL = 1.3; EXPRESSED IN BONE MARROW, SIGNAL =   1; EXPRESSED IN LUNG, SIGNAL = 1.1
tgccattcgttgtagcagagctgaggagagatagctggtcaggaatccgggagatggagtgggtggacctggggctttggtctcagtttctaccatcagccggttttcctgttcagagctcagagttggagtcaagtcgccactgtgtttgaggtttctggcagtcggattcatttgcctcacaatactttcctgttgttttttgcagcaaaccaaagagagagtgaagctattgatacagctggctgatggcttttgtgaaaaagggcatgcccatgcggcagagataaaaaaatgtgttactgctgtggataagaggtacagagatttctctctgcggatggagaagtacaggacctctttggaaaaagccctggggatttcttcagattccaacaaatcggtaaatggccttgtgcaaactgaataaattatggtcttcttcctaacgccctctctgctgatttaattaactgagttcattggctctgttattccacagagtaaaagtctccagctagattcattccagccagtatccctggctcagaggtgaaacttcg

SEQ ID NO: 7441 - DNA, 600 bp, Homo sapiens
  MAP TO AC021356.5; EXPRESSED IN ADULT LIVER, SIGNAL = 4.9; EXPRESSED IN LUNG, SIGNAL = 3.8; EXPRESSED IN HELA, SIGNAL = 5.5; EXPRESSED IN BRAIN, SIGNAL = 5.8; EXPRESSED IN BONE MARROW, SIGNAL = 5.5; EXPRESSED IN PLACENTA, SIGNAL = 3.5; EXPRESSED IN HEART, SIGNAL = 4.4; EXPRESSED IN FETAL LIVER, SIGNAL = 6.2
tatgactgtgaggcttccccagccacttcaaactgtaaatcccataaacctctttcttttgtaaattgcccagtcttgggtatgtctttatcagcagtgtgaaaatggactaatacagtaaattggtaccagtagagtggggcactgctgaaaaaatacctgaaaatgtggaagtgactttggaactgggtaagaggcagaggttgaatagtttggaaggcttagaagaagacaggaaaatgtgggaaaatttggaacttcttagagatttgttgaatggctttgataaaaatgctgatagtgttatgaacaataagatccaagctgaggtggtatcagatggggatgaagaacttgttgggaactggagcaaaggtgactctttttatgttttagcaaacagactggtagcattttgcccctgctatacagatgtgtggaactttgaacttgacagagatgatttagggtatctggcagaagaaatttctaagcagcaaagcattcaagaggtgacttaggtgccattaaaggcatttggttttaaaagggaaacagagcataaaagtttggaaattttgcagtctggcaatgtgaaaa

SEQ ID NO: 7442 - DNA, 594 bp, Homo sapiens
  MAP TO AC015474.3; EXPRESSED IN LUNG, SIGNAL = 3.6; EXPRESSED IN HEART, SIGNAL = 3.6; EXPRESSED IN BONE MARROW, SIGNAL = 3.2; EXPRESSED IN FETAL LIVER, SIGNAL = 3.1; EXPRESSED IN PLACENTA, SIGNAL = 2.1; EXPRESSED IN ADULT LIVER, SIGNAL = 3.4; EXPRESSED IN HELA, SIGNAL = 4.3; EXPRESSED IN BRAIN, SIGNAL = 2.7
gtagctggctctgggttcaggaagcctgtgagaaagttcctttaagattgggaagaagtcaagcatgttgataataattgagggcctggccaatgtataaaaagggaaaaaaaagtaagaagattggaagtgaagagataatgtcattatttgcagctattataacatagctggaaaaactcaacagaaccaacagaataatactaatagagctaacatgaaagttcagcaagtttgccagatacaatatcgaaccaagaagaacataaagaagttgaaagggtggagatggagcatggacgggtaaggaggacttctttggagtagctgccaacttgctagtcggagtggtagtggtagaggagagttctacctctttgcatcccaccaagagagggcttcagtgtacaccttggatgctttgtatcccctggagtttaggacacccatacactgggtctgcaccggtgtgatagatccctcgacaaagggctgagtgcctgaggctgcaaggccaagagggaatggaggctcactgccctccgttctgacagcgggttttagccactgaatggtgggagacagaggtggaaa

SEQ ID NO: 7443 - DNA, 584 bp, Homo sapiens
  MAP TO AC025249.2; EXPRESSED IN ADULT LIVER, SIGNAL = 1.1; EXPRESSED IN FETAL LIVER, SIGNAL = 1.2; EXPRESSED IN BONE MARROW, SIGNAL = 1.1; EXPRESSED IN HEART, SIGNAL = 1.2; EXPRESSED IN LUNG, SIGNAL = 1.3; EXPRESSED IN PLACENTA, SIGNAL = 1.1; EXPRESSED IN BRAIN, SIGNAL = 1.2
actttgtggccatctccaaccccctgcactatgcagctgtcctcacaaatagtgtcatcatcaggattgggctggccattgtggctcaagttaccttgtgcctcttcctgtgccatttccggttaagagtctaaatttctgccctggtgataacatcccatcccactcgttctgtttccaccctgatgtaatgaggcgggcctgtgcggacatcacgatcaatatatgctatggggtctacgtggttgtttctacagggggcttagactcgctgctcatctttctgtcctataccttcatcctgcacacagtcatgggtctggctgctcccagggagcgcatctgggccctcaacacctgcgtttcccacattccggctgtctttgtcttctttattccaggtatcaccgtgtccatgatccaccattttgggaggcacctgccccacattgtacatgctcttgttacctatgtgtacctggtgatgccttctgtgctccaccccatcatttacagtatgaagtccaagcccatcagggaggccatcctcaggatgctgatggggagaagccaaggctgatgaa

SEQ ID NO: 7444 - DNA, 539 bp, Homo sapiens
  MAP TO AC021498.4; EXPRESSED IN BONE MARROW, SIGNAL = 1.5; EXPRESSED IN LUNG, SIGNAL = 1.2; EXPRESSED IN ADULT LIVER, SIGNAL = 1.4; EXPRESSED IN PLACENTA, SIGNAL =   1; EXPRESSED IN HEART, SIGNAL = 1.3; EXPRESSED IN FETAL LIVER, SIGNAL = 3.2; EXPRESSED IN BRAIN, SIGNAL = 1.9
gcactttttcccaccaattcagtgcctcattcaatgctttgtaaacacactattatgatatctttccctttctagcgatgtatgtgggctttcctatagtcatttcagtagatgctatagatattatggtatttgggaaactatatttcaatgtaaagaaggcaaggtgtcatgctttgacattgatttggtgggtaagagtgagaaagtgcaagtgtctatgggaatacacaacatacttaatacctttgaagtatgtactgaagacttgcagtgaggaaatgcccttgtacttctcctttaagagggtattttttatatgtaagcttttcattggtttactctaagcatcctagttttttggctgctgagtgcatgaacgatatcttggggccttttattactttcttaataataatcgccttctcattggcaagggagtcacctcccaatggtaggggaattacttaggtctctctctgtgctcgtgtgtgtgtgtgtgtgtgtgtattttatgcaggcaagttggatttttgacg

SEQ ID NO: 7445 - DNA, 549 bp, Homo sapiens
  MAP TO AC018761.2; EXPRESSED IN LUNG, SIGNAL = 2.4; EXPRESSED IN ADULT LIVER, SIGNAL = 1.9; EXPRESSED IN HEART, SIGNAL = 1.6; EXPRESSED IN BRAIN, SIGNAL = 2.7; EXPRESSED IN BONE MARROW, SIGNAL =   2; EXPRESSED IN PLACENTA, SIGNAL = 1.7; EXPRESSED IN FETAL LIVER, SIGNAL =   2
agttgtaggggccctcagtcctcgccctgcccacccccagcccagcggcccacctcgatgaaggtgtcaatattgtccatcagcgcctgggcccggtccatgatgaactggttcacgcaggcgatggcgtgggacctggcggggagcagacacgtgggtcaccctgaccctgcccactccaggctccctggaagcccccagggagctgcacccaccggatcttgggactgcagtgcttgaagaactgcaggaacttggggatcatgatgttgaggggcctgttgagggcgtcactgtccagaagctctgatgagtcttcacagatcttctgcagggctccaaaggctccctgagtgcagaggggcagagagacaaacgtgggtggtgggtggtggtcccagccccccagtactcgctctggccatccatggcttcttgcctacctcacaagtgttgtaatcctccgagttaagcaggttgcagagctggggcagcagctcgggccacatctgcagctcacccttggaagcgatggtggtgatgagaatg

SEQ ID NO: 7446 - DNA, 588 bp, Homo sapiens
  MAP TO AC007981.43; EXPRESSED IN LUNG, SIGNAL =  17; EXPRESSED IN PLACENTA, SIGNAL =  17; EXPRESSED IN HEART, SIGNAL =  17; EXPRESSED IN FETAL LIVER, SIGNAL =  17; EXPRESSED IN ADULT LIVER, SIGNAL =  19; EXPRESSED IN HELA, SIGNAL =  25; EXPRESSED IN BRAIN, SIGNAL =  17; EXPRESSED IN BONE MARROW, SIGNAL =  19
tgctgttcacgcctgtaatctcagcgactcaggaggctgaggtgggaggattgcttgaatccaggagttcgagatcgggctgggcaagatggcaagaccccaactcaaaaaagaaaaaaaaaaaaaatctttcctcctaagcctcattgccccatctgtaaagcgagtcagggactgtgcctgggatgctgcctgcgagagatcccgatgtcccccactcagggtcactaactgtggctctctctccccaggagggctgtcggtggcggtgcctggggagatccgaggctatgagctggcacaccagcggcatgggcggctgccctgggctcgcctcttccagcccagcatccagctggcccgccagggcttccccgtgggcaagggcttggcggcagtcctggaaaacaagcggaccgtcatcgagcagcagcctgtcttgtggtatgtctgtgggtgcggccccctgacacaggcagggcaggcacagcccaaggaccttgcaggccgtagcagcagtggagcggccctctgccttcaggaccctgtgctgataatgggatgaggagatacagacccttcccacca

SEQ ID NO: 7447 - DNA, 540 bp, Homo sapiens
  MAP TO AL133293.14; EXPRESSED IN PLACENTA, SIGNAL = 2.7; EXPRESSED IN HELA, SIGNAL =   4; EXPRESSED IN HEART, SIGNAL = 3.1; EXPRESSED IN FETAL LIVER, SIGNAL = 3.1; EXPRESSED IN BONE MARROW, SIGNAL = 3.3; EXPRESSED IN LUNG, SIGNAL = 2.9; EXPRESSED IN ADULT LIVER, SIGNAL = 2.7; EXPRESSED IN BRAIN, SIGNAL = 2.8
atggtcactcccaacctgtcctaggcaggaagccctcgctgccctccccatcagcttcccccaccccactttcctcaccggagccgggctccccatgcctcgctctgcccacagggatggtgaaccgcgaggtgctggaccaggtggagcggggctaccggatgccctgcccgccggagtgtcccgagtccctgcacgacctcatgtgccagtgctggcggaaggagcctgaggagcggcccaccttcgagtacctgcaggccttcctggaggactacttcacgtccaccgagccccagtaccagcccggggagaacctctaggcacaggcgggcccagaccggcttctcggcttggatcctgggctgggtggcccctgtctcggggcttgccccactctgcctgcctgctgttggtcctctctctgtggggctgaattgccaggggcgaggcccttcctctttggtggcatggaaggggcttctggacctagggtggcctgagagggcggtgggtatgcgagaccagcacggtgactct

SEQ ID NO: 7448 - DNA, 562 bp, Homo sapiens
  MAP TO AC011218.4; EXPRESSED IN ADULT LIVER, SIGNAL =   1; EXPRESSED IN HEART, SIGNAL = 1.3; EXPRESSED IN BRAIN, SIGNAL = 1.1; EXPRESSED IN FETAL LIVER, SIGNAL = 0.99; EXPRESSED IN PLACENTA, SIGNAL =   1; EXPRESSED IN BONE MARROW, SIGNAL = 0.96
tttgggctttaatggattggatgaggcccactcacactggggacggcaactactttactaagtctacatattcaaatgttcatctcatcaaggaacaccctcacagacacatccagggtgtttaaccaaatatctaggcaacccaacttggcaaataaaattaaccatcataaggtgaaagatgtatacgatctgaagagaaaccagggatgcaggacggttaaacatctgcaagtcaataaatgtgatgtgccatataaacagaattaaaaacaaaaataacaagatcatctcaatacatgcagaaaaaggatttgacaaaatccagcatccctttatgcctaaaaccctcagcaaaatcgacatagaaaaagcatttgacaaaatccagaatccctttatgattaaaaccctcagcaaaatcaacatagaagggacataccttaaggtaataaaagctatatatgacaaacacacagccaacattacactgaatggggaaaagttgaaagcattccccctgagaattggaacaagacaatgatgcccactttcaccactt

SEQ ID NO: 7449 - DNA, 530 bp, Homo sapiens
  MAP TO AL158198.3; EXPRESSED IN LUNG, SIGNAL = 4.1; EXPRESSED IN PLACENTA, SIGNAL = 3.8; EXPRESSED IN ADULT LIVER, SIGNAL = 4.7; EXPRESSED IN HEART, SIGNAL = 4.1; EXPRESSED IN FETAL LIVER, SIGNAL = 3.8; EXPRESSED IN BRAIN, SIGNAL = 4.3; EXPRESSED IN HELA, SIGNAL = 2.4; EXPRESSED IN BONE MARROW, SIGNAL = 4.1
tttaaccccaaaagcacaggcaacaaaagcaaaaataggtaaacgaaagcacaccaaactaaaacggcttctgtgcaataaaggaaaaaattaacagagtaaagagacaacccacagattgggaggaatatttgcaaatcataaggggctcatattcaaaatataaaaagaattctaactgcttaataacaagaaaataaataattctaattaccaatgggcaaaggatctgaatagacctttctcaaaagaagacatacaaatggccagcagatacgtgcagaaatgctcaacatctctaatcatcagaaacatgcacattaaaaccacaatgagacaacacctcacgtgtgttagaatgacaattatcaaaaagatgaaagataacaagtgcttggagagcttgtggagaaaagggaacgccagcacactgtcaggagaaatgtaaatcagtacagccattatggaaaacggtatggaagttcctcaaaaaactacaactagaatttgccacatgatccagcaatcac

SEQ ID NO: 7450 - DNA, 517 bp, Homo sapiens
  MAP TO AL139819.2; EXPRESSED IN HELA, SIGNAL = 4.7; EXPRESSED IN LUNG, SIGNAL =   3; EXPRESSED IN BONE MARROW, SIGNAL = 3.4; EXPRESSED IN PLACENTA, SIGNAL =   4; EXPRESSED IN ADULT LIVER, SIGNAL = 4.3; EXPRESSED IN HEART, SIGNAL = 3.9; EXPRESSED IN FETAL LIVER, SIGNAL = 3.8; EXPRESSED IN BRAIN, SIGNAL = 3.1
ttttctttgtctggcttggcaactcctgtggcctccataggcccttggcatggacttttcaatgcttttcccttttccttcttcatcccttggttcaacatggtccttccagatattcaagtacatcagcttcaacaaaaccatgacccagctctcctccacgctggcccgctgtgccaaggacatcctgggcttcgccgtcatgttcttcattgttttcttcgcctatgcccaactcggctacctgcttttcgggacccaagtggaaaactttagcactttcatcaagtgcatgtgtgtgtcctgtccccttcactcctccctggcccctcaccctccagctccacgggtgtatgtatccttggggaagatgggtacgtgcgtgtctgcatgtctgtgttcaaagcatctgtgtgagggtctccagaagccctggtgtgtgtgcttaaataatctaagcaccctgccctgtgtctatcagattggggtgaacgtgtggtgaggggtctctctgtga

SEQ ID NO: 7451 - DNA, 600 bp, Homo sapiens
  MAP TO AC010397.3; EXPRESSED IN LUNG, SIGNAL = 1.5; EXPRESSED IN PLACENTA, SIGNAL = 0.78; EXPRESSED IN FETAL LIVER, SIGNAL = 0.98; EXPRESSED IN BONE MARROW, SIGNAL = 1.2; EXPRESSED IN ADULT LIVER, SIGNAL = 0.85; EXPRESSED IN HEART, SIGNAL = 1.7; EXPRESSED IN BRAIN, SIGNAL = 0.96
ttggagggttttggattttggattttcaagttagggatactcaaacttgtagagattttaaaaatattttatcaaaacaagcttaaataacatactaagacttttaaatgtagtggaattattttttaaaattttgcatatgataagtattcactttatgtggtatcactaggattaaacaagctaccatagtgacaataaagtgactttcaagtaacacagtttgagaaaatgattaccacatgtatcttttgttcaggaatcaaaggatgaacagtggaaacgagctatggattatttaaacgttgtcaatgagctcaactacatgactcagattgttatcatgctttatgaggatcctaataaggtaaacagagctcttgatttgtgttttaccagacataaataaagagcttaaagtttctcattttgaaaatgttctgtcatatttcttaggatctttcctcagaagaacgctttcatgttgaattacactttagtccgggagccaaaggttgtgaagaagacaaaaatttgccatctggctatggatatagaccagcttccagagaggtaatgaaggtggaactctcagtgctt

SEQ ID NO: 7452 - DNA, 594 bp, Homo sapiens
  MAP TO AC024196.2; EXPRESSED IN LUNG, SIGNAL = 4.3; EXPRESSED IN PLACENTA, SIGNAL = 4.2; EXPRESSED IN FETAL LIVER, SIGNAL = 5.1; EXPRESSED IN ADULT LIVER, SIGNAL = 4.3; EXPRESSED IN HEART, SIGNAL = 4.5; EXPRESSED IN BRAIN, SIGNAL = 3.7; EXPRESSED IN BONE MARROW, SIGNAL = 3.9
atttgaaccaaggccaactgattcaagagctcaatacagaaatattgagttgggcccataaatgctgaggagacatgaattgggacccctgcttggaggtagtgcactttgagcaggtttcaggggaagagaggaagcagggagagggcagtcttatcagggatgaggtgggagcctcactagccccactaaagagagttgagaaagaggtcttagcaggggtcacagaaaaccagaagggggagagtgagaccaaggtgacaggacaggccaaggctaacgagattaactatgacaaaagtgacaggaggagggtgggtgcccaggccgagacagaatataattgtacagtctccactatttcttttctcctccttttcaggcaattctgggattctagtgaaagtcatcaccttcttaaaaatttctgataatttttcttgagtactctgcatatttgaccccagataaacttctgtcaaggtcatgaacttgagaaagtgttcttctatctcttaggaaatttccagtctaaataggcaaagcaaaagtctgctataaggagtccccaagccctctctctgctcccagcct

SEQ ID NO: 7453 - DNA, 593 bp, Homo sapiens
  MAP TO AL135922.4; EXPRESSED IN BONE MARROW, SIGNAL = 1.7; EXPRESSED IN ADULT LIVER, SIGNAL = 1.3; EXPRESSED IN HELA, SIGNAL = 2.9; EXPRESSED IN HEART, SIGNAL = 1.9; EXPRESSED IN LUNG, SIGNAL = 1.3; EXPRESSED IN PLACENTA, SIGNAL = 1.8; EXPRESSED IN FETAL LIVER, SIGNAL = 1.8; EXPRESSED IN BRAIN, SIGNAL = 1.7
tagcctaggcctacacagggtcaagatcgtcaatatcaccatcctccatttacacatctcgtcccactggaaggtcttcaggggcagtaacactcatggtgctgttgtctcctagaataacaatgcccttttctagaataccccctgaatcaagacctgctctgtggctattttacggttagcattttttttttctaagtagaaggaatatactaaaataagattaaaaagtacagtaagtacataaaccaataacagtcatttattatcactatcaagtattaggtacgtcacataattgtatgtgctatacttttatgccactatcagtgtagtaggttgtttacaccagcagcaccacaaacaggtgagtcatgaattgtgcttcagtgttacaatggctgtgaccgacatcactaggcaacaggaattttgcagctttattataatcttacaggaacgtcgtcatatatgcagtttgtcattgactgaaatgtcactatgcacgacatgactatattctcttaaataatattttgtagtggtttaacaaacttaattctttcccagcaaccatcacaaatccgtgcctc

SEQ ID NO: 7454 - DNA, 586 bp, Homo sapiens
  MAP TO AC007325.51; EXPRESSED IN LUNG, SIGNAL =  21; EXPRESSED IN ADULT LIVER, SIGNAL =  21; EXPRESSED IN BRAIN, SIGNAL =  17; EXPRESSED IN HEART, SIGNAL =  18; EXPRESSED IN HELA, SIGNAL =  17; EXPRESSED IN PLACENTA, SIGNAL =  19; EXPRESSED IN FETAL LIVER, SIGNAL =  16; EXPRESSED IN BONE MARROW, SIGNAL =  18
tggtgggaagggtctgtatctcctcatcccattatcagcacagggtcctgaaggcagagggccgctccactgctgctacggcctgcaaggtccttgggctgtgcctgccctgcctgtgtcagggggccgcacccacagacataccacaagacaggctgctgctcgatgacggtccgcttgttttccaggactgccgccaagcccttgcccacggggaagccctggcgggccagctggatgctgggctggaagaggcgagcccagggcagccgcccatgccgctggtgtgccagctcatagcctcggatctccccaggcaccgccaccgacagccctcctggggagagagagccacagttagtgaccctgagtgggggacatcgggatctctcgcaggcagcatcccaggcacagtccctgactcgctttacagatggggcaatgaggcttaggaggaaagatattttttttttcttttttgagttggggtcttgccatcttgcccagcccgatctcgaactcctggattcaagcaatcctcccacctcagcctcctgagtcgctgagattacaggcgtgaacagca

SEQ ID NO: 7455 - DNA, 526 bp, Homo sapiens
  MAP TO AL136984.7; EXPRESSED IN HELA, SIGNAL = 2.6; EXPRESSED IN LUNG, SIGNAL = 2.7; EXPRESSED IN PLACENTA, SIGNAL =   3; EXPRESSED IN ADULT LIVER, SIGNAL = 2.7; EXPRESSED IN BONE MARROW, SIGNAL = 2.9; EXPRESSED IN HEART, SIGNAL = 2.9; EXPRESSED IN FETAL LIVER, SIGNAL = 2.7; EXPRESSED IN BRAIN, SIGNAL =   3
aggcactcacaccaacagcctattctagacagttaccagtttttttcctttaaaatgttagagcatgtctctcctgctccagatcttcccacggtttcccattttactcggagtaaatctccgagacatgctcccacctcagggcctttacacttgctgtctcgtttgcctaggatgcttttctcacagatacccatgtagttcacttcctaacctccttcaggtctttatacaactggtgaatccataccagaccccatccctgccagtccttccctactttatttttctctgactttcatactagaatgtaaatttcactggataaagaattttgtaagagagtcctgtactgatctattctcaggatgtgtaatgctgtatataacaggcattcagtaagtattagttgaatgagtagcttggtggagtctagagtagcagctgagagaacagtttaaagggtctgagtctagatgagagatggtggctgagacaaagattgtggaagatgcagagaagcagg

SEQ ID NO: 7456 - DNA, 574 bp, Homo sapiens
  MAP TO AC025588.1; EXPRESSED IN HELA, SIGNAL = 7.4; EXPRESSED IN BONE MARROW, SIGNAL = 5.5; EXPRESSED IN PLACENTA, SIGNAL = 5.5; EXPRESSED IN ADULT LIVER, SIGNAL = 6.6; EXPRESSED IN FETAL LIVER, SIGNAL = 5.1; EXPRESSED IN BRAIN, SIGNAL = 5.1; EXPRESSED IN LUNG, SIGNAL = 6.4; EXPRESSED IN HEART, SIGNAL =   6
aggtgctctgtgattcaggccgccatcactgtacaccttttccagtggagcacagtctgtgatctcattcagcagctgaaaggccaatactactaattctgtttgactttccaggtgtctgtgacctttgatgatgtggctgtgactttcaccaaggaggagtgggggcagctggacctagctcagcggaccctgtaccaggaggtgatgctggaaaactgtgggctcctggtgtctctgggtaaggccttccttccccctccaccatgcaggtgacctgccacttccttcattccatcttctgactccaggcctggctgcacaagaaggcctctagaatctaccttgcctctttcccacagctttagtcattttccacagtaacctcttcctatctggtctcctatatctctgggctaaagacagggtactctttggctcccagccaaaggagaaggtggtaaaaggaaatggggtgttttgcaaactcaaaggtaattttcagctgtgcctcatgaggggctggtgtaggaactgagaaccaccacgatggtgtcctggcttctctgtctgg

SEQ ID NO: 7457 - DNA, 519 bp, Homo sapiens
  MAP TO AC018742.2; EXPRESSED IN ADULT LIVER, SIGNAL = 3.1; EXPRESSED IN HEART, SIGNAL = 2.9; EXPRESSED IN BONE MARROW, SIGNAL = 3.1; EXPRESSED IN LUNG, SIGNAL = 3.3; EXPRESSED IN PLACENTA, SIGNAL = 3.3; EXPRESSED IN FETAL LIVER, SIGNAL = 2.8; EXPRESSED IN BRAIN, SIGNAL = 2.8
ctcaaaccctttaccacccctttcttacctaggcttctcacagagtgtcattatttcatctctcagaattctcaatgtatggttctgggttagaactagctgccaaagaaacttctgcaggccatttttataatcagaaggtgggtgtaggctcaggtgctgttgaagttaacacaggtggacacaggtctgctagctcaccatattggcctgggcagtaaccaggcctgcagctcctcctctggcaaccactggatctctttcatgagcatctccaactgctgtgttaggtacatgtttagctccatgaggaagggcaccagcttcttctgtatggtgacgcattatccaagttgaaggcttggaagcagtaagaaattaataaaggtgcctgtttaccatcatgagttctggaatattctatgattcccatttgttctttctctacagagtttcaaatccatctttccatcctgaatccctgccttgtggacttcaggcctcagcaccatgtacaaa

SEQ ID NO: 7458 - DNA, 551 bp, Homo sapiens
  MAP TO AL139347.2; EXPRESSED IN LUNG, SIGNAL = 1.1; EXPRESSED IN ADULT LIVER, SIGNAL = 1.3; EXPRESSED IN HEART, SIGNAL =   2; EXPRESSED IN BRAIN, SIGNAL = 0.88; EXPRESSED IN BONE MARROW, SIGNAL = 1.1; EXPRESSED IN PLACENTA, SIGNAL =   1; EXPRESSED IN FETAL LIVER, SIGNAL = 1.3
attccactgcttcctgatggtactcacacatctcatcattttctgccaaagtatacactctatgaaatagtcgtattctattctgcactctttctctccccaaataccaccaattccatgtgcacattctctccattctttttcaaaaggatggtgtcgagcaggaatcttgtagggctgttcagcactttggattgtcaaccacccatctgtgttaaggccaaaccttttctgcacgtccaagaaaggcatggcgttctgatgctcgtgcccttgtctcttctctggccgctgcttcaggacgattctacttttcaaatttttatatgacacaaacctgaaaagaatagttcactaatatcttagattgctaaatccattttgacaaagagctcaacacacaggaataatgtacccaaattagatacatttaatatagacaagcctaaaggggatgacttactctaatcttggtttcagtaagaaaaaaaaatttacagattttagttaaccacagacagcacaataatgctgcccccaaattaatgatc

SEQ ID NO: 7459 - DNA, 562 bp, Homo sapiens
  MAP TO AL121908.7; EXPRESSED IN BONE MARROW, SIGNAL = 1.3; EXPRESSED IN LUNG, SIGNAL = 1.4; EXPRESSED IN PLACENTA, SIGNAL = 1.2; EXPRESSED IN ADULT LIVER, SIGNAL = 1.3; EXPRESSED IN FETAL LIVER, SIGNAL = 1.1; EXPRESSED IN HEART, SIGNAL = 1.2; EXPRESSED IN BRAIN, SIGNAL = 1.6
gaaaaggtcgcaagtggaaggaagcttgggtttgtagtttcctcacatattcttagaagctaggggctggggaaacccagaagttaggtggtcaagggcaaaaagattctcccttttctgtctttcttccccaaaccttgtcacatggaagatttgaaatggctcccccaggcctgagtcctgggcagctgtgtcactgttggtgcccacctcccaggctgcttgctctgccctgcttggagaatgacaacttcttaagttgccacacagtacccagagccaccagttcctctcctggttgctgtgtggctgagactgaccctggatcatgaggcatcctgctgcccagcccatcatttccatctggtcctgttggggaggaagaaaatgcagaggcaaatgcagatgcagtatctgtggctgggctccagcaagacccctccaaggtctctgaccccagggccagtggtttcacccacctggaccatctacaagggtcaaatccagtgtgtgcagtgcctggaattagaggaaagagacatgcaggtacagcatcgtgaaa

SEQ ID NO: 7460 - DNA, 503 bp, Homo sapiens
  MAP TO AL137248.4; EXPRESSED IN LUNG, SIGNAL = 1.6; EXPRESSED IN PLACENTA, SIGNAL = 1.6; EXPRESSED IN ADULT LIVER, SIGNAL = 1.4; EXPRESSED IN FETAL LIVER, SIGNAL = 1.3; EXPRESSED IN BRAIN, SIGNAL = 1.7; EXPRESSED IN BONE MARROW, SIGNAL = 1.2; EXPRESSED IN HEART, SIGNAL = 1.3
atctgacattcgtgtgggtgcaacaccaaagcttctactccatttgcatgactgggccatctagtacagagaggcatgacattagctggaaatgtgatctaggaatacatgttaggtgtgattagcagctgtgctctcaacttcccagcaaagcagcttgaaagacacactgcaaatatacatttcatttccaacatctctcactgtaaatgagggccaacaaccaaatggtgtgccagaatctaagagaaattctcagctactaaaatatagagggtgctaacataccttcctgccagaaaccagaggaatcatgctgccagaatgtaggctgtcagccccatagttcacaaatgtgagagaggcactgtgattgtcgctttgctgtgggttgcaaatctgggctaggggaggcaggggaggcctccagagtaccaaaattcttctatttgcaccagtacttttcctcctatattcattcaagtctgtggctctgcaactga

SEQ ID NO: 7461 - DNA, 537 bp, Homo sapiens
  MAP TO AC025139.2; EXPRESSED IN LUNG, SIGNAL =   8; EXPRESSED IN PLACENTA, SIGNAL = 5.9; EXPRESSED IN ADULT LIVER, SIGNAL = 9.3; EXPRESSED IN HEART, SIGNAL = 4.9; EXPRESSED IN FETAL LIVER, SIGNAL =  20; EXPRESSED IN BRAIN, SIGNAL = 7.3; EXPRESSED IN HELA, SIGNAL =  15; EXPRESSED IN BONE MARROW, SIGNAL =  22
tataaggccggacattctgccagtatttcttgagcaatgacaacaagaagctgacagccaggtgaatgttatccacaagctcatcgtctgtcatcttcacgtgaccaacagctacagccagatataacaccttcttcatttggaacttgattgtgaacttcacctcatccactttggccaccatgttttcgttgtgtgtgagcagggaagggaactttcctgccttatttagatctgggccgaggattcgtggaatctgcttgatcagagactctgaggccaaaaacgcatcatacttctcggccagcttcttgaccagttttttattcttgttgagttttttcagcgtctcagtgtccatgtgggggatatccatggccttggcctcgtcgcagtgctactggtccgccagaacacacacagagaacttggggcggggagtggacttaagcctgatggtgcccgaggagcgcttgtccttctgtgggtcatacttcttcaagctgatctgcacctacaccgtctcctggaatttgt

SEQ ID NO: 7462 - DNA, 554 bp, Homo sapiens
  MAP TO AC013726.3; EXPRESSED IN LUNG, SIGNAL = 1.4; EXPRESSED IN PLACENTA, SIGNAL = 1.4; EXPRESSED IN ADULT LIVER, SIGNAL = 1.1; EXPRESSED IN FETAL LIVER, SIGNAL = 3.6; EXPRESSED IN BRAIN, SIGNAL = 2.6; EXPRESSED IN BONE MARROW, SIGNAL = 2.5; EXPRESSED IN HEART, SIGNAL = 1.4
tttcagtgggggagtaggtgggagtggccagatgagaaggagaaaaactgctgtgagggatagaagttgaaagctagctgcttttttagctaccttatcagcataagcattgtcctgagcgatgggatctgatgccttttgatggcccttgcagtgtatgactccagcttcctttggaagtaaagcggccttgagaagagtttttattaaagaggcattaatgatggaggacccttgtgtggtgaggaaacttttcagcccataaaacatcatggtggtgcaggatatggggtcagtataaatattgacgtgtagtccctttgcaagagtgagggctcgaattaaggcaatgagttcggcttcctgagaggtagtggagggaggcagagcggtagcctcaatgatagatgtggaagattctatagcatagcctgcctttgctagtgagtggcgattaggcctgatggactaaaccaaatgtgatcaataaaccaaatgtgatcagagtgaggaacaggaaagaaggaaatatggggaaatggaatgaatgccag

SEQ ID NO: 7463 - DNA, 509 bp, Homo sapiens
  MAP TO AL139248.2; EXPRESSED IN PLACENTA, SIGNAL = 1.4; EXPRESSED IN HEART, SIGNAL = 1.4; EXPRESSED IN FETAL LIVER, SIGNAL = 1.4; EXPRESSED IN BONE MARROW, SIGNAL = 1.4; EXPRESSED IN LUNG, SIGNAL = 1.4; EXPRESSED IN ADULT LIVER, SIGNAL = 1.7; EXPRESSED IN BRAIN, SIGNAL = 1.1
tcttttgtgtgtgcctccagtctctgcctcacactgaatctctgctccctcttcttgcttcttctcttgaactacagattgttttttctttggtaccaggccagatgagaggtctttctccatcatttcaggcttctgttcttccttttgatcgaaaagctgatctcccttttctctttgcttcttatcagccttcttttcctcaccttcacctttgatgagctgtttccagagagctggttcttgattcttgtcaagtaccttgaatggatttctcagccagttggaagaatgatgaaatgtctcagatgcatgctgagacttattggatacagaatgttctttggaatcaggatcctaaagacaaaataattaatcttcatataaaatattaatacaaacttcgtatctagaatgcctttccttttcatctcaacttttattttatatacagggggtacatatgcagctttgttatatgagtatattgcactcaggcagtgagcata

SEQ ID NO: 7464 - DNA, 596 bp, Homo sapiens
  MAP TO AL133293.14; EXPRESSED IN PLACENTA, SIGNAL = 5.5; EXPRESSED IN HEART, SIGNAL = 7.2; EXPRESSED IN FETAL LIVER, SIGNAL =  30; EXPRESSED IN BONE MARROW, SIGNAL =  31; EXPRESSED IN LUNG, SIGNAL =  15; EXPRESSED IN ADULT LIVER, SIGNAL =  15; EXPRESSED IN BRAIN, SIGNAL =  13; EXPRESSED IN HELA, SIGNAL =  25
ttgccttccccttgataatgcagtaagggactcccattttatgacacagggcaggcaagaagacaaccagcttgatggaatccacatcgtgtgcagtcaccaccagctgagctttcttattctccaccaaggtggtgactgggtgttaactcctgcttgaaggacaggtagtctcttagtggagatgtcccctttgccagcagttttctcctcggcctgggccaagagcctctgcttcttctcttgctttgtctctggtctgtacttgtgggccagctcaagcagctgagtagcagtttggcggtccagggcctgggtgaactggttaattgcaggaggcactttcagccgtttatagaggaaggctctctgatgctgcaacttgatatagcggggccatttcacaaaacgggtgaggtctcttttgggctggatgtcctgtccaacaccaaaattcttaggccttttctcaaacaggggattcaccactttcttggcctcctgcttcttcacgacagcaggggctggagccaccttcatcccccggccttctttcctttcggcatcttgggcggcgggaggagagagtacaccca

SEQ ID NO: 7465 - DNA, 572 bp, Homo sapiens
  MAP TO AC024495.2; EXPRESSED IN LUNG, SIGNAL = 1.5; EXPRESSED IN PLACENTA, SIGNAL = 1.4; EXPRESSED IN FETAL LIVER, SIGNAL = 1.7; EXPRESSED IN BONE MARROW, SIGNAL = 1.7; EXPRESSED IN ADULT LIVER, SIGNAL = 1.5; EXPRESSED IN HEART, SIGNAL = 1.8; EXPRESSED IN BRAIN, SIGNAL = 1.4
gaacacactcattagctgaggcctacacggggtcaggatcatcaatatcactgccttccaccttcatatcttgtcccactggaagttcttcaggagcaataacatgcatagagctgtcgtctcctatgataacaatgccttcttctggaacacctcccaaaggatgtgcctgaggatgtttacagttaacttttatttcataagtaaaaggggtacactctaaaataacaacaaaaagtgtagtatagtaaatacataagccagtaacacagttgtttattatcattatcaagtattatgtactgtatatcattgtatgggttacacttttatatgactggcagtgcagcaggttgttttacaccagtgtcaccacaaacacatgagtaatgcattgcattatgatgttatgatggctatgacgtccactagatattgagaatttttcagctccattacaatcttatgggacaacggttgcacaggcggcccatcattgaccaaagtgtcgttatgcagagcatgattatattcatgcatataaaatgtaatgccatgcttgcttaaaagct

SEQ ID NO: 7466 - DNA, 531 bp, Homo sapiens
  MAP TO AL162390.2; EXPRESSED IN HELA, SIGNAL = 2.6; EXPRESSED IN BRAIN, SIGNAL = 2.3; EXPRESSED IN LUNG, SIGNAL = 4.5; EXPRESSED IN PLACENTA, SIGNAL = 1.7; EXPRESSED IN ADULT LIVER, SIGNAL = 2.8; EXPRESSED IN FETAL LIVER, SIGNAL = 2.5; EXPRESSED IN HEART, SIGNAL = 2.4; EXPRESSED IN BONE MARROW, SIGNAL = 1.8
acatagggattttggggagggggacacataataatcatctccgagggatttatcctttgagtcgtagggactattgaccatgaccgcccttcggaatttttttcatgttctttgagctgtatcctttctgattcctttctcttaggtgaacggccctttccctgcacgtggccagactgccttaaaaagttctcccgctcagacgagctgacccgccactaccggacccacactggggaaaagcagttccgctgtccgctgtgtgagaagcgcttcatgaggagtgaccacctcacaaagcacgcccggcggcacaccgagttccaccccagcatgatcaagcgatcgaaaaaggcgctggccaacgctttgtgaggtgctgcccgtggaagccagggagggatggaccccgaaaggagaaaagtactcccaggaaacagacgcgtgaaaactgagccccagaagaggcacacttgacggcacaggaagtcactgctctttggtcaatattctgattttcctctccctgca

SEQ ID NO: 7467 - DNA, 504 bp, Homo sapiens
  MAP TO AL122000.10; EXPRESSED IN LUNG, SIGNAL = 2.7; EXPRESSED IN ADULT LIVER, SIGNAL = 2.5; EXPRESSED IN FETAL LIVER, SIGNAL = 2.2; EXPRESSED IN BRAIN, SIGNAL =   2; EXPRESSED IN BONE MARROW, SIGNAL = 2.1; EXPRESSED IN HELA, SIGNAL =   3; EXPRESSED IN PLACENTA, SIGNAL = 2.3; EXPRESSED IN HEART, SIGNAL = 2.1
tatgtttgatcaccgagggggtgtgtgtgtgtgtgtgtgtgtgtgtgtgtgtttgtatatttgcatgtatcagttataaatatatggcacacctaaacaagatgcagttgtgcacgtgtacatcacctaagttctaaattatcagacagccatgccaggcattacttccttaactgcctccagctcctttggaaatttcagaaacagccgttgttctggcaaggaaatgagttcaaaagcaatgaagaacaccaatcccactgccatccccaccatcacacacaaatgtgtgcttgtatgtgcctgcacgtatatgcttatagtcttccaatcagcctgcaactccatctacaaattctacctatagaattaaatgctccaacaaaaacagatttcttagtcttgccttcaagaaacacatagatctggatatacttcttctagagatccataatactgcagtttcacttttaaaaaaaatttccctccctcaacaacacaggt

SEQ ID NO: 7468 - DNA, 591 bp, Homo sapiens
  MAP TO AL161426.2; EXPRESSED IN LUNG, SIGNAL = 2.9; EXPRESSED IN ADULT LIVER, SIGNAL = 3.6; EXPRESSED IN BONE MARROW, SIGNAL =   3; EXPRESSED IN PLACENTA, SIGNAL = 3.1; EXPRESSED IN FETAL LIVER, SIGNAL =   3; EXPRESSED IN BRAIN, SIGNAL = 3.3; EXPRESSED IN HEART, SIGNAL = 3.3
gacaaagcaaaccatcccacccaggtcaaagtttatgcctttcctggaacatgataagaggtggaatttatgaagcatcataagtataaagacgactggaacgattacaggaatggaagttctttgagatataaagataaatgaaacaatttggttcagcaatctggtacaagggctgtgaggtgattattaaagtttatatagacagggcaaatacagtttgaatatcccttatctgaagtgcttagaaccagaagtgtttcagattttggacttttctggattttggaatatttgcattatacttaatggttgagcatccctaatccgaaaacccgaaatccaaaatgctccaataagcctttcctttgaatgttatgttggtactcaaaatgtttcagattttggagcatttcatatttcagattttcatatttgggatgctcaacctgtacatgtagatatttagcaaacactatacaattaggtctcaagaatgcctcttaaatatggaaaggaggattttgtttgcttcttgtttttaaatgaaagtatttctcaaaatgttgtccagggaccaactgcatcatt

SEQ ID NO: 7469 - DNA, 565 bp, Homo sapiens
  MAP TO AL136112.9; EXPRESSED IN PLACENTA, SIGNAL = 1.2; EXPRESSED IN HEART, SIGNAL = 1.4; EXPRESSED IN BONE MARROW, SIGNAL = 1.5; EXPRESSED IN LUNG, SIGNAL = 1.2; EXPRESSED IN ADULT LIVER, SIGNAL = 1.6; EXPRESSED IN FETAL LIVER, SIGNAL = 1.4; EXPRESSED IN BRAIN, SIGNAL = 1.4
taaaccaactcccccaagtgattattaagcacattaaaacccgagaaccactatactaggtgctcaataagtgcttgttagcttgagtatgacattttagtaaagcaggctgaatgtttgagtttacttggtgctccaggtctgtgagttagcaaaatacatatatttgaaggagtttaaaaggatttccaaggaagtataagaaccaatggagtgatccagggaaagaagggagatatgacaataaaacatcttcatgtcttaaataaaacagaaaagtaaaatacctctttctgattatctttttcttcagataatggaatctgaaaatatggattctgaaaatatgaagacagaaaatatggaatctcaaaatgtagactttgagagtgtttcttcagttacagctctggaagccctctctaagctacttaatcctgaagaagaggatgattctgactatggacaggtggtcatatacttaacagttgaattagttttgttcatgggaagttgtggaactgtatttgaataacctgttcccacctagctgtgggaacagagc

SEQ ID NO: 7470 - DNA, 503 bp, Homo sapiens
  MAP TO AC022392.3; EXPRESSED IN PLACENTA, SIGNAL = 4.7; EXPRESSED IN ADULT LIVER, SIGNAL = 4.8; EXPRESSED IN HELA, SIGNAL =   6; EXPRESSED IN BRAIN, SIGNAL = 5.3; EXPRESSED IN BONE MARROW, SIGNAL = 4.1; EXPRESSED IN LUNG, SIGNAL =   5; EXPRESSED IN HEART, SIGNAL = 4.5; EXPRESSED IN FETAL LIVER, SIGNAL = 4.6
cgtagccaagaaagagccactctgacttcccaagagagcctggaacttcgggtagagcccacacgggtgaggcaggggcctgggaggggggctgcactcactctccctccagaagcagaagcaccactcagcagtagagacccggccatccttgtaggtgtcacaggagttgaagaagggacggatgcagacctcgtacttgtccaggttgatggcggccagctccgtctggtccaggaagaggtcagcactggtgtccagcttggagaacatccagccaatggagtccttgcagctggcccccaggctcttgtccagccctgggaaaagatcaggttcaggcacgcttcatctggctattcagccgtttctccagccctccatctctccgcctcgccatcagccccagccctctattctgggtctgggcagcttggaatctaaccatgggattgagaaactcgagaacggcgaaaggtccttccttccacctccacatagga

SEQ ID NO: 7471 - DNA, 558 bp, Homo sapiens
  MAP TO AC012200.5; EXPRESSED IN HELA, SIGNAL =  31; EXPRESSED IN LUNG, SIGNAL =  37; EXPRESSED IN BONE MARROW, SIGNAL =  32; EXPRESSED IN BRAIN, SIGNAL =  15; EXPRESSED IN FETAL LIVER, SIGNAL =  40; EXPRESSED IN HEART, SIGNAL =  12; EXPRESSED IN ADULT LIVER, SIGNAL =  42; EXPRESSED IN PLACENTA, SIGNAL =  17
attggtaatgtgcctttgggctgagtggaaactggtgttctcaaacccagcatggtgttccctttgctctagtcaatgttacaactgaaataaagtctgttgaaatgcaccatgaagctttgagtgaagctcttcctggggacagcatgggcttcaatatcaagaatgtgtctgtcaaagatgttcgttgtggcaatgttgttggtgacagcaaaaatgacccaccaatggaagcagctggcttcactgctcaggtgattatcctgaaccatccaggccaaatccctgttggcagtgcccctgtactggattgtcacacagctcaccttacttgcaagtttgctgaactgaaggaaaagactgattgccattccggtaagaagctggaaaatggccctaaattcttgaaatctggtgatgctgccatttgttgatgaggttcctggcaagccacgcatgttgaggactcctctgactatcctcctctgcgtcctttggctgttcgtaatgcgagatagacagctgccgtggtgtcatccaagtagcggacaagaaggc

SEQ ID NO: 7472 - DNA, 599 bp, Homo sapiens
  MAP TO AC026437.1; EXPRESSED IN LUNG, SIGNAL = 1.7; EXPRESSED IN PLACENTA, SIGNAL = 1.7; EXPRESSED IN ADULT LIVER, SIGNAL = 1.7; EXPRESSED IN FETAL LIVER, SIGNAL =   2; EXPRESSED IN BRAIN, SIGNAL = 2.1; EXPRESSED IN BONE MARROW, SIGNAL = 1.8; EXPRESSED IN HEART, SIGNAL = 2.1
tgtcccagtggagaaaggagcctgcctggtcccagccatttagatccaaagggctgtgaggaggcggggagccgaggcgggcctaggctcaggagcagggatggggaaccctggcaggaagatgaggtggccagcggctcaacagcaaggccagggtcctaggcagcccctggctctcggatgtgctgccctggtccagaggcagcaggatggggagtggatggcgggcacggctgacgagtcctttgctcctcccaacagtcacagtgagggcgcatctcaccgggtggctgatgacactgaagaaaaccttcgtccttgcccccagctctgtgctgcggatcatcgtcctcatcgccagcctcgtggtcctaccctacctggggtatgttgtcagggagtttggggctgtgggtccttctgccacttcaatactgtgtccagaggtttaacagctacattttcaggggaaatccccaggcacgtctagaatcggaaattcagaatgatgttttgtgtgtctgcccaggcaccaggtggaggctcttgggatccattttagaaaagtgcttttgaaatcaggcccagacacgaataat

SEQ ID NO: 7473 - DNA, 541 bp, Homo sapiens
  MAP TO AP001433.1; EXPRESSED IN HELA, SIGNAL = 2.6; EXPRESSED IN LUNG, SIGNAL = 2.2; EXPRESSED IN ADULT LIVER, SIGNAL = 2.1; EXPRESSED IN HEART, SIGNAL = 1.8; EXPRESSED IN BRAIN, SIGNAL = 1.6; EXPRESSED IN BONE MARROW, SIGNAL =   2; EXPRESSED IN PLACENTA, SIGNAL = 1.9; EXPRESSED IN FETAL LIVER, SIGNAL = 2.1
atggtggattcagttcctgcctgagagctcctgcctgctgttcttggtggcctgcccttcaggctttaagacttgcttagtcagccctcacaattacataacacaatgtcttgtaataagcctcttactgtatatcacttcctcattctgcttctctattgaaccctgactggtataccaggagagacatcacaattaacaagtggatctgatgagttgggagaatacctttgggtttctatagatggatggaaggaggaaattggtccttgggtgggcacaggctgctggttcttcactgaaccaggagcccgacctttcacatacttttgtgcagcttttgctaaaggaacagacctggccggagctggacagtgaggccagggttgcattcaaatggaatgaccagctggacattggtccctgcctactggcaactggggagaatgagcaagaaaagtgtgggatcagaaactaagtacagagaatgtcaaaagggtccattggcaattcccacgaaacagcacttcagccagattca

SEQ ID NO: 7474 - DNA, 541 bp, Homo sapiens
  MAP TO AL121920.7; EXPRESSED IN LUNG, SIGNAL = 2.6; EXPRESSED IN PLACENTA, SIGNAL = 2.8; EXPRESSED IN ADULT LIVER, SIGNAL = 3.7; EXPRESSED IN BRAIN, SIGNAL = 3.6; EXPRESSED IN BONE MARROW, SIGNAL = 3.5; EXPRESSED IN FETAL LIVER, SIGNAL = 3.7; EXPRESSED IN HELA, SIGNAL = 4.3; EXPRESSED IN HEART, SIGNAL = 2.9
gagtcagtgagctggggaaggcagagccacccttaatcgggtgggcaccacctaatcagctgccagggaacataaagcaggcagaaaaaatgtgaaaagagagcatggcctagcctcccagcctacatctttctccagtgctggatgcttcctgcccttggacatcggactccaggttcttcagttttggaactcagactggctttccttgctccgcagcctgcagatggcctattgtgggaccttgtgattgcgtaagttaatacttaataaactcctatatatatcctattagttctgtccctctaagagaaccctaatacagtctgtctcctgcagctcatggtctaactgggagacagatgataggcattaaccaaatgatccgatgaatggatgagcaggtacaggtgtgataagtgtggggccagggagagaaggggtgctctggttgcttttaaaaaggggctttgacccagtttgccagggatgtctttgctggggggagcgccaaagcttgagcagactttgaccagatgca

SEQ ID NO: 7475 - DNA, 572 bp, Homo sapiens
  MAP TO AC008688.4; EXPRESSED IN LUNG, SIGNAL = 3.7; EXPRESSED IN ADULT LIVER, SIGNAL = 3.4; EXPRESSED IN FETAL LIVER, SIGNAL =   3; EXPRESSED IN BRAIN, SIGNAL =   3; EXPRESSED IN BONE MARROW, SIGNAL = 3.1; EXPRESSED IN PLACENTA, SIGNAL = 3.4; EXPRESSED IN HEART, SIGNAL = 2.9
tacatccaagtcctgggcacgttctattaagaaagtagttccaggagtgatactttctggaattttcaaaagtatttctttgtctaggaaaactggggaatgatcatttacgtccctaatccgtagctccgcctgaaaaaactgcaagggattttctagtaacacctggaaaggtaggacacagggctctgtggggccgcacagctcctcccggtccaatttctcatttaacaacaaatccccggtctgcctatcgaactgcaaatgcattttttttcctttggaaacgaccctggcccccctcacagcaagttctcctatctccagccccaggtcttttaacaaattggccacaaaggagccactctccgtttcctcggccactgaatagtgcctaggctggcaactagcctgagctatgcccagcaaaacaaagaatatcaggacttgcctttgtttcggaacgcgctccttcccctctccggcctccattgctttctggtctctcaccaaacgtgctccagctctggctcacgttgtcgctaactctatctccccgtatctcgctgata

SEQ ID NO: 7476 - DNA, 516 bp, Homo sapiens
  MAP TO AL109614.27; EXPRESSED IN PLACENTA, SIGNAL = 2.6; EXPRESSED IN HEART, SIGNAL = 2.6; EXPRESSED IN BONE MARROW, SIGNAL = 2.2; EXPRESSED IN LUNG, SIGNAL = 2.8; EXPRESSED IN ADULT LIVER, SIGNAL = 3.9; EXPRESSED IN FETAL LIVER, SIGNAL = 2.4; EXPRESSED IN BRAIN, SIGNAL = 2.6; EXPRESSED IN HELA, SIGNAL = 3.5
tagcaggtgtgagatgctggacttgggagatgagggggaaggaggagtcttggataatgcccaggtgtttgccttgagtggtgtcacttgccatagagagcaaaaagggcttgcttggatattctaacctagactaattttggacatgcagaatctgaggttttctccaggggatgctcttcaggaggcagtagataaatggtccagctttcctggggctcaggaagaggtgggagttgaggtcctgaatcaaaaactctgattggctctttgtgacatcatagaaatggggagtagtgtagtaaaagaagcctttgaccataaaaatatggaaggtaacttgtccaaaccagtttttcatgttgaacttgctgtcccaggtgagcttgctagaattgaattctttcaaactaagctctttggacttttaaaaaaattatttagcatcatgagcttcatgttgccaggccccatcaaccctgtatccacacccccaccacacacacattgcctttc

SEQ ID NO: 7477 - DNA, 502 bp, Homo sapiens
  MAP TO AC012611.4; EXPRESSED IN ADULT LIVER, SIGNAL = 3.1; EXPRESSED IN PLACENTA, SIGNAL = 2.9; EXPRESSED IN HELA, SIGNAL = 3.8; EXPRESSED IN FETAL LIVER, SIGNAL = 3.2; EXPRESSED IN BRAIN, SIGNAL = 2.6; EXPRESSED IN BONE MARROW, SIGNAL = 2.8; EXPRESSED IN LUNG, SIGNAL = 3.2; EXPRESSED IN HEART, SIGNAL = 3.3
gttgcacataaggaggaggctgaggaatatgttccacaagagccaaagctgcgagatcctcaggcaacagctgcgaagaataagcactcactgtccaaaattcttcccaaaccaactgattggtagtgaaggtgatagaatgagtacattgcaaaagatgacagaaaacaattttagaagtagagttaatttatactagtacaagaaaacaagcaccattattgagtagaaatttagaggagttactaggaggctgtataaatcagactactaagttgaaaataacagaattcattctgtctgttttaagcagaaaatgaacttattaagggatattaacaacctctcagaatggagaaggaagaatagaatcaaattgtagagctatacagcccaaaacgatgcttaaccatgcctctctagctaaaatttcctgccaccgctgttcagcacctaccacattcaggactggataacagaagccccattagtgccatctctg

SEQ ID NO: 7478 - DNA, 595 bp, Homo sapiens
  MAP TO AC021677.3; EXPRESSED IN PLACENTA, SIGNAL = 1.8; EXPRESSED IN FETAL LIVER, SIGNAL = 1.5; EXPRESSED IN BONE MARROW, SIGNAL = 1.4; EXPRESSED IN HEART, SIGNAL = 1.7; EXPRESSED IN HELA, SIGNAL = 2.7; EXPRESSED IN LUNG, SIGNAL = 1.8; EXPRESSED IN ADULT LIVER, SIGNAL = 2.1; EXPRESSED IN BRAIN, SIGNAL = 1.5
gttcccacagatcccaacactgccttcaatccataattaccaagaacaagcggcaaacaggagtttccatcagtaccagttagaccccatgaccggaggccctctcagagagcaatgggagattaaaacagtatcttttgatcaaaagcagtaatgtttccccccatgacgcccttgaaaatgaaactcccaccttacccttcattccaaatttggaccgtcgaccatatttgttgatcatgacgaagagaaccaccaacaggacacaggcaaaagcagcaagtccaactgctatggatacctgtgaggaaccagaaacagagagtcagcaacaatcacagaaaacccaatttccttgaaaataatgtgtgtgcccagataagaacagtcctactgccatagtaattgtagccttctcagaactgcaatactgagtaaggtctttagaagaagaaatatatgagacccttagaacatttaaaagtatataaattacccaatttgattagagaaagttccacgattcaatgttctgagccccttctcacctggggccattctaacagatgcaaaaacaagcctagagaggcgtctg

SEQ ID NO: 7479 - DNA, 551 bp, Homo sapiens
  MAP TO AC021677.3; EXPRESSED IN ADULT LIVER, SIGNAL = 2.9; EXPRESSED IN BRAIN, SIGNAL = 2.3; EXPRESSED IN LUNG, SIGNAL = 2.8; EXPRESSED IN PLACENTA, SIGNAL = 2.7; EXPRESSED IN HELA, SIGNAL = 4.7; EXPRESSED IN BONE MARROW, SIGNAL = 2.8; EXPRESSED IN HEART, SIGNAL = 2.4; EXPRESSED IN FETAL LIVER, SIGNAL =   3
gaacagggctctcactctggccacttcaacaagttctaaacagagggcagggctttcttaccttattaacagcttccttagttaggaaggtaagcagcaccataccctgtcattccctcccctggccaaccctggtttaattctatccctggtggcttcacccccaccctcacaatgacacttcgcatgcactgggaccttccagataaggaaacccaaactctgtctggtcacggaccccttcattttgatgatgtttcagggagttcagcctagagaggatgaaaaatgaccacatgaacgtgaggtagtaatgagtatggagagatggataattaaaatatagtcataccctaaccaagggttgtggaatatctgagaatacccttggtaagccaagcatggtacccagtggaactctttcctgagcacccaccccaggccactgtgtaaacaagcatggacagaaacgagtgaatcttggtgaagaaaggattcctcatagacacatgtctcttgcttcttttcttgcctgtatggtggcccttcta

SEQ ID NO: 7480 - DNA, 501 bp, Homo sapiens
  MAP TO AC011159.3; EXPRESSED IN PLACENTA, SIGNAL =   5; EXPRESSED IN ADULT LIVER, SIGNAL = 5.2; EXPRESSED IN FETAL LIVER, SIGNAL = 4.5; EXPRESSED IN BRAIN, SIGNAL = 5.2; EXPRESSED IN BONE MARROW, SIGNAL = 4.9; EXPRESSED IN LUNG, SIGNAL = 5.3; EXPRESSED IN HELA, SIGNAL = 3.3; EXPRESSED IN HEART, SIGNAL = 5.4
gagagacagaaggcaccagcagaagagcagaaaaagtgcacagaatcttgggaattagaaatttagatagctttagagtaacaggaactcacaaagaagacaaatatacagagagaattagaagaagctcaacagtcaagatgggtttgagttgctgttttgttttttactaaattatggatttaacttctcacagttgaacacatcaataccccatgctgtagagccaaatgtgcagtcttccacctggctcctatttcatacaactccatgaagcccagcacattagcaatagagcgaattgcaattatagtactctgccccattcccaggacactttcattcacaatggcatttgtcctgtgagatcccactttccctacagtcctagaaaagaacaagttaatggaaattaatatattttgcattactctttcacttacttataatactataagaactattattagcaccagaaagagagcccacatccatctcaat

SEQ ID NO: 7481 - DNA, 572 bp, Homo sapiens
  MAP TO AC013626.3; EXPRESSED IN ADULT LIVER, SIGNAL =  23; EXPRESSED IN HELA, SIGNAL =  30; EXPRESSED IN BRAIN, SIGNAL =  16; EXPRESSED IN LUNG, SIGNAL =  19; EXPRESSED IN PLACENTA, SIGNAL =  17; EXPRESSED IN FETAL LIVER, SIGNAL =  16; EXPRESSED IN HEART, SIGNAL =  16; EXPRESSED IN BONE MARROW, SIGNAL =  16
tcgcatcactgtactccagcctggatgacacagtgaggctccatgtcaaaaaaaaaaaaaaatcaataaaagaaattttgtgttatcctgtgaaactatgaaaccacctttagtgatctcattccctaaaaataaatctccgaagttctttccaaaacagatttgtacttaaggatgacggaaagtctaacatgatgtgcctttctacttagttattgattggattactttattattaggttagattcagaaaatggttttctagaggaaaagataatgtcacagagacacctcctggggttttcttcagtcacccagaaccatcccttttcccactcaactttcttccttccctacaggcaactgctctataccaggcctctcttagggagacatgtcttatccctcaggtgtgcggaaaaacacggcttctgctggagatggaaaaaggactctggggaggacaagatgcctcatgtcaaagcaacaaggttccagtgaagagctgcaggcctcagaggcaggtaggcagagccatttcttggtctgaacgtctttcttcttcggtcccc

SEQ ID NO: 7482 - DNA, 565 bp, Homo sapiens
  MAP TO AC018761.2; EXPRESSED IN ADULT LIVER, SIGNAL = 6.7; EXPRESSED IN BRAIN, SIGNAL = 6.4; EXPRESSED IN BONE MARROW, SIGNAL = 8.1; EXPRESSED IN LUNG, SIGNAL = 7.7; EXPRESSED IN HELA, SIGNAL = 4.8; EXPRESSED IN PLACENTA, SIGNAL =  13; EXPRESSED IN HEART, SIGNAL = 6.2; EXPRESSED IN FETAL LIVER, SIGNAL = 5.8
ctgaaagcgggcttcaatagttccaacccgatcaccgaaatgccaaaatgatgaacccggaagtgataaacaggaagtaggtcaggaagaacaataataaggttacacccaagcgtgggtttctaaggcgcggaattttccgtacagaccgatttaaggctgcaaggaaggagtcctgggagcatggctttccctgagccaaagccgcggcctccagagctgccgcagaaacggttgaagacgctggactgcgggcagggggcagtgcgagccgtacgatttaatggtgagcgccttcgtcttcattccgggtcctcctcccgcctcctgagatcgacggcccagtaacccccgcctggtgttccccagtggatggcaattactgcctgacgtgcggcagtgacaagacgctgaagctgtggaacccgcttcgggggacgctgctgcggacgtacagcggccacggctacgaggtgctggatgcggccgggtgagccggggaccaggctgggatgggagcgctgaggctgggatccgaggtcgatgctgatcctcctcctccttt

SEQ ID NO: 7483 - DNA, 561 bp, Homo sapiens
  MAP TO AL157381.7; EXPRESSED IN HELA, SIGNAL = 2.6; EXPRESSED IN LUNG, SIGNAL = 1.5; EXPRESSED IN ADULT LIVER, SIGNAL = 1.7; EXPRESSED IN FETAL LIVER, SIGNAL = 1.8; EXPRESSED IN BRAIN, SIGNAL = 1.7; EXPRESSED IN BONE MARROW, SIGNAL =   2; EXPRESSED IN PLACENTA, SIGNAL = 1.7; EXPRESSED IN HEART, SIGNAL = 1.7
atcctgaagcagctggattgatagaatggcggaatgaccttttgaagtcacaattacaacaccaactaggtgacaatgctttgcagggctggggcaaagttctccagaaggccatgtatgctctgaatcagcatccaatatatgttactgtttttcccattgccaggattcataagtcctggaatcaaggggtggaagtagaagtggcatcactcaccatcacccctagtgatccactagcaaaatttttgctttccgttcccacaacattacattctcctggcctagaggtcttagttccagctggaggaatgctgccaccaggagacacaacaatcccattgaactggaagttaatattgccacctggacactttgggctcctcctacctttaagtcaacaggctaagaaggcagttacagtgttggctagggtgattgacccagactatcaggatgaaatcagtctactactccacaatggaggtaaggaagagtatgcatggaattcaggagatccattaggtgtctcttggtattaccatgccctgtcattaaggt

SEQ ID NO: 7484 - DNA, 552 bp, Homo sapiens
  MAP TO AC009410.3; EXPRESSED IN ADULT LIVER, SIGNAL = 0.69; EXPRESSED IN BRAIN, SIGNAL = 0.85; EXPRESSED IN LUNG, SIGNAL = 1.2; EXPRESSED IN HEART, SIGNAL = 1.3; EXPRESSED IN PLACENTA, SIGNAL = 1.8; EXPRESSED IN FETAL LIVER, SIGNAL = 1.1; EXPRESSED IN BONE MARROW, SIGNAL = 1.1
ccttgcctgcctcagtctacctgtttcactacattaatgataacatactaacctctgagtctcttacggacctggagactgtcctacgaatcgtcttggacagcctgaaggacaaggaatggaaagtcaacctcaagaagaaacaggggcccagcatagagatcaaattcttgagagtttcctggttaagatgcaaaacctactcggagctgtcattgataagacagcacagcagcccatttcccagacagtaaagcaactccaggttttcctaggtttcttgggctactggaagatactcatttctcatttggcacaaaccctccacccatggtacaccctagtgaaaaaaataaaaattggatctgaacacacatagagcaagaggcatctgataaaacaaaaataatggtgaaataagcctgagcattaggtaccacactgccacagcatgcttttgtattaggagttattagagatgccacaggtatgaattgaagtttacgacaaaagcaaccaacagaaatggtacctgtaggggttgggtctcaa

SEQ ID NO: 7485 - DNA, 550 bp, Homo sapiens
  MAP TO AC022562.3; EXPRESSED IN ADULT LIVER, SIGNAL = 0.99; EXPRESSED IN BONE MARROW, SIGNAL =   1; EXPRESSED IN HEART, SIGNAL = 1.3; EXPRESSED IN LUNG, SIGNAL = 1.1; EXPRESSED IN PLACENTA, SIGNAL = 0.99; EXPRESSED IN FETAL LIVER, SIGNAL = 0.96; EXPRESSED IN BRAIN, SIGNAL = 1.2
aacctgtatgagggggttcctagaagaaatagtctgtttttcaccttcaacctcttactacatcttacatacatcccagcttcattctacaatatagaaaatgacttggctcaaagtatgcaggaaaacaggacaagaaacattccccagatctgccctaaagaagagtcctgggaatgtgaacctagagctttcagagtagagaggagagtcagactcaagaagggaagagggcagcatgctgacaaccatgcaggagggaaggctgagatgaaggtggtgggatggtaagatggagggggagtgttgtggagaagccccgggttagaaaagaaggcaagaaaacctggatgttagttactaacagtgatctcggctgtgcactgcgggcaccgctgccctcttaccgcctcctgagcgtgcgatttgctcatgatggtgagcagagtctgcaagagcacgtccaggaggctctccaccatcatctctacttcctccatgacatctgcctcctggagcgagcagcaagagagcacaccattagcagcaa

SEQ ID NO: 7486 - DNA, 554 bp, Homo sapiens
  MAP TO AC025313.2; EXPRESSED IN HEART, SIGNAL = 7.2; EXPRESSED IN BONE MARROW, SIGNAL = 8.4; EXPRESSED IN ADULT LIVER, SIGNAL = 7.1; EXPRESSED IN BRAIN, SIGNAL = 7.6; EXPRESSED IN HELA, SIGNAL =   6; EXPRESSED IN LUNG, SIGNAL = 7.3; EXPRESSED IN PLACENTA, SIGNAL = 6.8; EXPRESSED IN FETAL LIVER, SIGNAL = 7.3
ttgaaacccttcacctcctgtcctccttttttaaaagactgtatctacaatatctttcattattttcttgattggctgtcataagttctgtgaagtcatgcataacatctggacacaattttctccagtaggaatttctcatttttgccttgacagcttgcacagccttttctataacaacaatggcattttcaatgatgtaatccttccagacattggttatgttctctcctttggggttctcttccatagcattgacaatccttttcatataccatgtgcaatgagccttaagtgtctttatgacccccttatcagaagctgacttaaagatgtgtttgggggcaagtagaccattttgatgcctttagtgttaaattcatgaggttctgtgaccaggggcattgtccaatatcaaaataattttaataaggcagctccttactggtaatgtgcgtctgatttaatgtcccttctgatttcagggacaaagcattgatggaactgatcccaaacaggggttctcattagctaggtcgggttggtgtacaatc

SEQ ID NO: 7487 - DNA, 584 bp, Homo sapiens
  MAP TO AC010910.6; EXPRESSED IN HEART, SIGNAL = 2.3; EXPRESSED IN FETAL LIVER, SIGNAL = 2.1; EXPRESSED IN BRAIN, SIGNAL = 2.6; EXPRESSED IN LUNG, SIGNAL = 2.7; EXPRESSED IN HELA, SIGNAL = 2.2; EXPRESSED IN PLACENTA, SIGNAL = 2.5; EXPRESSED IN ADULT LIVER, SIGNAL = 2.7; EXPRESSED IN BONE MARROW, SIGNAL = 2.2
ttccaatttgtggcttctcctgctaattccagttaagatgagcatatttagtaaatcttgtacttgtaaatcttcattgcctcatttctcctgacaatcaatttccatcactgcctgaaggaaaaggtagaagtccatacttctgatgctgagtttgagccagaactcttcaggacaccatatgaaaaacggctttctttctcaagtatggattgcatgttgatgtccacgatgtgtttatttgcctcaagtatgttttggatgatgatgtccagatagagaaatagaactgggagtcaataggaagaaaatgtcatacctcattcaagaagcaacttttttttgccttctttatttagtcaacatcatttacttggccactactgcatgctgggcatcatttcaggcactgtagatacagcaataaataaatctgtgaatgggtgtgagcacagattaatttacaattaaaatacaaagtgaaaagtcatactggaaaggaaactgaccttggtaatgcacaatctttactacatttttgcctgtgatggtagtagtggaatggaggggtgttccagacaaag

SEQ ID NO: 7488 - DNA, 581 bp, Homo sapiens
  MAP TO AC019233.3; EXPRESSED IN LUNG, SIGNAL = 5.5; EXPRESSED IN PLACENTA, SIGNAL = 4.5; EXPRESSED IN HEART, SIGNAL =   4; EXPRESSED IN FETAL LIVER, SIGNAL = 4.5; EXPRESSED IN BONE MARROW, SIGNAL = 4.1; EXPRESSED IN ADULT LIVER, SIGNAL = 5.1; EXPRESSED IN HELA, SIGNAL = 6.7; EXPRESSED IN BRAIN, SIGNAL = 4.3
aatctttgctgtcagaccccctggtttctttttaatatacttaactaatcttttgcatttttctgattgcacacaggtctgcaattaaggccttacgtcctggagggatacttgtatactctacatgcacgctttccaaggcagaaaatcaagatgtgatcagtgaaattttaaactcccacggtaacatcatgcctatggacattaaaggaatagcaaggacttgctcccacgacttcacatttgctcccactggccaggaatgtgggctcttagtgattccagataagggcaaagcctggggcccaatgtatgtagccaaattgaagaaatcatggagcacaggaaaatggtgacatgaatttgtaaactgtgtttatgtgttattatatttatatttctgaactcagtacatgttaatatttaaataattatgcagtaactttctctgggtctgtttggaatcctatttagttaatactttagcatcttagaatctaggcttgagaattgttcaggtgtatttttttcctagaaatatatctgtaacaatgatttaaggtggtgcagatggtgtttgt

SEQ ID NO: 7489 - DNA, 542 bp, Homo sapiens
  MAP TO AC024575.1; EXPRESSED IN LUNG, SIGNAL = 6.3; EXPRESSED IN HELA, SIGNAL = 4.1; EXPRESSED IN HEART, SIGNAL =   5; EXPRESSED IN PLACENTA, SIGNAL = 5.7; EXPRESSED IN FETAL LIVER, SIGNAL = 4.6; EXPRESSED IN ADULT LIVER, SIGNAL =   6; EXPRESSED IN BRAIN, SIGNAL =   5; EXPRESSED IN BONE MARROW, SIGNAL = 5.6
gttccaggctgaaggaacagcatgtttgaagaaccggaggcagaagagcgtttgggggtctgaatgttgtcagggcgactggatcctagtaagatagggatggggcaaatggggctggagaatcaggcaggggcctgattacctgggcccttgcgggctacattgaggcgtttgggcttctctccagagggctacagggaaccccagctcgggagagagacccagcttggtgtgtgttttggaacatctccctgctgccctgtggagtagaggcagggaggtagtagtcaatgaggaggaggcagaacagaggagagctggtctcttgccttctgcccacccagaaaaagctcattgagctacaggctgggaagaagtctctggaagaccaggtggagatgctgcggacagtgaaggaggaagctgagaagccagagagagaggccaaagagcagcaccagaagctgtgggaaggtatggcagaaatggccaaggactcaccttcagtcctgggtgggagcaggtctgggcctaggagtctc

SEQ ID NO: 7490 - DNA, 582 bp, Homo sapiens
  MAP TO AL139248.2; EXPRESSED IN LUNG, SIGNAL = 2.4; EXPRESSED IN ADULT LIVER, SIGNAL = 2.8; EXPRESSED IN FETAL LIVER, SIGNAL = 2.7; EXPRESSED IN BRAIN, SIGNAL = 2.6; EXPRESSED IN HEART, SIGNAL = 3.2; EXPRESSED IN PLACENTA, SIGNAL = 3.4; EXPRESSED IN HELA, SIGNAL = 5.3; EXPRESSED IN BONE MARROW, SIGNAL = 2.9
gtgaggatacactcgcaaggtttacctgtgggcttgagtttcaattctgttagtcctgacttcttttctccaagcttgtgccaagtgccatttgtagacaggagccattcctccacagcacagtgatatttgccccgatcgctgtcttccacattcagaatgtgcagctgaaataagtcttgggaaaccttctcagtatgaaatttttgttttctctgtggggtgtgaaactcatccccagtttttataacattggtttggtccatctccaggatctttagccaagaggcattagtggaaacaggagaaaaataccaaataatggctaactgaaggtttccattggaccgggacaagatgctacattctatatcagtgttggagttgatggagagctcttggacttgactccttgaattcacttttagcttgctctctaaatttaaaaaaatgaaacagttactttgctatgaaatagaaagttaaggtagtagagacattagaggtcaagtatgacactgcatcctcccgccatcatatgggtgaactccctctacagtagccccactcactgctcataca

SEQ ID NO: 7491 - DNA, 532 bp, Homo sapiens
  MAP TO AL096863.10; EXPRESSED IN PLACENTA, SIGNAL = 1.3; EXPRESSED IN FETAL LIVER, SIGNAL = 1.5; EXPRESSED IN BRAIN, SIGNAL = 0.87; EXPRESSED IN ADULT LIVER, SIGNAL = 1.2; EXPRESSED IN HEART, SIGNAL = 1.2; EXPRESSED IN LUNG, SIGNAL =   2; EXPRESSED IN BONE MARROW, SIGNAL = 1.9
ttagggagaaatccaagaggcataaaaagcattttaagttactattttacatagtcaacagtaaagaaagtaatctcagaattctggacaatttgaagatactatgtttgattgtaaaaaataaacaagtgtcttctcatacactactgagaggaatgaaactgataacactttagagtgtaatttgtcattacagagaaaaaccctagaaatggtgttattctttgacccagcaattacatttttcgtacgtttggtaaaatacagttttaaatagcaaaactttggaaacaacaataggaaattgtctaaagaaacaatcatgtttttggaaagtaagtacagcactggggaaatcttcacactatattaaatagcaaaagaggggttcaatctgctatatgcacaaatgtacaaaaacccagcttcatgggctttctcaatgcttctgcgcttctatgtgattcacgagaaacatattacaaacagaaaaatattactacaaataaaaccatttacaaaaagctgtggg

SEQ ID NO: 7492 - DNA, 549 bp, Homo sapiens
  MAP TO AC010802.4; EXPRESSED IN LUNG, SIGNAL = 1.7; EXPRESSED IN ADULT LIVER, SIGNAL = 1.8; EXPRESSED IN FETAL LIVER, SIGNAL =   2; EXPRESSED IN BRAIN, SIGNAL = 1.9; EXPRESSED IN BONE MARROW, SIGNAL = 2.2; EXPRESSED IN PLACENTA, SIGNAL = 1.5; EXPRESSED IN HELA, SIGNAL = 2.6; EXPRESSED IN HEART, SIGNAL = 1.6
ggtgaactcagcagaggaggattttagtaatcaagtgaataggatgactcgttctgtggacaccactcagcctcttccccagcaacccctgttatcacccaatgcccaatgggtccatgaacaaagtggccatgatggcagggacggagattaagcctgagctcagcaacgtggacttccactcaccaaggctgacctggctacggccagtgctgagcacccaatttgccagcagcagcacagaccaacactgagccattgatatggcaccattcttcggggtgatcagccagctacttggtggcaggttgattatattagacctcatccatcatagaaagggcagcagtttgtcctcaccagaataaacgcttactctggatatgggtttccatatcctgcacgcagtgcttctgccaagactaccattcatggactcacagaatgccttatccaccgtcatggtattccacacagcattgcctctgaccaaggcacttactttacagctaaagaagtgcagcagtgggctcatgctcatggaattca

SEQ ID NO: 7493 - DNA, 594 bp, Homo sapiens
  MAP TO AC011666.18; EXPRESSED IN PLACENTA, SIGNAL = 3.1; EXPRESSED IN ADULT LIVER, SIGNAL = 3.9; EXPRESSED IN HELA, SIGNAL = 3.6; EXPRESSED IN FETAL LIVER, SIGNAL = 8.9; EXPRESSED IN BRAIN, SIGNAL =   2; EXPRESSED IN LUNG, SIGNAL = 2.6; EXPRESSED IN HEART, SIGNAL = 2.2; EXPRESSED IN BONE MARROW, SIGNAL =  59
ttgctgtagcccatactcccatcctcccttgtcaacccaaactgcggtgaggctgggtcagacctgccagagtccagccctaccttgagaaaattttgcagatcttttcgcaccagctctttgaattccccctggttcagggtgtctgggtgccccagcttcacagagtattggtggaaggtgttgatgatggtctctatgttgcgttccagctgcgacattttgcaagtcatcgtcttgcactctgtctgtgtaatggaaaaccaagagttgggacacttagaagaaaatgctgtcaagcttctttgacacttcctactaagcactcacagaaatagtgggggaagtgcaaaataaaaagaaagcacaggctgcaacttaactgggagatggcctgtcacacacatgtacaaaatgattttttagaatatctacagagtgccaaaaagcaaagcatttgagggcaggaggccccaggggaacatgacctaagaaaatgtgaaagaagctttaaagtaggcagggccaaccaaggagggcttctaggaggaggatttggaaggaagttgggtcagggaaggaaagaaggaatcg

SEQ ID NO: 7494 - DNA, 532 bp, Homo sapiens
  MAP TO AC013746.4; EXPRESSED IN PLACENTA, SIGNAL = 3.8; EXPRESSED IN ADULT LIVER, SIGNAL =   5; EXPRESSED IN BRAIN, SIGNAL = 2.7; EXPRESSED IN BONE MARROW, SIGNAL = 5.6; EXPRESSED IN LUNG, SIGNAL = 5.7; EXPRESSED IN HELA, SIGNAL = 5.8; EXPRESSED IN HEART, SIGNAL = 3.6; EXPRESSED IN FETAL LIVER, SIGNAL = 4.8
aagcacacagttttggtcccagaaaaacaaataaatgaaagcagaaaacaaatttcacttttaagaaatttttaattctgcccttggaaagttgaactgctctgtggatgtttcaacaaatgtggcctttaactatctggataatcttttttagattataatctatagtctgcatgacaaaaagtgatgcccaggctcactaatgtctgcatttcattattttccttttgctgtaaccagataggatttaaaaaaggagaaacagtcaagcaaggaccatggtctcaggaaaggaggagaaccacctccaggatatacagcttgctttcatcttcctcttcttcttcttcttcttcttcttcttcttcttcttttcttcctcctcctcctcctcttcgagacaggagtcacaccatgttgctcagtctgatctggaactcctgagctcaagctactgtcctgcctcagcctcctgagtatctgggactacaggtgcatgtcacagcacccggctacagccagctttccaagg

SEQ ID NO: 7495 - DNA, 546 bp, Homo sapiens
  MAP TO AL162311.1; EXPRESSED IN HELA, SIGNAL = 4.8; EXPRESSED IN BRAIN, SIGNAL =   3; EXPRESSED IN BONE MARROW, SIGNAL = 2.9; EXPRESSED IN FETAL LIVER, SIGNAL = 4.5; EXPRESSED IN HEART, SIGNAL = 2.5; EXPRESSED IN ADULT LIVER, SIGNAL = 2.7; EXPRESSED IN PLACENTA, SIGNAL = 2.8; EXPRESSED IN LUNG, SIGNAL = 2.4
acatcatgcacaacacctcggcggcagcagcgcactgcacccactcccgccacggccctgctcatttgtgcatgatatttggagcatctggaggagtgggaatagcactggggagaggagggagcaagaaacagcatgagtgcctgctgagaggtcagccaaagttgtgcagggcgagcctgaacatgtcattggtgcaaacccaagtattgttgatgttctttaataggaacatctggtggaaccccatgatggcggtcttcatccgccttaagctggcccacaaccatgctgatgatgcagctatgcggcgtgagctgatggtcctgcgcggtgatgctgtgctggattttctggaaccgaaggctagacaacttctccacaatggcagctttcccctggaactgttgtccttcccacgtaaggcatgatgcgtcaatgtaaattgcgcctagttggggtctatcgttatcaaataactggtagtaatgtggaatgaagctggatcctatctgctcccaaattggcttgtctcccactctggac

SEQ ID NO: 7496 - DNA, 589 bp, Homo sapiens
  MAP TO AC021308.3; EXPRESSED IN PLACENTA, SIGNAL = 2.2; EXPRESSED IN ADULT LIVER, SIGNAL = 2.2; EXPRESSED IN FETAL LIVER, SIGNAL = 1.7; EXPRESSED IN BONE MARROW, SIGNAL =   2; EXPRESSED IN HEART, SIGNAL = 1.8; EXPRESSED IN BRAIN, SIGNAL = 1.9; EXPRESSED IN LUNG, SIGNAL = 2.1
tcataaaccaccaaccagggctgcctgaggttgccgctatcttttccttttcttttttcaatttctggtgcaacaaaaaacaccttttgaatgaataaaccaataaatgacatttttgttttcctgctgcacagaacctgaagcgggtagctgagacctggatggatgaatttgccgagtacatttaccagcggcggccggagtacaggcatctctccacgggggacatctctgcccagaaggagctgcgcaagcagctcaagtgcaaggacttcaaatggttcatggctgctgtggcctgggacgtgcctaaatactaccctccagtggagcccccgcctgctgcctggggggaggtgaggaaaggttgcctgaaacctgcgcctacctatgagactgtgtgcctcccccatagcctcaggtggtgggagggactgctaaaaccttcacttttaccctgcagccaagtagcattcatttaaatcatctcaaatacatgaatgttcaacctctttttagcaattactagatttagcttcagagttgatagcctaacccagaattagtgaccactgttgattccccagat

SEQ ID NO: 7497 - DNA, 538 bp, Homo sapiens
  MAP TO AL121575.24; EXPRESSED IN LUNG, SIGNAL = 2.2; EXPRESSED IN ADULT LIVER, SIGNAL = 1.5; EXPRESSED IN FETAL LIVER, SIGNAL = 3.9; EXPRESSED IN BRAIN, SIGNAL = 1.5; EXPRESSED IN BONE MARROW, SIGNAL = 2.7; EXPRESSED IN PLACENTA, SIGNAL = 1.6; EXPRESSED IN HEART, SIGNAL = 1.5
acagagacagtggcattccctattaagcccaaaccagaagattatcactgttacattttggtgtctagtttaactggatggattcaagaagtgttcactgagagcccagtatacagccgcaccagtgtgtgatactggtaacatgacgtcaagcaaaagcagacatgggtctaccttcccaagatttacagacctttcaggtttttcctttgcttatacttgtgaatatatgcctattttatacaattgagatcatcctacacagactgatttataatctactttttaatttagtaactcaaaactttttaattttagagtgtgatgtgaaggattatggggacctgccctttgctgacatccctaatgacagtccctttcaaattgtgaagaatccaaggtctgtgggaaaagcaagcgagcagctggctggcaaggtggcagaagtcaagaagaacggaagaatcagcctggtgctgggcggagaccacaggtcttgttgaataactgtgtctatgggaatctggcacaaaggaag

SEQ ID NO: 7498 - DNA, 577 bp, Homo sapiens
  MAP TO AL133293.14; EXPRESSED IN PLACENTA, SIGNAL = 1.1; EXPRESSED IN ADULT LIVER, SIGNAL = 1.3; EXPRESSED IN HEART, SIGNAL = 1.4; EXPRESSED IN BRAIN, SIGNAL = 1.4; EXPRESSED IN BONE MARROW, SIGNAL = 1.6; EXPRESSED IN LUNG, SIGNAL = 1.4; EXPRESSED IN FETAL LIVER, SIGNAL = 1.5
tctgccttcatcaaagtccccctccttcctgggcacccttccctgcatctccccttcttgtcataatcctcactacccccatgtttttttccaggatgccacgaggctcccacaggctcacctgcctgcctgtctcttgggggctttcaacatcagccacagccaagtgggacaactgctgggggccccaggcatgatgtaacaccaccccgctgctcgggaggatctgggaccccacaaagttcacccaggacacggggataaagttacacactgaggacttaatgagctcaccttggcagctcagcccaacactgagggattgcttaaatctgagccttccaccaggcctggatctcatcgatgtggggcctcccagcccatttcttccttcttagtataccctgtcttttcctccacccctctaccaacagtccccctccttctcaggcctggctgccccttctgggctgctccaggccctgtgggccatcgaaacctccctggccaatgtcatcagggtcttccatgagggctcagccagtggtgttagctgggcagcatctgagaccatcaa

SEQ ID NO: 7499 - DNA, 579 bp, Homo sapiens
  MAP TO AC022045.2; EXPRESSED IN PLACENTA, SIGNAL =   2; EXPRESSED IN ADULT LIVER, SIGNAL = 2.2; EXPRESSED IN FETAL LIVER, SIGNAL = 2.9; EXPRESSED IN BRAIN, SIGNAL = 2.1; EXPRESSED IN LUNG, SIGNAL = 2.6; EXPRESSED IN HEART, SIGNAL = 1.9; EXPRESSED IN BONE MARROW, SIGNAL = 1.8
actgcttgaactgagcagggcaggagggcagtctctgctggacagcttggctgccctgcctgccctgacctctgcactcgcccccacagtcttccccagggtgctgctgcagaccctacgccaccccatcttcctgctggtggtcctgtcccaggtatgcttgtcatccatggctgcgggcatggccaccttcctgcccaagttcctggagcgccagttttccatcacagcctcctacgccaacctgctcatcggctgcctctccttcccttcggtcatcgtgggcatcgtggtgggtggcgtcctggtcaagcggctccacctgggccctgtgggatgcggtgccctttgcctgctggggatgctgctgtgcctcttcttcagcctgccgctcttctttatcggctgctccagccaccagattgcgggcatcacacaccagaccaggtgagtgtgtgcgtgggcacgtaaaggcaagcctgggaggacaggacagggaggacaggggccctgggcagaggccaggatggcagggcaacccctgcctcaaatcttgcctccccagttctgcttaacagc

SEQ ID NO: 7500 - DNA, 579 bp, Homo sapiens
  MAP TO AC013291.4; EXPRESSED IN HELA, SIGNAL = 2.2; EXPRESSED IN LUNG, SIGNAL =   2; EXPRESSED IN BRAIN, SIGNAL = 1.7; EXPRESSED IN BONE MARROW, SIGNAL = 1.8; EXPRESSED IN PLACENTA, SIGNAL = 1.9; EXPRESSED IN ADULT LIVER, SIGNAL = 1.9; EXPRESSED IN FETAL LIVER, SIGNAL = 1.7; EXPRESSED IN HEART, SIGNAL = 1.9
  unsure 120
  unsure 240
gtggaaatgctgccctagacatataatgttttagagactacagggtctctgtagaagatctagttcatcgttctcatttcacagagaaatgaagagaacttcccaggttgaacagaattncaacagatcagagttgagaatctgggtctcctgtccccttgaaagaattgtttcctaattaatgtgtagaggtttcttggctccaaaactataagtatgtttttgactgttttcctgtcntcacagattacatttgacaacaaggcccatagtggaagaattaaaataagtttagataatgacatttccatcagagaatgtaaagactggcatgtatctggatcaagtaagtgatgcgcattactagttttcagaatggttattaaataatgtaaaatggttattaaaatagcaccctctggatatctagaacaacaaatagaagattagaccattttcaagtccctaaacctctacaagtagatcaactctgatgtttcaggcaatatgtgagtcatgaataactgaaatggccttcctctccttgtgccctcacttgcccactcctgaccaagaatg

SEQ ID NO: 7501 - DNA, 559 bp, Homo sapiens
  MAP TO AL139245.2; EXPRESSED IN PLACENTA, SIGNAL = 2.5; EXPRESSED IN HELA, SIGNAL = 3.9; EXPRESSED IN HEART, SIGNAL =   2; EXPRESSED IN FETAL LIVER, SIGNAL = 3.3; EXPRESSED IN BONE MARROW, SIGNAL = 3.2; EXPRESSED IN LUNG, SIGNAL = 1.9; EXPRESSED IN ADULT LIVER, SIGNAL = 1.9; EXPRESSED IN BRAIN, SIGNAL = 2.2
gtgagctaagttgcaagccccgtgtttaaaggtggatgcggtcaccttcctagctaggcttagggattcttagtcagcctaggaaatccaggtagtcctgtctctcagtaccctctctcaacaggaaaaccctgttgagaggttggccgatgaccgctctaactgcttcctgctgaactggggcatagtaggggtcatgcagttgagatttcctcaggaggggtgccttcaatgtcatcaacatcagagcatgggctagcaggctggtccagggatccacggtagattttagttatggactgcctctggggctccatttgaagaatgatttgtagcttcacagcttcgattctggaagagacaagcttaacaaggaggttaaagatacagggtccaaagaggagtaacaatattatagctgctagaggtcctaagaaggggagaatccagggcatccattggctgaggaggccccagggtccagtgttttgaagctcctctgctctatgttgtatgcaatctcgaatttctttaactttctcggtgacgattctggatt

SEQ ID NO: 7502 - DNA, 541 bp, Homo sapiens
  MAP TO AC026236.4; EXPRESSED IN PLACENTA, SIGNAL = 1.5; EXPRESSED IN ADULT LIVER, SIGNAL = 2.2; EXPRESSED IN HEART, SIGNAL = 1.5; EXPRESSED IN FETAL LIVER, SIGNAL = 1.3; EXPRESSED IN BRAIN, SIGNAL = 1.3; EXPRESSED IN BONE MARROW, SIGNAL = 1.3; EXPRESSED IN LUNG, SIGNAL = 0.86
agcagatgattccaagtggcattctggagttatgcttgttgctgcagctgctgaaaaaaattctttcagtgatcagttctcaccggggcagccacagccacagcatggagcactgggaaggagtaaggctctaggactacaggatggcagtgtttggccttggaacagtgttgggaaggccatgaggagggtgaccgcatctcctggttctgtaggtgcttctacgttgtctcagtttattcctgttgtcctgccctagcttgcacggcacacacacctttgctcggttcctggaatatgtctattaattttcttacttgaggcctttatattttctgatccttcagcttgtagtgctttaaccccaaatacgtacatggttggctctttcatagccttcaggtctcaggccaaattgtcaactcctcacagatgtttctcaattattctccattacagcagtgcttgttttttccttcttagcattattcagtttgaattaccttgtgtatttttatttcctgtcactccacttcccctg

SEQ ID NO: 7503 - DNA, 589 bp, Homo sapiens
  MAP TO AC008474.4; EXPRESSED IN LUNG, SIGNAL = 1.6; EXPRESSED IN PLACENTA, SIGNAL = 1.6; EXPRESSED IN ADULT LIVER, SIGNAL = 1.7; EXPRESSED IN HEART, SIGNAL = 1.4; EXPRESSED IN FETAL LIVER, SIGNAL = 1.4; EXPRESSED IN BONE MARROW, SIGNAL = 1.8; EXPRESSED IN BRAIN, SIGNAL = 1.5
tacccaccggttattccttggttatattagtaatacaacaaagagtaatattaaaagctaatgattaataatgtctatactactgattgataatgtccatgatcatctctatagctaatttgtattacaactattcttattctaactattttatttattatactgaaacagtttgtgccttcagtctcttgcctcagcacctaggtaatccttcacccacacttaccagtattcccatccttcagggaaccattgcaaacactgataatgtggctagaattgacaagaatgtctcccatgtaacctttaaccaccgtcagatttattttgacaaacatttttcccatacaagcaatgaaaataataagtaactttttttttttttgccagtgcctcaactacagtaattagccatgtagagaggtgcctaaagaccctacagtcagctcatttgtgtcaggtatgttacctttgaaaccatgccccaaagagttaactaaaaccaatgactgactgaaattcttgagcttgcaagatggcagataagaagaaaaacaatttgctgaaacgctgaaactccctccacttg

SEQ ID NO: 7504 - DNA, 572 bp, Homo sapiens
  MAP TO AC008928.5; EXPRESSED IN PLACENTA, SIGNAL = 3.2; EXPRESSED IN HELA, SIGNAL = 4.6; EXPRESSED IN LUNG, SIGNAL = 4.7; EXPRESSED IN ADULT LIVER, SIGNAL = 4.4; EXPRESSED IN HEART, SIGNAL = 4.8; EXPRESSED IN BRAIN, SIGNAL =   4; EXPRESSED IN BONE MARROW, SIGNAL = 4.3; EXPRESSED IN FETAL LIVER, SIGNAL = 4.6
cttgagggcaaggatagctgtcattcacctgtgtaaccatagcatttagcacatagaaggtactcaatacatccttgtccagttgaagaaaatatccattctttgttgtagtttggtgttcttggctgaactcagtaggattgacctgataattatgtgttagtaagaatggaggacgtttttcagtaagaatggagttagcaaagacaaatgcccagtgtagccccaggacagttgccttccaggaaactctgactttctttttttcttattcttttttctttggcttctggactctagcattttccagaaccaagactgaaagaagcaaaaacagctgaaaaatctcttaaattacatcatcttcctctgggaattcaggcatgttggctgggtttgactaaaacataaccaggatttgagtcttgggttcagataaaatataagttcaaatctctcaagccttcttaaaagatcagataacagtccttaggttaaaaattctttaagccaggcattgtggctcatgcctgtgtcccaatactttgggaagccaaggtgggagaatttct

SEQ ID NO: 7505 - DNA, 507 bp, Homo sapiens
  MAP TO AC021076.2; EXPRESSED IN LUNG, SIGNAL = 3.2; EXPRESSED IN ADULT LIVER, SIGNAL = 2.7; EXPRESSED IN BRAIN, SIGNAL =   3; EXPRESSED IN HEART, SIGNAL = 2.7; EXPRESSED IN PLACENTA, SIGNAL = 3.1; EXPRESSED IN FETAL LIVER, SIGNAL = 2.7; EXPRESSED IN BONE MARROW, SIGNAL = 2.6
aatgctctaccgtcaccaccttgaaatttataatattttgaacaagaggccctgcattttttattttgcataaaaaacatacaaatcacatagctggccatgattaaggacaatcaggactaccttgtgacttttatgggtcctagccaattttgccttcatggacctcttccttcctaaaatcatattagaattatattttacaactgcgttcatacaaagatgaataggttaacatgttcttgacctaaaagttaattttttccagattttaaatgaaactaaaacattttttatgaacttcaacactatcgtgggcccttgcactgtgcctactctgcttaatggagatgttgaccttggggccgagcgggtggagacgggacatcaacagcccattgccagcatggccatcaaggcaatgtgtgctggttggaaatgaatgcttctggatgtcagttttcgcagtgaaagatgggtccacattctctgctcacatttgctgga

SEQ ID NO: 7506 - DNA, 546 bp, Homo sapiens
  MAP TO AL160281.2; EXPRESSED IN LUNG, SIGNAL = 2.1; EXPRESSED IN HEART, SIGNAL = 1.9; EXPRESSED IN FETAL LIVER, SIGNAL = 1.9; EXPRESSED IN BONE MARROW, SIGNAL = 2.2; EXPRESSED IN PLACENTA, SIGNAL =   2; EXPRESSED IN ADULT LIVER, SIGNAL = 1.5; EXPRESSED IN BRAIN, SIGNAL = 1.9
ctccttccctttgaccttccaaatctcatgtaatttctactttagccaactcttatttctcagtataacccaaacgacagaataatctagtccaatggcttgatatttttctatgagaaaaattgcttcatggtgaagtaacaccacctgaattcagaaattcctctgagtttgctcaattgctttgtttaaatttacttccaaaatagcattcatcaaagccaacaacaacctctgtgtcataaaatcaagaaccaattttccatcctcatatgaattgatgtctaatttggacaagtcctccattaaaacacttgttggaaacactgttctctatgagccccttgctcacctggtatgtttttacctctctggctgctccttctcattatcttctataggcatatccttctcgacccaaagcacaagctttggtcttaggcctgcttttcctgttactccctacattttctttagatagctggatgacactaagatgccggaaacaagctctcaaatcccacctcagtgtcccaagcacagaga

SEQ ID NO: 7507 - DNA, 599 bp, Homo sapiens
  MAP TO AL122008.9; EXPRESSED IN PLACENTA, SIGNAL = 2.8; EXPRESSED IN ADULT LIVER, SIGNAL = 2.5; EXPRESSED IN HELA, SIGNAL = 3.2; EXPRESSED IN BRAIN, SIGNAL = 2.8; EXPRESSED IN BONE MARROW, SIGNAL = 2.6; EXPRESSED IN LUNG, SIGNAL = 2.8; EXPRESSED IN HEART, SIGNAL = 2.8; EXPRESSED IN FETAL LIVER, SIGNAL = 2.9
aaccagtatgctcaggcaccaccccatcctatcccaatgtaagaaatgtggagccatttcttactttccatgtggtttttcatcgagtcaagactagtaagccagccgataggcacattgaaacttaaaaatctcaccacatttagcaaaggatcatctgcacagagacctggaaagatcaaaaaaggactttgaggattctctgatccaacttattcatattatcaatgagtccagagatgctcagagaaagggcaagagagccctgtgctctgcagcctcagacctctccagaaatactactaggaaagaagtgggtcagcgctatctgtccttataggaaggaacctggaggcggtgcctgggcaggttggagcaacagaggtaggagtgctactagcccatgctgggacattgtgatagatgataagaacatatgcttgccattagatagtttgggcaggaaactcatctcttcctttatttggcaacatggtcataggtaagtcaactgaaagctcttagtctcagctcttacttgaaaaaaatggagactttaattcccacttccaaaggtcactgtgggattgagtgtccct

SEQ ID NO: 7508 - DNA, 573 bp, Homo sapiens
  MAP TO AL162471.1; EXPRESSED IN PLACENTA, SIGNAL = 3.6; EXPRESSED IN HELA, SIGNAL = 5.6; EXPRESSED IN HEART, SIGNAL =   3; EXPRESSED IN BONE MARROW, SIGNAL = 3.3; EXPRESSED IN LUNG, SIGNAL = 3.1; EXPRESSED IN ADULT LIVER, SIGNAL = 4.7; EXPRESSED IN FETAL LIVER, SIGNAL = 3.7; EXPRESSED IN BRAIN, SIGNAL =   3
tcattctgaggccactctcctaggtttgtacatggatgtcttctctctgttcctgtattcacatggtcataccttggtctgtgtgtgtctgtgtcctaatctcctctccttattaggatgccaatcatactggattaggactcaccccagtcatctcatttaatcttaagtatctctttaaaggaccggtttccacaaaaacacagtcacattctggggtactgaaggtgaggactttaacacaaattttggaggggagcttcaattcagccagtaacactgggtaactactttgcctgaagttaaggcctgccttgtggatcaactgcatactcgtaccttccttggacttgatcttcaaatctaagcaatgttgacagggcccctgtaagcacacgattcgatgtaattggaactggcaaatgcggaggctgatgttaatgcagactccagctcttctcagtgctgcatttgatggagagacctagcctgggggacctttgccaggatgtcaaaaggtaggtacatggtctctgacttgacaagctgcagtctgtgtgggctgcttttgta

SEQ ID NO: 7509 - DNA, 521 bp, Homo sapiens
  MAP TO AC008269.3; EXPRESSED IN PLACENTA, SIGNAL =   7; EXPRESSED IN ADULT LIVER, SIGNAL = 9.1; EXPRESSED IN HELA, SIGNAL =  10; EXPRESSED IN BONE MARROW, SIGNAL = 8.6; EXPRESSED IN LUNG, SIGNAL = 7.1; EXPRESSED IN HEART, SIGNAL = 8.2; EXPRESSED IN FETAL LIVER, SIGNAL = 8.5; EXPRESSED IN BRAIN, SIGNAL = 7.3
gccattttcagccacttttctatgttccatatttatagtatcatatttttagtttgacatcttgggactcctttctactacatttcactatttttcaattgactttttatggggatcaaagacacttgaggaaagacactagaaataaagctgtatttctattttgactgtggattaggtttctgatacttagttccactgagccagggaacatcctttttctctttaattcctctctccattgtaaaattgtttctttctctccttacagtgagtgggtaaaaagagaatttgtggcaattcttaaaaacttgaccaccacaggaagacaatttggaggcattttggctgcacacagtatagccactacactgaaatactggtaccatggctcaccacctggggagattgtatctttaggaatattgagtgaaggtaaatctgggtttttcatatcttgtaaaatcttaaaacctctatctataactcgtgctcctaattctgtgtccccacccatctag

SEQ ID NO: 7510 - DNA, 513 bp, Homo sapiens
  MAP TO AC010397.3; EXPRESSED IN PLACENTA, SIGNAL = 2.1; EXPRESSED IN ADULT LIVER, SIGNAL = 2.1; EXPRESSED IN HELA, SIGNAL = 3.4; EXPRESSED IN HEART, SIGNAL = 2.4; EXPRESSED IN BRAIN, SIGNAL = 2.2; EXPRESSED IN BONE MARROW, SIGNAL =   3; EXPRESSED IN LUNG, SIGNAL = 2.6; EXPRESSED IN FETAL LIVER, SIGNAL = 2.6
ttaggctaagcagcaggagcaggagctcccatttcctctgattttgagagcagagatttactagtttatagttgggctcctgagggaacccatgaaaagggctacagtgatggcttggaaatattaagttcaggtaagggggatctgaatactaggtgggactgatggatgatccagggtgttattttgaggatcaggtagctctggccgtgaccagtaaaggtatggaagagatgattatcccaggcagtagtgttcatgatagtctcaagcagtgtggtaagactagaaaaggtgtaaagaggtctccaacaacagcagtggcaaacgggagtttctgtggcttcattagacaagaggtaagtagatacattctaaattgagttatttatatttgttccttgccaattaaatttgctagaaaactgtcataacaacatttaacaaaatattaaacatctaacatttactgagtgcttaatatgtgctatttgctctggcatctgtattgca

SEQ ID NO: 7511 - DNA, 546 bp, Homo sapiens
  MAP TO AC022918.2; EXPRESSED IN PLACENTA, SIGNAL = 5.4; EXPRESSED IN ADULT LIVER, SIGNAL = 5.6; EXPRESSED IN BRAIN, SIGNAL =   5; EXPRESSED IN BONE MARROW, SIGNAL = 6.2; EXPRESSED IN LUNG, SIGNAL = 5.9; EXPRESSED IN HELA, SIGNAL = 4.4; EXPRESSED IN HEART, SIGNAL = 4.4; EXPRESSED IN FETAL LIVER, SIGNAL = 4.4
tatgcctggcctatttcctgggctcaacttccacattttaatagtgttgtagacacctttgatttgatgtcattctgaaaagaaagtcatttttaaaaatgattctttttcagctgcttttttctctgtttctacccttatcacctaaattgacacaaaatgtctcagtaaacagccccagtatcttctcatctcatattcttccttcttcatctatacttccccttaactttcttctctggatccctaagtgaactaagtttttgcattcactaaatccatcttctagattttccttactaacatagatgtaatttgattctcaacttttcatgttcataattttcctacaaaaatgctcccttttaatcaatctggtctagccactgtcaccttgagcaccagtaatatagaaactttccatattggctcttgcctttcttgttatccgaattctgtatatattcttcttgtctttcaaaaagctttttctcattcattacataccttaaaaattgcattattggtgatgccagtctttatcct

SEQ ID NO: 7512 - DNA, 553 bp, Homo sapiens
  MAP TO AC024575.1; EXPRESSED IN PLACENTA, SIGNAL =   3; EXPRESSED IN ADULT LIVER, SIGNAL = 3.4; EXPRESSED IN FETAL LIVER, SIGNAL =   3; EXPRESSED IN BRAIN, SIGNAL = 3.5; EXPRESSED IN BONE MARROW, SIGNAL = 3.4; EXPRESSED IN LUNG, SIGNAL = 2.6; EXPRESSED IN HELA, SIGNAL = 3.5; EXPRESSED IN HEART, SIGNAL = 2.8
tgctgttctctcatccctccccaccccagatcctgaccaagatgaagcagcagggtcatgagacagccgcctgtccggagactgaagagataccgcagggagccagtggctgctggaaggatgacctccagaaggaactgagtgatatatggtgatgcccagcctgcagtctgacccctgaccctcctctgaacccgttcccccaacgggatctggcagtgaccaccagaacctggagcccacctgagtccagacttccctcaccccctaggactcaccccaccacggcccccaaccttagctgtactgctgtctacaccctgagcagtgtggagtctcccagcgcccccagctccttgtcttcttgcaggtctgctgtgcacgtgctgcagaactccatagacagcctcactttgtgctcgggggcctgtcccaaggcctcgagcctaagaggtgagggaggctgagaattgctcaggggtgggaggtcattgtctagcttcacagggaggctatgttcagagagcctatttgggagtcacatctgatgggt

SEQ ID NO: 7513 - DNA, 549 bp, Homo sapiens
  MAP TO AL121673.27; EXPRESSED IN LUNG, SIGNAL = 3.9; EXPRESSED IN ADULT LIVER, SIGNAL = 3.5; EXPRESSED IN BRAIN, SIGNAL = 3.5; EXPRESSED IN BONE MARROW, SIGNAL = 3.3; EXPRESSED IN PLACENTA, SIGNAL = 3.3; EXPRESSED IN HELA, SIGNAL = 3.2; EXPRESSED IN HEART, SIGNAL = 3.1; EXPRESSED IN FETAL LIVER, SIGNAL = 2.6
gacagagaccacttccagcccccaggaggcccacactcccctccactccacagcgcccccaaaggtgcccacgtctctgacccccaccctgggtgagtaggagcacgtagcaggtgcccctcacgtgcagctctctcatccacacatactcacacatgctcacacaggaaagcacatgcccgctgtgtcctgctgcattgctgggcagtgtccactgcacgtcgctcgctgcattgctgggcagtgtccgcggcatgtcgctctctgcattgctgggcagtgtctactgcacgccgcttgctgcattgctgggcagtgtctactgcacgccgctcgctgcattgctggggagtgtccgctgcatgtcgctcgctgcattgctgggcagtgtccgctgcacgccgctcgttgcattgctgggcagtgtctactgcacggtggacgctcctgcactcatggatgctcaggctgcttcccgttggacgcgattgtgagtgacgctgctgtgagcctccaggtaccggccttggagccagcaaatgctttcat

SEQ ID NO: 7514 - DNA, 593 bp, Homo sapiens
  MAP TO AL121897.15; EXPRESSED IN PLACENTA, SIGNAL = 1.9; EXPRESSED IN ADULT LIVER, SIGNAL = 1.9; EXPRESSED IN BRAIN, SIGNAL = 1.4; EXPRESSED IN BONE MARROW, SIGNAL = 1.5; EXPRESSED IN LUNG, SIGNAL = 1.4; EXPRESSED IN HELA, SIGNAL = 2.5; EXPRESSED IN HEART, SIGNAL = 1.5; EXPRESSED IN FETAL LIVER, SIGNAL = 1.9
aatgcttgatggaaacgaggcagggtggtgctactcaggccagacgtgaagacaggaggcaaggagtgcagaggcccaaagttcagtggtcccccagctcctggggaatcttgaggctgagcttgcaaagtggtaagcaggggctgtgcctcagcctgggagtagcccatgaccaggcctcctgtggccccaggtgggttacacgggggcaggttgagtggaagaaagcccagtaggtgggagaagtccacattagcagcgcagagggcctcagagaggttggcggggctcttggcaagcagtgcttcatctaggagggccgcagctgccgccggctgaggtgaggcgggctggggttcagcggatgagagagacaggcttccaggaagctccgccagaaaactatccacctccactttgggcaatttgtcgggcaagtatgaggtagatccaagctggtattttggagggagctgagctggggaagagataggtgaggattccagagggtagctcatacccatgggcagcgtgttgtgcaccagggagtgtggcacgcccgtgctgggcatggtagggatgtgggcaccata

SEQ ID NO: 7515 - DNA, 563 bp, Homo sapiens
  MAP TO AC019223.2; EXPRESSED IN PLACENTA, SIGNAL = 3.2; EXPRESSED IN ADULT LIVER, SIGNAL = 3.6; EXPRESSED IN HELA, SIGNAL = 2.8; EXPRESSED IN BRAIN, SIGNAL = 3.7; EXPRESSED IN BONE MARROW, SIGNAL = 3.1; EXPRESSED IN LUNG, SIGNAL = 4.6; EXPRESSED IN HEART, SIGNAL = 3.5; EXPRESSED IN FETAL LIVER, SIGNAL = 4.6
aatcccacctgctcacacaccaagcatattgtactacaaccagtagctgagtaagccactatacaaagactctctataaccaaggaattcctacagagtcttcatatttgaaagcacccagagccaaattaagttctaataaactataatgataaggtcacatcctcaatgagaaaaaaatttaagaaaacatactaaaattaaaaataaatttaaaaataattaggagaaatagtctacccaagtgagaaggaactagaaaaataattctggcaatatgacaaaacagtgttctataacccatccagaagatcacattacctctccagcaatgaatccaaaccaatatgaaatctttgagatgccagataaagaattcaaaatgttgattatgaagccactcaaggagttacaagagaaaggtgaaacccaacataaagaaatttaaaaaacaattcaggataataatgaaaaattttctaaagagatagatatcttaaagaaaaacgaatcagaacttctggaaatgaaagacacatttagggaattacaaagtgcaatgg

SEQ ID NO: 7516 - DNA, 507 bp, Homo sapiens
  MAP TO AC015599.3; EXPRESSED IN PLACENTA, SIGNAL = 4.3; EXPRESSED IN FETAL LIVER, SIGNAL =   4; EXPRESSED IN HELA, SIGNAL = 7.4; EXPRESSED IN HEART, SIGNAL = 4.1; EXPRESSED IN BONE MARROW, SIGNAL =   6; EXPRESSED IN LUNG, SIGNAL = 4.3; EXPRESSED IN ADULT LIVER, SIGNAL = 5.5; EXPRESSED IN BRAIN, SIGNAL = 3.6
atgatggaacctcaggcaagtcctgaaacttctcttagcatggatcttttcatcagggaaatgaggctcatgcccatgtcataaggttgttgtgagaattaaatggtatcatataaactgatacctaaaatgccatgcaaagtgtttcttattgattttatcaacaattctatcacaattcttactgtgcatctggaagctaacgtaccactgcatctattaagacctcaaacactacctttactcctccactgtccaattcatcaatcttttcaccactgttgcccagaagagctaaaccagcaactgcaatgtctgaatgtgaagtgcaccaacagagagaaaatgtcctctcatctttgaagcttagatcagctcctctttcaaggtttcttcccttcaagtataaaactgtgatgaagtagccccatagaggcagatgggagagagggagaaggagaggaggaggaagagggagagagagaagggagagagggagagagggaa

SEQ ID NO: 7517 - DNA, 550 bp, Homo sapiens
  MAP TO AC013635.3; EXPRESSED IN PLACENTA, SIGNAL = 8.4; EXPRESSED IN ADULT LIVER, SIGNAL = 6.7; EXPRESSED IN HEART, SIGNAL = 5.7; EXPRESSED IN BRAIN, SIGNAL =   7; EXPRESSED IN BONE MARROW, SIGNAL = 7.6; EXPRESSED IN LUNG, SIGNAL = 7.9; EXPRESSED IN HELA, SIGNAL =   6; EXPRESSED IN FETAL LIVER, SIGNAL = 6.8
aggttctgtgttcagcagggctccaccttggcctctctgcagcccacctgtacccaccttctagaggctaagttctagttctctcagagagcagctgtgcaggcagcaccatgacttgtcacagaagcatgcccctgacactggccatagcccagggctgtcctaatccagatgtgtcaccaatgtcctgctgagctactggcctcagaacagctgaagatgctaatacagccagctctgactctgggccctcatcctggagcacttgagtctctttagatccaactcctgcttattgggagctgcctggggcaggccatgcactgcctgatgtttagacactcacctgtggtgtttatgagggtggtggtcatttccatcattcagatgggcagaccgaaacccaggtggggaaggggttgtctgagaccacagagctcataagtgacagcactgtgatttggagagtctcaggcccacaggttctgcattcgagtcccacactgcctctgaaaggtgagaacccgaggccttcaacccttggcaatta

SEQ ID NO: 7518 - DNA, 569 bp, Homo sapiens
  MAP TO AL162260.1; EXPRESSED IN ADULT LIVER, SIGNAL = 2.6; EXPRESSED IN HELA, SIGNAL = 2.8; EXPRESSED IN LUNG, SIGNAL = 2.7; EXPRESSED IN PLACENTA, SIGNAL = 2.1; EXPRESSED IN FETAL LIVER, SIGNAL = 2.6; EXPRESSED IN BONE MARROW, SIGNAL = 2.5; EXPRESSED IN HEART, SIGNAL = 2.1; EXPRESSED IN BRAIN, SIGNAL = 2.3
gtggcccaagacaattcttcttcttccaatgtggcccagggaagccgaaagatcggacacccctatgttagaacaccaaggtctattactttgaagttgttatcctggattaccaatcagaatttgtgttttcaccattactaagcctactctttaattctctcaatcatctctgctctaagagataaggaatggcaggaattattaagagtgagaggttctgaaaatctggttggtttattttagagttctatgaagtattcatttcctccttgtaccacccccctttgtttacaagtgagtatccctctgttgctctcctttggcacaaatattcagatgaaaaacatccacataaatgagcggtgtcttaatctgaagaaatgtgctctgcatcccatcaataggagctctaattcccctatggttcaggacactccagtgactcaaatgacctttctgccaaaggatctgcatcacttcctttgttcctgttctacataatatggaattacaataatgtgaataatttttcttttataaaaaaaccccacgaaacacaggaaatc

SEQ ID NO: 7519 - DNA, 547 bp, Homo sapiens
  MAP TO AL121585.13; EXPRESSED IN LUNG, SIGNAL = 2.8; EXPRESSED IN PLACENTA, SIGNAL = 2.6; EXPRESSED IN ADULT LIVER, SIGNAL = 3.7; EXPRESSED IN HEART, SIGNAL = 2.6; EXPRESSED IN BRAIN, SIGNAL = 2.5; EXPRESSED IN BONE MARROW, SIGNAL =   3; EXPRESSED IN FETAL LIVER, SIGNAL = 3.5; EXPRESSED IN HELA, SIGNAL = 4.1
aaccacaacgtttttagggctaaaagaagcatgacatatgcaacttaatctccaatggtacagaaaaaccaggtgtgtaacgtttgtaagcacgcaaagccatgaggatgactgtgcatgtgcaagtgataaggcagaggggtgaagtgctgacactgggtgaaggatacatgggtgttttttgcactatttgtagaacttttctaagtttgaaattattttcaaattacagtacagaaagaagaatgtcctgctcaaccttcttttgcagattcggaaagttgttcaaatttctggcagcactcctgctggtgtgcctcagccaacttgacgtctttgctctttaaccgggccttatccagagctttgtttgagttctcatagtcaatgagggctttggtgcgtctgtataagagatcctgggaaaaaaattaacaggtatacatactaagtatctaaaccagtctaaaaaatagcccaagtgccaatgtaccacctgagatgttagtggcaataatctacctctacaccttccctctcccagagt

SEQ ID NO: 7520 - DNA, 509 bp, Homo sapiens
  MAP TO AL162263.1; EXPRESSED IN HEART, SIGNAL = 2.1; EXPRESSED IN BRAIN, SIGNAL = 1.5; EXPRESSED IN LUNG, SIGNAL = 1.7; EXPRESSED IN PLACENTA, SIGNAL = 1.6; EXPRESSED IN ADULT LIVER, SIGNAL = 1.4; EXPRESSED IN FETAL LIVER, SIGNAL = 1.6; EXPRESSED IN BONE MARROW, SIGNAL = 1.6
ttttctcatggtgacctccccttttctttcaggatgaagagatattcaacctgtacagcccagattaattacaattttagcataatttgcacattttttccactctagtttctcaatggaagttgtattcaccattccttcctgtcttctttcttgagtcagtgccagcaagcactgttcatagaaatcagatactcctaccagtgctccctggtccaggtcagtacgaatgatctaccatgaaccacagagtccagggcaggctggaaagcaccacctcacaaagaaaacacctaacggggccacccaaaggcccctctatggcagcagtccccaacctttttggcaccagggactggtttcatggaagacagtttttccacagaccgaggaggagaggatggttttgggatggaactgttccacctcaggtcatcaggcattcgtgagattctcataaggagcaggcaacctagatccttcatatgcgcagttcacaacagggttca

SEQ ID NO: 7521 - DNA, 589 bp, Homo sapiens
  MAP TO AL121946.11; EXPRESSED IN HELA, SIGNAL =   4; EXPRESSED IN HEART, SIGNAL = 1.5; EXPRESSED IN BONE MARROW, SIGNAL = 1.7; EXPRESSED IN LUNG, SIGNAL = 1.9; EXPRESSED IN PLACENTA, SIGNAL = 1.3; EXPRESSED IN ADULT LIVER, SIGNAL = 2.2; EXPRESSED IN BRAIN, SIGNAL = 2.9; EXPRESSED IN FETAL LIVER, SIGNAL = 2.7
actatgctgatcattgccccaaacatttgtgtaagacagaagttctagagacaagacaaactaacttacaaagtctaaatcttcaaaacatttcatgctttttaattttcttgtcaaaatgtctaccattatttaagcagaagaaatatatcattgaaagaccccaatacaaatgtccagaccccaatacagttaagatctcatcttcttccatgtcaacttagccaagctgacactcagtacctcaaaggtgacttaagatagaggtctgtatcctgcacagtttccacagtgacaatctcttccatcggtttggcacctttaacacctgttccactgatgatgacaacttcatccccagggttccagtccacagcatcttctaaagccagcactgtgtctagggcatgggcagttgctctaagacaggtgacaattacttctggtagtgaacctaaagcagcccgaggaaaagttgtccagataatttaatcattaatcaaaacgtgattaatttaatcattaataaatgtgatgttatttagccaaagaatcccataaaataagacctggaaaagcaagcttcagg

SEQ ID NO: 7522 - DNA, 580 bp, Homo sapiens
  MAP TO AC008431.2; EXPRESSED IN HEART, SIGNAL =   2; EXPRESSED IN BONE MARROW, SIGNAL =   2; EXPRESSED IN LUNG, SIGNAL =   2; EXPRESSED IN PLACENTA, SIGNAL = 2.4; EXPRESSED IN ADULT LIVER, SIGNAL = 1.6; EXPRESSED IN FETAL LIVER, SIGNAL = 2.1; EXPRESSED IN BRAIN, SIGNAL = 2.1
gagcaatcagatggaggagccctaaatctggagctgtttagggtagacagcagccgccgcaagggcacgcaggcaggcaaggagccgccggggctggctgcagtcgcgcgagggccgcttggaaggtgacgatggatttcaagagcgccacccggaggagccccaggacctgcggagggagggaggccggcctaagcaggcctgggcgccgacctcgtttcccgcgtgcccttccccacctccttgggttgcccctgctgcccttacttttgtgagagcctcagcgcctgccgcggccttctctccttgagtcgctcttgttctctaaggcttgctggcccccagggccattgttcttccagacggcggctggaataggctgcagcttcggcatccctggggtggtaagagtcaggctgctgttgagtgggtgcctcctctgtccaggcccagcgctgggagcacccaagctttacaaaggcagcagagcaggcttccctgcgccggctctgggccagactccctgcctggactctggccacttctgccacttactggttgtgagaccatggacaggtca

SEQ ID NO: 7523 - DNA, 597 bp, Homo sapiens
  MAP TO AC022470.3; EXPRESSED IN HELA, SIGNAL = 3.8; EXPRESSED IN HEART, SIGNAL = 2.9; EXPRESSED IN LUNG, SIGNAL = 3.1; EXPRESSED IN PLACENTA, SIGNAL = 2.5; EXPRESSED IN ADULT LIVER, SIGNAL = 2.9; EXPRESSED IN BRAIN, SIGNAL = 2.4; EXPRESSED IN FETAL LIVER, SIGNAL = 2.9; EXPRESSED IN BONE MARROW, SIGNAL = 3.3
atgcttgccccactgtactcccacctgggtgacagagcgagaccctgccttaaaaaaaataataaaaaaataaaaaatgaaggtttgtgggtcaactgtacacaggtaactgaagctgagaagacagaacagagggtcaggatcttagaaaattctcacagtgagatcagagctgggctgaaaaaactcagaaaaatatcttatcagcgagacagaaaactcaaccatatgggatggcagaagtgggataaaaggaagagagagagccaatgggtaagagatgctctgtgctcgggccaggagcgatctggggtggcaggcttaccacatcagcccttccccactgtgggcagacctgctccggcctcatgatcacagcctccttctgcgagctccttcccaccgccactcaccttgatgggtgtgaggtgctggaagtgacggtgagggtgcgggatcaggcccagggggcagtcccactgggaagcagagtaaactcggatctcgctcttctggtccgtggtcaggagccgggctccatcgggactgaaacaagctggcaaagtgaaaagcccctgagctgaaggaaccacaagc

SEQ ID NO: 7524 - DNA, 528 bp, Homo sapiens
  MAP TO AC007325.51; EXPRESSED IN PLACENTA, SIGNAL = 2.8; EXPRESSED IN HELA, SIGNAL = 2.9; EXPRESSED IN ADULT LIVER, SIGNAL = 3.1; EXPRESSED IN FETAL LIVER, SIGNAL = 3.1; EXPRESSED IN BRAIN, SIGNAL =   3; EXPRESSED IN BONE MARROW, SIGNAL = 2.7; EXPRESSED IN LUNG, SIGNAL = 2.9; EXPRESSED IN HEART, SIGNAL = 2.9
tggagcctgtcttcccatacctgggacatgacctccaaggaccagctgtcagtcatggtgatgggctggctggggttggcagggagcttgctctccttctcggagggccggagcagcgtggggccaaacaccgtgccaaggttgtgcagggacatcttattgactgcctccttctctgccatcctgtagaggaccgaagcagagggtgctgtttcaacgccaccaccaggagagaggcagaggggctgtgccgtgctagagtcctcagggagggagtgacctcgaccctggctgtgctgcaagctgactccagccttggtacttctgggtctcagtggcccaggacaaggggccagctctgggctgatggggaggtcttcatgatgtgcttgggagggaagggggggcggtccaaatgcactgctggccacggccaaagctctgagctctttgttaaggccacagtgcagagggaggagggtggcaaagaggagaggcaggggcgggggtggcagtggtgctagtcct

SEQ ID NO: 7525 - DNA, 558 bp, Homo sapiens
  MAP TO AF241726.1; EXPRESSED IN LUNG, SIGNAL = 6.2; EXPRESSED IN ADULT LIVER, SIGNAL = 9.6; EXPRESSED IN HELA, SIGNAL = 3.7; EXPRESSED IN HEART, SIGNAL = 2.9; EXPRESSED IN FETAL LIVER, SIGNAL =  15; EXPRESSED IN BRAIN, SIGNAL = 3.7; EXPRESSED IN BONE MARROW, SIGNAL = 4.7; EXPRESSED IN PLACENTA, SIGNAL = 2.6
ctgcgtgctactctgcaaacatttttttccctctcagcctagcattttttaaaaaaaaatttgcaaaaagaaccttttattgtttccatttggtccacggcttggtgagtacttctggatgttgagaagctcaggccgaaatcccgaagccagaagaatgcagaggggcacctcaaaggttgctgggctctggaagctcccagtcgtccttgagccttctgaagagatactccaccagcccggcctggcggctggccagcctgcagaggttggtcaagtagttgcccatcttcttgatgagtttcacctctcggtctaggaagtgcttttccagaaaatcacagaaattgggatctgtgttggcagaacctagggcatgcagatccaaaaaggcctggttcaggctcttctccagggccagggcggcttccatggcggccaggctgccactccactcatctcagagcagcttctgctcatcttggaagaggccgcagctgctgggctggttctgcatcaaaagatgcttggcaccctcgcatttctcttcagccagct

SEQ ID NO: 7526 - DNA, 571 bp, Homo sapiens
  MAP TO AC024248.3; EXPRESSED IN PLACENTA, SIGNAL = 4.7; EXPRESSED IN HEART, SIGNAL = 4.5; EXPRESSED IN FETAL LIVER, SIGNAL = 3.9; EXPRESSED IN BONE MARROW, SIGNAL = 4.5; EXPRESSED IN LUNG, SIGNAL = 3.9; EXPRESSED IN ADULT LIVER, SIGNAL = 4.7; EXPRESSED IN BRAIN, SIGNAL = 5.3
tcacctgttgaatgctttgctgtttagaaatgttttccgccagatactctaaatcatctctgtaaagttcaaagtttgcaaatctctatggcaggggcaaaatgccaccagtctctttgctaaaacataacaaatgtcacctttgccccagttcccaagaagttcttcatctccatctgagaccacctctgcccagaccttattgttcacatcactgtcagcatttttgtcaaagccattccataagtctctaggaagttccaaactttcccacattttcctgttgtcttctgagccctccaaaacctcttcctgttacccagttccaaagtcacttccaatttttcacatatcttttcagcaaagcactacttctggtgccaatttactgtattagtatgtttgcacactgctgaaaaagacatacctgagactgggcaatttacaaaagaagaggtttattatacttacagttccatatggctgggaaggcctcaaaatcatggcagaaggtaaaaggcacatcttacatggaggcagacaacagaagagagcttgtgctgggaaactc

SEQ ID NO: 7527 - DNA, 562 bp, Homo sapiens
  MAP TO AL139250.2; EXPRESSED IN HELA, SIGNAL = 2.6; EXPRESSED IN HEART, SIGNAL = 1.7; EXPRESSED IN LUNG, SIGNAL = 2.3; EXPRESSED IN PLACENTA, SIGNAL = 2.2; EXPRESSED IN ADULT LIVER, SIGNAL = 2.4; EXPRESSED IN BRAIN, SIGNAL = 2.1; EXPRESSED IN FETAL LIVER, SIGNAL = 2.8; EXPRESSED IN BONE MARROW, SIGNAL = 2.3
ctccaaagcaaaactcaggccaaccacttccatttacaatgtgccaaagtgcgccagatgttgcaggaatgctaggaatttccaattcaccagggaagccacagactgcagcttcttcccactggcttttcccttcctgctttctggggacagcggaggggccaccaggcatccctgagagcctggagcttccgcccagttctccatgctccctgtagccccaggaccggaagttcccagaaacatcttaccagtgacagggatggagtccaagtggatcagtggggggtctgtgtccctctcaggagcaaggctggggacgcccagggctgcgctggtgtcctcttcatcatcactgtcatcaaactcaaacgcctctcctgggtcgtcctctgcctcagaggaggggcctgggactcctggaaccagctgatctcctggaagagagaaggagttggccaggctgcaggatctccgaggtttggtcaatggagagatggctggggtaggtgggcatggctggaactgggtgagcacctcaggtctgagccagggaatgaga

SEQ ID NO: 7528 - DNA, 506 bp, Homo sapiens
  MAP TO AC022206.2; EXPRESSED IN HEART, SIGNAL = 5.9; EXPRESSED IN BRAIN, SIGNAL = 5.5; EXPRESSED IN BONE MARROW, SIGNAL = 8.7; EXPRESSED IN PLACENTA, SIGNAL = 2.2; EXPRESSED IN ADULT LIVER, SIGNAL = 4.9; EXPRESSED IN HELA, SIGNAL = 4.4; EXPRESSED IN FETAL LIVER, SIGNAL =  11; EXPRESSED IN LUNG, SIGNAL = 3.6
taggatctccggtccttgcctccaagatgactaagaaaaggaagaacaacagtcatgccaaaaagggctgcagccacatgcagcctatttgctgcacgaactgtgcccagcgcgtgcccaaagacaaggccattaagaaatttgtattcaaaacatagtagaggccacagcagtcagggatgtttctgaagcaagcgtcttcgatgcctttgtgcttcccaagctgtatgtgaagccacgttactgtgtgagctgcacagttcacagtaaagtagtcaggaattgatcttgtgaaccccacagggaccaaaaacccccacctcgatttagacctgcgggtgctgccccatgacccccaccaaagcccatgtaaggagctgagtccttcaagactgaagacacacgatactctggagaaaaataaaatggaaattgtacttaatattgcatgttaagtgtatctgtgccagacagggtggggattttgtgtgggttagaccaaggga

SEQ ID NO: 7529 - DNA, 583 bp, Homo sapiens; identical to SEQ ID NO: 6654
  MAP TO AP001442.1; EXPRESSED IN ADULT LIVER, SIGNAL = 4.9; EXPRESSED IN HELA, SIGNAL = 4.7; EXPRESSED IN LUNG, SIGNAL = 5.4; EXPRESSED IN PLACENTA, SIGNAL = 3.9; EXPRESSED IN HEART, SIGNAL = 4.5; EXPRESSED IN FETAL LIVER, SIGNAL = 4.3; EXPRESSED IN BRAIN, SIGNAL = 8.3; EXPRESSED IN BONE MARROW, SIGNAL = 4.1

SEQ ID NO: 7530 - DNA, 524 bp, Homo sapiens
  MAP TO AC024196.2; EXPRESSED IN BRAIN, SIGNAL = 2.6; EXPRESSED IN LUNG, SIGNAL = 2.9; EXPRESSED IN ADULT LIVER, SIGNAL = 2.7; EXPRESSED IN HELA, SIGNAL = 3.1; EXPRESSED IN PLACENTA, SIGNAL = 2.5; EXPRESSED IN HEART, SIGNAL = 2.6; EXPRESSED IN FETAL LIVER, SIGNAL = 2.4; EXPRESSED IN BONE MARROW, SIGNAL = 2.6
ctggagtgaaggagagctggttactggtccagggagggtcaacccagctaaatgtcatggctgcattcatgagaggtagggactgtctcacatgcccaaaaggacttggtgccattctcaacatcctttcttgggaatggtgcccaactaccattaaacaaaaaaccaataaccttactgtacactttccagctgggggtgcaacccagctcatggcagggagctgtggctcttcctacattccctctacttgccttgctgtggtacagggcctccgcttcttccttgctcctctgggcgatctcctcatactgggccttgacctcggcgatgatgctatccaagtccaggttgcggctgttgtccatggagaggatgacgttggtgtcagtgacactctgatgtatctgggatatctcctacaacacacaggaaggtctggtcatgacatcctgccatagctacaggcagacaggaggcctctgtctcccagcataagggaaacgcagaccctcagactaagc

SEQ ID NO: 7531 - DNA, 567 bp, Homo sapiens
  MAP TO AC027273.2; EXPRESSED IN HEART, SIGNAL = 7.4; EXPRESSED IN BRAIN, SIGNAL = 7.9; EXPRESSED IN BONE MARROW, SIGNAL = 8.2; EXPRESSED IN FETAL LIVER, SIGNAL = 7.7; EXPRESSED IN HELA, SIGNAL =  11; EXPRESSED IN ADULT LIVER, SIGNAL =  11; EXPRESSED IN PLACENTA, SIGNAL =   9; EXPRESSED IN LUNG, SIGNAL =  10
ttccttccttccttccttccttctttccttcctcttttcttctttttttctggtttacatttcagatatttcagggaacactggcagtgaacatgtgatttagttaacatgtaagtaagaacatttattcactggccataattatttgttcagagatagtatgcatgtattacctgattcatgtgatgaatttcaatcgtaggattttatttaattgtctaggaaggaaatgtatgatttttaactctcaggaaaataaaatctaagtcagagaacaggcatcaggttgagaacctccctgagagtaatgtcaacataaaggaaagcaaaaactaaaatgagtcagagcaagagacagacagagaaagagaaattcttaatctcctaatgccatggtattaggcatcactatactttacataagacaataatcaatactttagataagacatatactttacatagacatacactttacatagacatatactttacaagacaatactttacatgagacataatcttcatctaagccagttttagctggggttgttactgcgcacagtg

SEQ ID NO: 7532 - DNA, 571 bp, Homo sapiens
  MAP TO AC025011.2; EXPRESSED IN BRAIN, SIGNAL =  10; EXPRESSED IN BONE MARROW, SIGNAL = 7.8; EXPRESSED IN LUNG, SIGNAL =   7; EXPRESSED IN PLACENTA, SIGNAL = 7.4; EXPRESSED IN ADULT LIVER, SIGNAL = 9.3; EXPRESSED IN HELA, SIGNAL = 9.4; EXPRESSED IN FETAL LIVER, SIGNAL = 7.2; EXPRESSED IN HEART, SIGNAL = 6.1
tttgaaactactggggcaggcgggctttattctgggtgctggagagctgtgggccccactcctcccgtagaatgccaccagggtgaggggctgggcctcggcaggggtgagtgctcagagcaggaaggggatgatgggcatgcgcaggggcgggtagtcccagaactcctttagggagctgtggtgcttgcccttggcctagatcgtcatctgggtaaagcccaccagggagaacagggccactgggagacactgtgtcatgatggcaaaactgatccaggaccccatctggtaggtgtagttggggcaggacaccagcaggaaaagccacgtgaaagggttcttggtgaggtatgggatcttctgggtgttggactcagcgggccgccggtcccacagggccatgtggatggagaagtcgccaagcacaggcagatcacaaagatggcgagtgccagtttcacctgctgagctctgtaagtagggggtgtgtagagagggtggttgatgtaataggccatccacccagtgaagccccaggagtaggtgcagttcttgaagatgttgcgca

SEQ ID NO: 7533 - DNA, 558 bp, Homo sapiens
  MAP TO AC013626.3; EXPRESSED IN PLACENTA, SIGNAL = 7.3; EXPRESSED IN FETAL LIVER, SIGNAL = 7.2; EXPRESSED IN HEART, SIGNAL = 4.4; EXPRESSED IN BRAIN, SIGNAL = 5.2; EXPRESSED IN BONE MARROW, SIGNAL = 4.4; EXPRESSED IN HELA, SIGNAL =   4; EXPRESSED IN ADULT LIVER, SIGNAL = 5.1; EXPRESSED IN LUNG, SIGNAL = 5.1
accctcaaagccacactcaccagagtatctgcatccatgaatacacattttgaatactgtgtaagcgaccagcagtggagctttgtcagcgtgacacccaactctggcctcttcattaaggttagatgagcagaatcgccactgtccaagacatctaccatgatgacttcatcaaagactgtctctaaaacttttctgtcaaaataaaatccagaataccacacttagcatcttttcagaacaagtgacccatctgctgtaagactgatgctttattaccttctccatcaattactagaacaatgtattgctttggtagaatatgtacccttaaatctgttctaattttactccaggacaaactgtgtttatttgcatgtccagttaacgtcactaaagtagtaagaactgcttatggtgaggatgaaatgctcatcttaaaacgttattatagaagacattttctgggtttttgtattttattgtatcactgaatagcaggcaggttgtggaaatagcttgcaaaaatgtgtaagggctctgttcatcaggttgcca

SEQ ID NO: 7534 - DNA, 546 bp, Homo sapiens
  MAP TO AC019233.3; EXPRESSED IN BONE MARROW, SIGNAL = 1.2; EXPRESSED IN LUNG, SIGNAL = 1.3; EXPRESSED IN HEART, SIGNAL = 1.2; EXPRESSED IN PLACENTA, SIGNAL = 1.3; EXPRESSED IN ADULT LIVER, SIGNAL = 1.6; EXPRESSED IN HELA, SIGNAL = 2.2; EXPRESSED IN FETAL LIVER, SIGNAL = 1.3; EXPRESSED IN BRAIN, SIGNAL = 1.2
atccagcacaccaatgtcagaatttaaggagaaacttgaaggactgactgaattggagataacattagagagctgagaaaattccagatggagacaatagctggaataaagcctctgagtaaagattaagtacagaatataatggagattgtgtgaagtcaatctgattagagtacagtacacatgttaagaaatggtaaatttgaaaaagtagcttcagacaagattttagcaatttcaagcaaagtagactaaagggtcatttggtagcaactgaggattcattaaagatttctaaggagaagctgaactcatgaaattaattctttaaggggagtgattgatctgttgtatgttgtctgtatcagaagtaggaaaaaaacagagccctggagacctgttgcaagatgaggagcaccaggtcatagtggtggcattgaggatgaaaatgtcactgctttttattcccatagtttggtgagtgaaagggagtggtgtccagcagcttttctactcctgtagttcagcaagtgggaaagggtgtta

SEQ ID NO: 7535 - DNA, 592 bp, Homo sapiens
  MAP TO AC022045.2; EXPRESSED IN HEART, SIGNAL = 8.5; EXPRESSED IN BONE MARROW, SIGNAL = 6.9; EXPRESSED IN BRAIN, SIGNAL = 8.6; EXPRESSED IN FETAL LIVER, SIGNAL =   8; EXPRESSED IN HELA, SIGNAL =  11; EXPRESSED IN ADULT LIVER, SIGNAL =  11; EXPRESSED IN PLACENTA, SIGNAL = 9.2; EXPRESSED IN LUNG, SIGNAL = 8.4
ccaagttgttggtagggacgtatatacttcaggaggttgtgaggtttcggtaagttatgcattagtcattagaacagtgcccagcatacagtaagtgcttagtaggcattaaccgttatttatcattatttcctttcttatttctgacagtcagaagatggtgattgtgccccctccctccacacacatgatattctcttcccctctttttcaagagttgcacatgggccgttcccacccaggtggagggacatactccagggtgtccatgggaatcttcacagcttggacccaaagctgagcccatcctctgggtgcggcctgattcatccaagaggagcagtgacagtgggagtgaagattgactggattggtgtgttggtgttttgggtaacattggtggtgatgatggcagtggcgatggagatgaggctggtgatactgatcttggtgaagacagtggtagtgatgatgatgttagagacagtgataatgatattgatgattctgatcatcatcatggtggtagtgattctgaaggttcaggtgacagtgataatgatgattgtgctggtggtggtgatcatgacag

SEQ ID NO: 7536 - DNA, 567 bp, Homo sapiens
  MAP TO AC021855.3; EXPRESSED IN PLACENTA, SIGNAL = 4.9; EXPRESSED IN FETAL LIVER, SIGNAL =   5; EXPRESSED IN HEART, SIGNAL = 5.3; EXPRESSED IN BONE MARROW, SIGNAL = 5.4; EXPRESSED IN BRAIN, SIGNAL = 5.4; EXPRESSED IN HELA, SIGNAL = 8.4; EXPRESSED IN ADULT LIVER, SIGNAL = 6.2; EXPRESSED IN LUNG, SIGNAL = 5.3
tgaaaactgggcgaaaaatcatgacttcttattgcggaaacctcagcctcttggtcccatactcttgtttctttcagcttgtaaatgttgataaatgcctttgttgtctgtccatttatgttgctcataaagacaccatgttccaaccattttcataactccctgtgggtaaagccctcttggctgactctctgatgttattggttcttatcataattgtggcctcctggcttctggcagttaagtcttaccccttgtcttctgttactgcagggccctgtcatccccatggctattaatgagcccatgtctgtgactacctctcctactatcattcctgttctttacaggacacccaccactgaacttcctagtggtgctgttgcccctctcaggagtgaattcctgatgaccctggtaaacagttggttctctgtgccctcctgtgaagcactatccttggttgggttttctggcctcccataatatagtcattctggcctgcccacttccctgagactttgtatttcttcctctaatggatgcagggcaccttctactcccttc

SEQ ID NO: 7537 - DNA, 520 bp, Homo sapiens
  MAP TO AF241729.1; EXPRESSED IN LUNG, SIGNAL = 2.4; EXPRESSED IN PLACENTA, SIGNAL = 2.8; EXPRESSED IN FETAL LIVER, SIGNAL = 3.1; EXPRESSED IN BONE MARROW, SIGNAL = 2.6; EXPRESSED IN ADULT LIVER, SIGNAL = 2.4; EXPRESSED IN HELA, SIGNAL = 2.3; EXPRESSED IN HEART, SIGNAL = 2.4; EXPRESSED IN BRAIN, SIGNAL = 2.7
cagttctgacagtttggcccttaaactctttgatccttgctttcttctcagggtggttgtgaagttaaaatgagttaacatgtcttttgagttaacaagtctaatttccaagcacttgtgctcaataaatatgacctagaaaaattaccattcacaataatataagtggctgtgccactccattttgtcctagaaaagatggtacttggaatgagaggggccacactcaaaagcaaaccagagctacttctaaagttagtgactaggatggatgagcgactcaaaagagaacatgaagaatggctacaggaactggggataactgacttgaagaacagtagacttaaggagaccatatctaccttcaaacatctgatggtgtgcttcatggccttctgtagagctccaaaagatagaagaacactggagaacggaaaatagaagaatgtaggcaagggcgaccacttggtggggatgttgtgagcgatttcagcacaagtggatggttggactacatggc

SEQ ID NO: 7538 - DNA, 529 bp, Homo sapiens
  MAP TO AC016706.2; EXPRESSED IN PLACENTA, SIGNAL = 2.1; EXPRESSED IN ADULT LIVER, SIGNAL = 2.9; EXPRESSED IN HELA, SIGNAL = 3.1; EXPRESSED IN FETAL LIVER, SIGNAL = 1.8; EXPRESSED IN BRAIN, SIGNAL =   2; EXPRESSED IN LUNG, SIGNAL = 2.2; EXPRESSED IN HEART, SIGNAL = 1.9; EXPRESSED IN BONE MARROW, SIGNAL = 1.9
ttacctggacttaatgcagccaagttttttgctagtgcataacagatgtgacctttactctggttcccagcaagttccttatttccatcggaaacctcatcatcctggccttcactgtccacatctcttatcagctatcttggttacaaccatgtaaccaatctctacaaagttccaaactttccctcatcttcttctcttcttctgagcccaccaaattcttcaaacttctgcccactacccagttccaaagccacttctacatcttcaggtatctttgttgcagcactctactcctcagtatcaattttatgtgttagtcttttcttgcactgctataaagaaatacctgaagctcagtaatttctaaaaaaaaaagtttaaatagcttatggttctgcaggctgtacaagcatgacaccaacatttgcttggcttctagtgagggcctaaggaagcttacaatcatggtgaaaggcaaaggggaaagctacagtatcacatggtgaggtgagagagggagcaagaa

SEQ ID NO: 7539 - DNA, 593 bp, Homo sapiens
  MAP TO AC018583.3; EXPRESSED IN ADULT LIVER, SIGNAL = 7.1; EXPRESSED IN HELA, SIGNAL = 8.5; EXPRESSED IN BRAIN, SIGNAL = 5.7; EXPRESSED IN LUNG, SIGNAL = 5.9; EXPRESSED IN HEART, SIGNAL = 5.2; EXPRESSED IN PLACENTA, SIGNAL = 4.9; EXPRESSED IN FETAL LIVER, SIGNAL = 5.2; EXPRESSED IN BONE MARROW, SIGNAL = 5.8
ccaagagctctgatggcaacgcactaggatattaatgttttcatggctgctaacactacatccattctacagctcatgaatcaaggagtcatttagactttctagtcttattacttaagaaatatatttcttaagactatagctgccatagatagtgatttctctcaagaatctgggcaaagtaagttgaaaaccttctggggaagattcaccattctagatgacagtaagaaaatttgtgattcattggaagaggtcaagataactacactaacaagagtttggaataagttgattccagccctcatagatgactttgagtggttcaagacttcagtagagggagtagctgcagatgtagtggaaatagtaagagtactagaattagaaatgaagcctgaagatgtgactgaattgctgcaatctcatgttaaaatttgagcagatgagaaattgtttcttatgaataagcaaagaaagtagtttcttgagatgaaatctactcctggtaaagatgctatgagcattgttgaaatgacaaccaagaatttagaatatcacaaaaatttagttgataaagcagcagcagggtt

SEQ ID NO: 7540 - DNA, 571 bp, Homo sapiens
  MAP TO AC022038.2; EXPRESSED IN LUNG, SIGNAL =   2; EXPRESSED IN HELA, SIGNAL = 2.5; EXPRESSED IN PLACENTA, SIGNAL = 2.1; EXPRESSED IN ADULT LIVER, SIGNAL = 1.9; EXPRESSED IN HEART, SIGNAL = 1.8; EXPRESSED IN FETAL LIVER, SIGNAL = 1.9; EXPRESSED IN BRAIN, SIGNAL = 1.8; EXPRESSED IN BONE MARROW, SIGNAL = 1.7
aaagggctaaaatgacccaagtataaagaaattactttctgaaggtcatttcattacattaatttgggtactagcttcaagttattttttaaagtttattttatctataaaatacatgctttcattaaatgcatcattacttttatgatccttgtaatcaatctcctttttccccttctaaacatgagaaacaaataagacagacacaaacatttatattgatgagcttttaaaaatacatggagatggcttaagggaaaaggaattaaagatagctttatgataaaatctacattcaaggcagaacttaaatgactaaggattctgagtatatttcacagctcagaaaatattcaatccaaagtaaaatggacccagaacagggtttgtataaaataagaacagatgagtaattaaggcctactttaaggcactaaactcttttcaaaaagaaaattgtgatcatggaatttttctttctcatgaatgtagagatttttttaaagcaataaaacagagattgcaattcaaaggctatctgattgcacctgcctcacaggctggttttgtt

SEQ ID NO: 7541 - DNA, 506 bp, Homo sapiens
  MAP TO AC023032.2; EXPRESSED IN LUNG, SIGNAL = 1.9; EXPRESSED IN ADULT LIVER, SIGNAL =   2; EXPRESSED IN HELA, SIGNAL = 2.5; EXPRESSED IN HEART, SIGNAL = 1.9; EXPRESSED IN BRAIN, SIGNAL = 1.7; EXPRESSED IN PLACENTA, SIGNAL = 2.1; EXPRESSED IN FETAL LIVER, SIGNAL =   2; EXPRESSED IN BONE MARROW, SIGNAL = 1.8
attttctcctgaagctaaaaacctaataaagacagcataggactgataaaattttatttcttaagctagttaccaaaaaggcaaagaaaaaccttcttcagagtgactacttctctttatgggaagtccatataaataagttggaggtcaaacttgatgaaaaaatgcttgaatttaatcagaaacaggaagggtatgtttagggttatgaatatatcagggaaatacatgactcttaggaaaaacataagaactgttctaattatattgagaatttagacatattaagaaaagctaagagtacaaaagttatgttagaggaaaacgttgttttaattatatttttttacttttaagataaaacactttagcattaggccataataatagttagcactggaggaaaaaattacaggagttgacgaaaagctgcagagagttattatctcagactttcttcaggagagaaaaagctgaaaacagtgaggcacagcaaaaggtgaact

SEQ ID NO: 7542 - DNA, 569 bp, Homo sapiens
  MAP TO AC011929.3; EXPRESSED IN LUNG, SIGNAL = 8.4; EXPRESSED IN PLACENTA, SIGNAL = 7.8; EXPRESSED IN ADULT LIVER, SIGNAL = 7.4; EXPRESSED IN HELA, SIGNAL = 9.5; EXPRESSED IN HEART, SIGNAL = 7.8; EXPRESSED IN FETAL LIVER, SIGNAL = 8.2; EXPRESSED IN BRAIN, SIGNAL = 7.6; EXPRESSED IN BONE MARROW, SIGNAL = 8.1
tttaaccaagccacacctggtgaacaaatttgctattttaaaaataaatttagattttagttaatcaaatattgttcagttaatgtcactgttttctagatagcatttttcatgtatacattttacttaatttctttcccaggaaagtattaagccattatgtaatgataaacagtgtgatttttgttgattatatgtactttcttgaattattacctcaggcctctgaggaaacactacattccagtaatgaagaggaagaccctttccgcggaatggaaccctatcttgtccggagactttcatgtcgcaatattcagcttccccctctcgccttcagacagttggaacaagctgacttgaaaagtgaatcagagaacattcaacgaccaaccagcctccccctgaagattctgccgctgattgctatcacttctgcagaatccagtgggtgagtgccctcagatgtcatttccccattttatattttagatggtgattgttgtctgtggtcttttgagtttttgtggctcattgcttgatttgagtgggagaacaatggggtttct

SEQ ID NO: 7543 - DNA, 530 bp, Homo sapiens
  MAP TO AC022943.4; EXPRESSED IN PLACENTA, SIGNAL = 4.8; EXPRESSED IN HEART, SIGNAL = 4.7; EXPRESSED IN FETAL LIVER, SIGNAL = 4.4; EXPRESSED IN BONE MARROW, SIGNAL = 4.5; EXPRESSED IN LUNG, SIGNAL = 4.8; EXPRESSED IN ADULT LIVER, SIGNAL = 4.4; EXPRESSED IN HELA, SIGNAL = 5.6; EXPRESSED IN BRAIN, SIGNAL = 4.1
gtgctgagaggctcaggttcacagtactgacttgggtggctacagctgtgcccagggcagggcgggtggcaggactcctgcctgctctggcctccaagagcacagggaggcccaggtccacagccttcacttgggcagctacagccgcacctggtgctgctgtctgctcctgtctcccgctggctccttggaacatgcagccctggccacgtccccttgcagcctggggcaagggctccaggtcctcgctgtgcctgaattggcatccagggcaggggcaacattgctgggagctccccttggcgctggtactcaggggcggccctggcctacccctggcctggctcgcgggccctcctgggagcacccggaagcagattgcaaaccgctggccctgagcctggccatctggagtgtcaggttcagcggtcaccccaatgcagggcggcaccacgcaaagcctccttctaaggtgcaggaacccagcgccctcagcagggtgagtgaagtggctacaccactgaccaggt

SEQ ID NO: 7544 - DNA, 593 bp, Homo sapiens
  MAP TO AC011859.4; EXPRESSED IN LUNG, SIGNAL = 2.2; EXPRESSED IN ADULT LIVER, SIGNAL = 1.9; EXPRESSED IN HELA, SIGNAL = 2.2; EXPRESSED IN HEART, SIGNAL =   2; EXPRESSED IN BRAIN, SIGNAL = 1.8; EXPRESSED IN PLACENTA, SIGNAL = 1.8; EXPRESSED IN FETAL LIVER, SIGNAL = 2.1; EXPRESSED IN BONE MARROW, SIGNAL = 1.9
tcccacacatccttctctccatagacagcgagttaggtaatcacatctttgtattcaagcgagggaagttttaattaaacacattctaaaatactgtatttggtggtatagtttgggcttttggggtttagggtcagtgtgggctggaaaataccagttcacttttccagactaattttcaaagaatggaaggtattgagtcaatcaacctttctagatactgtgtctgcattgtttttacaatctgaaaagtagagtgtcatagaatgttcctcatctgcattttccatgaaggctagaagacagatttaataaatattaatgtatacaatcagccagttcctactaaataaaaactagatgctaggctctaggtgcttcacagacatgagtaagactggttcctcctagcaagaatgtacctgtctttggaacaattccaaactgtaaacaaatttgaaatatcagaacaaaatgagtactgaaatacagttaaaagcaatacatcatgaaaaaaataaagcaaataataatgcttcatagtgtcaggagggaaaataatacttcttgatgcagtggcatttaatttggca

SEQ ID NO: 7545 - DNA, 600 bp, Homo sapiens
  MAP TO AC021824.2; EXPRESSED IN LUNG, SIGNAL = 2.3; EXPRESSED IN PLACENTA, SIGNAL = 2.2; EXPRESSED IN ADULT LIVER, SIGNAL = 2.4; EXPRESSED IN HELA, SIGNAL = 2.6; EXPRESSED IN HEART, SIGNAL =   2; EXPRESSED IN FETAL LIVER, SIGNAL = 2.3; EXPRESSED IN BRAIN, SIGNAL = 2.3; EXPRESSED IN BONE MARROW, SIGNAL =   2
acagactgggacaaaatgccttaaacatttaatgtctctgtattctataggaggaagtataaaaggtgatcaaaattttcttctttagaattgtctttctccaaaatgtcctgtgacttatttgttttcttcatcactgggggggaaaaacacaaaaattgaaataaaaaaccctattttttagaagatataaagtggcaaataaataaatataccttttcttaattataatctcttctaccataattacaatctaaaactagtgtagagattcaaggatctggattaatgggttcaagatcctattttgagataggtggagtctgtttttacctatataatgtcctttctgtttccaaatgttacttaaaacagattgtcaatcatacctcattaggagtttataaaaaagaaaaggaaactgacaactgtaagtcagtaaagattctcttgctttggaaaatgcagacatgtactcatagaggaaagcacttagaaactcagaaagctcttcattttattgtggcttcccttacaaaatgttgatgaacacttctgcttcaccatagaaaaactcatacattccacacacatgggaga

SEQ ID NO: 7546 - DNA, 589 bp, Homo sapiens
  MAP TO AC018535.3; EXPRESSED IN LUNG, SIGNAL = 1.4; EXPRESSED IN ADULT LIVER, SIGNAL = 1.3; EXPRESSED IN BRAIN, SIGNAL = 1.4; EXPRESSED IN PLACENTA, SIGNAL = 1.3; EXPRESSED IN HEART, SIGNAL = 1.2; EXPRESSED IN FETAL LIVER, SIGNAL = 1.3; EXPRESSED IN BONE MARROW, SIGNAL = 1.2
tgagccgtccattgtatcagcttccaatgtgcttctttgtagtctagtgatctaaaagctaatacataagtcatttataaccaaattcccatataatcatctattactgtgtaacaaattagtaagcagaaagctgagacttgagactctttgggaagtgagccctcctcccttgtcttcatccccacatttagtgtcatcaactcctatttgactaaatcctctaaatctctcttcattctttaaatttatccacttattaggttggttcaaaagcaatcacagtttttatcattgctttaatgtaaaaagcaaactttctttttttctttttataaaaagtaaactgcaattgtttttgcagcaacctaacatttccattcctgtggctacaaccttggctctggccaccatcacgtctgaagtaatctttgcagtcaccctgactgtcctcctctccttcaagcttgccctcgtctagtctgttctccacactatggctgtagtggttttattacatcaagcatgcttcctgatgatactgctctgcttaaatattttcaatgtttgttttggccgtctttttgtc

SEQ ID NO: 7547 - DNA, 524 bp, Homo sapiens
  MAP TO AC018530.4; EXPRESSED IN LUNG, SIGNAL = 1.2; EXPRESSED IN PLACENTA, SIGNAL =   1; EXPRESSED IN ADULT LIVER, SIGNAL = 0.97; EXPRESSED IN HEART, SIGNAL = 1.2; EXPRESSED IN FETAL LIVER, SIGNAL = 1.6; EXPRESSED IN BRAIN, SIGNAL = 1.1; EXPRESSED IN BONE MARROW, SIGNAL = 1.3
ttttgagcgatgccaagtagcagcttaactatctcagtctggaatttacggtagtcagtaataacatttaaagttgtggaaccagatgagattacatagaacagagatctacaaactataaccatcagtccaaatatggccattggttgtttttattggaacatgaaaatgtttgtttttgtatattctatatggaaacttttgcactacaatggcagagttaagtaggtgcagcagaaaccacattgccctaaagtttaaaatatttactatctggtcttttatgggaaaagtttgctgatttttgacctagggagtaattgaagatgaataagaaagtcaaggatgaagttctggagttcacagacatttaaagattggaaagatgaaggtgacccagcaaaagatactgagaagaaacagcaagtgaggaaaggaaaaccaagtgagtgtgatatcccaggaaccaagtacattcttgggaagaagattatttaactatggcagatgttgctgagaggcaa

SEQ ID NO: 7548 - DNA, 591 bp, Homo sapiens
  MAP TO AC013751.3; EXPRESSED IN HEART, SIGNAL = 1.5; EXPRESSED IN LUNG, SIGNAL = 1.3; EXPRESSED IN ADULT LIVER, SIGNAL = 1.2; EXPRESSED IN BRAIN, SIGNAL = 0.94; EXPRESSED IN PLACENTA, SIGNAL = 1.1; EXPRESSED IN FETAL LIVER, SIGNAL = 1.3; EXPRESSED IN BONE MARROW, SIGNAL = 1.9
taaacttccagcttgagggggatttggcatacagttacataagagttttttcctgttgttacaaaggtaaagataaaatacttgagagagtcacaatactattttaaaacaatttatcatatagcctgcaagaagcacataatgaacatcctgaagcaacactgctaaaccaaatcggagctctcaaatggacaaaggaaagtgttcacacatcctctaaccctgcacacctaatcaactgcctggttgtagatgggcaaaggtctgtgttcagtcactttagtgtttgagtagggaggagtggtactcacattctggaactgtctgaaaggcacaaactggacaatatctctgatggccacttcgcccaatggggagcggagacttccaccatcaccatccagaaactccatggcgctgaagtcagcacctccaactccaacaattatgatggacataggcagcctggaggcattaactatagcttgtctggtttcatcaaggtctgtgatcacaccatcagtaataatcaaaagcacaaaatattgctgccagaaaaagaaaacatgtcccctgagcaagtcaagcaat

SEQ ID NO: 7549 - DNA, 579 bp, Homo sapiens
  MAP TO AL133352.10; EXPRESSED IN ADULT LIVER, SIGNAL = 2.3; EXPRESSED IN BRAIN, SIGNAL = 2.2; EXPRESSED IN BONE MARROW, SIGNAL = 2.1; EXPRESSED IN LUNG, SIGNAL = 2.3; EXPRESSED IN HELA, SIGNAL = 2.2; EXPRESSED IN PLACENTA, SIGNAL =   2; EXPRESSED IN HEART, SIGNAL = 2.1; EXPRESSED IN FETAL LIVER, SIGNAL = 2.3
gtttggagccaagcctacagcatcacatacctggcagcaaggaaaagagtcgggaaaaagaaacagaatctgttgcagaagtcccctcttctgcagggaggagttatgtaacagcagaagtggcctcctagcaagagaggctgcctggtttagaccagcagcttatgagcgatgatgaggacagccttcaggataggcatgaagctggacacctcgctgaagctgctacagcccgccacctgggcatgcactgcaaggccctgctcaaagcttcctgcatccacacatcgggcaacctcatggagcccagccacgacatgaggtgagagctgtggagggaatgacccttaggttagtgagcccaacccagctcctaccctggcagcatggaagggataagggaagacttaagttctggggcccagtccaggcaagatgcacgtattttgtggggaacccaggtcagtgacacctatgggaagaaaagacactgggcttcctttggccatggtgatggtggaagtgtaggaggcagtgggagcacagctagctgtacttactgtcccctcacagagcttc

SEQ ID NO: 7550 - DNA, 590 bp, Homo sapiens
  MAP TO AC015807.3; EXPRESSED IN LUNG, SIGNAL = 1.5; EXPRESSED IN PLACENTA, SIGNAL = 1.5; EXPRESSED IN FETAL LIVER, SIGNAL = 1.3; EXPRESSED IN HEART, SIGNAL = 2.2; EXPRESSED IN ADULT LIVER, SIGNAL = 1.6; EXPRESSED IN BRAIN, SIGNAL = 1.4; EXPRESSED IN BONE MARROW, SIGNAL = 1.3
tctttgaaggccttggagtccagccttgtgaatgtgtaagtaaatgaggtctctaaaaaggattttttaaaaacacctactttaaaatttctatcaaattaaaacaagaatagacctaatctgcaaacaaacaaattttcctcaaggcaacaggaaatcctggagagacaagaagacacttttataaagcaaccaagtgttccctccccccttaaaaaccactctctgtgggtagaaactaatgaaagagtacattttgctgtctcatctcctctgtttgatggatttggctctacacagaggccagagtctacttggattgcttttgaatttgcccttgcatcaactgaactctctagactactctctctgccacaggaaaaaaaaaatgttcttactatgaataataaactcttacatgaagtaactctaaagaaagtagattggaaaataaagaccgagctaaataaaaatgtcataataggtaagaagtcttgccagtatttttccgctgggatccttaacctattatccattaatattttgggcttacagaagacaaagtaattagcatgacaccacttgctgag

SEQ ID NO: 7551 - DNA, 575 bp, Homo sapiens
  MAP TO AC016429.4; EXPRESSED IN HELA, SIGNAL =   4; EXPRESSED IN HEART, SIGNAL = 2.9; EXPRESSED IN LUNG, SIGNAL = 3.3; EXPRESSED IN PLACENTA, SIGNAL =   3; EXPRESSED IN ADULT LIVER, SIGNAL = 3.5; EXPRESSED IN BRAIN, SIGNAL = 2.9; EXPRESSED IN FETAL LIVER, SIGNAL = 3.3; EXPRESSED IN BONE MARROW, SIGNAL = 2.8
tttaacctgttagccagccccacctctccaccactcactcgctgcccgtcactccccttcccaacctctggtaaccacccttctactgtgtccatgagttcaattgtatttatttttagatcctacaaatgaatgagaacatatgatgtttgtctttctgcgcctggcttatttcactgaacataatgatcttcagttccatccatattattgcaaatgactggatctcattctttttgtggctgaatagtactccattgtgtaactatattttttcatagcacactttgattcaaacataaggtatggttattgtagaaaacttgtataatttaactttaatgtgttaaaggattaaaatgactttatgcctaattgaaggaaaagtgcctgatctctaaggaatctgggataaggatgtaatgtaaaattattaatatttggtgtcatgaaactttattcaaataacttctgaaaaaataaaataaattggaagtcttaattcctgtgttaaatagtttataattataaaatgaaaagtagaatacagtctctgtgagcatgagggaatttcc

SEQ ID NO: 7552 - DNA, 571 bp, Homo sapiens
  MAP TO AC011938.3; EXPRESSED IN ADULT LIVER, SIGNAL =   4; EXPRESSED IN HEART, SIGNAL = 3.6; EXPRESSED IN FETAL LIVER, SIGNAL = 3.3; EXPRESSED IN BRAIN, SIGNAL = 4.1; EXPRESSED IN BONE MARROW, SIGNAL =   4; EXPRESSED IN LUNG, SIGNAL = 4.2; EXPRESSED IN PLACENTA, SIGNAL =   4; EXPRESSED IN HELA, SIGNAL =   4
aagaccctctcagcctctccacattcgctggtgaattctgggataagagaggggagtaggcttaacatcctgtgccttgctcatgcagcattagtggtggtccattttctggtggaagctgattaactcagaggaagcagaagtagggttgctgaataacaccaactcaactcagggagaaagatttactatctccatatgaatcatctcaacagtcttaaaatttttcagttcaaagttggatgaaatgtagaacgtattttggggatgtggtgcaccccaatcccaacctaggacacaattcgggtactcaccccttcgccgccattttcacctgtgttggcaagcatttcctgcagggctctgacagatagggactgttccagcacaaaattgcagacgcagagatctggaggaatgtactgtggaaataaaatcagaatgaggatacctactcatatcagtcagagatcagtcacgcaacaacatctcaagggcaaagagcctatgaatcaaaatgacagttggatggatgaataggaatgcaaaaaggtggctttctcctgttcaa

SEQ ID NO: 7553 - DNA, 590 bp, Homo sapiens
  MAP TO AC012207.5; EXPRESSED IN BONE MARROW, SIGNAL = 2.6; EXPRESSED IN ADULT LIVER, SIGNAL = 2.3; EXPRESSED IN HEART, SIGNAL = 1.8; EXPRESSED IN FETAL LIVER, SIGNAL = 2.4; EXPRESSED IN BRAIN, SIGNAL = 2.6; EXPRESSED IN LUNG, SIGNAL = 2.5; EXPRESSED IN PLACENTA, SIGNAL = 2.5
actgactcccacactgctcctgggctataatttgctataatttcccacttctccttgttgtattagaagttgagcctaatctctcctactacacaaccacactttagtagccaccggaataaagcctaccttagcatctttaacaagtgtcgtgaataattttttctttaacaaatcaagaaaggtgacacttttaatacggggaaggttgattaaaaaggcagatttattttcaggtatctgccttgaaatggtgtcattaacatgatcttgaaactgtaaaaacagagtgagaaaaaatatttaaagtatatgcaggaccaatcagatcacaattaaatatatcaggaagcaaagagagaaaaaactccacttcatgcagaaaagaaaattggctgaaaatactgtgaggggttagccaattcatcagatatgagaactaggtaattcaggaaaaggcactgcaagatgaccccatgtggagagcattaacatcaaaactcaaaagtttgaactggcaggtagtagcataacaacaaaaaattcaccttccatatttacaatataagacatcacatccaggcaaactg

SEQ ID NO: 7554 - DNA, 508 bp, Homo sapiens
  MAP TO AC015474.3; EXPRESSED IN LUNG, SIGNAL = 4.6; EXPRESSED IN ADULT LIVER, SIGNAL = 3.2; EXPRESSED IN HELA, SIGNAL = 2.8; EXPRESSED IN HEART, SIGNAL = 2.8; EXPRESSED IN BRAIN, SIGNAL = 2.9; EXPRESSED IN PLACENTA, SIGNAL = 2.9; EXPRESSED IN FETAL LIVER, SIGNAL = 3.7; EXPRESSED IN BONE MARROW, SIGNAL = 6.7
agcagaacttcagtgacgccgccatgaaggctggccagtgcgtcatcgggctgcaaatgggcaccaacaaatgtaccagccagttgggcatgaccgtgtatggcgtgaagaggcatctgtgtgaccccaagaatcacatcctgcccccccatggaccactcgatcattggcctccagatgggtacaaataactgtgccagccaggtgagcatgacagctcctgggacgcggcagcacatctgtgacaccaagctgggaaccgacaagtgtggtaattcctccatgtccctgcagatgggctacacccagggtaccaaccatagtagccaggtctttggcctgggccagcatatatgtgaccccaagtactgcctgccaggcacagtggctgacggggctcccttgggtgctggcaactgcctgggcccaggagaggtccctgaatatcccccttactaccaggaggaggctggctactgaggctcccagcacactctctccccacatt

SEQ ID NO: 7555 - DNA, 500 bp, Homo sapiens
  MAP TO AC016498.4; EXPRESSED IN HELA, SIGNAL =   8; EXPRESSED IN LUNG, SIGNAL = 5.5; EXPRESSED IN ADULT LIVER, SIGNAL = 5.7; EXPRESSED IN BRAIN, SIGNAL = 6.3; EXPRESSED IN BONE MARROW, SIGNAL = 4.9; EXPRESSED IN PLACENTA, SIGNAL = 4.8; EXPRESSED IN FETAL LIVER, SIGNAL = 5.3; EXPRESSED IN HEART, SIGNAL =   5
gcaagagaggtgagactggggtgctggctgccagccaggcggtccctcagcccctggagaagcggggtggggcctgcacaccgagtccttccagtgagtccagtgatgctctctcctcttcctcccagtcacctttctctccagtgccactactgcgctttcgatgcagaataattcagtatttggcgacttgaagtcggacgagatggagctgctctactcagcctacggagatgagacaggcgtgcagtgtgcgctgaggcaagtgtcggccccggggagcccttggctgctgtgcagcttgagctgtgccctggtgtgggacgtggagtcccacatgtgtgcgggtggggagagagccatcttgcagccgtccatatggcagcctgggtcttcccgttgctttcagtcatccacacaggtctgccacaggccagtcctgaaatctgggtaactcagtcagaaggtggtgatcagggcgtagcttgtgaaggggttgg

SEQ ID NO: 7556 - DNA, 578 bp, Homo sapiens
  MAP TO AC010769.3; EXPRESSED IN HELA, SIGNAL = 3.2; EXPRESSED IN LUNG, SIGNAL = 1.8; EXPRESSED IN PLACENTA, SIGNAL = 1.1; EXPRESSED IN ADULT LIVER, SIGNAL = 1.7; EXPRESSED IN HEART, SIGNAL = 1.5; EXPRESSED IN BRAIN, SIGNAL = 1.5; EXPRESSED IN FETAL LIVER, SIGNAL = 2.1; EXPRESSED IN BONE MARROW, SIGNAL = 1.7
tcagttgtctggctgtggaggacaggttcatgccaggaataaaggttcctaccttgtttcctagggaaaaaaaatgggcttacctgatatcgcagataaccaggaaattccacttcctctttcagatgtgtgcgtgatatgtccctattcattggttcaccttcccccttcaaaactaaaaatgaatgtgaacataccttattaagtaggatttttaaaggcacggcatcataaaacttgcaacttctgtaggaagagcctaggacatgtgttggaatcacaccagtgatttgtgttgtgtgttggtcagcttctcagccgctggtaggtaggtcagtactcacagtgtgactcttgtcccacaaggctaatggtgaccatggttctggcttctgaggccagcagagaagtaacaatgtgcatgaactgccgtggcaccagctgctcctatgtagacctttgaagcatgaaaaatacatgtctctcatcattcttagtatatttacttatttgctcattttccctgtatgtacctggtttcctgaccctgccaactatcttcttcactccagctgcct

SEQ ID NO: 7557 - DNA, 524 bp, Homo sapiens
  MAP TO AL158091.7; EXPRESSED IN ADULT LIVER, SIGNAL = 2.5; EXPRESSED IN HELA, SIGNAL = 3.6; EXPRESSED IN BRAIN, SIGNAL = 2.5; EXPRESSED IN LUNG, SIGNAL = 2.7; EXPRESSED IN BONE MARROW, SIGNAL = 2.6; EXPRESSED IN PLACENTA, SIGNAL = 2.5; EXPRESSED IN HEART, SIGNAL = 2.5; EXPRESSED IN FETAL LIVER, SIGNAL = 2.7
gctctaccgttttcagccactcaggccatggtcccatgtaacgcagccccaggaactcgcccaaacagcaagctcacctacagagactgcacggcaccacgctctgagtggtggcactgggggtcttcacccaggactcacatggtcccatccgccagggaccctgccttttgagtctgtagttttgaggtacactgcaaggggccctttgtagagctggacaagggcgctggggtgagagccactggcgccatccacgctgcccctgccaggtgaggcatgccttgaccacggtcctgctggaaagcacgtggcaaagccacccagaaaccagatgcaaagcccagaagccctcggtgcagcccctgcatccaagtcacggtcccctccagctgggctgcgtaaggaggtccaaccctgggtcttcgtgaggaggagagcagcgcagtgccgccccgcagtcagttctgcagagggagggtgggccaggccagtgcggacccccagggcatgttctacagcaa

SEQ ID NO: 7558 - DNA, 550 bp, Homo sapiens
  MAP TO AL133352.10; EXPRESSED IN PLACENTA, SIGNAL = 3.7; EXPRESSED IN ADULT LIVER, SIGNAL = 4.3; EXPRESSED IN HELA, SIGNAL = 4.4; EXPRESSED IN BRAIN, SIGNAL = 4.2; EXPRESSED IN BONE MARROW, SIGNAL = 4.6; EXPRESSED IN LUNG, SIGNAL = 4.4; EXPRESSED IN HEART, SIGNAL =   5; EXPRESSED IN FETAL LIVER, SIGNAL =   5
gggagacacttctgagcagctagccttcaggcttcccaccttcaggaactgccacagcatcttttcactttgcagtaaagcttgctggctcttgttctgacagtaattcagtagatttcctgatcccaaggcctcctgcagctcagctgatcgcatcaggaattcagattctgtggtgacttgactgatgaagactaggcgggggcaaggctgtggcaccagatgggcaggggtgctggggaggccaaaagtaaccagcttccctccaaactggtgaggaaaagcaagaagggtaaaggttataccttcaagtcaaaaagtaacactaagtcagattcacagagaaggctatctaatggctgaccctaggctaggaaataaataaaataagagagttcctggggggtggaataggatcaggaatttagtattgaattcgtctccctaccaaaaccacttctgcactcttaggaccacccacttcaaacttcaccacacaagactcaccttctgctaacctgtcctggtaccaccattctcccagtcacct

SEQ ID NO: 7559 - DNA, 537 bp, Homo sapiens
  MAP TO AC019276.3; EXPRESSED IN BONE MARROW, SIGNAL = 2.7; EXPRESSED IN PLACENTA, SIGNAL = 1.7; EXPRESSED IN ADULT LIVER, SIGNAL = 2.1; EXPRESSED IN HEART, SIGNAL = 1.8; EXPRESSED IN FETAL LIVER, SIGNAL = 1.9; EXPRESSED IN BRAIN, SIGNAL = 1.7; EXPRESSED IN LUNG, SIGNAL = 2.4
cccactcctgggtatttctgaaactggcaatctatgcttgtctaggacggcccagaaccagcagaggctccagtgagcaccaaggtgactccaggctgctggggctcttacctgtgccatcttggcaaggtctagagaaggcctctgctcttgcacttcttcagggcgccgccttttaacaccgaccttcttgtcgttaaggacacacggctgggagcggctgcgggaaaggccgctggagcgtctcgccagctctggtgttgaggcaggtgtgctgttggctgagggaggacagtattccacaaaggaaaactgctcatgtgagcaagagagggaccgctgcaggtccagccggcctcctcccacggggtgcaggtcagggctccaggtgtcacctgcctgtccacacggggctgagcctggcaccccttggcagggctgccctccaaatcggtggtggagtcctgcctggtcgcagggtgaggagagcacgttggcccgggaagggaggctgaagctggaactcctctgcatggt

SEQ ID NO: 7560 - DNA, 576 bp, Homo sapiens
  MAP TO AL132793.24; EXPRESSED IN LUNG, SIGNAL = 2.1; EXPRESSED IN HEART, SIGNAL = 2.5; EXPRESSED IN BONE MARROW, SIGNAL =   2; EXPRESSED IN FETAL LIVER, SIGNAL = 2.4; EXPRESSED IN PLACENTA, SIGNAL = 2.2; EXPRESSED IN ADULT LIVER, SIGNAL = 2.3; EXPRESSED IN BRAIN, SIGNAL = 2.4
tcgaacttgaccatgacctgtatcaccccacaaaacctggagggattgtcatgctaaaatcactagtagactgggttttagcatgtgctttaaacagcagatggtatcattgatcattctacactgcttataattctcttttctttgttttctatttcttgatccttcactgtcttcctcttagatgactgctttttgttttcctcaagaatgatcttgttttccttctcattcatatcattattattttatttattcctatgtacccaattaacatcagagtctttcaaatctatatttttataataagttccataacccggatgattatacatttatgtgccacagacatgaaattcaaagttaacatgtctaaagctgagcatatattgtctcctcaaatatgcctcttctcccatgatccctttttgtgagtgactccacctctacacgtttacctaactagaaatttggtcaacactcttgaaaccatgtttctttccaataatttaatcacaaatttatttttgaatattctactttttttatctataaacttcttttcctccccactgt

SEQ ID NO: 7561 - DNA, 532 bp, Homo sapiens
  MAP TO AC010802.4; EXPRESSED IN LUNG, SIGNAL = 1.6; EXPRESSED IN PLACENTA, SIGNAL = 1.5; EXPRESSED IN HEART, SIGNAL = 1.4; EXPRESSED IN FETAL LIVER, SIGNAL = 1.6; EXPRESSED IN ADULT LIVER, SIGNAL = 1.6; EXPRESSED IN BRAIN, SIGNAL = 1.4; EXPRESSED IN BONE MARROW, SIGNAL = 1.4
aaatgctccctgtcctgttggataataaaattttctgaatttctatttgcctccttgaaatgaggcatgaatgaggacccaagatgagattaatatagtctcttttccatcctcttgattcacccccatcacagtaggtgtcttagtccaggctcttttgtttgcaagtaacagaaactctcttagcatggttaagggaaaatagcatgcttttcataatggaataatgctatcttgtggaatctgggacacgaaggtgcctgagccctagtaggagtaaacattttgttaccagtaggaacaaggccacccactctcttgatcttggttcttagatcccctgctctgctctgctctgctctatctgcctcagggattgttacattctccttgcctatggccaccacccagcgccctggtttatagaacctcagttcaagccatgtgtagaggctgaaactaacaccccctccaccaaatccaaagtcctgggaaagagattctgattagcccacactgggccaagtaacct

SEQ ID NO: 7562 - DNA, 599 bp, Homo sapiens
  MAP TO AC015999.3; EXPRESSED IN ADULT LIVER, SIGNAL = 1.6; EXPRESSED IN LUNG, SIGNAL = 1.6; EXPRESSED IN PLACENTA, SIGNAL = 1.1; EXPRESSED IN HEART, SIGNAL = 1.8; EXPRESSED IN FETAL LIVER, SIGNAL = 2.2; EXPRESSED IN BRAIN, SIGNAL = 1.9; EXPRESSED IN BONE MARROW, SIGNAL = 1.9
aaaaggacaaccagagccagtaactaacctcttgtaggtagcaagggcaccagcagctgttacatctcaagggcctgttcactgtaatgacctctcgacctgagttatctgtgatcctcagggtgcaagatcgcagagtggaacagaaagtacgattgaagcagatgctttcctccactgcaaagtaaattctttgtcccaagctgtttttaatctcatatttgttggaggtctcagtaccaagtatcactaatggaacaaaaaaaaaattataaaaacatttttttccttagtattgataactttaaataaaggggagatgttattaaaagaatacagtgtctgatcaattattaaatatatggtatcttcttcacacaaatttatttctatgctctaaatttttaggacttagccatggaaataaaagtaaatggtgagaataaagctatataattaattaatgtttattccagatatatgacctacttgagaacatgtagtgtaccttttcactaaaggacaaatgctttaaagaataatttatagctcaaaaaataattatattattgttatagaactattgggacaactcatgg

SEQ ID NO: 7563 - DNA, 594 bp, Homo sapiens
  MAP TO AL139008.3; EXPRESSED IN LUNG, SIGNAL = 1.6; EXPRESSED IN HEART, SIGNAL = 1.2; EXPRESSED IN PLACENTA, SIGNAL = 1.9; EXPRESSED IN FETAL LIVER, SIGNAL = 1.7; EXPRESSED IN ADULT LIVER, SIGNAL = 1.5; EXPRESSED IN BRAIN, SIGNAL = 1.5; EXPRESSED IN BONE MARROW, SIGNAL = 1.4
tccaagctttgctgttgttgttaaggtctttcctggactctgtctacagcatctgtttctttctcttacaggctgttttcatgccaaagtcacacagactccaggatatttggtcaaaggaaaaggaaggaaaacaaagatgtattgtacccccaaaaacggacatacttttgtttgttggtatcagcagaatcagaataaagagtttatgtttttgatttcctttcagaatgaacaagttcttcaagaaatggagatgcacaagaagcgattctcatctcaatgccccaagaacccaccctgcagcctggcaatcctgtcctcggaaccgggagacaccgcactgtatctctgtgccaccagtccgtccacagcactgaaatgtcagttcctgttagcacacaaacttgccacagacccagctcaggaagcaggtgatgtattaggttggaagggagtaacagaaaataactggagccagcttaagccacagtggaatttaacacaaggataaagggtgtttagcagaagtcaagaggtgatggacagacagttctgaaaaggacagacagttctgaaaaggcaccactaggg

SEQ ID NO: 7564 - DNA, 578 bp, Homo sapiens
  MAP TO AL121582.14; EXPRESSED IN ADULT LIVER, SIGNAL = 2.2; EXPRESSED IN FETAL LIVER, SIGNAL = 1.9; EXPRESSED IN PLACENTA, SIGNAL = 1.8; EXPRESSED IN HEART, SIGNAL = 1.7; EXPRESSED IN BRAIN, SIGNAL = 2.1; EXPRESSED IN BONE MARROW, SIGNAL = 2.1; EXPRESSED IN LUNG, SIGNAL = 1.8
acaagccctggttgtcactctgttagccatggatattttcagctcttatattctgacaactaattattccatgggaagtcttttaatcaggattctctttgtttatattgaaatgactaatatctttctcacacatctcatttcagcaatatgagttgatgctgtattttggatcatgtattttagaccaggtggccaggcagcagcactccccaccaatgcagacaggttaggttttcagtctgtgcttggtgcatctctagggggttaatgaagccttcccgtcgaagccgctgtgatgagaggacaggcaggactcctgctccctccccacctgctctgagttctaatccgagcagctcttcttctgtctggtttacatattcatcttttgggtgaaatggtgttaaatataatatatttgaaaacgattgggttaaaaaagctattctatttaaaatatcaagatggccatacataacacagatagataggtcctcaacattagcaggttgggtagtgtagtcaactgctgaaaataaatacagcacaacccaacaaaacacctttcccctcaa

SEQ ID NO: 7565 - DNA, 505 bp, Homo sapiens
  MAP TO AL139340.3; EXPRESSED IN PLACENTA, SIGNAL =   2; EXPRESSED IN HELA, SIGNAL = 3.1; EXPRESSED IN HEART, SIGNAL = 1.9; EXPRESSED IN FETAL LIVER, SIGNAL = 1.9; EXPRESSED IN ADULT LIVER, SIGNAL = 2.2; EXPRESSED IN BRAIN, SIGNAL = 1.7; EXPRESSED IN BONE MARROW, SIGNAL =   2; EXPRESSED IN LUNG, SIGNAL = 2.2
tccggagagaggaaagtgactgggccagtcacagactgacttatgatggagcacaaaatgttagcttctttgccccaaagcaaaatctaaatctgaggcttcattgcaaaatgtgcccttgcctgctttcctgcctgtccctagcctgcttccctactcctttactggttttgcctgagagcatttccatcttaatcacttgcactcaggtccttggaccaggatctacttctgggagaacactacctagggcagagttagaaaactccaatttgaaacccagttagacttgccagctgtgaaaccttgaagtctttcatttaacttctagacatatcagtttttttctctgtaaaaacttcatctcttttctttgtttgcaggaccattgtgaagaagaaaggagctgatgtatgtgaaatacttagcataggccctgttgtgcagcaggcactcaataaacgttagttgaatgtgaatatttactggcatgtcttggcttgta

SEQ ID NO: 7566 - DNA, 574 bp, Homo sapiens
  MAP TO AC011111.3; EXPRESSED IN PLACENTA, SIGNAL = 0.76; EXPRESSED IN HEART, SIGNAL = 1.3; EXPRESSED IN BRAIN, SIGNAL = 0.6; EXPRESSED IN ADULT LIVER, SIGNAL = 0.61; EXPRESSED IN FETAL LIVER, SIGNAL = 0.61; EXPRESSED IN BONE MARROW, SIGNAL = 0.63
tcacaggaatgtgtggaagccaaatgaattcccaaaacaaaaaaaaaaattcaaaaaacatgttagaaaattagtcttttaattttaatttcatatttgggatttttattttatgtgtcttaccctagggatgttatcctaagacaaggaagtatgttagcattggttttttgtttgtttgttttgttttttacatttcttccttgctatatgagttagcattcttattcattgtctgtgacaatgctgcacgttctggagagcaaagagaaaagcaactcccagcaaatttttttctcattttatgacaaatcagtttttctcatggtcgaagtcattggcaaggtgaaagtttaaccctagacctctccattctcagtaggtaattgaggcaaatgcagatctctctagaatttttaatgatataatacaaaatgcaaggcttgatgaaatttgaattccaagggaaataatgaaacaccaaatcttactattagaagtcctgggtttgtagaaagaaacatttattcatttattccccaaaatcactaccaccaccatcaaagccataggt

SEQ ID NO: 7567 - DNA, 565 bp, Homo sapiens
  MAP TO AC022904.3; EXPRESSED IN PLACENTA, SIGNAL = 2.8; EXPRESSED IN ADULT LIVER, SIGNAL = 2.9; EXPRESSED IN HELA, SIGNAL = 2.9; EXPRESSED IN HEART, SIGNAL =   3; EXPRESSED IN BRAIN, SIGNAL = 2.8; EXPRESSED IN BONE MARROW, SIGNAL = 3.1; EXPRESSED IN LUNG, SIGNAL = 3.5; EXPRESSED IN FETAL LIVER, SIGNAL =   3
taaaaccagggaaaggagggtccctgtggctgtggacctaaggctcttagcagaggaaacatttgattcatgaacttctttcctttctttagcctaatcattctctccttctgtgcctatttaggagctgttcatttgctcatccagcaacttaaagagcacccagaatacactagacaataaagacggagcaattaccaggacaggtaaagtctaacttcagggagcctctaacccagtgggaatggtcagaattgatccaattctgatgtgcatttccagtgttatttgagaatgttctactctattacagtagatgtgaaactcatgcaatgtgctaactgtagattacgagtaagcaagcatcttgtgagacagtcaggattcataagataagtaaatataagtaagtagagcacatcaagagaaatctgatattcctgaggcaccaaatatttgtgaaacgctaaatatacatgaggcatctgaggcatttaatatacagtgttaatttagccacccttggtgagactctggccccatgtgtcctctgcccaagaaacac

SEQ ID NO: 7568 - DNA, 502 bp, Homo sapiens
  MAP TO AC009924.4; EXPRESSED IN ADULT LIVER, SIGNAL = 2.1; EXPRESSED IN FETAL LIVER, SIGNAL = 2.2; EXPRESSED IN PLACENTA, SIGNAL = 2.1; EXPRESSED IN BRAIN, SIGNAL = 2.5; EXPRESSED IN BONE MARROW, SIGNAL = 2.3; EXPRESSED IN LUNG, SIGNAL = 1.9; EXPRESSED IN HEART, SIGNAL = 1.9
ccacatagccagcattcatctaaacaatgaacagctcttaagaatgtctgtgtgtgtgtgtgtatcaacaatattccctgtttttctcattccttttttgctctgtcgaaagcagccaacagctatctgaataactttactatatatcttatatatatgccttaatatgtgtatttgcttatttatacatttgtacatgaggttaaacaacaccaaagaacaaacaaacagaacaacaaaacaaaacaacaaaaatgcaatatctcaaaccagacagaggtttatttttctctctcatattgtagtctggggttgttccaggtttttgagtagtgacttaggaacctgggtttcttccaccttgttcctgggtcatttccttcagagacgtactttttatacctgtagccggctgcagctgataggaaagagaaaaaagttatggaaggctagtatgggagagtcagccaactgcttaagggcctcaacccagagagagcac

SEQ ID NO: 7569 - DNA, 515 bp, Homo sapiens
  MAP TO AC021237.3; EXPRESSED IN BRAIN, SIGNAL = 0.47; EXPRESSED IN BONE MARROW, SIGNAL = 0.42; EXPRESSED IN HEART, SIGNAL = 3.8
aaggaacggagtacgaagggcgccgccgcttcccacctgcgtcaagctccagctggtaacaaggcagcggctcaagagagagcttgtaaccctcgaagcggggatccaacagaggtctcttcacccgtagggagcaattagccgccacctccatcgctttccagggccgcagcgtgagaattaataaagcccttgttgaaaggtccgcgcttcacgcctcgcacagagactgggaagcggcgtggttcccatcccagaaaacactgcggtgcgaactgccttctgggaaatgtagtgtccgtgaaaaagttgagactgttgcatgctgggctatgtagttctcctggtacttaacgcgcgcgcgacggcaaggtctgaactctgttacccagaggccctagcaaccaggaggcggcccgcgctggttaaattctcacattataggcagggtggcgagaccccgccccggaaatgcgtgttctagctttctgtgtgcttaggtgcccgagctactg

SEQ ID NO: 7570 - DNA, 527 bp, Homo sapiens
  MAP TO AL138702.3; EXPRESSED IN PLACENTA, SIGNAL = 3.6; EXPRESSED IN ADULT LIVER, SIGNAL = 3.5; EXPRESSED IN FETAL LIVER, SIGNAL =   3; EXPRESSED IN BRAIN, SIGNAL = 2.9; EXPRESSED IN BONE MARROW, SIGNAL = 3.2; EXPRESSED IN LUNG, SIGNAL = 3.6; EXPRESSED IN HELA, SIGNAL = 4.5; EXPRESSED IN HEART, SIGNAL = 3.1
gaagtcagaatgagctgggcttattggagtggcagaaagaaagccagtagggcttggatatagtgagggaaggaccaacaaggtatacaggggtagatcatgatggcctgtgactgtgggaaaataatgatttaacaacagggctgtgggaagccattgcaaggtttaagcagggagttatttaatctgatttatatatttttaaggttcccactgactactctgtggaaagcacatcaatctctgcagttgtggtcacattgccttctcctcttctgtggtatcatcttcctccacctccttcctataaggaaacttgtgattgcatttagggtccaccgagtcaaattgctccatttcaaaatccttaatcatacctgcaaagtcttgtcttttgtcataccaggttacattaacaagttctagggattaggatgtaaatatcttttgaggaggcattattcagcctaccaaaatgtgtatatactgagaaagagagagagagagagagagagttcctggcttcc

SEQ ID NO: 7571 - DNA, 503 bp, Homo sapiens
  MAP TO AC009699.6; EXPRESSED IN LUNG, SIGNAL =   2; EXPRESSED IN PLACENTA, SIGNAL = 2.3; EXPRESSED IN ADULT LIVER, SIGNAL = 1.1; EXPRESSED IN FETAL LIVER, SIGNAL = 1.7; EXPRESSED IN BRAIN, SIGNAL =   2; EXPRESSED IN BONE MARROW, SIGNAL = 1.6; EXPRESSED IN HEART, SIGNAL = 2.4
tggacgcatgtcttatttgcttcagtgtttttagtttttaggatgatatgcgttttggttgctgtcacaactaccaccatcatcatcatcaccaccaccacccacaccatcattatcactgtttgtgtgtgtgtgtgtgtgtgtgtgtgtgtgtgtgtagatgtgagaggactgtatgtgtgctattgtcaacttacacttatatgctgatcttgaataatgatactggttattttcctaagttgcttctgtagagaggaactaaggtatctgattgataatctgagaagtaaaaacactaataaccttggccaaggcatgatttgattatctatttgcattcaggaatgtcaatcaacattattctaaaaagggctgtgagacaaggaatttagtcaaagctactcagtttggggaaaatgtttttgaaccagggattaggaagctggtatcagacactgaaaagacaaaaggtataatgaggtggcttccagatgcttttc

SEQ ID NO: 7572 - DNA, 583 bp, Homo sapiens
  MAP TO AC022174.2; EXPRESSED IN ADULT LIVER, SIGNAL = 2.4; EXPRESSED IN BRAIN, SIGNAL =   4; EXPRESSED IN LUNG, SIGNAL = 2.4; EXPRESSED IN PLACENTA, SIGNAL = 2.5; EXPRESSED IN BONE MARROW, SIGNAL =   3; EXPRESSED IN HEART, SIGNAL = 2.4; EXPRESSED IN FETAL LIVER, SIGNAL = 3.4
acaaagcctgtttggtggtctcttcacagggacgcaagtgacaaaggcgaaaggcaatatggctgaggccactgagtctaggggtctccagatctgaaatgaatggtgtcaggaataaggacatagagcactgactaaaatgaaaacattagcagtcagtctattgagtccaagagggcagctatgaaaaacttacagggaatgcaaagctttggctactggcagagtctgtgtgttttctctctctctctctctctctctctctctctctctctctctctctctctctctccctctccctctctctctctctctgtgcttcttgatctcttcctccacctttactcaaacctatgattttttaaggcaaaagcctaatattatagagaagttcatggggtggaggaaaacaaacttttatagtttgctgggatataggcacccaagtcaatatactacctagtcccaagaggggtagggttcggagcacaggaatggctgagggcactgtgaactgaaggcagagctgcagcagcatgtgaaggggcagaaagaaagaactcctgtgtgaggcactttccag

SEQ ID NO: 7573 - DNA, 556 bp, Homo sapiens
  MAP TO AC018511.3; EXPRESSED IN LUNG, SIGNAL = 4.3; EXPRESSED IN PLACENTA, SIGNAL =   4; EXPRESSED IN ADULT LIVER, SIGNAL = 3.7; EXPRESSED IN BRAIN, SIGNAL = 4.5; EXPRESSED IN FETAL LIVER, SIGNAL = 3.1; EXPRESSED IN HEART, SIGNAL = 4.2; EXPRESSED IN BONE MARROW, SIGNAL = 4.5
gtctgagtccctgatgaccctgcagtggccgtgccagccccagcccacctccctctgcacttatatgtgagagagaaataaacctctatcttgcctaagactttgtttaggttttctgtaatgtgaaggcaagcccagccctaactaattgagttctcacagaacgactacaaattccaaagcccatggctaggaggtggcgcagggcgtggcctggggaggggctgctgcctgctcccaagcgagcctgggcctgggcacttactcatcgccaatgtagagcttgggccagacctcgttgacgtgggtgtactggggactgcccttccagaagagccgctccagctcaaaggctccaggggtgcagtagtcctcctcctccccttcctcctccatcttcggcgacagcctcttggcagatgagtaggcattcttgaggcttgtcttcacttctccagatgtcattttagagccaagggattttctctcctttctgcagctggttatgagagagaagcaggatgggggttagcaggggacactgaggcagggaata

SEQ ID NO: 7574 - DNA, 557 bp, Homo sapiens
  MAP TO AL121910.19; EXPRESSED IN FETAL LIVER, SIGNAL = 1.6; EXPRESSED IN BONE MARROW, SIGNAL = 1.6; EXPRESSED IN HEART, SIGNAL = 1.5; EXPRESSED IN LUNG, SIGNAL = 1.8; EXPRESSED IN PLACENTA, SIGNAL = 1.7; EXPRESSED IN ADULT LIVER, SIGNAL = 1.9; EXPRESSED IN HELA, SIGNAL = 2.4; EXPRESSED IN BRAIN, SIGNAL = 1.6
tgtaggatgtttggcagcaccccagtttttattcactggataccagtagcacctcccagttttgacagccaaaaatgtctcctgatatgtccagacccttgggatcaaaatcacctccagtgaaaactactgcactttgtaactgtggttgggatgccttttctagtgagggaaacaacggttcttaggagcacctggggaaacatgcacatctgcaggtgtccacctcctggatctgctgcactggggtccccaggtatgtctccacaggtgaacacacctgtcatctgcaggtgtccacctcctggatctgctgcactggggtccccaggtgtgtctccacaggggaacacacctgtcatctgtaggtgtccacctcctggatctgctgcactggggtccccaggtgtgtctccacaggggaacacacctgtcatctgcaggtgtccacctcctggatctgctgcactggggtctccaggtatgtctccacaggtgaacacacctgtgtgacaatgctttaggaggtgaaggtgggaagaggagcagtttggtgg

SEQ ID NO: 7575 - DNA, 547 bp, Homo sapiens
  MAP TO AC013685.3; EXPRESSED IN LUNG, SIGNAL = 1.4; EXPRESSED IN ADULT LIVER, SIGNAL = 1.4; EXPRESSED IN HEART, SIGNAL = 1.2; EXPRESSED IN BRAIN, SIGNAL = 1.4; EXPRESSED IN BONE MARROW, SIGNAL = 1.3; EXPRESSED IN PLACENTA, SIGNAL = 1.2; EXPRESSED IN FETAL LIVER, SIGNAL = 1.7
caaaggctccatttctgaggcttggattcagttcctgcgctggaccctgtggctctctctgtcctaagctgccgctggcccccattacattcttccaattgtttcagtaagaagacatgagaagtgccatgtaaatgtctttgtaaactctttctagaaagaaaaaaactcaaaacgcacaaacatcttttataaactatagacattttacttatactgatgattggttcaataataggaaagtaatgaagtaatttgctaattatctatcctggctccatgaaacaactggtccttcctaaggatgttggtgcattattcatagttgccaaaggaatgacaaaagccatagaaaaggaagacacccaagagacaggaagtgtcagaaagcagtaagtaatcttatctcagatctaggtttggcccaatattatcagttaccaagtgaaaagaagagtgcagaaccctgcacccatgtattccctggggagcaacacaggagtctattcagaaaaaaatccagatttctcacaaaggggttccagag

SEQ ID NO: 7576 - DNA, 591 bp, Homo sapiens
  MAP TO AC021049.12; EXPRESSED IN HEART, SIGNAL = 2.3; EXPRESSED IN BRAIN, SIGNAL = 2.5; EXPRESSED IN LUNG, SIGNAL =   2; EXPRESSED IN PLACENTA, SIGNAL = 2.3; EXPRESSED IN ADULT LIVER, SIGNAL = 1.6; EXPRESSED IN FETAL LIVER, SIGNAL = 2.3; EXPRESSED IN BONE MARROW, SIGNAL = 2.4
ccccttctctcttcctgctcactttaaagctattctagtatagaatatttcaaacatactttttaaaatgtttttaaaatgtacgtatactttttggcactgattttctttttcacctaatatttttcctatagagtcctctcatcatttgtactgactatataacattccattacatagctatccataattgtactagccttctatcatgggatattgagggtatcttaattgccattgcaaacattttgcttgatataatcccaacatccttacttctaaatactgtcatctgtttcaggatggtagctattctatttctgggaaaaaataaaataaaatggaatgatgaatgcagagttggggaaaacacactggttgtaggtacagaaataacacaaattggatgtgatgtgaggatgggccaaaagtatgttattttactggtgagggaccttggattgctttatcaagaaatacaggctaccggggtgagaccacagccagaaattaactagaaggctatctgtcatacggcaatcacaacttaactctgtggttgttcatatttgatggcactgcacctatcag

SEQ ID NO: 7577 - DNA, 600 bp, Homo sapiens
  MAP TO AC022216.3; EXPRESSED IN PLACENTA, SIGNAL = 1.7; EXPRESSED IN ADULT LIVER, SIGNAL = 1.5; EXPRESSED IN BRAIN, SIGNAL = 1.5; EXPRESSED IN BONE MARROW, SIGNAL = 1.5; EXPRESSED IN LUNG, SIGNAL = 1.6; EXPRESSED IN HEART, SIGNAL = 1.8; EXPRESSED IN FETAL LIVER, SIGNAL = 1.4
tttagcttcccacgctatgagccatcataaaggagactttattttccaatataacatttctcaatataggaatcgttattgatcacatgttctgacaattgtgaaagaatcatcaataataataaaaaccgagacaaatttattctgcatatttaaaactgtaaaggtttaagagaaaaatctttcagaaaactagggctccgttcttatctgctctttgaagacagcaaatcctaggtgccttaaaaaattcactcctggggcggctcctgcaccttggccccaaagtaaatgtgtgaacgttggagctgcagttcttgattttacctgaagatggcatccatcccaaagctgtatgtgatttgtaggaggactctcttcaaattcgcaagcactgtcataaattcctttctacggactggaaaatgtgtgccatgtatggtaaatgattcttctttaagtaacaatacattagtatgttcttcagatgggtgcaggtacacctcatcttgggctgtgctgatgctcaagtcattaccctaaagggggaaaaaaaagaaataaaaaagagtaaaactgaaaagagggtacaaaagtgtc

SEQ ID NO: 7578 - DNA, 594 bp, Homo sapiens
  MAP TO AL121901.10; EXPRESSED IN ADULT LIVER, SIGNAL = 3.2; EXPRESSED IN BRAIN, SIGNAL = 2.7; EXPRESSED IN LUNG, SIGNAL = 4.9; EXPRESSED IN PLACENTA, SIGNAL = 3.1; EXPRESSED IN HELA, SIGNAL = 3.4; EXPRESSED IN BONE MARROW, SIGNAL = 2.6; EXPRESSED IN HEART, SIGNAL = 2.8; EXPRESSED IN FETAL LIVER, SIGNAL = 2.7
tccaaagggtttgaggtgtctgagaagttgaagcatgggaaaaaaaacgaagatatctggtacaaaaaataaaagtcagagattatccgaggggcaaagatggagtagatgttgccacacacctgagctccaggctaagcttcctggcaacaaatgcacaaaaaggaaacaggctgaatggtgtcatttccttctaggttgctattgggtaagctgcagagttaaaattcttagctgactccctgctctgtctcctcaggccaagttgttggactcacagggaaaggtgaccaagtggttcaataactctgcagcttccctgacaatgcccaccctggacaacatcccgttcagcctcatcgtgagtcaggacgtggtgaaagctgcagtggctgctgtgctctctccagaagaattcatggtcctgttggactctgtggtaaacctcagcacaaggcagagaatagggccgcccaggccacatcataggaatttcctgaacacagggtgcccctaagcaggaatcctccatcaggctcagtttaatggagatctcactccctcctctaatagaccctgcctctgacatagctc

SEQ ID NO: 7579 - DNA, 597 bp, Homo sapiens
  MAP TO AC013550.4; EXPRESSED IN LUNG, SIGNAL = 2.7; EXPRESSED IN PLACENTA, SIGNAL = 3.5; EXPRESSED IN FETAL LIVER, SIGNAL =   4; EXPRESSED IN HEART, SIGNAL = 6.8; EXPRESSED IN ADULT LIVER, SIGNAL = 3.1; EXPRESSED IN HELA, SIGNAL = 3.8; EXPRESSED IN BRAIN, SIGNAL = 2.8; EXPRESSED IN BONE MARROW, SIGNAL = 2.5
tatgcctgtgcatgtgtgtgtttgtgtgtgctctgcatataccagtggtttggggtgtgtagagagaaagtgatgtgtgtcaggataaatttccatactgtgcctgagcatgcatctcctaatcgtgtccatgttcctgaaggcgagcttccacccaggcatcttcccagaagtccttgagtcagcggtcgtcttcacagagagcctccagccagacgtccctgggaggaaccatctgcagggtctgtgcgaagcgagtgagcacgcaggaagatgaggagcaggagaacagaagcaggtgagcacatggcttccctgactccacttgtgccctgcgtggggtcacagtggagggacagtggggtgaggagggaagagcgaccttagctgagagggaagatcaaggaacacaggccatgcctggggtgagagggagaatgctgctgtttcccaatcacctgcttctctttaccatcattatctcaattaatctgaacaagaaaactactgggcaccagcttcccaccattttgcagaagagagcgttgctgttcagagcgctcacgccactgcccaggattccatgtctcacgcatg

SEQ ID NO: 7580 - DNA, 559 bp, Homo sapiens
  MAP TO AC019276.3; EXPRESSED IN LUNG, SIGNAL = 2.8; EXPRESSED IN PLACENTA, SIGNAL =   3; EXPRESSED IN HEART, SIGNAL = 2.4; EXPRESSED IN BONE MARROW, SIGNAL = 2.7; EXPRESSED IN ADULT LIVER, SIGNAL = 2.3; EXPRESSED IN FETAL LIVER, SIGNAL = 2.7; EXPRESSED IN BRAIN, SIGNAL = 3.6
tcaggaagctttcatcaggcccacgagttgggctccccttcaagggcccacctagtgcccagagtgggggctgtcgatgccagcacaccccagccctgcctgggcccacaccccctcagttcttctctatctgctcaatgtccaactcgccgtccagggagcagaggctgttcccaggggccccgcggtcccgccaggctgcagccggctccgctctcctgccacaatcctcgtccagggcgcagctgtctgactcctcacaggacaggtcctcctggcaggcgaggtggtcgtcgaaggaagggggaagaggctcagggaccggggtcccagcgggggtcctgccccctgggccggaggctgagagcagggcggtccaggccctggtgttgctgacgtggcgggcgaaggggctctggggaccgcagtcctctgtccctgcgctcaggcagctgaggctgctgaaggtctgacagttctgtggaggggcagacacacaggttactaagggttactcccctcccgcagccccaggactgcacaccccacaaagcaacta

SEQ ID NO: 7581 - DNA, 596 bp, Homo sapiens
  MAP TO AL157377.1; EXPRESSED IN LUNG, SIGNAL = 1.3; EXPRESSED IN FETAL LIVER, SIGNAL = 1.2; EXPRESSED IN BONE MARROW, SIGNAL = 1.1; EXPRESSED IN HEART, SIGNAL = 1.2; EXPRESSED IN PLACENTA, SIGNAL = 1.2; EXPRESSED IN ADULT LIVER, SIGNAL = 1.6; EXPRESSED IN BRAIN, SIGNAL = 1.1
aatcatcggcaaaaagcaacttctaagcaataaaaatatttctgttcatgaaaaatactgccttgtgaaaaaaaaagtgttgtgcttttctttttcaggaaggtaaaccagaagctctttgggttgaagaaagatttacagctcacattgcccgggtccgtgatgtagaacttctcactgggcttgacttctatcaggataaagtgcagcctgtctctgaaattttgcaactaaagacatatttaccaacatttgaaaccactatttaacttaataatgtctacttaatatataatttactgtataaagtaattttggcaaaatataagtgatttttttctggagaattgtaaaataaagttttctatttttccttaagtcccctaaaagccataatttttattattcctttttctcttttttcaattctatgaatatgtattattttaaagttatatttttcacacagagatgatgctatattacaccttcccttttttgttggtttcttaaactctaatctcatgacagattataccttccttattacttgttttatcttactcagaatctttgaatatatttttctgcccaga

SEQ ID NO: 7582 - DNA, 574 bp, Homo sapiens
  MAP TO AC019221.3; EXPRESSED IN LUNG, SIGNAL = 3.6; EXPRESSED IN PLACENTA, SIGNAL = 3.5; EXPRESSED IN HEART, SIGNAL = 3.7; EXPRESSED IN BONE MARROW, SIGNAL =   4; EXPRESSED IN HELA, SIGNAL = 2.6; EXPRESSED IN FETAL LIVER, SIGNAL = 3.3; EXPRESSED IN ADULT LIVER, SIGNAL = 3.3; EXPRESSED IN BRAIN, SIGNAL = 4.3
tggcctccaaaaggtatgtccatgttctaatctctggaacctgtgaatgtgaccttatttagaaaaacagtctttgcagatgtaatcaagttaaggatcttgagatgagatcatcctggattatctgagtgggccctaaatccaaggacaggtgtctgtttaagaaaacagaggagaagacacagaagaaggaagaaaaggccatgtggagacagaggcagatcttgaagcgatgcagccacaagccagggaatgcctggaattaccaggagctgggaaaagcaagtcacagagtctctcctaggaccccagccctgccaacaccatgatttcagatgtctggcctccaggaatgtgatagaattacatttcttctgtttcatgttatctgataatttgctatggaagccatgagaaactaatacagtagctaaacctaactctaacatacactaccttcatgatattctaccagcattaaatataaactgccctttatatatgcagtattataaagctattacacataagcagccctctagacatgtgtcttagtctgttttgcgctgctgta

SEQ ID NO: 7583 - DNA, 571 bp, Homo sapiens
  MAP TO AL160492.1; EXPRESSED IN PLACENTA, SIGNAL =   2; EXPRESSED IN ADULT LIVER, SIGNAL = 1.7; EXPRESSED IN HEART, SIGNAL = 2.3; EXPRESSED IN FETAL LIVER, SIGNAL = 1.8; EXPRESSED IN BONE MARROW, SIGNAL =   2; EXPRESSED IN LUNG, SIGNAL = 1.9; EXPRESSED IN BRAIN, SIGNAL = 2.2
caacctgggtctctctctgccccagcccagcctggctgatgctgcccttctgtccccagtgacccgtgtccgttctcagggctttgtcaccctcctcttcaacgtggtgaccaaggacatgaggaaactgggctatgacactgggccttctgatacacagggtgtgttggggcccagcccaccccagagcttcccccagtgaaggctccacaggctgcacagtctctgataatgaagggctgccttcccgaagtcagccgctgcccatcggcctgaggggcagcctggtggccagagctgggggcacacagaatagttttgtataataaagtctcattttcagagagcctaggcctggggctgccttctctcctgtttagcccctcccccacaggagctgggggctcttgggcctttcctggccccacctccagggctctccctgtccctaccccttgtgccgtggaagctgccaggagaccagaccgtgcagcaggatggcatgtgggatgggagctttgacataaccaggttctgccactcaaagctgtgtggccttttctataccgca

SEQ ID NO: 7584 - DNA, 586 bp, Homo sapiens
  MAP TO AL121895.18; EXPRESSED IN ADULT LIVER, SIGNAL = 4.8; EXPRESSED IN BRAIN, SIGNAL = 4.3; EXPRESSED IN LUNG, SIGNAL = 5.1; EXPRESSED IN PLACENTA, SIGNAL = 4.7; EXPRESSED IN HELA, SIGNAL = 6.5; EXPRESSED IN FETAL LIVER, SIGNAL = 4.6; EXPRESSED IN BONE MARROW, SIGNAL = 4.3; EXPRESSED IN HEART, SIGNAL = 4.5
atgcaaaccgtaagtctggcttgaacttataaaactcgaaacaaatttaggaatatttttgctctgatagttttgaaaatcagaaaaaggcaattgtactggaatctacttcatagcctttcttttcccacctttctgtaaaattttctgcctctgttgttgctaggaaatcagtgagccaagagaatcctcgttggcctagccgggccgtctcccttcccacactgcctctctgggggtacagcgtccctgtacccaggaagctggccctcttgggccggctttctgtggatccacaaggcaatcaccacaagaggctgaataagagcctgtcagtcactgggagacaggcagctataaatccagaggaccatgattagaaagcaaattacaggcctcccgctctaagtttccaactcacaaaacttcttggcagtcaaagggcctttacttaagttgttcaaagtttccagagagagtgaacacacacaaggcaagagagaaaaaaaaaatgggacacaacagaggcagaaaattctatagacaggtggagagagaggccactgggaggcagcatgtcacaata

SEQ ID NO: 7585 - DNA, 501 bp, Homo sapiens
  MAP TO AC016212.3; EXPRESSED IN LUNG, SIGNAL = 2.7; EXPRESSED IN PLACENTA, SIGNAL = 2.7; EXPRESSED IN ADULT LIVER, SIGNAL = 2.3; EXPRESSED IN HEART, SIGNAL = 2.3; EXPRESSED IN FETAL LIVER, SIGNAL = 1.9; EXPRESSED IN BONE MARROW, SIGNAL = 2.3; EXPRESSED IN BRAIN, SIGNAL = 2.2
tacttgagtggtccaaggggaaataaaaagagaaaataaaagaaaggaaataaaagaaaggaaaataaaagaaagaaaaacaggcaatgaaataaaaaggtaaatatatttagagttatagaattttctagctaaagaagccttacagagaggtcttctttttcttggacttgaatcacttgaatatacacacatgtatcgtatctactgtgtgtcttcagaccagccctctagacccagtgtccactcttcaccaccctgcgctctgccctcagaccactggctgcattgctgggcttccttgcccttggcttcctgttggaattggccagttggaggcaccagaaagagatctggtgagcagatgagagtgaaattggggtatcgattcccctgactcccttcctgtgggggcaatgcagactgtctgggtcctagtactgtgagtcatagctccttcctcctgtcagggacctctcctcgccattctctctctccttg

SEQ ID NO: 7586 - DNA, 536 bp, Homo sapiens
  MAP TO AC009415.2; EXPRESSED IN ADULT LIVER, SIGNAL = 3.8; EXPRESSED IN BRAIN, SIGNAL = 3.1; EXPRESSED IN LUNG, SIGNAL = 3.8; EXPRESSED IN PLACENTA, SIGNAL = 3.9; EXPRESSED IN HELA, SIGNAL = 4.7; EXPRESSED IN HEART, SIGNAL = 3.6; EXPRESSED IN FETAL LIVER, SIGNAL = 3.4; EXPRESSED IN BONE MARROW, SIGNAL = 3.2
atgaaaggcaattcacccacaggtaacagcagcactgaagacaaagccgtagaaatgctgaagtgtatttggagaagagggagtgctccagtgtggctgctgttttgttataatcaaggttcttgcattttctgtttctctgtagttcgaaataaagtgcacgacttaaaaaaaaagtgatcagaacacctgcaaatgtagattaattgtttatcaacatacactttaaaagcgactgaactaaaccacttttatcacgctatatgattgcatagtttagggagagtttttggtgtataacccacagtgaatgatgcagctggaggcacaatgttggagatcaggaataccaaactgaggcatatgctcctcattttcctggaaaaaaactttgtttttgcggtatctgtaataaaattgaaaaatgggagcaaagtcatgattacagcaataatccttgtcaatgcaagctttctctgactcttccaacaagacaggatctctctttctctgaaggccttgaacacttgacccat

SEQ ID NO: 7587 - DNA, 585 bp, Homo sapiens
  MAP TO AC021468.2; EXPRESSED IN ADULT LIVER, SIGNAL = 3.7; EXPRESSED IN LUNG, SIGNAL = 3.3; EXPRESSED IN BONE MARROW, SIGNAL = 3.3; EXPRESSED IN BRAIN, SIGNAL = 3.2; EXPRESSED IN FETAL LIVER, SIGNAL = 3.5; EXPRESSED IN HEART, SIGNAL = 3.4; EXPRESSED IN HELA, SIGNAL = 3.1; EXPRESSED IN PLACENTA, SIGNAL = 2.8
aggaagacctttgtccaggctgttgctacacctgagggagagactgagatgacagtgatgcaattctggaaggattacaacacaggtatgattgcatcaagaaccttggttgggcttggggtgatgtcaccaagaagtatgtgaatggcatctggaagaagacacttagcatttctccatgacttcagaggatttgccaaggatgaggaggttgcaaaaatcaacaagtttgtggttgagatggcaaacagctttgacctgggtgtggatgagaatgacactgaggagctcctagaggtggttcttgaggaattgactaataaggagttgttggaaatgaaacaggaatgcatagctgaagaagaggcaagaaaaaaggaaactgcatgtattagtctgttctcatgctgctataaagaactgcccaagaccaggtaatttataaaggaaagaggtttaattgactcacagtcctgcatggcttgggaggcctcaggaaacttacaatcatggcagaaggcacctattcaggagggggcaggagagagaagaatgagaatagagcgaaggaggaagccccttatg

SEQ ID NO: 7588 - DNA, 597 bp, Homo sapiens
  MAP TO AC018469.3; EXPRESSED IN LUNG, SIGNAL = 2.9; EXPRESSED IN PLACENTA, SIGNAL = 3.4; EXPRESSED IN BONE MARROW, SIGNAL = 3.1; EXPRESSED IN HEART, SIGNAL = 2.8; EXPRESSED IN ADULT LIVER, SIGNAL = 3.9; EXPRESSED IN FETAL LIVER, SIGNAL = 2.8; EXPRESSED IN BRAIN, SIGNAL = 3.2
tatgagcattgtggctctgctcatacaagagcgtgtcattattacttgtagaagaaaatgcaatttaagactattttaggctatatctttatgtataagtcagagttaaattctagaagtttatatatacatatatgtgcatgtgtttgtgtatatatatatatatatatatatgcatatataaatatatatatatatatgtaaaatcagtcaaacctagttgcacatggtagttatattctataaagtttctgtgaatactaaattagtaaatattaaatcattgctcctaggggaagtaaatgtgtgtgtgtgtggtatattaacatgactgacatagattatgatttaaatcttaaaaacctaaaactaactcttcctggtacattctgttttatttattttacaaaaaggaaatgaggttcagaaatgttgtgtgacttacctcaggctgctcaactgacaggtaggtgccagagttaagattcagactctccaaccggcccctagagcctggtcttcttgcactgctttgcactgcctcctgccatctccattctctggtcatctctgtatgaaagctgaaacaaggcagag

SEQ ID NO: 7589 - DNA, 540 bp, Homo sapiens
  MAP TO AC015897.3; EXPRESSED IN LUNG, SIGNAL = 0.95; EXPRESSED IN HELA, SIGNAL =  15; EXPRESSED IN FETAL LIVER, SIGNAL = 0.98; EXPRESSED IN HEART, SIGNAL = 1.5; EXPRESSED IN PLACENTA, SIGNAL = 0.92; EXPRESSED IN ADULT LIVER, SIGNAL = 1.3; EXPRESSED IN BRAIN, SIGNAL = 1.2; EXPRESSED IN BONE MARROW, SIGNAL = 0.77
tgattccaagacatggggacatgagattttttttgcttattgctgcttattttaaacatctctgatgatcagcttttctttaatatcaatgtgttccttaaatttgaagacatttcttttcataatgaaaaaccattattaagtcatggtgcatgttatagtcagcatcctagaaacaatggagaaagtgttttatatataatacaatggcctcttgatatcacatataaatatctcacactgtaaataagtgtgatataagattatagtgtcccctcccttgttcgcttggattaaagtaatcttgatttctaaccttatttttatagcaccaacaatgaatttcatggtggatgaaacagcagcaatcaactcaaacaaggaatcccagcaattggtgcaaaaaacgtatacactggagaagaaagaagcaatggaggaagatgaagcgccccagcacagagatgctgacatagtacagggaaaaggggaggcagcactgtggggagaagcaggagctgttcatgaggctcccttgag

SEQ ID NO: 7590 - DNA, 578 bp, Homo sapiens
  MAP TO AC013317.4; EXPRESSED IN HELA, SIGNAL = 4.9; EXPRESSED IN HEART, SIGNAL =   6; EXPRESSED IN BRAIN, SIGNAL = 7.2; EXPRESSED IN BONE MARROW, SIGNAL = 8.4; EXPRESSED IN PLACENTA, SIGNAL = 5.1; EXPRESSED IN ADULT LIVER, SIGNAL = 7.8; EXPRESSED IN FETAL LIVER, SIGNAL = 6.8; EXPRESSED IN LUNG, SIGNAL = 5.9
gtaggcaaatttctgcagccagcttgaatttatcctcaaaaaatgggtttttctttcctactgcattatcaggctgcaagttttccaaactttcatgctctgtttcccttttaaaatggaatgcttttaacaacacccaagtcgcctcctgaatacttttctgcttaaaaatttcttctaccagatactctgaatcatctctcttatgttcagagtttcacaaatctttgtggaaggggcaaaacacttccattctctttgataaaacataacaagagtcacctttgcgccagttctcaacaagttcctcatctccatctgagaccacctcaggttggaccttattgttcatatcactatcagcatttttgtcaaagccattcaacaaatttctagaaggttccaaactttcccacattttcctgtcatcttctgacaggaaactcttccaagctttgcctactacccagttccaaagtcacttccacagtttggggtattttttcagcaacacctcactctactggtaccaatttactgtactagtccgttttcatgctgccgataaagacatgcct

SEQ ID NO: 7591 - DNA, 512 bp, Homo sapiens
  MAP TO AL157792.2; EXPRESSED IN BONE MARROW, SIGNAL =  14; EXPRESSED IN ADULT LIVER, SIGNAL =  10; EXPRESSED IN FETAL LIVER, SIGNAL =  17; EXPRESSED IN BRAIN, SIGNAL = 7.1; EXPRESSED IN LUNG, SIGNAL =  12; EXPRESSED IN PLACENTA, SIGNAL = 8.1; EXPRESSED IN HEART, SIGNAL = 8.9; EXPRESSED IN HELA, SIGNAL =  10
tttttcttgtcatagggcggtgggatgccgtcaaacaccttaaggcagtccagagcggcctggcctcgcttggtcttgtggggcagcaagcctcgctcggtccgaacttcaacttgtttctgtagaaattgccagaaatgttgatgccttcgcagcatacgaccaccactttcctgcccagcagtacctgtttagccacaatggccgccaggcggcccaggagatggcctcgaccatcaagcaccaagacctgcacctccgccatcttcggcagcagcttgggaaagccctttttctatttttattgcattagctgctagtttacctgctccatcaacttcttgaggaacatttttcacgtggtttataacccctctctcttacatgattcctgctaccaaatgctgtgatttcaatatccgcatcaatccatcctcactaactccatattccctaataccctctactgaaaggacagtcacttccatttcacttcggcaacactctcacaa

SEQ ID NO: 7592 - DNA, 528 bp, Homo sapiens
  MAP TO AC015578.4; EXPRESSED IN LUNG, SIGNAL = 1.5; EXPRESSED IN PLACENTA, SIGNAL = 1.3; EXPRESSED IN BRAIN, SIGNAL = 1.3; EXPRESSED IN ADULT LIVER, SIGNAL = 1.3; EXPRESSED IN HEART, SIGNAL = 1.5; EXPRESSED IN FETAL LIVER, SIGNAL = 1.3; EXPRESSED IN BONE MARROW, SIGNAL = 1.3
ttctggtacactccacatcctgaagaatgactaagcttggtatctaattcatcagtacctcctatggcttattttatctttcattctccatctctcccttgtaaattttcaaacagcatacagagccagaaatcttgttcttttgaagttgagacatctaattctaatactagggttgccatcaaattttctacttatcaggtatgcccttagtatttttaatttctaaaacatggaaagagatctgattttcctttaataaaaattaaatttaaatctgctattcataaagtacaggaagaaattatatctaggtttgattaattagcgatgaagatgatttgttataaatctttgcctgtaattcttcatgtaaaaaaattgacctgaagccaagttatcagcaagaattcaatgctctttactgttgtacttatttgaagctaagtcttggattgaagccaccgatgaaaaagctgttgtacatggctcatgatggaagggcgtaccgcagacaatagggacact

SEQ ID NO: 7593 - DNA, 561 bp, Homo sapiens
  MAP TO AC019126.3; EXPRESSED IN PLACENTA, SIGNAL = 1.1; EXPRESSED IN ADULT LIVER, SIGNAL = 1.8; EXPRESSED IN FETAL LIVER, SIGNAL = 1.5; EXPRESSED IN BRAIN, SIGNAL = 1.4; EXPRESSED IN BONE MARROW, SIGNAL = 1.5; EXPRESSED IN HEART, SIGNAL = 1.6; EXPRESSED IN LUNG, SIGNAL = 1.4
tttcatcccaaagccatctcccccggaccatctgtggaaaaattatcttccatgaaaccgatcccaggtgccaaaaaggttgactgctataaggtaaggcaagccactggtgacacaacctggaacatactgagagctacattaaaatgcttgcaaatatggtaggttcaaacaacataccaaatgttgtgtcatttctactgcaataggagtaacttcttcactatattcacagatcattttctgaattacattggtaaggtcatcattttctgtttctcttataatgtgaagaagagcctgcattacaggtctgatgaatggtgtgatatattctttagctgtaagagaaagagtaaaaaacttgcgtaaaacccctaaaacttcttaaaacctgatataacaaatatcgatgagttttttaaaaaagtactttcacataaaaaggaagtatgccaagtttctaggattatggctttttacaattaatatatatatatatattttataagaggcagggttttgatctgttgcccaggctggagggtagtggcaatcgta

SEQ ID NO: 7594 - DNA, 574 bp, Homo sapiens
  MAP TO AC021356.5; EXPRESSED IN LUNG, SIGNAL = 4.9; EXPRESSED IN PLACENTA, SIGNAL = 5.2; EXPRESSED IN ADULT LIVER, SIGNAL = 5.2; EXPRESSED IN HELA, SIGNAL = 5.2; EXPRESSED IN HEART, SIGNAL = 4.7; EXPRESSED IN FETAL LIVER, SIGNAL = 4.5; EXPRESSED IN BRAIN, SIGNAL = 6.6; EXPRESSED IN BONE MARROW, SIGNAL = 4.9
aggtgatcaggtcatgagggccctgctctcagaaatggatcaacatccttatctcaaagtgggtttgttataaaagccagtttgtgctaccacccacccctcactcaccacatacatcctctttcctacatgaggtctttcatcacgggatgatgcagcaagaaggccctggcaagatacaagccccttgaccttggacttctcagcctccagaactgtaagaaataaatctctgttctttataaaacccagtttgtagcattctgttacagcaacacaaaatggactaagaaaatcctataaaggaataaaaatgaaaataccatgaaaattttcattggtaattcagggtgctagctgaccttggaacaatgtttttcaaagttctggataaaaaatattaatcaggcatgaaggcagaattttaaaattttaaatataaaacctaagaaaatgcactcagacaccctttaccaggaaattcctggaggatataatcccactacatgaaggagtaaaccaagaaagagaaggcattcacccatggctcctatcaagcacagcaaggacagaa

SEQ ID NO: 7595 - DNA, 501 bp, Homo sapiens
  MAP TO AL161751.1; EXPRESSED IN BONE MARROW, SIGNAL = 1.6; EXPRESSED IN PLACENTA, SIGNAL = 1.8; EXPRESSED IN ADULT LIVER, SIGNAL = 1.1; EXPRESSED IN HELA, SIGNAL = 2.5; EXPRESSED IN HEART, SIGNAL = 1.5; EXPRESSED IN LUNG, SIGNAL = 1.1; EXPRESSED IN FETAL LIVER, SIGNAL = 1.6; EXPRESSED IN BRAIN, SIGNAL = 1.5
cacatcttaaaaccaaacacactgtacagctgtacaaaaatattttctttctttatatctttattagcttttttctaattttctttttcttttttttttaaaaaaacttgtttgttgaaaactaagacacacagacattagcctatacctacacagggtcaggatcatcaatatcactgttggtcacctccatattttgtcccacttgaaggtcttcaggggtaataacatgaaggaagctctcatctcctatgataacagtgccttcgcctgcaatgtctcctaaaggacctgcctgaggctgttttacagttaatgtttttatatatagaagtaggttacactctaaaataatgataaaatatacagtacagtaaacacataaattagtgatagtcattattataaagtattatgtcctatacctaattatatatgctatatttttatatgactggcagtgcagtatgtttgtttataccagcatcaccagaaactggt

SEQ ID NO: 7596 - DNA, 500 bp, Homo sapiens
  MAP TO AC018421.3; EXPRESSED IN ADULT LIVER, SIGNAL = 1.1; EXPRESSED IN BRAIN, SIGNAL = 1.6; EXPRESSED IN PLACENTA, SIGNAL = 1.4; EXPRESSED IN HEART, SIGNAL = 1.7; EXPRESSED IN FETAL LIVER, SIGNAL = 1.9; EXPRESSED IN LUNG, SIGNAL = 1.2; EXPRESSED IN BONE MARROW, SIGNAL = 1.6
agagagtcagggtcacccacaccattgtcttccacctctacgccttgtcccactgaaagttcttcaggggcaataagaagcatggagctgtcagctcctttgacaacaaagccttcttctggatgcctcccgaaggacctgcctgaggctatttacagttaacttaaaaaaaaataattagaaggagtacactctaaaacaatgatttaaaagtatagggtagtaaatacacaaaccattcacatagttgtttattatcattcttcagtattatgtactgtgtataattctatgcactagactttcatatgaccagttgtgcagtaagcttgtttgcaccgtcatcaccagaaacacaagtaatgcagtgtgctacaacattatggcagctgtccatcactaggtgacgggaattttttggctccattataaccttgtaggaccctcattgtatatgtggcccatcgctgatgaaaacatccttatgtggtgcatgactg

SEQ ID NO: 7597 - DNA, 560 bp, Homo sapiens
  MAP TO AC009298.2; EXPRESSED IN PLACENTA, SIGNAL = 0.83; EXPRESSED IN FETAL LIVER, SIGNAL = 0.77; EXPRESSED IN ADULT LIVER, SIGNAL = 0.92; EXPRESSED IN BONE MARROW, SIGNAL = 0.51; EXPRESSED IN LUNG, SIGNAL = 1.3; EXPRESSED IN HEART, SIGNAL = 1.8; EXPRESSED IN BRAIN, SIGNAL = 1.1
aaaatggggcatgtcaaaaggacacagaagacacttataaaagatcccagtagccaaagctagaacaatatgaacaacataataaataacaatagtattggattataactcccaaagtatgtgtctgtattgataaaataaataatgtggagaagaaacaaatcttgtttatagaattcagttgttaaatatattagaagggatggagatatacaaaattcccattagaatagcaaatagtaataattactgtagacaagatttactgatgaattctaaaactggtgggcaaaactttaaagagaaaagaatatatctgcatagcctccaagtacttcttctaaaatacacctaattactgtggtggttttaacatatgaccacaaatttctttcatattctcccttttaggaggtggaatttaattctcctccccttgaatatgggctggacaaagagaaaaatggtagctcaacagtggagacacctggacagcactttaaccaagtgatcaaagttaatatcgccaattatgtatgtgctcccggatgtgatgttat

SEQ ID NO: 7598 - DNA, 529 bp, Homo sapiens
  MAP TO AC021641.4; EXPRESSED IN ADULT LIVER, SIGNAL = 7.2; EXPRESSED IN BONE MARROW, SIGNAL = 5.3; EXPRESSED IN HEART, SIGNAL = 3.5; EXPRESSED IN FETAL LIVER, SIGNAL = 5.9; EXPRESSED IN LUNG, SIGNAL = 7.2; EXPRESSED IN PLACENTA, SIGNAL = 6.5; EXPRESSED IN HELA, SIGNAL = 3.9; EXPRESSED IN BRAIN, SIGNAL = 3.9
tgactgcagcattttggaacagaatttctttcagggaggaatagggcactgagtataaaaagcagcagtggaaagaattgcacaaaccccttttccatgcactaggtctctgggtataacttttatgaagtttaatttccttctagttgaataaaggtagcaatgtgttgccttttacgttgtgtatgaagagcctagaatgatgatcgacaccaaaaaggagtcagtaatttgatccattcactcttgggtgctgagctcctcagggcataggcaggaggcacagctggaaagccacctgtgggtgcacaggtgctgctggagagcagagtgaaggaggaaataggacaggtgctaaggaacatgcaggtggagctggaacacagagtgcaagagggaataggccaggtgctaaggaacatgcaggtggagctggagagcagagtgcagaagggagtaggtcaggggctaaggagaacacaggggcagctagagagcagagtgcaggagggaataggacaggtgctca

SEQ ID NO: 7599 - DNA, 551 bp, Homo sapiens
  MAP TO AC015570.5; EXPRESSED IN LUNG, SIGNAL = 2.7; EXPRESSED IN HEART, SIGNAL = 2.2; EXPRESSED IN BRAIN, SIGNAL = 2.2; EXPRESSED IN BONE MARROW, SIGNAL = 2.3; EXPRESSED IN ADULT LIVER, SIGNAL = 2.6; EXPRESSED IN PLACENTA, SIGNAL = 2.3; EXPRESSED IN FETAL LIVER, SIGNAL = 2.1
aagctcaataggcagccaaggcccaaatcttaaaacattattatgatcaattccaaagaatttgaattgtatcaatgagaatttgttactgagtttcaagcagggcaataatacaaacaaatctttatttacagatcaatcacaggagcaacgagagggaggtgaagctggagaacaatcaactaagaagtcattcagcaaccaggttaacaaaatatgaaagcctaactcaagagaaagtgattgtggtaattatgaggaaggttggatttgcatcttctaataggtttaaaatttccaggatgcagtgaacctaattagagttggaaaatgagcaagtgaaaatctcctagaaagatccagagctttgtttagacttgagcctctgggtgaatgctggtgccctttactaaaagagaagacacaaaaggcatatctgatttaatagggtaaagtgatgagctccttttaagatactggaagtttatattgcctgtgaagtattaaagtggaaatgtctagtaggctgttggtcattttgcctctgagct

SEQ ID NO: 7600 - DNA, 521 bp, Homo sapiens
  MAP TO AC009503.3; EXPRESSED IN LUNG, SIGNAL = 0.98; EXPRESSED IN BONE MARROW, SIGNAL = 0.85; EXPRESSED IN HEART, SIGNAL = 1.2; EXPRESSED IN PLACENTA, SIGNAL = 1.2; EXPRESSED IN ADULT LIVER, SIGNAL = 1.2; EXPRESSED IN FETAL LIVER, SIGNAL =   1; EXPRESSED IN BRAIN, SIGNAL = 0.88
tgcaggaccactgctacaagtgccatgagagttagcatagcccaggagcaatcatgtaaatgcattctgttgcctgttccataatgaaagagaactgtttctgatccttgttcctgataaggatgtaaaacgccgcattcaccagctcaatggccatgtacttgaggctgtgttggtctactctctagaaaaggtactacacctgacacagaagctgcaattggagctaagtttgatgttatccactattatcctctaggatctgtttttatttttaaggaaataggagtggtgagttaaataggaatataatggggccaccacccttgtaacctagttctcaataaagcatttggaggtgggaccaatctcttccattttccccagaacatgagagtgtattttatttacaatttttgacttggaaggcacagttttagagactttcaccttggccttcccgacttcaatagctcttacttcaaaagctaagaagctcatggaaggattttgccaaacaa

SEQ ID NO: 7601 - DNA, 597 bp, Homo sapiens
  MAP TO AC013314.4; EXPRESSED IN HELA, SIGNAL = 2.6; EXPRESSED IN LUNG, SIGNAL = 2.2; EXPRESSED IN PLACENTA, SIGNAL = 2.1; EXPRESSED IN ADULT LIVER, SIGNAL = 2.6; EXPRESSED IN BRAIN, SIGNAL = 3.1; EXPRESSED IN BONE MARROW, SIGNAL = 1.9; EXPRESSED IN FETAL LIVER, SIGNAL = 2.5; EXPRESSED IN HEART, SIGNAL = 2.1
gggctttttagggaggtcagtctaatttcagcaggtagctttctcaacaaattccacaaataccacagccagtttcccaggaaatttagtgcaaattccacagtaggatttccagcaagctccaccagcaccacagctggcttcccagctgtctcagagttgccctagtggcagcttgctagtgactttcagtgccctagaaggcagcctcctggaaagttttgtcagcactccaatgggcagtctcctgcttaccagcctcagcctgtggtgcctccacataatactcaactatccagtaggctacagtcactccttctccaatgacatctggatccctaccttagagtagggagtgtatcttctaaatttttttcttccttgtgtgaaccctgaaaatttgaaacaggtgtcaattaattcagacagttaattttgccaaggttgagaacacatactcgtgacacagcctcaggaggtcctgaagacatgtgcccaaggtggtcagagcacagcttggttttatacattttagggagacataagacatcaatcaatatgtgtaaaatgaacattggtttggtccagaaaggtcca

SEQ ID NO: 7602 - DNA, 589 bp, Homo sapiens
  MAP TO AC007000.2; EXPRESSED IN LUNG, SIGNAL =   4; EXPRESSED IN HEART, SIGNAL = 3.2; EXPRESSED IN BONE MARROW, SIGNAL = 3.3; EXPRESSED IN BRAIN, SIGNAL = 3.3; EXPRESSED IN FETAL LIVER, SIGNAL = 2.9; EXPRESSED IN HELA, SIGNAL = 2.8; EXPRESSED IN ADULT LIVER, SIGNAL = 3.2; EXPRESSED IN PLACENTA, SIGNAL =   3
gaatcgtgaaaaatggaagacagtagcacagacacagaaaaagaagaggaagaggagaaagatgaaaaggatcaagagcccatttatgccatagtgcccacaattaacattcaagatgagcggtttgttgatttatctgaaactccagctttcatttttctgcatgaggtatatttttctttatatgttactacagtaaaacccaactcaacatgtacttaaaaattcaaatgaagccaatatcattatcaaaattctttattacatatatcctgtaggtgatatttacaacttgatacactaaaacaaaatggtccctgccttttcttccaaaaatttatcatgtaattctgaaccaatgcagtagtgtaggttctgatactttcgtagcataagtatttgcacatatattcggtcagttacatacatttcgtgggttggtacatgaaataaagaagatttcttttattattgcatatactacatttacttccataaaattaaaatatcttgtcatataatgatagaaagaatatatatttacctagctaactatagttactgcagtggagcactgaaatctgctgtt

SEQ ID NO: 7603 - DNA, 520 bp, Homo sapiens
  MAP TO AC022939.2; EXPRESSED IN ADULT LIVER, SIGNAL =   2; EXPRESSED IN HEART, SIGNAL =   2; EXPRESSED IN FETAL LIVER, SIGNAL = 1.8; EXPRESSED IN BONE MARROW, SIGNAL = 1.8; EXPRESSED IN LUNG, SIGNAL = 2.2; EXPRESSED IN PLACENTA, SIGNAL = 1.9; EXPRESSED IN HELA, SIGNAL = 2.3; EXPRESSED IN BRAIN, SIGNAL = 1.7
cttaaagggtgaagtgggggagctagtagaagagcctgggtttttccttttatacctcattgcttctctgtacaaataccagaagctgttaaaaatatctgtggataaaattttagacttttgaaaatgcatttttatcttccttttccaggatcagttcgacagcttagacaagcatacacaatggggaattgacttcttggaaagatatgccaaatttgttaaagagaggatagaaattgaacagaactatgcgaaacaattgaggtaagttaatttttttttcagtttttagaatgaaattacatgtttaaacagttgaatattagaggaatgtgatagtccagaggttaaattctatgtttttcatcagaattagattgaattaggtaaccggtttgttttaatgattaattaagtcattggctagtacagtaccacaaggaatattgactagctggatcacaaatagctttcattccagaaagacacttaaaaatctgaaaactggggagcaaaa

SEQ ID NO: 7604 - DNA, 502 bp, Homo sapiens
  MAP TO AC021677.3; EXPRESSED IN ADULT LIVER, SIGNAL = 2.2; EXPRESSED IN FETAL LIVER, SIGNAL = 2.2; EXPRESSED IN BRAIN, SIGNAL = 2.8; EXPRESSED IN BONE MARROW, SIGNAL = 2.4; EXPRESSED IN LUNG, SIGNAL = 2.2; EXPRESSED IN PLACENTA, SIGNAL = 2.2; EXPRESSED IN HELA, SIGNAL = 2.8; EXPRESSED IN HEART, SIGNAL = 2.3
tctcttggtgtgtgcaggtcccgtggctgtcatcagtggtgaggaggactcagccagcccactgcaccacatcaaccacggcatcaccacgccctcgtcactggatgccgggcccgacactgtggtcattggcatgactcgcatccctgtcattgagaacccccagtacttccgtcagggacacaactgccacaagccggacacgtgtaagtactgggatggaatgctctccctcctggggaggggagggtggttggtgatagaccatgtacctggggttctggaaccttctagggtgacctgctacctgccaacctcccactttctaagagaccctccctgtttgtttcaaaacttgaagaatagcctgagccaggagtccccgggaccagagtcctctgcgaagggggtcctgtgggtctgaatctgcttcccttttttcttcacctgggctcagcaggaccctgggtgctcccaataaggcaggagacacagagaggct

SEQ ID NO: 7605 - DNA, 577 bp, Homo sapiens
  MAP TO AC018780.3; EXPRESSED IN PLACENTA, SIGNAL = 2.7; EXPRESSED IN ADULT LIVER, SIGNAL = 2.9; EXPRESSED IN HEART, SIGNAL = 2.5; EXPRESSED IN FETAL LIVER, SIGNAL = 2.5; EXPRESSED IN BRAIN, SIGNAL = 2.6; EXPRESSED IN BONE MARROW, SIGNAL = 2.8; EXPRESSED IN LUNG, SIGNAL = 2.9
gttctcatgttcccctttgcagaggttgaacatgctgtgtctgaattcatcaaatatgagatctccttcaatgtatatatgttccatggtggaaccaactttggtttcatgaacggggccacatatttcgggaagcactcgggcattgtcaccagctatggcaagtgtcgctggtgtagtagcctctccagcatgggcggtgctggggctttacagaggaggctccggaagcctgttctggcaccactgggttcttgacctataatctatgctgagtactgaagattttcctatctactttccttccttctgtatgttcataatgccccaacaggctgtcattgcagtagacagggctttccgggacttagagctccgcttcacacatctggtatactgccctgttggcttgaacctctgaagagaggcagggtaggaacggtgactgctgtaaaggcacagacctgcacggccgggcgatacagactgagcaaagaaaagagtacccgttgaaggggtgtccactcttttggcttccctgggccacactggaagaagaagaattgtcttgggccac

SEQ ID NO: 7606 - DNA, 542 bp, Homo sapiens
  MAP TO AL133320.8; EXPRESSED IN ADULT LIVER, SIGNAL =   3; EXPRESSED IN HELA, SIGNAL = 3.5; EXPRESSED IN BRAIN, SIGNAL = 2.5; EXPRESSED IN LUNG, SIGNAL = 2.7; EXPRESSED IN PLACENTA, SIGNAL = 2.6; EXPRESSED IN BONE MARROW, SIGNAL = 2.7; EXPRESSED IN FETAL LIVER, SIGNAL = 2.7; EXPRESSED IN HEART, SIGNAL = 2.7
aactgccccaaattcaaatgctgccactgccacctacaaagtgcgcaaatttagacaatttactaaagttctatctgtcaaatggtcagtatagagataaaactatataatgcatgttgaaatataatggtgcttactaaacagcaggttatcaggtaaattttttcttttcttcatccttctaaggtatcaattcagtagccctaagagcacattcccaagagctatgaaaccacctgaatctggaggcttaattatcctaggctgacacactcaggagacctaaagatattgagaaaagaggcatgcaaatttctctaacctatttctttaggaaaactatctgctaacaaggtaacaaaggcttaccccatcacacaggagagggtgaactgcagaagaaagagggtgtcagcccagccttcaaactccacagcctgcaacacacaagaaagcattaaattttagaccaggccttcaaaatcagctatcccgttttaatgtaaatccttctacgagtctgcctccaacacagacacaga

SEQ ID NO: 7607 - DNA, 549 bp, Homo sapiens
  MAP TO AC022555.2; EXPRESSED IN PLACENTA, SIGNAL = 2.6; EXPRESSED IN FETAL LIVER, SIGNAL = 1.5; EXPRESSED IN ADULT LIVER, SIGNAL = 2.2; EXPRESSED IN BONE MARROW, SIGNAL = 1.5; EXPRESSED IN LUNG, SIGNAL =   2; EXPRESSED IN HEART, SIGNAL = 1.3; EXPRESSED IN BRAIN, SIGNAL = 1.5
tctagtgcctgagtgagggctattagttctgccagctgagcactggttcctggagtgaggggattactttcaagtattccattgtcactcaccactgcatactctgcctttcgaagtcctttttctacaaaggaacttccatcagtatacaagttgaggtagggatcagtcaagggaacctctagaaggtcccctcgagtagcgtaggtttgagcaattacttgttgacagttacgttctgtcttttcttcattgtctggaagaaatgtgactgggttaagagttgcacaggtgtgcagtcgcagcactggtccttcaagtaatagagcctgatatttaagtaaatggttgtctgacagccacaagtctcctttagcagtgagtatgccgttcacatcatgagatgtccacacgataagatctcttccctgtattattttaatggcttcagatactaagactgctactgctgccactacccataaacaatgaggccaactctttgccactacatcaatttccttactcagatatgccacaggttgcaag

SEQ ID NO: 7608 - DNA, 522 bp, Homo sapiens
  MAP TO AC019214.2; EXPRESSED IN PLACENTA, SIGNAL = 2.4; EXPRESSED IN HEART, SIGNAL = 1.6; EXPRESSED IN FETAL LIVER, SIGNAL = 2.6; EXPRESSED IN BRAIN, SIGNAL = 2.2; EXPRESSED IN LUNG, SIGNAL = 2.4; EXPRESSED IN ADULT LIVER, SIGNAL = 1.9; EXPRESSED IN BONE MARROW, SIGNAL = 1.9
acacccagagtacccacagctgccagggagggatctgtgcaggaacagctagttggacgggcttatgggatggcagggagtgagcgagctggggggccccaggggacggtggagtatctccagctcctgagtgacagagagaacccacgtgcactgccacaccagcaccactgctccaggctcagccgtgggcatctgcgaggccctggagggcacagacagggtgtgcatgctcggctctgtcaaggggctgcagtgctgcagatgcctgtggtttggcttctctgctctcctgcttgttctctaaaagctggggctgtctacatgcatggacacacttcccatacctggtaagcaacctgagtcctgacaccagagtggacaaaagcttaggtagaggggctgacaggcactgcatcatgaatggaagccactgtccttcaactaattacgtcttcagtaagaggaactaaactagctactcgtcaatgaggaatggtgagtaatcaaaacgatgccgct

SEQ ID NO: 7609 - DNA, 574 bp, Homo sapiens
  MAP TO AC013726.3; EXPRESSED IN ADULT LIVER, SIGNAL = 5.3; EXPRESSED IN LUNG, SIGNAL = 5.5; EXPRESSED IN BRAIN, SIGNAL = 4.8; EXPRESSED IN BONE MARROW, SIGNAL = 4.9; EXPRESSED IN PLACENTA, SIGNAL = 5.2; EXPRESSED IN HEART, SIGNAL = 4.9; EXPRESSED IN FETAL LIVER, SIGNAL = 4.4
tacagcagcgcaaaacagactaagacacatgtctagagggctgcttatgtgtaatagctatataatactgcatatataaagggcagtttatatttaatgctggtagaatatcatgaaggtagtgtatgttagagttaggtttagctactgtattagtttctcatggcttccatagcaaattatcagataacatgaaacagaagaaatgtaattctatcacattcctggaggccagacatctgaaatcatggtgttggcagggctggggtcctaggagagactctgtgacttgcttttcccagctcctggtaattccaggcattccctggcttgtggctgcatcgcttcaagatctgcctctgtctccacatggccttttcttccttcttctgtgtcttctcctctgttttcttaaacagacacctgtccttggatttagggcccactcagataatccaggatgatctcatctcaagatccttaacttgattacatctgcaaagactgtttttctaaataaggtcacattcacaggttccagagattagaacatggacataccttttggaggcca

SEQ ID NO: 7610 - DNA, 505 bp, Homo sapiens
  MAP TO AL133419.11; EXPRESSED IN LUNG, SIGNAL = 1.9; EXPRESSED IN ADULT LIVER, SIGNAL = 2.1; EXPRESSED IN HEART, SIGNAL =   2; EXPRESSED IN FETAL LIVER, SIGNAL =   2; EXPRESSED IN BRAIN, SIGNAL = 1.9; EXPRESSED IN PLACENTA, SIGNAL = 2.2; EXPRESSED IN BONE MARROW, SIGNAL = 1.8
gtcaggacctcttctgggtgttgggtgaacaccaccacattatactaattagtgtctacactaacaaagtagacatcactgaagacctcagtgaatttggtatttagtaaggaaccaacagacaagtttaaacctgaaacagaataagatagttgctctaacagggctatgggccagataggggagagaatcatcagataggttggaaacccacccatgaggctccttggctcacgtcctgcctgcctggctgaccctccaggcattcccggacatgtctgaatattcaggatgtacacattttgggctcccattttaggaccctgttggacttggaacattgccagtctcctcttggttggcactgtggtctaaaagagggtagaaagagagtaagttctacatgtggcagaatagaggtttcatcctcatcccctttccctgcttcctggacacagtggttacttatttaccccttatcttttggagctgggatcaatgctaa

SEQ ID NO: 7611 - DNA, 530 bp, Homo sapiens
  MAP TO AL121918.15; EXPRESSED IN PLACENTA, SIGNAL = 1.5; EXPRESSED IN ADULT LIVER, SIGNAL = 1.6; EXPRESSED IN BRAIN, SIGNAL = 1.3; EXPRESSED IN BONE MARROW, SIGNAL = 1.2; EXPRESSED IN LUNG, SIGNAL = 1.6; EXPRESSED IN FETAL LIVER, SIGNAL = 1.3; EXPRESSED IN HEART, SIGNAL = 1.3
acccaacataaagcctggtgcattgtatcagctctatgaatacaatgcagctcttcctattattaatagtatcaaggcctaggatacaaaacaaaggcttagagacttctccaggcccctgggatactggaaaatttcagcaaatatgtgagacattcagagttttgaaattgtaacagctcaacatttttcagtgagaagattagtttgctgggagatagattagacaagtgaatgaagagcaaactgtctatcgcggagataaataggcttccacgggagagagggggtagaaagaccttgtctcttctcgatgattgcacttcttgcaaagcaccaagtacacaagcgccttagctacaacaaagggctccttagcttcaggcatcttgctaaggagttgtactcagtagatataaacaggacattggaagaccaagacacccagccccttgcagacaggaggaaatgcccccaagggactctccacatcctgagattccacattctgtatccccgctctgtgtgat

SEQ ID NO: 7612 - DNA, 501 bp, Homo sapiens
  MAP TO AC011666.18; EXPRESSED IN LUNG, SIGNAL = 2.1; EXPRESSED IN PLACENTA, SIGNAL = 1.7; EXPRESSED IN FETAL LIVER, SIGNAL = 1.9; EXPRESSED IN ADULT LIVER, SIGNAL =   2; EXPRESSED IN HEART, SIGNAL = 1.5; EXPRESSED IN BRAIN, SIGNAL = 1.5; EXPRESSED IN BONE MARROW, SIGNAL = 6.9
acatcagttccctcccacagccttccttcctacaatcctgaagaaaaagagggttcttttggcattgatcccacttactgatatccaatgtcacaaaagttccgtgtgtccatgtgaaaggactgtatgtttcggacgacagtctggcagtctgtggatacagtgcagcttgtgccagcggtgtggatgatgatgacatatttggctgggaggttcattttagggcagtgtgtctctctggcttcccaagcagatcgtttgatgatgttggggcaaactgtggtaaaatgaaaagccaaggaagtaggaattttttttgcctctctgtgagcaatcactcaactccaggctggattattcctcagcctctcccaggcctccagcacccacgggcacatcctaatgtaatatcagctttgggattctggggaagtccagttgggaggtttctgattcagatgggctggagccaaggggctgaggcaaaaatctacaggcctg

SEQ ID NO: 7613 - DNA, 600 bp, Homo sapiens
  MAP TO AC021677.3; EXPRESSED IN PLACENTA, SIGNAL = 2.1; EXPRESSED IN ADULT LIVER, SIGNAL = 1.8; EXPRESSED IN FETAL LIVER, SIGNAL = 1.7; EXPRESSED IN BRAIN, SIGNAL = 1.6; EXPRESSED IN BONE MARROW, SIGNAL = 1.3; EXPRESSED IN HEART, SIGNAL = 1.4; EXPRESSED IN LUNG, SIGNAL = 1.9
catccccacacctatgttcccagcaagggctctgcatttgacattgtctttattctgcatttatttagcctttccagggattccgaaagagcggaataaagatgctcctagtttgcaatgtatacagaacccaaagcctaataaagcccccctcattatttttgtatagccctctggttcttgagagcatcaggaaatggatacagccctcctggtcacacagctgaggaccctagactttgggccaggtccgatagaatgagaagtcaagggaccagtccagatgggtcacttgggagaagctaaaagttatttgtagcaacattggaccctcagttacctttgtcacccatgtggcagctctggactgcagtaagttgttcatggatgagggctggactgcttgctgctttctcaggagtcacacattggccttttcccataagccagttgaaaggcttcttggttaatcttaaggatgaacagggttctctgttcatccttttctccccacacccatactcttggttgagaaaacagagaccatctggggagaggcaactgcctctgccccgtccttctgtccttgggtgtccttgt

SEQ ID NO: 7614 - DNA, 590 bp, Homo sapiens
  MAP TO AC025749.2; EXPRESSED IN ADULT LIVER, SIGNAL = 1.5; EXPRESSED IN BONE MARROW, SIGNAL = 2.3; EXPRESSED IN PLACENTA, SIGNAL = 1.8; EXPRESSED IN HEART, SIGNAL = 2.2; EXPRESSED IN FETAL LIVER, SIGNAL = 1.8; EXPRESSED IN LUNG, SIGNAL = 1.6; EXPRESSED IN BRAIN, SIGNAL = 1.9
tttgtcaatttcccacctccctcaagctagatgtgtgcgggaggtgaatgcctgtctcacagcagctttgccagcattgaggtttattattcttttaatttttgatgcatgttattggctgtggcctttgtccaagtctgtcttcataggctgtgccctgctgtctgcctatgggatgatgagtgtgatcaggtacccacaagctgtctttcatactcctgacagccaacccagctggagcttccagaaggctgtcaagggctggcgcctggcacggaggtcacttaccgactacagctccacatgctgtcctgcccgtgtaaggccaaggccaccaggaccctgcacctggggaagatgccctatctctcgggtgctgcctacaacgtggctgtcatctcctcgaaccaatttggtcctggcctgaaccagacgtggcacattcctgccgacacccacacaggtgcctcctctgggtggggagggcggtatgagggcccctcagagctgagcacctactctgagcctcagctagaccagggtgagaggagcgaggcagaaaattttaaaggagtgcctgatttaggggt

SEQ ID NO: 7615 - DNA, 598 bp, Homo sapiens
  MAP TO AL136528.9; EXPRESSED IN ADULT LIVER, SIGNAL = 0.81; EXPRESSED IN PLACENTA, SIGNAL = 1.1; EXPRESSED IN HEART, SIGNAL = 1.3; EXPRESSED IN FETAL LIVER, SIGNAL = 1.1; EXPRESSED IN BONE MARROW, SIGNAL = 1.1; EXPRESSED IN LUNG, SIGNAL = 0.83; EXPRESSED IN BRAIN, SIGNAL = 0.99
tgcttgatgcagctaaccagatactagaaccagagcctgtcagggagcagggctgtcctcccagccggacgcagagagaggggtggggggccgggatttgcaccccctccgccagtaccttctcgtggatgactgagaggtaccagggcatcctctttctcaggcagctctgagatgcgactgagctgctggtgaccggactcaaagtctgggattttctcctcttccgcaagtaatcgaactcgcagatgctcttactgaagggaaggaggtaccctgtggcgacagcggaggccaagtgagaaatgagacccttccctgccgagctcctctggcgtcttcgatgacgacatccacccttccgagacttccctcggaaacccctatctgcccagacagactccaatctgtctcctaactcttgtcaccctcattttgaggacacagtgtggtgctgctgtgaacacgatggggcgcccacacccagcacagcgcgtgctgagggagtgcaggaaggtgcggaagctctggccgagacacccaggacaaacgagccggagctgggagtcgggacgagggggtcatcctgatgctgtct

SEQ ID NO: 7616 - DNA, 598 bp, Homo sapiens
  MAP TO AC009311.2; EXPRESSED IN LUNG, SIGNAL = 1.8; EXPRESSED IN ADULT LIVER, SIGNAL = 1.3; EXPRESSED IN BRAIN, SIGNAL = 1.6; EXPRESSED IN PLACENTA, SIGNAL = 1.3; EXPRESSED IN FETAL LIVER, SIGNAL = 1.1; EXPRESSED IN HEART, SIGNAL = 1.4; EXPRESSED IN BONE MARROW, SIGNAL = 1.2
gcatgtagatgcatgttgggagcaaatgcacatcaaagaagagtgacaagatcaggaatcttctgcttccccttctccttccccttccccttcccctcccccttcccctcctcctcctcctttttcttcttcttcctcctcttcttcctcttcttcttttttcttcttctttcttcttctcccttcctctcctctcttttcatcttcctcttttctaacttttatagaaaatgaatatcaaattctctcacttttatgggcctcctcttccttgaattcccatatgaagtaacttgagctcacttcccatataatgaaggaaagttctatgccagatacacaaatctgtcctctcttttcctataaatctgaaaacagtaaatctccataaagacagggactagttttacctacatcgtcttacaatagtatacaaagacttgcatgcaaataggactcactacaatttttactttttattttttaattatggtaaaatacacataacaaaatttatcatcaaccatttttaagtgtacatttcagtggtattaagtacattcacattgttgaacaaccatcactaccatccatctcc

SEQ ID NO: 7617 - DNA, 568 bp, Homo sapiens
  MAP TO AC015649.5; EXPRESSED IN ADULT LIVER, SIGNAL =   4; EXPRESSED IN LUNG, SIGNAL = 4.2; EXPRESSED IN HEART, SIGNAL = 4.7; EXPRESSED IN FETAL LIVER, SIGNAL = 3.1; EXPRESSED IN BRAIN, SIGNAL = 3.8; EXPRESSED IN BONE MARROW, SIGNAL =   4; EXPRESSED IN PLACENTA, SIGNAL = 3.5; EXPRESSED IN HELA, SIGNAL = 3.6
tcccagtggagaatgagaggcaggccccccgtggtggccggggccctggctgccagaggaccgggctggtgaggaggcgaggatgtggactttcgtcacccagctgttggtcacgctggtgctgctgagcttcttcctggtcagctgtcagaacgtgatgcacattgtcagggggtccctgtgctttgtgctaaagcacatccaccaggagctggacaaggagctgggggagagcgagggcctcagtgacgacgaggagaccatctccaccagggtggtccggcggcgggtcttcctgaaggtaaccgcctggcaggaggccggcagggctggtggtgtgggcgccggaggccggggctgaggggacgctgctgtggggagctccggacccagagttgggagacgccggaggaaaaggaccaggaggcccccagggatcatgttccaccctgggagccagagtgtgtgtgcgcccaccagaacctgccctctggtgcccagtgcattgtgacagtgacattaaacactcagctttgggtctcgggaggctgcgctcatcctgtttctt

SEQ ID NO: 7618 - DNA, 563 bp, Homo sapiens
  MAP TO AL031726.11; EXPRESSED IN PLACENTA, SIGNAL = 1.3; EXPRESSED IN HEART, SIGNAL = 1.4; EXPRESSED IN FETAL LIVER, SIGNAL = 1.2; EXPRESSED IN BRAIN, SIGNAL = 1.1; EXPRESSED IN ADULT LIVER, SIGNAL = 0.9; EXPRESSED IN BONE MARROW, SIGNAL = 1.2
attgtgggtcacagggagagacatctacttgaggacatacaatccctgtctggcagggacccatatttgaaactcagtcctcctgaaggttcacttacctgatccctctgcttccagccagctcttgctgatggtgaggagcctcattatcttaagacaacacacagtggagatgtgctttacgtaattggcctgccctgtgaaaacccctggctgttttttcaggtgagttttcttataacttaactgcagctccgtgacttactgcttcttttccaggctcttctagggaaaatttgcgtctgtggccttagtccagaacacaccctagtcttctctggagggaaacacagtcagggaaggaagagattttgtaatgtggacagtgttcggtgttcatcgctgaggaatctgagtgtcagtttgcattcatcatgggcggagggccccacagctggcggaaggccagctgcagtgtaaaggtaggactaaatggagaggacttcctggggtggaggaggtagagaaatcaaaggacgctccctgaggttatgccctcttgc

SEQ ID NO: 7619 - DNA, 505 bp, Homo sapiens
  MAP TO AC024060.2; EXPRESSED IN LUNG, SIGNAL = 1.4; EXPRESSED IN PLACENTA, SIGNAL = 1.2; EXPRESSED IN ADULT LIVER, SIGNAL = 1.3; EXPRESSED IN HEART, SIGNAL = 1.5; EXPRESSED IN FETAL LIVER, SIGNAL = 1.3; EXPRESSED IN BRAIN, SIGNAL = 1.3; EXPRESSED IN BONE MARROW, SIGNAL = 1.5
tggctcactcagctcaaatgtcttttcttccaggcacttaccactttattttgaagttttatttttccacatccagttccacagctctgcagaatgttggttgaggttagaaaccacgcctcactcatctttatatgctcagtgatagcacagagtgaaatgttgataaacaattgttggactgaatttaactcagaggagaaagcccagcttatgtctacacagtcatgatatgtgctattcgaatgatggcttagagtgagaacccagtcatcagtaaaagtagtatagacctccagtccccaggataggacagaagaaacagggcgatattgaaggtaatgaatccaacaacctacatgtgtggaatgctttccaccagccatgctctgggagagagattttcattcattatttgagttaatcctccagatagtcccaaatatctgccttacagatagttgttatctgtaaggcaacttaaaggcaaccagagagtcaaagc

SEQ ID NO: 7620 - DNA, 582 bp, Homo sapiens
  MAP TO AC019058.3; EXPRESSED IN LUNG, SIGNAL = 1.6; EXPRESSED IN PLACENTA, SIGNAL = 1.2; EXPRESSED IN HEART, SIGNAL = 1.3; EXPRESSED IN FETAL LIVER, SIGNAL = 1.2; EXPRESSED IN BRAIN, SIGNAL = 1.1; EXPRESSED IN ADULT LIVER, SIGNAL = 1.5; EXPRESSED IN BONE MARROW, SIGNAL = 1.3
tggttggtgaattttcctgcaatatatttttacatagcaatgtttttaagagtcgtctacatttatagttgcagcactagttccttcatttttactgttaaatagaattcaattttatgactgttccagaatttgttgactatggtacattcaggctactcttaattgtttgtcattgtcaaaatgctgatatggacattgttgaatatgtattcctgaacatgtatgtgagggctctctaggactgaaattgtgatgatatgtatatcttatacttaaatagaatttgccaagttattttcaaaattttcataaataatttaattcccctagtgaatttctaagaactctgttagctccacattagagccaatatttgcatttcagactttcaaaaataggtattatagtcacatagttaaaatatcaaaacaatataaaattatatacactgaaatatttgttgttaatagtttaaatgtggatctggagaaaagtcaatcactgcaggcaatttattatgggaattgagttcattaaacaagaaggaggattaaatgtagcattttggggtaaggatga

SEQ ID NO: 7621 - DNA, 519 bp, Homo sapiens
  MAP TO AC010789.7; EXPRESSED IN ADULT LIVER, SIGNAL = 2.9; EXPRESSED IN LUNG, SIGNAL = 2.9; EXPRESSED IN BRAIN, SIGNAL = 2.2; EXPRESSED IN BONE MARROW, SIGNAL = 2.4; EXPRESSED IN PLACENTA, SIGNAL = 2.7; EXPRESSED IN HELA, SIGNAL = 2.7; EXPRESSED IN HEART, SIGNAL = 2.6; EXPRESSED IN FETAL LIVER, SIGNAL = 2.2
ttgagttttgggtgccctacaggatgagcctctctgcggtctggcattgtggggagggccaggcagcacctatcggggctcgggggcccaagtcctctggctgccgcgcaggctgcgcgtgaagggcgggtagttgaggaactcgaagcgcaggctctgctcggtggtgtggtggccccggggcagccgcttcatgaagtggacctcacgctggtgctgccgcgtcttggagcccttgcggggccggcccttgcgggtgaaggccatgtaccagccctcgtacttggcattctgcagcgctgtgtagttgttctccagcacaatctccgtgaagacgcagtccttgcctttgccgttgctctgcaggtaggggagccagacaccacgttacagagcccccccagcagaggcagagggcgagcggccccagacagcaggtgggcaccccagcagatggcgaggtgggcaggagccgcagccccaccccctgcctgggcacccgctctctaatccctcaca

SEQ ID NO: 7622 - DNA, 587 bp, Homo sapiens
  MAP TO AL118520.12; EXPRESSED IN LUNG, SIGNAL = 2.7; EXPRESSED IN HEART, SIGNAL = 2.6; EXPRESSED IN BRAIN, SIGNAL = 2.9; EXPRESSED IN BONE MARROW, SIGNAL = 3.1; EXPRESSED IN HELA, SIGNAL = 3.5; EXPRESSED IN PLACENTA, SIGNAL = 2.7; EXPRESSED IN ADULT LIVER, SIGNAL = 3.1; EXPRESSED IN FETAL LIVER, SIGNAL = 2.5
gactcagatgctatgccaccatgattgctttttgtggtcggtacggcggagatgagctcggagggtaccagagtggttactatcgagcgtacactggtggggagagcaccgccaggtaagctgggtcctgctgaggcagtgcccgggcccacagggctagaggtcatttttagcagagtgggtgctgggggcgttggggttttactgtccagctctgtggataactgctctgttcccatgagccccggagctgtggtgtctagcccttggccttcagtctctccatctgcaccatattgttcttcccctttctcaagagagcctgtaactttcttacatgccttggtcaacaaaatttggccaattttgtccacttttcctttgcccttactagacgagactgggcttcgccggttgccagaggaccctggactattggtcaaaaggggagaaaccattgtggttgactgtgaagagggaagagtgttctgatctgctgaggtgttcacctgagggctagcctcatctggattcaattctttcacttgctgcacagggggatgagaagggacaactggagaagacgt

SEQ ID NO: 7623 - DNA, 591 bp, Homo sapiens
  MAP TO AC010492.4; EXPRESSED IN PLACENTA, SIGNAL = 3.4; EXPRESSED IN ADULT LIVER, SIGNAL =   7; EXPRESSED IN HEART, SIGNAL = 5.6; EXPRESSED IN FETAL LIVER, SIGNAL =  13; EXPRESSED IN BONE MARROW, SIGNAL =  14; EXPRESSED IN LUNG, SIGNAL = 8.9; EXPRESSED IN BRAIN, SIGNAL = 6.2; EXPRESSED IN HELA, SIGNAL =   5
gagccaggagacagctgaacccaccacccaagcgaggtgaggctggttctctccctccactggggacaccaagagctgttacctgtccagctgcccacatgcctggcagaggccttcacaaggtgtacggctagagccgcagtgacccttgcgctgggctattggggcaagaggctgccccagctccctggtgagctgtgtgcaagggtgaatctgtaccctctgggtgagttcacacccatcacctccgagggctgcataggagatagggacagcaggcttagtgagggcaaccatcagaggggcaggtggaggaagattcaggtgcccatccgaggtggtacctgatatggcgctggcggatcagcacgcgagcgtggtggatggacttggccaagcccagcttgaagacctgggtctgcaggcgtctctctaagaaatcctctatcttcaggcccaggatgtaatccagcttcatcttgccctcatccagcaccccaatgcggaccagccgccgcagcagggcgttgcctgggaagagtgggaggaaacactgattccgccttctgacctcaggcttcttgggttcaa

SEQ ID NO: 7624 - DNA, 502 bp, Homo sapiens
  MAP TO AC007326.28; EXPRESSED IN LUNG, SIGNAL = 1.9; EXPRESSED IN ADULT LIVER, SIGNAL = 1.9; EXPRESSED IN FETAL LIVER, SIGNAL = 1.8; EXPRESSED IN BONE MARROW, SIGNAL = 1.7; EXPRESSED IN PLACENTA, SIGNAL = 1.7; EXPRESSED IN HEART, SIGNAL = 2.3; EXPRESSED IN BRAIN, SIGNAL = 2.3
agcaggagcgacactaccagctgctgtcggcgttacagagcctggtgaaggagttgcccaggtacgcgggcggggcgggcggcggcctgccgaggccgcatcgtgtcccgccggggctcaccgcgctcctctaccccgcagctcattccagcagcgcttgtcctacaccacgctgagcgacctggccctggcgcttctcgacggcaccgtgttcgaaatcgtgcaggggctactggagatccagcacctcaccgaaaagagcctgtacaaccagcgcctgcgcctacagaacgagcatcgaggtgcgcgggggcagcgggaggaggtgccgcctcctcggggtcggcgcctcccggcagctcttggtatctgtgcagctcggctccttccttgggagtgttcggaagaggtccctaagattaacaaaatcaagggcgcagagactgagacagcgcctttttggtgaccaatgtgtccaacgagttttgttttcagttgcgca

SEQ ID NO: 7625 - DNA, 582 bp, Homo sapiens
  MAP TO AC008812.4; EXPRESSED IN PLACENTA, SIGNAL = 4.9; EXPRESSED IN ADULT LIVER, SIGNAL = 4.2; EXPRESSED IN HEART, SIGNAL = 4.2; EXPRESSED IN BRAIN, SIGNAL = 3.8; EXPRESSED IN BONE MARROW, SIGNAL = 3.6; EXPRESSED IN LUNG, SIGNAL = 4.7; EXPRESSED IN FETAL LIVER, SIGNAL = 4.7
tgaggctaaagccatgattgataaaagagagtgctatgagctgagtgtttacctctgaaattcatatgttgaaatcctaacccctaagatgatgttattaggaggtggtaatttggggttagtaattaggtcatgaggtcagagccttcattagtgtcctcataaaagaaaccctagaaagcttccttcaccctttccaccatgtgagaacacagcaagaaggcaccatctatgaatcaggaagcaggctctcaccagccaccaaatgtaccagcaccttgatagctggaagtgctgggcaaagttctagcaatgctatgatcagctgcaggaccagaccagctcctagaacaccatggtcacctaggaaggccagggcagctcctaacaacaccaaagccagctgtgagcttcaggcctgctcttgaccactcttcttctctcgggattaaactagctatgttatgtagagcatgtagaacaatgtctgataaatcttttatcgagacttgctctttctagcctccagaagtgtgagcaataaatttctactgtttataatccacccagcctatgatgttt

SEQ ID NO: 7626 - DNA, 592 bp, Homo sapiens
  MAP TO AL157777.3; EXPRESSED IN ADULT LIVER, SIGNAL = 5.1; EXPRESSED IN PLACENTA, SIGNAL = 6.7; EXPRESSED IN HELA, SIGNAL =  12; EXPRESSED IN FETAL LIVER, SIGNAL = 8.1; EXPRESSED IN BONE MARROW, SIGNAL = 7.3; EXPRESSED IN LUNG, SIGNAL = 2.5; EXPRESSED IN HEART, SIGNAL = 7.3; EXPRESSED IN BRAIN, SIGNAL = 8.2
agctttgcccaccacctccctaccatggacgcccgcaaagtgaacgagcttcgggcctttgtgaaaatgtgtaagcaggatccgagcattctgcacaccgaggaaatgcacttcctgagggagtgggtggagagcatgggaggtaaagtaccacctgctactcagaaagctaaatcagaagaaaataccaaggaagaaaaacctgacagtaagaaggtggaggaagacttaaaggcagacgaaccatcaagtgaggaaagtgatctagaaattgataaagaaggtgtgattgaaccagacactgatgctcctcaagaaatgggagatgggcgcaaggctccggactccacggtgcagactgcacctcgcagtctccccaggtccgcgcagcagccacgcttcagccagaatactgggatcttcagtggcaggaggagtaatcagaagatggagatgaattttaacattattttggaagagattcttattaaaaggtcacagcagaaaaagaagacatcacccttaaactacaaagagagactttttgtacttacaaagcccatgctaacctactatgagggtcgagcagagc

SEQ ID NO: 7627 - DNA, 554 bp, Homo sapiens
  MAP TO AC021079.2; EXPRESSED IN FETAL LIVER, SIGNAL = 2.3; EXPRESSED IN PLACENTA, SIGNAL = 1.4; EXPRESSED IN ADULT LIVER, SIGNAL = 1.7; EXPRESSED IN HEART, SIGNAL = 1.6; EXPRESSED IN BRAIN, SIGNAL = 2.8; EXPRESSED IN BONE MARROW, SIGNAL = 1.8; EXPRESSED IN LUNG, SIGNAL = 1.1; EXPRESSED IN HELA, SIGNAL = 2.3
gcacctgatcacccaagaactctgatggagatggacaaggagattaatgtttacatgcctgctaatatgccatccattctacagcccatggaccaagcagtgatcttgactttcaagttttattattcaagaaatacatttcacaaggctactgctgccatagatagcaagttgcctgatggatctgggaaaaataaaatgaaaaccttctggaaaggattcaccattctagaggccattaagaacatttgtgattcataggaggaggtcaaaatagcaatattaacaaaaggttgtaagaagttgatttcaaccctaatgcatgactcagaggggtccaagacttcagtggagaaagtcattacatatgtggtgaaaaccgcaagaaaactagaagtagaagtggaccatgaagacataggtgaatggctgcaatctcatgataacactcgaatgaatgaggagttgcttcttatgaattaaaatagaaagtggtttcttgaggtggtatctaccttgtggtatctactcctgccgaagatgctgttgttgaa

SEQ ID NO: 7628 - DNA, 518 bp, Homo sapiens
  MAP TO AL161646.3; EXPRESSED IN PLACENTA, SIGNAL = 2.3; EXPRESSED IN FETAL LIVER, SIGNAL = 2.2; EXPRESSED IN ADULT LIVER, SIGNAL = 2.3; EXPRESSED IN HEART, SIGNAL = 2.1; EXPRESSED IN BONE MARROW, SIGNAL = 2.4; EXPRESSED IN LUNG, SIGNAL = 2.1; EXPRESSED IN BRAIN, SIGNAL = 2.2
gcctccagaatagcaaccagacaggcggcaccttcacagccattgctgtaccttgctcatctgttacccttgcgaccctcagctgctccccctttgttgggtaaatgatcacagagtgaagaaatggcttattcttcaagcaccgctcctgtcacttgtgactatcaagtggttgtaatcctcaaagctatagaatttgtgaagaggccaagaaattatctagttatttccaatttctttcttcaccacagaaccattatttcaaatggaacccttacaccacccactgcaggagaaagtgaggtcttgccccagatgaggcaggaagggaagaccagagctggatggaatccgcctcctcctcatcttccccctctccccactaggctcagccccatcccaggagccactagcagccacagcccaccccagacacatccaggaggcacacatccgtggcagcccctgcttccaggtgggctaaggctcaacctccttcccatccccagactctgtaa

SEQ ID NO: 7629 - DNA, 509 bp, Homo sapiens
  MAP TO AL132654.12; EXPRESSED IN PLACENTA, SIGNAL = 2.1; EXPRESSED IN HELA, SIGNAL = 3.3; EXPRESSED IN HEART, SIGNAL = 2.3; EXPRESSED IN FETAL LIVER, SIGNAL = 1.9; EXPRESSED IN LUNG, SIGNAL = 0.93; EXPRESSED IN BRAIN, SIGNAL = 1.9; EXPRESSED IN ADULT LIVER, SIGNAL = 1.7; EXPRESSED IN BONE MARROW, SIGNAL =   2
aaccacatccccaaagactgggggtttaacttagaaagagtgtcaagttagaaaatcataaaattctggaaactgtaaagacagggtgttcctagacctcatcagactcccatcaccatgataccatcacaactgaaggctgaatgtaatgaattctggagacaacctaacttcacatgagaacagaaatatactcgccctccaagctaccggctttaccttttgaaaactttacccagtgggtggctgagcatgcccctttggccactggcttttacctcttttgggcttccttgttgatgaggtccatttctgaggttctcctgaacatctcttcctgaacccaatatccttggttacctggtcccagaatttcaggccggcacagttccttgcggttgcagcgctggtaaacagtgaccagacgtctgagacgagctgtgagggcggaggaaactggccagggcgatttgtctgggtcggagccatcctgggcttcaaacatcagt

SEQ ID NO: 7630 - DNA, 553 bp, Homo sapiens
  MAP TO AL121771.17; EXPRESSED IN PLACENTA, SIGNAL = 1.3; EXPRESSED IN FETAL LIVER, SIGNAL = 1.5; EXPRESSED IN BRAIN, SIGNAL = 1.6; EXPRESSED IN LUNG, SIGNAL = 2.7; EXPRESSED IN ADULT LIVER, SIGNAL = 1.9; EXPRESSED IN HEART, SIGNAL = 1.6; EXPRESSED IN BONE MARROW, SIGNAL = 1.4
aaacaacgggatgagcaaaggttccaactcgatttcttacattgtggctgaatgctttaaggtgcttatgatttatgccatagaaagtgaggagcgtagagagcaaataacaggcaggactcacccgtgtgggatcgcaggtggacagtgagctggctggagttgcggctggcgtaggggcagatctggcatttgaagggccgctcgtccgagtggatcctcaggtgcttgttgaggctgctgctgtcggcagcggcgtagtcacacgtcttacacttgtagggcttcacgcccgtgtggcaccgcatgtgagttttcagcttgtctttccggctaaagcacttgccacagacttcacacttatggggtttgtctccttcaaacacatacacacacagatggcagcaggaaacaagattaaaaaaggaaaaggcttatttcccactgccttacgaaaaaagtcatatacaaccaccgaagaatattccaaaaaccctaaaacactgggtggatgattggcaaagagctaacatcttgggagaggggaagtttc

SEQ ID NO: 7631 - DNA, 524 bp, Homo sapiens
  MAP TO AC018761.2; EXPRESSED IN LUNG, SIGNAL = 1.1; EXPRESSED IN ADULT LIVER, SIGNAL =   2; EXPRESSED IN HEART, SIGNAL = 2.6; EXPRESSED IN FETAL LIVER, SIGNAL =  14; EXPRESSED IN BRAIN, SIGNAL = 5.1; EXPRESSED IN PLACENTA, SIGNAL = 0.89; EXPRESSED IN HELA, SIGNAL = 2.9; EXPRESSED IN BONE MARROW, SIGNAL = 7.7
ccattattttcacgatggggaaacgcaggttccagaggttgagcaatggccacgaagccacactgctaggacctgagggtgtgagcttagctgcaacctccctctttggcccctgctcataccaagccaggtgggtgaactgagagtccaccgagacgcccagcacttcacagcccagcttgcggaagtcctctgcacggttgctgaacgcgatgatctcggtggggcacacaaaagtgaagtccagagggtagaaaaagaggaccacgtacttccctggggaggagggacacagaggagttagggcccagcttctctcatgcacggccccgcttctacctgggccccctccgggcggcgctcacctttgtagtccgacagcttcacctctttgaaggcgccatcaaccaccgctgtggccttgaagtcaggggctggctttccgatgcgcgcgttaccggaggccatgactgaaagctgagacccccgcccggtcagtgcgcccgggaagacactttgtcctc

SEQ ID NO: 7632 - DNA, 579 bp, Homo sapiens
  MAP TO AC024575.1; EXPRESSED IN LUNG, SIGNAL = 2.2; EXPRESSED IN ADULT LIVER, SIGNAL = 2.5; EXPRESSED IN HEART, SIGNAL = 2.1; EXPRESSED IN FETAL LIVER, SIGNAL =   2; EXPRESSED IN BRAIN, SIGNAL = 4.4; EXPRESSED IN BONE MARROW, SIGNAL = 2.4; EXPRESSED IN PLACENTA, SIGNAL = 2.1; EXPRESSED IN HELA, SIGNAL = 3.4
gactgctgtccctagccaagcccgccctccctgtttgtcatctcacccgagccctcctagtccctaccattagataggccttgagctgcaggtacacgctggtaatgtgctcggcctcctgcgccttcatctgggccttctccaggcggttctccaggttccgcatggtctggagagcagcagggctgggctgagggccctccgcactcaatccctcccacacgaccctctgccctgcaggcctcacccgcccctaccttggccacctccgtgtgtctgttttggcgcctccgccatctccagaaggcgcaggctgtgctgcagctggagctcctccagccgcctctgccgcaacaccacctggtgccgcagggcgttctgctgcttcaccttctccctcagccggtggtctaggtgctccagggcctgccgcaaggaggggagcgaaagcaggagcctcaacaccctaccccgacacacacctagcccttcctcccttccttctcccacactgtggcttccaggactcccctctcccgttttctacccacctccctggccaccccttctgtgttgttt

SEQ ID NO: 7633 - DNA, 552 bp, Homo sapiens
  MAP TO AC025588.1; EXPRESSED IN ADULT LIVER, SIGNAL = 1.2; EXPRESSED IN BONE MARROW, SIGNAL = 1.2; EXPRESSED IN FETAL LIVER, SIGNAL = 1.6; EXPRESSED IN BRAIN, SIGNAL = 1.3; EXPRESSED IN PLACENTA, SIGNAL = 0.87; EXPRESSED IN HEART, SIGNAL = 1.4
taatggctgggagaatccaggaagcctggaaaatgttggggctttttaggaagcataataagatccctagaaatgagttgctgaatgagtttatggacagtgcaagagtgtctaacagcccctcccaggccactgaggtagtagaggtggctcagcttacctatttgtgagggcctcacccagagagtaatgactgactttgcaatcaaccaggaacaaaaggaagccctaggcaacttcactgcattgaccagtaacagtgatactgacagcagcagtgacagcgacagtgacaccagtgaaggcaaatgaaagtggagattcgggagcagcaatggcctcagcgcagctgctggaatcacacctgagagcgagatatgctaatatttaacactgttacaaagaagacaagatacagattgggtgaatttgttactgtgagatacagtcagtacacagctgatttatgtagatttaagctcctaatttgcaacttaataactgtctattaatacaccattaaaggtttagcatttaagtagcaacatggcc

SEQ ID NO: 7634 - DNA, 512 bp, Homo sapiens
  MAP TO AC011472.3; EXPRESSED IN BONE MARROW, SIGNAL = 5.6; EXPRESSED IN PLACENTA, SIGNAL = 4.9; EXPRESSED IN ADULT LIVER, SIGNAL = 5.2; EXPRESSED IN HEART, SIGNAL = 5.1; EXPRESSED IN BRAIN, SIGNAL = 5.7; EXPRESSED IN LUNG, SIGNAL = 5.4; EXPRESSED IN FETAL LIVER, SIGNAL = 5.1
gaaaataggcgaaggggaagacaggtggggagatagatgagggatggccaggtgagggaatgagtgtggggatggggtacaggtgaggagattggctggtccttggggcggacatgggggtaacagtgaagagaatggacaagtgggaggcaggtggggaggaccaggtgagtcccctcctcacatcccccctcacctggactccagaattgcccggggctaccagggctcaccggaccttcggctgacctggttgcagaacatggccgggaagcacgcggacgtgggcaaccacgccgaggccgcccagtgcatggtgcacgcggccgccctcgtggctgagtacctcgccctgctcgaggaccagcgccacctgcccgtggctggcgatttccttccaggtgagtggccaggggttggcaggtggcggacggcacgagtgcagtggggaccagggtctgacgccacctctcccaccccagaacatctcatccaacgtgctagaggagtcc

SEQ ID NO: 7635 - DNA, 532 bp, Homo sapiens
  MAP TO AC015599.3; EXPRESSED IN PLACENTA, SIGNAL = 1.8; EXPRESSED IN ADULT LIVER, SIGNAL = 2.4; EXPRESSED IN HEART, SIGNAL = 1.5; EXPRESSED IN FETAL LIVER, SIGNAL = 1.7; EXPRESSED IN BONE MARROW, SIGNAL = 1.7; EXPRESSED IN LUNG, SIGNAL = 2.2; EXPRESSED IN BRAIN, SIGNAL = 2.1
gcatctagcaaagcagtcccctgacctgcatgccatgggcatcaactcccagatgacacattcacttcaaagactacttacggtaatagtcatcattaggaaaataagcacttttccagatgggtgagagctgaataaatatgtgctatttccaagtaaaaactgacccagtgaaacctgatattagcagatacacctcttcataagaaattgacatgttcagccctttggcagcatttacctgcttctccttcctcctcacccaaattcagcacgataatgcagatgtgcttccgcagctggcgcgtgttggagaacttccgacagcacttgctacactccaagctgcttggaggcaggctgttcccttcctccggagccagcgggctgtcctcagtcggactcacgatgttttctgccagctcctcttctgtgctggacttcttcgtggaccccttaggcctgcctctcttcctcttcatgaccaaaaactctacagaggaaacaagagggcacaatggaatcacgtgag

SEQ ID NO: 7636 - DNA, 543 bp, Homo sapiens
  MAP TO AC018761.2; EXPRESSED IN PLACENTA, SIGNAL = 1.4; EXPRESSED IN ADULT LIVER, SIGNAL = 1.8; EXPRESSED IN HELA, SIGNAL = 2.5; EXPRESSED IN HEART, SIGNAL = 1.4; EXPRESSED IN BRAIN, SIGNAL =   2; EXPRESSED IN BONE MARROW, SIGNAL = 1.9; EXPRESSED IN LUNG, SIGNAL = 1.6; EXPRESSED IN FETAL LIVER, SIGNAL = 1.8
ctcagtctcatccctttggcccccaggagattgaccccagcctgggcgtggcggagctgcctgacgagttcttcgaggaggacaacatgctgagcatgggcaagaagatgatgcaggaggccatgagcgcatttcccggcatcgatgaggccatgagctatgccgaggtcatgaggtcaggcccagccagcaggggtgggggctgcctggggaaggggaagagcggacacagagggcctgacccctgtctcccctcaggctggtgaagggcatgaacttctcggtggtggtatttgacacggcacccacgggccacaccctgaggctgctcaacttccccaccatcgtggagcggggcctgggccggcttatgcagatcaagaaccagatcagccctttcatctcacaggcaggcggcgggggcccccacctgcaccatccaggcagccgggagtgggagtaggcccgggcccccagaccctcaaatgcgcactaacaattccctttccttcccaccccttctcactctggacttctccctgg

SEQ ID NO: 7637 - DNA, 551 bp, Homo sapiens
  MAP TO AL161752.1; EXPRESSED IN HELA, SIGNAL = 4.3; EXPRESSED IN HEART, SIGNAL = 3.7; EXPRESSED IN BONE MARROW, SIGNAL = 3.9; EXPRESSED IN BRAIN, SIGNAL = 3.4; EXPRESSED IN FETAL LIVER, SIGNAL = 3.8; EXPRESSED IN ADULT LIVER, SIGNAL = 2.8; EXPRESSED IN PLACENTA, SIGNAL = 3.5; EXPRESSED IN LUNG, SIGNAL = 1.9
aatttgctggattggctcacaaaaatcagggaacacttaggtttatcatttattgtcaaggatattacaaaggatacagatgaagagactcataggatgaagtatgtgaaaaggggcacagagcttccatgtcctccctgggcctaccctcctccagaaacctccatatgttcacctatccagaagctctttgaactgtgtcctcttgggtttttatagagacttcactaagtaggcctaaataattaaaccattggccattgctgatcagcttgaccttcagtccttacctttctcaggagtctgggggttggggctgaaagtcccaacactttaattatgcctttgtctcaggtgatcatccccaccctgaagctatcagccaacattagcatgcaaaaagatagcactttggaaattccaaggatttttaaagttgtataccaggaaacatggatgcagaccaaacaggtattttaaatatcacaggggtacacaatcaaagatgattactcccgtaagagcagacatgtggggaaaaggccatactt

SEQ ID NO: 7638 - DNA, 557 bp, Homo sapiens
  MAP TO AL160471.1; EXPRESSED IN LUNG, SIGNAL = 2.7; EXPRESSED IN BONE MARROW, SIGNAL = 8.2; EXPRESSED IN BRAIN, SIGNAL = 4.8; EXPRESSED IN FETAL LIVER, SIGNAL = 8.4; EXPRESSED IN HELA, SIGNAL = 6.3; EXPRESSED IN ADULT LIVER, SIGNAL = 1.8; EXPRESSED IN PLACENTA, SIGNAL = 0.99; EXPRESSED IN HEART, SIGNAL = 2.9
caggaatactggtccgaaggccatgctgaagtttgctgctgccactggagtcactccagttgctggctgcttcactcctggaactttcattaaccagatccaggcagccttttaggagccacagcttcttatggtgactaatcccagtgctgatcaccagcctctcacagaggcatcttatgttaacgtacctaccattgctctgtgtcacacagattttcctctgtgctatgtggacactaccatcccatgcaacagcaagggagctcactcagtgggattgatgtggtggatgccgatccaggaagttcgcatgtgtggcaccatttcctgtgggaggtcatgcctgatctctacttctacagtgttcctgaggagattgaaaaagaagagcagcctgctgctgaaaaggctgtgaccaaggaggaatttcagggtgaatggactactccagctcctgagttcggtgctcctcaacctgaggttgcagactggtctgatggtgtgcaggtgccctctgtgcctatttagcagttccctcctgaaaactggagtgc

SEQ ID NO: 7639 - DNA, 585 bp, Homo sapiens
  MAP TO AC007687.16; EXPRESSED IN LUNG, SIGNAL = 1.9; EXPRESSED IN ADULT LIVER, SIGNAL = 1.8; EXPRESSED IN FETAL LIVER, SIGNAL = 2.4; EXPRESSED IN BRAIN, SIGNAL = 3.1; EXPRESSED IN PLACENTA, SIGNAL = 1.6; EXPRESSED IN HELA, SIGNAL = 2.9; EXPRESSED IN HEART, SIGNAL = 1.9; EXPRESSED IN BONE MARROW, SIGNAL = 2.6
tttcatgcatccctctttcctctagggccacaagcagcctccaagtcaaatttctgaccccctgttaacaaacattcaagatgatatcaagtttctttcagtttgctcatattaccccagatttatttatctcattcgctgtgtgaaaatcattcattttagctttatatttataatatgcaaataaatctttatgggctatgatgagattcacagttagatgaatcaaacatgaatcaaaatgatcaaagtacattggaaagtctcaactgctacagaaataaattcacacacacacacacacacacacacacacacagtctctcatgctcaccgttgctcgtagtgcctgaatagcctgatttcgctgaaatcccatggaggtgatgatagctacgatttcctctggaggttggttatccagtccagaagcaccaaaaacagaggctccagcagaagctgcccctccataaccaggcatggtcagcggctcagcaaaatctgagaaaaataaccacacccaagtcttttcctttttttttttttttttttgtcctgaaacaacactaacaaggaaaaacatga

SEQ ID NO: 7640 - DNA, 512 bp, Homo sapiens
  MAP TO AC016224.6; EXPRESSED IN PLACENTA, SIGNAL = 0.85; EXPRESSED IN ADULT LIVER, SIGNAL = 0.68; EXPRESSED IN FETAL LIVER, SIGNAL = 0.69; EXPRESSED IN BRAIN, SIGNAL = 0.69; EXPRESSED IN BONE MARROW, SIGNAL = 0.65; EXPRESSED IN HEART, SIGNAL = 7.1
caaggaagggaagggagaacatcaggacaaatagctaatgcatgcgggccttaaaacctagatgacaggttgataggtgcagaaaaccaccatggcacacgtatacctatgtaacaaacctacacactttgcacttgtatcctggaacttaaagtaaaataaaatatatttaaaacaagaagttttaggttccatataaatcaccgaatgctctagaaatcacccgagtgctatttactttcaatattctagaggttggatcaagaacaaggccctgaggagtctcagccagaaactgacacctcagacatggatcctttagttggttttaccattgaagatgtaaaatcagtgctggatcaagtcacagatgacattttaatcggcattcaggtactcagtattgatagtatgctcacttactttattactggttaattagccaaccttaactttaatgtctataaacactccccacactgccagcatgagcgatgcttatgacgaagttc

SEQ ID NO: 7641 - DNA, 511 bp, Homo sapiens
  MAP TO AC022174.2; EXPRESSED IN LUNG, SIGNAL = 1.2; EXPRESSED IN PLACENTA, SIGNAL = 1.2; EXPRESSED IN FETAL LIVER, SIGNAL = 5.6; EXPRESSED IN BRAIN, SIGNAL = 1.1; EXPRESSED IN ADULT LIVER, SIGNAL = 1.3; EXPRESSED IN HEART, SIGNAL = 1.2; EXPRESSED IN BONE MARROW, SIGNAL =   1
tgacctagacagatgccacgtaaacagatgaatgtgagggtgacctgcacgccccctgcgtcaggggtcctagatgaaggatataatggcatttacctatgccatctgtcctccctattgtcagtagcctttgcgttccctagacctcatttatgccatggatactagcatgacctctatccatgaaatgggggcttaatcagcaataattagtcatgctcacctgtgctgtgtccattgacttccattgtcctgtgcctctggatccctcagatccagtttcccttactagggctttagcctgaaggttgaaattgagtttgaggcaaaaatgtgtctcaggaaagttcacatatttatttaagtgaagtcccagacagccctcaccaaatttgcagccagcagctggcgaggtctctcctctgttgcttccctatcataagcagagtgctaaggtaggaaaaaaacctcttgcatagaaaagctccctgcatttgcagggctgtgttaa

SEQ ID NO: 7642 - DNA, 535 bp, Homo sapiens
  MAP TO AL158150.2; EXPRESSED IN ADULT LIVER, SIGNAL = 0.61; EXPRESSED IN HEART, SIGNAL = 2.6; EXPRESSED IN BONE MARROW, SIGNAL = 0.64; EXPRESSED IN PLACENTA, SIGNAL = 0.88; EXPRESSED IN FETAL LIVER, SIGNAL = 0.81; EXPRESSED IN BRAIN, SIGNAL = 0.65
gggcactggtggtgatagactctggggccgtgaggaaaggaggtcaaagatgaatacaggtgtctgagttgggtgagaaggaattgatggtacccttctcaaaagtgggaaatagaggagaaacagttcgggggaggagggaaggcaggtagagtagaacaggacttctcagcaaatgtttgtagagttgggttgagcagaaaacataagccttatcgcaagccaaggaccccaacagcatgcacttgcttccttacaggagagattttgggcctcacaaagtggcaccagtgaaggtccaccagtatgaccagttcgtcccgagtgaagagaatatggatttgctcacgacgtataagaaagattacaatccctaccctgtctgtcgagtggaccccatcaaacctcgggacagtaaatatccatgtagcgacaagatggagtgtttgcctacttataaaggtgggagagcacagaggggcagattgggggaaagacaggctgagcctgtgtgcgggccaggaaatgtgtttta

SEQ ID NO: 7643 - DNA, 569 bp, Homo sapiens
  MAP TO AC019275.3; EXPRESSED IN LUNG, SIGNAL = 2.2; EXPRESSED IN PLACENTA, SIGNAL = 2.7; EXPRESSED IN ADULT LIVER, SIGNAL = 2.7; EXPRESSED IN HEART, SIGNAL = 2.2; EXPRESSED IN BRAIN, SIGNAL = 2.4; EXPRESSED IN HELA, SIGNAL = 3.6; EXPRESSED IN FETAL LIVER, SIGNAL = 2.8; EXPRESSED IN BONE MARROW, SIGNAL = 2.6
ctctcaccaaaccaggcatccacagacaaaagagcaaaacaaaagactcaggaaaatttacattaagttttaagtgacacgaggaagagtttgtctaaagaatgcctatacatttcagtcctcaggtccagcttgtgaaaacagacatttattggggcctgtacccattctttccctaggaacattctccttaagggcatgttacaaagacatatttgacaaggacaaagacaagtaatgttattagtacaaaggcagatttccaccaagataaaagttactttatcagataatgaaaagattcctaaaactagttcctaagtactgggaggcaaaaataaagctgagattttttcaacaaaaagtattcagagcttggcccattgcaatatttacctccctgttatggtcagagataccctttgcccaccaaatgcgaggcttaaacgatttctgaagagtgtactgtccagagccttggggccatcatgaagagccttggagcccttcattggttcttggtaaaacctataagatcattgaattcggcctccctgaaaagttcacca

SEQ ID NO: 7644 - DNA, 592 bp, Homo sapiens
  MAP TO AL136124.3; EXPRESSED IN LUNG, SIGNAL = 1.3; EXPRESSED IN PLACENTA, SIGNAL = 1.3; EXPRESSED IN ADULT LIVER, SIGNAL = 1.1; EXPRESSED IN HEART, SIGNAL = 1.3; EXPRESSED IN FETAL LIVER, SIGNAL = 2.9; EXPRESSED IN BONE MARROW, SIGNAL = 1.3; EXPRESSED IN BRAIN, SIGNAL = 1.2
tcacgagaacagatggttgctccttcaccactgtatccccagcaccactgggagatactcaataaatatttttcttaaattatataatttcttaatatataattatataatttcttaaatatatataatttctaaattatataaaaagttttctctttgttttaaaaagacggaagtttcctctctagaactctaaataccaatgctatatcaagcaagataccaagagaaacaacttatcctcaccatcttgggcactggaacctttcaacctgcatgtgttcaacagcttcaacagcagctggaggcatctgtcagtcttcagcaagggcatgtaggcattggtactaaacttcataagcacatccagaagagggtctaagaatatccgcaatacattctctgttctctgctttccgctagacattaaaagacatgccaaaatcaaccatttcaaaagcataagcaaattgcttcccacctataattgggtgaaaactggttagctaatggatccaattagacaaagttactctcatgaaagacccagacaaccagcagctatgaggactcatcttctggtccgtgcttt

SEQ ID NO: 7645 - DNA, 523 bp, Homo sapiens
  MAP TO AC021677.3; EXPRESSED IN LUNG, SIGNAL = 7.9; EXPRESSED IN HELA, SIGNAL = 6.2; EXPRESSED IN HEART, SIGNAL = 6.2; EXPRESSED IN FETAL LIVER, SIGNAL = 8.2; EXPRESSED IN BRAIN, SIGNAL = 6.2; EXPRESSED IN PLACENTA, SIGNAL = 4.3; EXPRESSED IN ADULT LIVER, SIGNAL = 8.8; EXPRESSED IN BONE MARROW, SIGNAL = 7.1
agcagagagcaggtgagaggaagaaattggcatattccttcccgaacttttatgggcattagctccttcgacacgctccaaatgtacgactgtacacatgatttcactgaatcctcatggcaagtcaatgaggtggatattttcttaatttcgctcatgaaaacaacatttgagactggtttagtaaattgccaaatgcggcctctgaggatgtgtccttgagtgtgaatttatacccagttctgtctcattccaaagccatgttctttctcagtccccttactctgatcctggtgtttgctcccaaggtccccttcctgtcctttcttcttttcttcgtgtctgttgtattttggggggtgctgctgcctctcttttatagaccaaatgatgctctttctccttattctgcctgaagcagctcagttttatcttggacccatggttgtaggtagctgtcaaggtcaatggtgtgtcctgcaaatgggtgactgggatcctctggtctccccttctacggttc

SEQ ID NO: 7646 - DNA, 587 bp, Homo sapiens
  MAP TO AL080312.14; EXPRESSED IN ADULT LIVER, SIGNAL = 1.5; EXPRESSED IN BRAIN, SIGNAL = 0.98; EXPRESSED IN BONE MARROW, SIGNAL = 0.95; EXPRESSED IN LUNG, SIGNAL = 0.97; EXPRESSED IN PLACENTA, SIGNAL = 1.3; EXPRESSED IN HEART, SIGNAL = 1.2; EXPRESSED IN FETAL LIVER, SIGNAL = 1.1
gtcacccactagggacatggggagggggcacactttagctgatgtacgtgtcctcccaggcaaagtcccgctgagtaccgtcacccctgaaatcaccacccacccactctcggccccagcagccatggggccacccatgtcctgcccttcttcaaatctgaaaccctttgctggccttccttcacctggccctgacctgcagctgaaacggaccctcatcctccagacacccctctggttttcatcccacatgcccctctccacgcccagcagcccagtggaggagaagtgtgactgcattttgcaaatgagaaaaccaagggtgggagaggtggagtgacaggctctaggtccacagccagggtcaggctgggcagagcacagcctcctgcctccaccaggtcctgggccctggcccctccccctgccagggacagggcaggcagggcacagcctcccgcctccaccacttcccagaccctggctcctccccgtgccatgtcctcaccagtcccccactcctgccttcgccacacttccccttcctctgcctctcaaaactcaaccctccacaaagccttctccac

SEQ ID NO: 7647 - DNA, 518 bp, Homo sapiens
  MAP TO AL160404.1; EXPRESSED IN LUNG, SIGNAL = 1.4; EXPRESSED IN ADULT LIVER, SIGNAL = 1.1; EXPRESSED IN HEART, SIGNAL = 1.2; EXPRESSED IN BRAIN, SIGNAL = 1.1; EXPRESSED IN BONE MARROW, SIGNAL = 1.1; EXPRESSED IN PLACENTA, SIGNAL = 1.2; EXPRESSED IN FETAL LIVER, SIGNAL = 1.1
aaaaacaggaggatgggggggaatagtactaaatgaaatagtgaggttataattacttgttcctcatcttactttcttcactataaccatcatcattttctatctctttcctatctccccagctccagaacacagccctaacagaagtccaagtcagcactggtaaaatcaactgcttatcctcagttggcaaaaagctagtaacaacatttttactccatctattctcaaaaatgttttctgccttgggcttctttatcttgtctactgcctccttctcctccttaatgccaactctccctttgatttccattaaattgcctgctccaagtttcattttcttccattcttccttatcctccttactgtctcctcctcatttctctttcttctaaatgtagcatttcctcaaaactctatgttaggaacttactctttctctatagcctctttccctataatcccatccattatcatagcttcaacagtttaaacctcctcacccatagcccaatgtt

SEQ ID NO: 7648 - DNA, 553 bp, Homo sapiens
  MAP TO AL158198.3; EXPRESSED IN PLACENTA, SIGNAL = 3.8; EXPRESSED IN FETAL LIVER, SIGNAL = 3.1; EXPRESSED IN BRAIN, SIGNAL = 3.4; EXPRESSED IN BONE MARROW, SIGNAL = 3.7; EXPRESSED IN LUNG, SIGNAL = 4.2; EXPRESSED IN HEART, SIGNAL = 3.6; EXPRESSED IN ADULT LIVER, SIGNAL = 3.9; EXPRESSED IN HELA, SIGNAL = 3.8
agctctccttgcacttgaccaaggcattcattgtaaatctcacaatagaacaggggccctgggtgagaaccagctcagctccagatgatccctgtctcctgagggattaagtaaggccccataaacctacaggacattctgtgtctcccattttatacatactcctgtaaagggtcaagcatggtttttagaattgagtatttggggccctgttaagatgttctcaattcagacatatgatggtgataaggacaaaggcatgggggatgaccatgaaaactttcacctcttccttccccagcccattttcaagaatgaggaagtgtcctgggagagaaaacagaaagagagggggtaagaaatactcagcactaagtacttgggcttttattttctgtataagtagaagaacttcttttcagctatgctcagtactttcttaggatgtgtcatttaccggaaataaaaacatcttgatcagctgaaacagaaagggtgattttggtttttttcaatgtaactggaatatttttgggaactgccaaaattttca

SEQ ID NO: 7649 - DNA, 596 bp, Homo sapiens
  MAP TO AC012308.4; EXPRESSED IN ADULT LIVER, SIGNAL = 0.82; EXPRESSED IN BRAIN, SIGNAL = 1.2; EXPRESSED IN LUNG, SIGNAL = 1.2; EXPRESSED IN PLACENTA, SIGNAL = 1.1; EXPRESSED IN HEART, SIGNAL = 1.2; EXPRESSED IN FETAL LIVER, SIGNAL = 1.3; EXPRESSED IN BONE MARROW, SIGNAL = 1.1
cacagcacgcagaagatttgcttgaaataaagtgccttttttaagactattaatgactataaatcagaattttatttaatctgtactggtgttttatcttagttccttatatttctcatcagttacaactagcatttccacttgctgctggctgtaatccagacatcagatcttggttaaagaaataaatttaatataaaaccttatttaatgaatccactaattgttatgtcctgctgtgagtgttgatgaatatgtaagacaaaaatatacttaatttgtctattgtttaaaaatccaagatactcatttggctgcttttaaaataactgtttttatattttgtcttagctaaataaagaaaataaaacgttgaaaagaatcagcatgttgtacatggccaagctgggaccagatgtaataactgaagagataaacattgatgatgaagattcgactacagacacagacggtgccgccgagacttgtgtctcagtacagtgtcagaagcaaattaaaggtagaactctttgcttaattattgagcatattttttaccccgttatgatagtgcttctgaaccctgactgcacatc

SEQ ID NO: 7650 - DNA, 510 bp, Homo sapiens
  MAP TO AL109824.21; EXPRESSED IN LUNG, SIGNAL = 2.3; EXPRESSED IN PLACENTA, SIGNAL = 4.5; EXPRESSED IN ADULT LIVER, SIGNAL = 2.5; EXPRESSED IN FETAL LIVER, SIGNAL = 2.4; EXPRESSED IN BRAIN, SIGNAL = 2.6; EXPRESSED IN HEART, SIGNAL = 2.2; EXPRESSED IN BONE MARROW, SIGNAL = 2.6; EXPRESSED IN HELA, SIGNAL = 2.4
tccagatctgtaagcccagggggtttaattgtcacattgggagctccagagttgtcaagaagttgacttaacgatgttggtgcttccctcatagcaggagacaccaaatttttgttctcttcgacactgggaagtttgttaggatccgaaggctgcccatcctttttggactgatcttcagggacaaccattttaacttcttgggcagggactgcttttagttcaatgtttacctgttccttcctactctgggaattctggcaatcactgtcctgaggcacattcaagctctccttgttatcctcaacaacacccccaactgcagccacagacacagtagaattctgaggattcagcccactgttgttaggaaagctcccaggtacagggggattggccagaggagtgggactgaccaatacatttctcggcaactccacattctgcaatagggctgcatttgtctgagaggccagagtaagtttaggggcttttgaattttgcctccca

SEQ ID NO: 7651 - DNA, 545 bp, Homo sapiens
  MAP TO AC016790.3; EXPRESSED IN LUNG, SIGNAL =   2; EXPRESSED IN PLACENTA, SIGNAL = 1.9; EXPRESSED IN ADULT LIVER, SIGNAL =   2; EXPRESSED IN FETAL LIVER, SIGNAL = 1.7; EXPRESSED IN BONE MARROW, SIGNAL = 1.6; EXPRESSED IN HEART, SIGNAL = 1.8; EXPRESSED IN BRAIN, SIGNAL = 1.7
caggacaagacatcccaagctactggaactaaaatgcagagataatataaactgtacaattacgtacttttcaggtgataaactacatatctatggtattgaagcataaagtcacagcaagaatttttgtatggttatatttaccttctttatgcacagtgagaaaaacactctgagagtagatgacccaatttttcttgtttcttatgccctcaaaatatttcgtgcatttcatcagcacccctattcgtatgaagaacatgttggcctaaaataaatgccggaatatcaagagaaattctaaagatgcaacatcagcatctcaaaaatgggacgcaagtaaaatgaccgatttttaaaagaatatatatctttgttagggatttaaaacctttgtacatatacgctgtttaaaaaaaaaaaagtcatctttaaaaaatgtaaaaaaaaaatcagtgaaaaaggtaagccacatggtggctgtgttttagcagaacccacgcattgccattagttcaccctatgggcacggtcatgttaacaca

SEQ ID NO: 7652 - DNA, 543 bp, Homo sapiens
  MAP TO AL121881.25; EXPRESSED IN HELA, SIGNAL = 3.8; EXPRESSED IN LUNG, SIGNAL = 2.2; EXPRESSED IN ADULT LIVER, SIGNAL = 2.7; EXPRESSED IN HEART, SIGNAL = 2.6; EXPRESSED IN FETAL LIVER, SIGNAL = 3.3; EXPRESSED IN BRAIN, SIGNAL = 2.6; EXPRESSED IN BONE MARROW, SIGNAL = 2.5; EXPRESSED IN PLACENTA, SIGNAL = 2.2
gtgttgagaggggaatctggtgggggatgatctggataatgggggtggtttctctcatgctgttatcatgataataagtgaattctcacgagatccgatggtattgtaagtgtttggtaagtttctcatccgcttgctggctctctcaactgccaccatgtaagatgtgcctgctttcccttccaccatgattgtaagtttcctgaggtgtcccgagacatgcagaactgtgagttgattaaacttcctttgttcatgaattacctcgtcttgagaatatctttatagcagtgtgaaaatggactaattcagtaaattgatagcacagagtggggcgctgctataaagatacttgaaaatgtgaaagtgactttggaactgggtaatgggcagaggttggaacagtttggagggctcagaagaaggcaggaagatgtgagaaagttcggagcttcctagagactcgtatggttttgaccaaaatgtggatagtgatgtgaacagtgaagtccaggctgaggtggtctcgggtggagatgagaa

SEQ ID NO: 7653 - DNA, 574 bp, Homo sapiens
  MAP TO AL078646.29; EXPRESSED IN ADULT LIVER, SIGNAL = 1.8; EXPRESSED IN HELA, SIGNAL = 2.7; EXPRESSED IN HEART, SIGNAL = 1.7; EXPRESSED IN BRAIN, SIGNAL = 1.6; EXPRESSED IN BONE MARROW, SIGNAL = 1.8; EXPRESSED IN LUNG, SIGNAL = 1.9; EXPRESSED IN PLACENTA, SIGNAL = 1.6; EXPRESSED IN FETAL LIVER, SIGNAL = 2.2
tattgctttgctggtagggcctggggtttttatgggtacaagatggagggtggggcgggccggggtggttttggaaaaggcaacattcgggcaggaaaacagaaatgcatgttctcactttgggccctacggttccaggcttgagggtgtggcgtttgctagggaccactctctcctacccagtatttccctgcctcctgtttgtatcataaagtgtatttaaaataagctattataaaggatgaggaaaatacttgacaatgtctgtcattttctttctttgccccagaagattgtcttatgtggccccactttggagactaccactcttggggctgccgtggtcacaaaaacccagattattgttttaactctatttcttgccttggttcatcgtactttggggaagaatctggaatttgtataaagtataccacccaagtggcagtcccagctggaagtcatggaatgggggcaagaacaataacctgggagcacgggatctgggttcggaacaaggatgatggccgggagctctaggctcagctgtgccaccagtcctgtggccttagac

SEQ ID NO: 7654 - DNA, 591 bp, Homo sapiens
  MAP TO AC013746.4; EXPRESSED IN BONE MARROW, SIGNAL =   4; EXPRESSED IN LUNG, SIGNAL =   6; EXPRESSED IN ADULT LIVER, SIGNAL = 5.6; EXPRESSED IN FETAL LIVER, SIGNAL = 5.2; EXPRESSED IN PLACENTA, SIGNAL =   4; EXPRESSED IN HEART, SIGNAL = 3.8; EXPRESSED IN BRAIN, SIGNAL = 3.2
tttaagatgtggcagggaggaaaaggttttcatcttcgaaattaaccagcctacacacatccttttttgttttggatgaaaggaaaccagatactgagactggtaattgaattatcttagacacacttgaggtacgacagttgaatgttgcaaacagagaaatacgtacattgatcctggttctacacttggaccacgaataaaaaaaggcacacgaatatcaaagtcatatggcatggatttccccttgaccagtccaaactgcccaatatggtaaccatggtcggcggtgtaaatgatgtaagtattctccagctcccccgtctccacgagcatgttatacagctgaaatacagcaaaggaacaagtcagaatcaattgtgctggtataagatgatgctcaatagtgttgccacgattgcccccaaatctttttcctgttatttttaaaaggcaagagttgctttaataacattatccacattttctatttgcttacagtctgggagggaaaggtccaatggtaaaggtgaaatgtaactttttggaatctagcacattctacttttaggctttttgtttgcttgtttg

SEQ ID NO: 7655 - DNA, 567 bp, Homo sapiens
  MAP TO AC019101.3; EXPRESSED IN LUNG, SIGNAL = 1.2; EXPRESSED IN PLACENTA, SIGNAL = 1.3; EXPRESSED IN FETAL LIVER, SIGNAL = 0.97; EXPRESSED IN BONE MARROW, SIGNAL = 1.1; EXPRESSED IN HEART, SIGNAL = 1.2; EXPRESSED IN ADULT LIVER, SIGNAL = 1.6; EXPRESSED IN BRAIN, SIGNAL = 1.2
atttgcaccccttctgtttgccacgatcctttatctcttcagcatccagcagcctgctgcacactgctgtggactaataaaggcatgagggagacgatcggagaaagagaatacggcagaagtgtgagtcagactccgggggcgatggaacggtggagatgcagaaatgcaaatttgcaaattcgtgtacccatttgctttgccctggagcccagcgcagagctggggaaggcagctccgcggaaggcagagccctgctctgcctggggtgagctcatggaagcattccagaaaacagtgattaggcacctactgtgtatcaggcaccatggaggtcctcagaacgcaagagtgagccaagtgcgtccacaggctgagaaggtagatgatggcaaagggcgtcaacacctctgggctggggacaggcttaaaattggggaagagactcagggggccttgagcatcatctggtatcacacaggcaccctagagagagaaggtgagttggagatgtttctcatttagaaaaataaactgaggtctctcggccagcacgcatttaatttt

SEQ ID NO: 7656 - DNA, 574 bp, Homo sapiens
  MAP TO AL161732.1; EXPRESSED IN BONE MARROW, SIGNAL = 1.3; EXPRESSED IN ADULT LIVER, SIGNAL = 1.2; EXPRESSED IN BRAIN, SIGNAL = 1.4; EXPRESSED IN LUNG, SIGNAL = 1.3; EXPRESSED IN PLACENTA, SIGNAL = 1.3; EXPRESSED IN HEART, SIGNAL = 1.3; EXPRESSED IN FETAL LIVER, SIGNAL = 1.2
ctgccttttctgagcattccacgatttttctgtctgaaggaagcctacctttccaaccacccagagtatcctcttttaaatttaattcaattttatgtcttgtattttatttttatttatttatttacaacttatttttatttttttcccctgtgggacccaagcagattatccccttcagagataaattaagcctgacatttcactttgcccattctgctaaggttcaaacctgtttttccacttgtactgaacatgctacactggatagcgcttgtcacttaaatcacaatcattcttgttaccaatgacattaatatacttttatttctgcagataaaagacaccattgggtttgacacactaggtcattgtttctttttggaagatggtattgaacagaggaatactttgttccacaatctgggactcctcaccaagccgggtactctcctgcccaccgataggaacaactccatgtgtaccaccatgcgagataaagtgtttggaaattacattcctgtgcctgctactgactgtatgtgagtaattggcggagagaaaaacccatgag

SEQ ID NO: 7657 - DNA, 560 bp, Homo sapiens
  MAP TO AC013771.3; EXPRESSED IN PLACENTA, SIGNAL = 1.6; EXPRESSED IN FETAL LIVER, SIGNAL = 1.2; EXPRESSED IN BONE MARROW, SIGNAL = 1.4; EXPRESSED IN LUNG, SIGNAL = 1.3; EXPRESSED IN ADULT LIVER, SIGNAL = 1.5; EXPRESSED IN HEART, SIGNAL = 1.4; EXPRESSED IN BRAIN, SIGNAL =   1
ggccttgtgtttttcctgtcattgtttaccagtgatttaccatttgaaaaattagatataattaataattaatcagtaattactttataaactaaataaaaaatatattttaattgaattttataagaaatagacaacaaagtcagattttagtataggagttagtacagcatacatggctgttttgttgttttttctactcctttgtacaatactgtgcattttggaaatgagacaggcctacaaagtccacataatccatgaatgagaaaagcaattctgttttatagttatataggaagatggtaatttgtctccatgtcagaatccagggaaaaaaaacatctgttataagcgaagatgaaggatatcgctttgtggccgaagagtttcaatggaccctgggcaaggacaaagtttcaagttcaaaagatcatgtaaaagtgaatgtattattaaattttatttgcccttagctagttgtcatgctgaaatgtatttagcaacatgaaaggaagtatcatattaaatatgatgcagagatgccagggttgtaaaca

SEQ ID NO: 7658 - DNA, 525 bp, Homo sapiens
  MAP TO AL121673.27; EXPRESSED IN LUNG, SIGNAL = 1.5; EXPRESSED IN FETAL LIVER, SIGNAL = 1.6; EXPRESSED IN BONE MARROW, SIGNAL = 1.4; EXPRESSED IN PLACENTA, SIGNAL = 1.8; EXPRESSED IN ADULT LIVER, SIGNAL = 2.2; EXPRESSED IN HEART, SIGNAL = 1.6; EXPRESSED IN BRAIN, SIGNAL = 1.4
accctgtttgatcagcatccattgctgagagagcagctttctctcttccccttttcctcctcccctctcccacctcagcttccacagaggtggcgtgcatggcgggaaccgtctgtcctatcggagcctggagaccctgggtctttcccttcagcagcttccacagaggtggcctgcatggcgggaaccctctgtcctatcggagcctggagaccccaggtctttcccttcagcagcttccacagaggtggcgtgcatggcgggaaccctctgtcctatcggagcctggagaccccgggtccttcccttcagaaatccctgccatctggttttgagactggctttgggggacagtggccctggtggggattcgggcatgaaaggccccctgttgaggtcgagcctggcagcatggggggactcgctcgtcttcgtggtgggcctcacagacacagccatctgggcacacaagagcattctggccgtgcatgtgtgcaaatgagaaccgtgtgcttcagaaacaga

SEQ ID NO: 7659 - DNA, 569 bp, Homo sapiens
  MAP TO AC015649.5; EXPRESSED IN BONE MARROW, SIGNAL =  16; EXPRESSED IN ADULT LIVER, SIGNAL =  20; EXPRESSED IN HEART, SIGNAL = 7.7; EXPRESSED IN LUNG, SIGNAL =  14; EXPRESSED IN HELA, SIGNAL =  16; EXPRESSED IN FETAL LIVER, SIGNAL =  20; EXPRESSED IN BRAIN, SIGNAL = 9.1; EXPRESSED IN PLACENTA, SIGNAL =  13
tatgcagagaatccaagggcctctaaaggagaatcaccagtgtatccctccaaagagtcacgtggcctggctaacgacagtcattccctcctcctttctaaaacgggaatacacagcagagcaggcaggtgggctgtgcaccacgtggggtggcagcagcgagccccactcccgcaggccctgcctcacctgagcggcagcagaaagcagtaccgaatcagcactcctaacccccacaggaccgtgagccgaaggctgatgtactggaagttataattggttctgctcagcaggttccaggactccagttcttctgctgagaatctctttgtcacctcatcatccataatggtctccattcctttccggcaaaagtagaaaatgtcagagagctcgaactctggagtgttgtccagagccttactactaccacttcgacgaatctctttgatctcttcttctagtgaagtgggatcctttgcaatgattcctgcaaaagaatgtgtccctgtcaagcagcacgctgggggagagcacgtgagacatactcagagcacacatcctgcact

SEQ ID NO: 7660 - DNA, 571 bp, Homo sapiens
  MAP TO AC010229.4; EXPRESSED IN HELA, SIGNAL =   4; EXPRESSED IN LUNG, SIGNAL = 4.4; EXPRESSED IN PLACENTA, SIGNAL = 4.9; EXPRESSED IN HEART, SIGNAL = 4.6; EXPRESSED IN BRAIN, SIGNAL = 3.9; EXPRESSED IN BONE MARROW, SIGNAL = 3.8; EXPRESSED IN ADULT LIVER, SIGNAL =   5; EXPRESSED IN FETAL LIVER, SIGNAL =   6
aacagcacccaaaggatgtctacatcctattcctggaatctatgaatatgttacttgacatgtcaaaaggagtctttgcagatgtgattgaagtcacagtccttgagatgggaagatgatcctggattatcggattgagcccagtgtaatcacctaagcccttgcaggcagaagaggcagaagagtcagtcagaagaggcaggaaagacacgaagcatgagagggactcggcctactattgctggctttggaaatgaaggggcaatgagccaagaatacgggaagccccagaaagtgaagaacaaccctgaccagaaaactagcaagaaaacaagaccaaagcctcatatacacatgcaactgaactctgccagcaacctgaatgatcctgaaagtagattccccctagaccttggggagactgaagacatggctaaggtaaaggtataacaggtttcatagggatgggaatgaggggagggaaaaaaataagagttcatctagatatgttgaggtttggctgtgcacccaaatctcatcttgaattgtagctcccataattcccacgtgt

SEQ ID NO: 7661 - DNA, 513 bp, Homo sapiens
  MAP TO AL121914.16; EXPRESSED IN LUNG, SIGNAL = 3.8; EXPRESSED IN HEART, SIGNAL = 3.1; EXPRESSED IN FETAL LIVER, SIGNAL = 3.1; EXPRESSED IN BRAIN, SIGNAL = 2.8; EXPRESSED IN BONE MARROW, SIGNAL = 3.2; EXPRESSED IN ADULT LIVER, SIGNAL = 3.2; EXPRESSED IN PLACENTA, SIGNAL = 3.3; EXPRESSED IN HELA, SIGNAL = 4.1
cctctgtcacccttctggaggtgacttcacagaatgttgttacccaccagaaatccctcccagaagaagtgtctgtagatactttgatttttcctcaggttgtccttcctccttctctgtcttccctttttggagaatgtaggtgggaaaaatgtaggtggtgaggggatttttcttacgctcttggaaacttttttttaacataatatccttttaaaatgatggaaagtaaacattcacaagccaacagataatacccttctctctgcattaatctttcctagcctgtatttgaatttacatgaaatgaaatacttccaagtacatttgaagggagactatttacttgaaagatgatcaaagagccctttctccattctgcactctctcgatgttgagtctgggcacagctacctcataaaaatgtataacagaatatgtcactgatctcaacataaaagctcctacatccatggaaatccttcatgaacttcagggattcacatttcccat

SEQ ID NO: 7662 - DNA, 529 bp, Homo sapiens
  MAP TO AL132981.5; EXPRESSED IN LUNG, SIGNAL = 1.3; EXPRESSED IN ADULT LIVER, SIGNAL = 0.71; EXPRESSED IN HEART, SIGNAL = 1.4; EXPRESSED IN BRAIN, SIGNAL = 1.2; EXPRESSED IN PLACENTA, SIGNAL = 1.1; EXPRESSED IN FETAL LIVER, SIGNAL = 1.2; EXPRESSED IN BONE MARROW, SIGNAL = 1.1
aagagctgccctccctagtcaggcagggcacaggtgaacatgggcatcatcctgacttgctgatcatcctctgggtagcccctctcactggaatgaaactgctgatgtcacttaccaaaatcctcattaacatatgtgccaggttcagagtcagtttcaaaatgcctctgaagtgtttaagagtaattggctttgaagtagagcaagacctcaaaaagttcatccactaccccaaaaccttttaatgtgaaagcatttcctgtatagtgctattaaaagtgacccctagctgaagctattctaggattttcttctaccatgtgctgcctccactccttctttggtattcaagttcttccatgatggactctccctcaaatggtcacctgccccttcatgtctcctcttcttcctggcactatcctgacctctgcaaggcctttctccttagtgtttttgctcccacttctgccctggatagatgtgtttgctctgacctagaatgtcctccatcttcctcatcccattc

SEQ ID NO: 7663 - DNA, 575 bp, Homo sapiens
  MAP TO AL162311.1; EXPRESSED IN LUNG, SIGNAL = 1.1; EXPRESSED IN PLACENTA, SIGNAL = 1.3; EXPRESSED IN ADULT LIVER, SIGNAL = 1.3; EXPRESSED IN HEART, SIGNAL = 1.3; EXPRESSED IN FETAL LIVER, SIGNAL = 1.1; EXPRESSED IN BRAIN, SIGNAL = 1.3; EXPRESSED IN BONE MARROW, SIGNAL = 1.2
cttccccttttctcctttgctgggacatttcatttacataatattaatattagaagactgagatacgatatgacactacagtaaaccaaaggtctggtgccactcaaacatcacaatcatatcattctccttacctgaggtaatatcaatgctgtgcctatcctcttcaagccttcttatcttctcctctagttcactctggactgtatcatatagcaacagcttttcgctctggggagaaaaacagattatacttaagtagaaagaaaaaaattggtgtatcttaactaagagtaccaaataacttaaagtactttaatatatgatgctttggtttgctttttcaattcaattaaaaattctaaagaagaaatgtcaaatacatgaaagaaataaaactagaaaatatagaatctatatatagatttaactacatgcaattacattctgtataagagcatctaaattatgtctgatgtacatttagaggtaaatatttactttataaaaaactcatagcaaacccctatggccccttttaaatttaagtaggtcccatctgtcaccatcatgga

SEQ ID NO: 7664 - DNA, 539 bp, Homo sapiens
  MAP TO AL133295.11; EXPRESSED IN BONE MARROW, SIGNAL = 1.5; EXPRESSED IN LUNG, SIGNAL = 1.7; EXPRESSED IN PLACENTA, SIGNAL = 1.8; EXPRESSED IN ADULT LIVER, SIGNAL = 1.6; EXPRESSED IN FETAL LIVER, SIGNAL = 1.8; EXPRESSED IN BRAIN, SIGNAL = 1.7; EXPRESSED IN HEART, SIGNAL = 1.7
ttcccctccatctcaatcagaccaggctattctctcctcctccgaaggtttaggggtcagaaagagatgtggggtcaaagtggcttccccgacaggtcccctccctaagtttcccctcggctgagcccagatctccgctctgaaccgacctaagagctggtctagggctgggagcccggttgataccagcagctgtccattccgcaccgacggtcgcgtgcccgcaatggacaccagtcgagggccgctgtcgttggtcacgctggctctaggacccctcctctggaaactggtgacgttgctcttgctggctgtcgccactgcagacccagtactcgcggcaacactaccgcaggttgccactgccgccatcttagagcctccagtgttaacccaataggaactctgggaacgcaaacacccgtcctatcagaaccagtgccaaactcccgcctcctcgccccaaccgcggctctcgtaaccaataggactgagacgtcagtcccgagccaaccaatcggaaggcgtattgctgaaaa

SEQ ID NO: 7665 - DNA, 578 bp, Homo sapiens
  MAP TO AC008597.3; EXPRESSED IN PLACENTA, SIGNAL = 1.1; EXPRESSED IN FETAL LIVER, SIGNAL = 2.6; EXPRESSED IN BONE MARROW, SIGNAL = 1.6; EXPRESSED IN HEART, SIGNAL = 1.7; EXPRESSED IN BRAIN, SIGNAL = 1.9; EXPRESSED IN LUNG, SIGNAL = 2.3; EXPRESSED IN ADULT LIVER, SIGNAL = 2.2
cctcccttccaaaggacttctaaattctgtgggtcagagtacacgacaaatactattcacccaacagaactcagaagaacatatccatatctacaataatttactaattatatcatgtgctcactaataaaaatagtaaacaatagaacaaagcttagaatcatgaaatagtctacatcaaaagttttaacaattctcacatatataaatatgtagtcagaaaactttggcagacttagaaaatcataattatactggaatactgagatatttgctcaaagattattaatgtgacaaatagcattagttgaaggaaaataaatagtatagttctctcaaataccataccatagttggccactgcttttccacctctccttcttatttcttcaacaaccttatcagcagctaaggagcctttaccaactcctttgaagtcccctcccaaatcattcactgtaatgcaaaaacaagcaaacaacaattaattattctagactttcaaaatgtgtgtgtgtgtgtgtggaaaatgaaattctaattactagcacatctcttcagtcatctgcccagttcct

SEQ ID NO: 7666 - DNA, 584 bp, Homo sapiens
  MAP TO AC008468.4; EXPRESSED IN LUNG, SIGNAL = 1.4; EXPRESSED IN ADULT LIVER, SIGNAL =   2; EXPRESSED IN HEART, SIGNAL = 1.8; EXPRESSED IN FETAL LIVER, SIGNAL = 2.3; EXPRESSED IN BRAIN, SIGNAL = 1.7; EXPRESSED IN PLACENTA, SIGNAL = 1.6; EXPRESSED IN HELA, SIGNAL = 2.7; EXPRESSED IN BONE MARROW, SIGNAL = 1.8
ctggaggtgatcgtggaaaggccgctgcaggttttccatgtggacgtggaggtgaaggacattaacgacaaccctccagtgttcccagcgacacaaaagaatctgttcatcgcggaatccaggccgcttgactctcggtttccactagagggcgcgtccgatgcagatatcggggagaacgccctgctcacttacagactgagccccaatgagtatttcttcctggacgtgccaaccagcaaccagcaggtaaaacctcttggacttgtattacggaaacttttagacagagaagaaactccggagcttcatttattgctcacggccaccgatggaggcaaacccgagctgactggcaccgttcaattactcatcacggtactggacaacaatgacaatgccccagtgttcgacagaaccctgtatacggtgaaattaccagaaaacgtttctatcggaacgctggtgattcaccccaatgcctcagatttagacgaaggcttgaatggggatattatttactccttctccagtgatgtttctccagatataaaatccaagttccacatggaccccttaagtgg

SEQ ID NO: 7667 - DNA, 532 bp, Homo sapiens
  MAP TO AC008103.27; EXPRESSED IN LUNG, SIGNAL = 2.8; EXPRESSED IN PLACENTA, SIGNAL = 2.4; EXPRESSED IN HELA, SIGNAL = 2.5; EXPRESSED IN HEART, SIGNAL = 2.8; EXPRESSED IN FETAL LIVER, SIGNAL = 3.4; EXPRESSED IN BRAIN, SIGNAL = 3.1; EXPRESSED IN ADULT LIVER, SIGNAL = 3.1; EXPRESSED IN BONE MARROW, SIGNAL = 2.7
agtctccaagcctctccctcaggcctggtttcttggcgccctgccctgagaagacagaggggtgggagagctgcgcacctgtggtacatggcgttggtggcctcgtacgtggggttgatggggtcctcatagccgatctctgccgcacgggctcgctcctgggccaggtatgcgccccgcaccagcttggccccaaaacaccagccctcacggcgagccagctccacgtccagggtcacattgtcataggcatcctgtggggccagggccaaaagtcacagggagcctgggcaagcccaagtgacagcaggatggggccttcctgggcccaggtgcagtcaccagggctgggcagcagctgcctggggaggtgcagctcagggcacctggagcaggtgtgggtgaggatgggcctccaacctctgtccccaaggagcaatggcagtggggacgtctgcaacttcctgtgtggcctgtggacggccctgtgggtgcagcccaggcgccagcagccatcatgtgctccagactc

SEQ ID NO: 7668 - DNA, 587 bp, Homo sapiens
  MAP TO AC021846.3; EXPRESSED IN BRAIN, SIGNAL = 2.2; EXPRESSED IN LUNG, SIGNAL = 2.2; EXPRESSED IN ADULT LIVER, SIGNAL = 2.3; EXPRESSED IN BONE MARROW, SIGNAL = 2.3; EXPRESSED IN PLACENTA, SIGNAL = 1.8; EXPRESSED IN HEART, SIGNAL = 1.8; EXPRESSED IN FETAL LIVER, SIGNAL = 2.2
  unsure 382
ctgctatattgagaggggcggctaatgtcataggcatgggcagattcattggagatgtgatggtgacagggtgtgctatattctctggggcagtgacggggtggggaggttgatctgggtagtgagtgttaaaggagaggtcatggatagtggactggttatagttacaggatgccctatgttcattggactggttatgttaactgcccttgaaacatttactgaacttctcatgctcattgcagctgccagtgtgactgggtttgacatagccccagacgacacagaggatgttatattgaatggcgtagtgagagtcacaggtgttgtagcagccgtggaggtttggcacaggttagcagcttctttcttccttgcttanacagcttcttcccacagtctcagtgttgctacctgcttccctggccagcttgtcacatgttgttgttgctgttgttgctgctgctgctgcttttggttactggtctcttcactcatgcttgttttactgatgccttgtttacatgtattgcagttgatactttggctctgcccatgagtctttaagtggctggtgatgtatgctg

SEQ ID NO: 7669 - DNA, 597 bp, Homo sapiens
  MAP TO AC025601.2; EXPRESSED IN LUNG, SIGNAL = 1.5; EXPRESSED IN PLACENTA, SIGNAL = 1.6; EXPRESSED IN HEART, SIGNAL = 2.2; EXPRESSED IN BRAIN, SIGNAL = 1.4; EXPRESSED IN FETAL LIVER, SIGNAL = 1.5; EXPRESSED IN ADULT LIVER, SIGNAL = 1.6; EXPRESSED IN BONE MARROW, SIGNAL = 1.3
ctcccagaatcagctcaacacttcttgatcatcaacaatgttcttgaccatgtatgaaatgatatgtgaacacaggctttttttcttcagaataatcatgctccaattttgcctaatggttctcatcatattactcaaagctactgaaccactttcttcatctaaactacctaatgcattagtaagatagcaagaaaatgagctgagcatgcagcgaataatgaacttggacctaaagatggaataaatattttagcatataagcatattgctgtaaagcctttgattaagagataattcttaataaatgtcccaggtccccaaatgtcataaacagcatctatacatgttggtatccacatttttacatccctttattcttaaatcattcatctatagattccttcaacattatttttttgaaaccctgtattaccaaattaaaaattactccctggtcctcgtttcaatatagtctgtacaattatgtttactctggggattgtgacaatagtatttacttcctacctactaaaacaccctcctttatgattctgtgataactcataatattgcagccactcacatttaggctcc

SEQ ID NO: 7670 - DNA, 511 bp, Homo sapiens
  MAP TO AL162261.1; EXPRESSED IN BONE MARROW, SIGNAL = 1.5; EXPRESSED IN ADULT LIVER, SIGNAL = 2.2; EXPRESSED IN HELA, SIGNAL = 2.6; EXPRESSED IN BRAIN, SIGNAL = 1.5; EXPRESSED IN LUNG, SIGNAL = 1.8; EXPRESSED IN PLACENTA, SIGNAL =   2; EXPRESSED IN HEART, SIGNAL = 1.9; EXPRESSED IN FETAL LIVER, SIGNAL = 1.7
agaggtgcatcctgttccaggaaataattacaatttaggcaagttatacatgtttgcttaagagaatgctttctgcacatttcatgttcttcctttctatcttagcctagggagaaaaccgtggggactcagggctggaactttagtgtgatggggcagaagcttaattttcacatgattctcaacaaatggcagcatatcccatgtattatcatgtccaatggctgcaatatgaaggaggcttttccgaaatagttgctgctttggtaaaaaattaactagatggattcaaagtcaaatttgaagaaagctgagcaggcagaagaaacaatcagtgaacctgaagataaggcaatggaaatcatccagtttgaggaacagaaataaaaaaagattgaagaaaagtgaacagagcctaagtgaccatcaagtggaccaccatgtacattgtggaagttcttttttgttgttgttgttttggggggtgggaggggggaaggagtttcatttt

SEQ ID NO: 7671 - DNA, 594 bp, Homo sapiens
  MAP TO AC019184.2; EXPRESSED IN HELA, SIGNAL =  11; EXPRESSED IN LUNG, SIGNAL = 6.5; EXPRESSED IN ADULT LIVER, SIGNAL = 7.8; EXPRESSED IN FETAL LIVER, SIGNAL =   6; EXPRESSED IN BRAIN, SIGNAL = 6.4; EXPRESSED IN BONE MARROW, SIGNAL = 6.1; EXPRESSED IN PLACENTA, SIGNAL = 6.5; EXPRESSED IN HEART, SIGNAL = 7.6
gaataccacttgggtcaggctttgtgaaaggtactatgctgggataaagagttataaatgactataaataattaagcttccaatctttctctttccttgtcttctaaacatacacatataatttatcatccaaatcagagcacttttgggagtgaaagtaagcattgttaataattatgataagaacaactgcgaccactggaggcaaacgaggctgtacagtcaccctaactaaaagaacctggtctgtttctgtctcttcttcttccagtctacctaccccaggctcacctcctgcaagaaaaatcctacattgacagccgtcttcctcaattctatcatgacgaaatcagaaggaaaggggataaaatggaagacaagagttttcttatgatggatacaagagttagaattttttcttagctttttttttttcttgattattttgtatttaagaggtgtagaaccagtagcaatgtgagatggcaggagatgagagagggaaaaaagggaaatggtaacaaatctgtgggaaataagagaaagatcaaagagggcaataagaatcaatgccccctcccccaacaaatttat

SEQ ID NO: 7672 - DNA, 506 bp, Homo sapiens
  MAP TO AL157396.2; EXPRESSED IN LUNG, SIGNAL = 1.7; EXPRESSED IN ADULT LIVER, SIGNAL = 1.9; EXPRESSED IN HEART, SIGNAL = 1.7; EXPRESSED IN BRAIN, SIGNAL = 1.5; EXPRESSED IN PLACENTA, SIGNAL = 1.8; EXPRESSED IN FETAL LIVER, SIGNAL = 1.5; EXPRESSED IN BONE MARROW, SIGNAL = 1.5
acatgccattaagctcagcctagcttctggctacattacagggagcaaaaacagagcccatctaacctttttcggctcctccttcttgcttttttgcctcctcttcaatgaccttcatctttgcatcatactcatcagctagtgatttccattctactctgttattctgaagaccactcagcataggtgtgatttctttgtgaaaccgtgagaactcctaaaaggaattttaggtcagaaactacataaatcatacagttaattttcaggatctttcatatgcagagagtgagctgtaaggaattgttacagcactcagagctgctaggataagtttaaccacgggcctatgaagtttgggaaagagacacgtgctgtctttactgcctgcctaaggaagtgttcagttcgctcacatctgagttccctccttttattccagccctgaatgagattagggtaaaacctcaaactgctttggagaaacagtgataccccaatggctt

SEQ ID NO: 7673 - DNA, 558 bp, Homo sapiens
  MAP TO AL137026.10; EXPRESSED IN LUNG, SIGNAL = 1.6; EXPRESSED IN PLACENTA, SIGNAL = 1.5; EXPRESSED IN ADULT LIVER, SIGNAL = 1.7; EXPRESSED IN HEART, SIGNAL = 1.5; EXPRESSED IN FETAL LIVER, SIGNAL = 1.3; EXPRESSED IN BRAIN, SIGNAL = 1.4; EXPRESSED IN BONE MARROW, SIGNAL = 1.4
agccgtacagaatccacctggcaaaaatggaaactgcctggaggccagggctgagggaaggcctggagcagagccggtgcgcgacctcgcagtgagcagggagggcaggctggggacgttcaccacccagaacgcctctgctccccgcaaccctgagactccaggctcccctgttcctccctccgggagaccctgcccgtcctccccgcggggctccttcgcagttcgggggaagggacgggttgcgtcctcgggacctttctctgcagccacagcagcgcatcccagcacctcctccaggagccccgccacctcctgccacccggactttccccacagcgcagcgtcccctcgtcctctcagggctggaacagcggtacccgcagacagtgcaaaagggaagtccctgttgccttcccatgcaaactgtagggcgcttacagctgctgggagaggaaaggaaagaagaaatacagtgagtgtgatatgggtacaaagaaaccaacacggagcttccgtgggcctagaaaggagcccccaggagaagtacactgggcc

SEQ ID NO: 7674 - DNA, 546 bp, Homo sapiens
  MAP TO AC018529.4; EXPRESSED IN BONE MARROW, SIGNAL =  17; EXPRESSED IN PLACENTA, SIGNAL =  17; EXPRESSED IN ADULT LIVER, SIGNAL =  20; EXPRESSED IN HELA, SIGNAL =  25; EXPRESSED IN FETAL LIVER, SIGNAL =  16; EXPRESSED IN BRAIN, SIGNAL =  15; EXPRESSED IN LUNG, SIGNAL =  18; EXPRESSED IN HEART, SIGNAL =  15
gctctgcagtttccttggagcaaatcaaagcatgtgggcgacggagaatcggccgtcgtggcagcgccagggcctgcagtcgccagggtggggctgaggccagggccggaggtctgggcagaaccacagggaaggaccttggaggccgacctcagtcccaacactgaccagccgatgtgctccagcaagtcgctgagcccagatgtgcctgtttctgtgtttatgagatgggagcattcatttctattcttacctgaaataaccccaggctcctttccgcagcagcacactgacctgggtgacgtgtcctccccatgccaccctcccacaaacgctgccttccacccacagcacccgcagagagtggcagagagggcattcctgagcagattgcaggagttttgggaggtgcatgtgtgcattctcgtaactctccgaggcgggtggttttagtagcccttttattcataccagaaactgagacttagcaaagttaaggtgggattgatggaggagctgccgttcactcctgcctaaactccctcc

SEQ ID NO: 7675 - DNA, 535 bp, Homo sapiens; identical to SEQ ID NO: 6917
  MAP TO AC020919.3; EXPRESSED IN LUNG, SIGNAL = 3.7; EXPRESSED IN ADULT LIVER, SIGNAL = 3.8; EXPRESSED IN FETAL LIVER, SIGNAL = 3.9; EXPRESSED IN BRAIN, SIGNAL = 4.5; EXPRESSED IN PLACENTA, SIGNAL = 3.9; EXPRESSED IN HELA, SIGNAL = 5.8; EXPRESSED IN HEART, SIGNAL = 4.9; EXPRESSED IN BONE MARROW, SIGNAL = 3.7

SEQ ID NO: 7676 - DNA, 539 bp, Homo sapiens
  MAP TO AL160281.2; EXPRESSED IN LUNG, SIGNAL = 1.5; EXPRESSED IN PLACENTA, SIGNAL = 1.5; EXPRESSED IN FETAL LIVER, SIGNAL = 1.7; EXPRESSED IN BRAIN, SIGNAL = 1.6; EXPRESSED IN ADULT LIVER, SIGNAL = 1.7; EXPRESSED IN HEART, SIGNAL = 1.3; EXPRESSED IN BONE MARROW, SIGNAL = 1.7
aacctcatgccttggaattgccagataaacattccttggcctttgtcatacacatcgaaaggattgatggcgtgagtttactggtgcagagaaccactgcaagaccgcctaaagaaaatttttagtggtgtctttgtaaaagttacctcccagaacctaaaaatgctgcatatagtggaaccttatgtgacctggggatttccaaatctgaagtctgtccgggaactcatttttaaacatagacaagccaaggtcaagaataagaccatccctctgacagacagtacagtgattgaggagcacctggggaagtttggtgtcatttgcttggaagacctcattcatgaaattgccttcccagggaaacatttcgaggagatctcatggttcttgagccctttccacctgtcagtggcccgtcatgctaccaaaaatagagtaggcttcctcaaggagacgggcacacctggctatcggggtgaacacatcaatctgctcatccaccagctgaactagacccaggtgccaaactgcagtaa

SEQ ID NO: 7677 - DNA, 584 bp, Homo sapiens
  MAP TO AL139258.2; EXPRESSED IN BONE MARROW, SIGNAL = 1.3; EXPRESSED IN LUNG, SIGNAL = 0.96; EXPRESSED IN PLACENTA, SIGNAL = 1.3; EXPRESSED IN ADULT LIVER, SIGNAL = 1.7; EXPRESSED IN HEART, SIGNAL = 1.8; EXPRESSED IN FETAL LIVER, SIGNAL = 1.3; EXPRESSED IN BRAIN, SIGNAL = 1.1
cattcattgtggacactggggttgcttccatcttttagctattgtgagtaatgctcctgtaaacacagatggacaaatatttcttcaagatcctcttttcaatcgtttagggatttcaatactttttagaagctcttcaggtgatctaaaacacagctaaagcggaaaacctctcttttacgtataggagaagaaagtcaaggggatgatgagggatttgggggactatgaaacagtgcaaggcttggaggaggcaggcatgagaaagagaggggagaaacagaggactacgaagaagagaggatgtcagattatgtaatacctgaagctgacatgatgttatctgctgaccagagcaggggaaagggaaagagaagattgacagcatttgctgaaagggatccaattgggagataacgggaggagagatgatcaaagttaaaagacaagtaaaggacctgggggcatttgtgtgctggaggagagggggtggaaatagaaggaactcctttttattaaaatgaagctcacttgagagcagacacttaaaaaagtttgtggcaagtgggcttagaaatggacga

SEQ ID NO: 7678 - DNA, 557 bp, Homo sapiens
  MAP TO AC007981.43; EXPRESSED IN ADULT LIVER, SIGNAL = 5.7; EXPRESSED IN HEART, SIGNAL = 5.2; EXPRESSED IN BONE MARROW, SIGNAL = 6.5; EXPRESSED IN LUNG, SIGNAL = 4.8; EXPRESSED IN PLACENTA, SIGNAL = 5.9; EXPRESSED IN HELA, SIGNAL = 3.3; EXPRESSED IN FETAL LIVER, SIGNAL = 9.7; EXPRESSED IN BRAIN, SIGNAL = 8.7
tgtaagcccatctctgtcccattgtctatctgaccatctttctcttactgtcctctttgtctagctatctggcctgtctgtcgatccatcttcgtgtctgtcttcagcccccacctgtttgtccatctgtccaattacctgtgagtctatctatgcatcttcttgtccattcatctgcccacccatctgtccctccgtctgcccaccggcctcccctctccttctgggccgcagagccatggcccaggactacggagccatgggtgacctggtcctgctggggctggggctggggctggcgctggctgtcattgtgctggctgtggtcctctctcgacaccaggccccatttgacccccggcctttgcccacgccgctgttgctgctgactccaaggtcttctcaaatattgtacggtgagtgagacgtgggaggaagctgggtggcctttggcagccagcccctcctggagaaggcgtgtgtgtgtgagcatgtgtgtgtgtgagagattatgtgtcagtgtgtgtgggtatatgtgtgagtgtgtttgtggggtg

SEQ ID NO: 7679 - DNA, 546 bp, Homo sapiens
  MAP TO AL121751.12; EXPRESSED IN HELA, SIGNAL = 2.4; EXPRESSED IN LUNG, SIGNAL = 2.2; EXPRESSED IN PLACENTA, SIGNAL = 2.4; EXPRESSED IN FETAL LIVER, SIGNAL = 2.5; EXPRESSED IN HEART, SIGNAL = 1.8; EXPRESSED IN BRAIN, SIGNAL = 2.2; EXPRESSED IN BONE MARROW, SIGNAL =   2; EXPRESSED IN ADULT LIVER, SIGNAL = 2.2
atcatgctcatggcttcctccaccttttttactacttggagcatatttatcatagctgttttatcatccttgtctgctagtttcatcatcattgtcatttctgtgttggttgatttgtttttctcctggttatgggtcatattttcctgctttttttttttgtatgcctgaaaaatatttttacactttcagtttctgtattttgttacactcctttaaagagttagatatttttcttgcatgcagctaagttagtgggaatcagatgaatattttcaagactgacgtttaagctttgttaggatgggtacagggtattctttagtctagggttaatttagcccccactactaaggcaatagccttccgagtactaaatgctgcagattttacagggtctttccactcaggcaggtggaaacacaagctattcccagacctgtgcaatcactgggaattgttctgcttacttctttttggtgtttggtatttttctccccctcaggcctttggtagtttcctcttgcacatgcacagaaaggcact

SEQ ID NO: 7680 - DNA, 562 bp, Homo sapiens
  MAP TO AC026407.1; EXPRESSED IN HELA, SIGNAL = 3.5; EXPRESSED IN BRAIN, SIGNAL =   3; EXPRESSED IN LUNG, SIGNAL = 2.9; EXPRESSED IN ADULT LIVER, SIGNAL = 3.5; EXPRESSED IN BONE MARROW, SIGNAL =   3; EXPRESSED IN PLACENTA, SIGNAL = 2.9; EXPRESSED IN FETAL LIVER, SIGNAL = 3.7; EXPRESSED IN HEART, SIGNAL =   3
acacaaagtggtctggggagtagaaaggccagaaggtgaatcactccactttccttcttgcgtctcctctatcttgttattcccactgcagccactcctgttattatcccacttttatagctttctcatcatccttgaaaagccactaattggtagcaagagggccaggctattgtataagtgccagaaggacttaggtagactagaaaatcagaatgttaagaagtgggaaagtagtcatagcttttctttctttgctcatgaacctgatgactactttaactacaagagcttccgtaaaggattgcacgcatgaatgcacatgtgcacacacacatacatatgcacagatacgcatgcacacacacacatacacacatacatatgcacacatacatacaagcacacacgcacatacgcacacacacgcaatacatatgcacatacacatgcacaagcacacacatacacatacacatgcacacacgtgcacacatgcatacacatgcaaacacatatacacacacacacagtgaagaccaggcaaaggactccatgatgt

SEQ ID NO: 7681 - DNA, 509 bp, Homo sapiens
  MAP TO AC011472.3; EXPRESSED IN HELA, SIGNAL = 3.2; EXPRESSED IN LUNG, SIGNAL = 3.8; EXPRESSED IN PLACENTA, SIGNAL = 2.9; EXPRESSED IN ADULT LIVER, SIGNAL = 3.3; EXPRESSED IN HEART, SIGNAL = 2.8; EXPRESSED IN FETAL LIVER, SIGNAL = 3.1; EXPRESSED IN BRAIN, SIGNAL = 2.9; EXPRESSED IN BONE MARROW, SIGNAL = 3.1
tccgtaactccaacaccctccatggctcccaccgccctcctatttgagtttgaagccagcgcgcacccacccctgcctcgtgcccccactctcagcctcctaggtagtgcgatcacagccactttgctccaatccaggtcccactgactgaagttgtcgagcccctggactttgaggatgtacttctgagccggccaccagatgctgagcccgggcccctcagggacctggtagaattcccagctgatgacttggagctgctgctgcagccccgggaatgccggaccacggagcccgggatccccaaggatgagtgggttcagccccacgccctctctgcctgtgattccactctgtctctgccaaccccatcaacagcccgacttcagctcctggcttggccgtgacgttggacaagccatgctttttctctgagcctccatctccccttgtctggaataggcaggacagtgctaaccttacaggctagcagaaggattcacagaggc

SEQ ID NO: 7682 - DNA, 510 bp, Homo sapiens; identical to SEQ ID NO: 7650
  MAP TO AL118520.12; EXPRESSED IN LUNG, SIGNAL =   3; EXPRESSED IN PLACENTA, SIGNAL = 2.3; EXPRESSED IN ADULT LIVER, SIGNAL = 3.1; EXPRESSED IN HEART, SIGNAL = 2.2; EXPRESSED IN FETAL LIVER, SIGNAL = 2.3; EXPRESSED IN BRAIN, SIGNAL = 2.5; EXPRESSED IN BONE MARROW, SIGNAL = 2.6; EXPRESSED IN HELA, SIGNAL = 3.3

SEQ ID NO: 7683 - DNA, 547 bp, Homo sapiens
  MAP TO AC008468.4; EXPRESSED IN ADULT LIVER, SIGNAL = 2.3; EXPRESSED IN HEART, SIGNAL = 1.9; EXPRESSED IN BONE MARROW, SIGNAL = 2.4; EXPRESSED IN LUNG, SIGNAL = 2.2; EXPRESSED IN PLACENTA, SIGNAL = 2.2; EXPRESSED IN FETAL LIVER, SIGNAL = 2.5; EXPRESSED IN BRAIN, SIGNAL = 2.4
tgtacactggcgagatcagcacgacacgcatcctggatgaggcggacgctccgcgccaccgcctgctggtgctggtgaaggaccacggtgagcccgcgctgacgtccacggccacggtgctggtgtcgctggtggagaacggccaggccccaaagacgtcgtcgcgggcctcagtgggcgctgtggatcccgaagcggctctggtggatattaacgtgtacctcatcatcgccatctgtgcggtgtccagcctgctggtgctcacgctgctgctgtacactgcgctgcgttgctcagcgccgcccaccgtgagccggtgcgcgccgggcaagcccacgctggtgtgctccagcgccgtggggagttggtcttactcgcagcagaggaggcagagggtgtgctctgcagagagcccgcccaagacggacctcatggccttcagcccaagccttcagctgtctcgagaagattgtttaaatcctcccagtgaagtaagttattaatattatttagatatatttgtttccttgaagaacttccgtttagg

SEQ ID NO: 7684 - DNA, 559 bp, Homo sapiens
  MAP TO AL157381.7; EXPRESSED IN BONE MARROW, SIGNAL = 1.4; EXPRESSED IN PLACENTA, SIGNAL = 1.5; EXPRESSED IN ADULT LIVER, SIGNAL = 1.4; EXPRESSED IN FETAL LIVER, SIGNAL = 1.2; EXPRESSED IN BRAIN, SIGNAL = 1.2; EXPRESSED IN LUNG, SIGNAL = 1.1; EXPRESSED IN HEART, SIGNAL = 1.3
gatggtttacaaggctgttgacctaattattcctatgaaaaatatgggtgaattgtatcacagaatatgaaataaaacattggctgaagggctgaagtaatggcaatttagatggaatttaataatatattttattttccagttttttgcagcaggtttttttccttgaatggtcaattaatgtgggaataattcatgcgcagatggattggctgtgctcttgaaataaactgttttcaaaattccaccaaaattccaccagcagatggatttaacctaagggagtagatgttcaatgtttggctccatgagctgatcttgtatttgagaactccccaatacctcctacctctttcttcttcttcttcttcctcttcttcttcttcttcctcttcttcttcttcttcttcttcttcttcttcttcttcttcttcttcttcttcttcttcttcttcttcttcttcttccttcttcttcttctttcttcttcttcttcctcttcttcttcttcctcttcctcttctacctcttattcttcctcttcttcctcttcttcttc

SEQ ID NO: 7685 - DNA, 570 bp, Homo sapiens
  MAP TO AL137225.7; EXPRESSED IN LUNG, SIGNAL = 1.4; EXPRESSED IN PLACENTA, SIGNAL = 1.8; EXPRESSED IN ADULT LIVER, SIGNAL = 1.5; EXPRESSED IN FETAL LIVER, SIGNAL = 1.8; EXPRESSED IN BRAIN, SIGNAL = 1.4; EXPRESSED IN HEART, SIGNAL = 1.6; EXPRESSED IN HELA, SIGNAL = 2.7; EXPRESSED IN BONE MARROW, SIGNAL = 1.5
tctggagtccttggtgttccagaagattcctaaaggagcgggggagtgggaaaggagaggaggagctggaatagtgtcccagccgggagcatgccacacaggcgaaagtgtgaactacacatgtggcatcttgcaggggctggggggcagggagtggcatctaggagtccaggttctgccatggagccacctccgtgctgaggccctgctgcttttctcccacttccccctcccacccctacaggctgttctcttcctgctgggcaagcccatcatcctgcccacggatgccaccccttttgtgttgccaaggcatgtgggtaccgagggctccatggccaccgtgggcctctcccagcagctgtttgactctgcgctcctgctgctgcagaaggccggtgccctcaacctggacatcacagggcagctggtgagggcccgacctgcagcccagggcctgtggggcaagagctccctgtggcccagcctagggagacctcccagaggccaaatcatgggtgggtggggccgctgaagctggcgccacagggtggctgttggaagggttaa

SEQ ID NO: 7686 - DNA, 546 bp, Homo sapiens
  MAP TO AC024196.2; EXPRESSED IN PLACENTA, SIGNAL = 1.6; EXPRESSED IN ADULT LIVER, SIGNAL = 1.6; EXPRESSED IN FETAL LIVER, SIGNAL = 2.9; EXPRESSED IN HEART, SIGNAL = 1.5; EXPRESSED IN LUNG, SIGNAL = 1.5; EXPRESSED IN BRAIN, SIGNAL = 1.5; EXPRESSED IN BONE MARROW, SIGNAL = 1.4
gagccgagagaccatttctgtgtcccctgcaggagatcactcagatccagtcccacatcagtgacatgtctgtcatcctgtccatggacaacaaccggaacctagacctggacagcatcattgacgaagtccgcacccagtatgaggagattgccttgaagagtaaggccgaggctgaggccctgtaccagaccaaggtgagctgggctgaggtggggccagggagggtgatgccagcgggcagcagatggagacagatcgtgcccagaatagaagcagtgtcccagtaagtgtctgttgtgttctgatcccaagatacatgcactcccacgacacactcatgactctgtgctttggggtccccagttccaagagcttcagctggcagctggcaggcatggggacgacctcaaaaacaccaagaatgaaatctcggagctcactcggctcatccagagaatccgctcagagatcgagaacgtgaagaagcaggtgagagcacgttggccttggcctgtggtcaagtgcaggggagcatgagtagag

SEQ ID NO: 7687 - DNA, 506 bp, Homo sapiens
  MAP TO AL139248.2; EXPRESSED IN LUNG, SIGNAL = 1.2; EXPRESSED IN ADULT LIVER, SIGNAL = 1.5; EXPRESSED IN HEART, SIGNAL = 1.3; EXPRESSED IN BRAIN, SIGNAL = 1.1; EXPRESSED IN PLACENTA, SIGNAL = 1.3; EXPRESSED IN FETAL LIVER, SIGNAL = 1.4; EXPRESSED IN BONE MARROW, SIGNAL = 1.3
gtggctgtgtggtagggaagggcccgtcgcttgattcccactgctggcagaaaggcccagagggtagtgctttctccttacctggcatggtgcctccacaggcgcagcgagcggttttctggcccccgctggagcagaaggtgcagcagtgaaacacgcctgagtgtgggcggtgctttctcctcaccgtcacagtgaatggcgagccctgcagtgttcagaccaaaagcaatgaacagcatcttacgagttaacaggatgtgctgcgcatcactatgtgctaaacagagtctgaggcacagggcctgtccttggatggacaaggacaacaggaaagaaacagattagaggacaagaaccctgctcagctgagagggggcagacacagatgcagtggaagcatcacagggtctatgcagccctcctaccatgcttttcaccgcagatgctaagtactagacgtaggtactgatttattccatgtagctgaacctgctggacactga

SEQ ID NO: 7688 - DNA, 600 bp, Homo sapiens
  MAP TO AL121917.12; EXPRESSED IN LUNG, SIGNAL = 5.6; EXPRESSED IN PLACENTA, SIGNAL = 4.8; EXPRESSED IN ADULT LIVER, SIGNAL = 5.1; EXPRESSED IN HEART, SIGNAL =   5; EXPRESSED IN FETAL LIVER, SIGNAL = 4.9; EXPRESSED IN BRAIN, SIGNAL = 5.6; EXPRESSED IN BONE MARROW, SIGNAL = 5.5
atttcaacagggtctggcacgtaatagacactcagtgcctatgagaatcttaccgttgtggttgtatggtgtaagaatagcaagcacttaagtagtacacgtgtgcatggtaagtactccatcaatgctaacttttattattatagttagatagtatacgagtattaagagacttagaatggggcctgggcactcagtgagtgttaagcttttattatcgtacaccaggtgaattttctgtgggggttttctaagctgtacaatcatatcatccacacgtaatcacaatattaccttctcctttctcatattttcgacttcaattttttttggtctaattgtgcgaaccatcacttccagaccaaaattaatagtggtgagaataggtactgttttgttgttcctgacttcaagaatattaagaatattgctggctgttggatccatacatgcacaggcacacacatgaaatgacatcaaacaagcattttttaattatcattttgccaagggcttttgtttaaaaaacaaaacaaaacaaaacagaaagggactcaatgctcttagatgcctttcaaccctattaagctgccaaaggcg

SEQ ID NO: 7689 - DNA, 501 bp, Homo sapiens
  MAP TO AC010802.4; EXPRESSED IN LUNG, SIGNAL =   2; EXPRESSED IN PLACENTA, SIGNAL =   2; EXPRESSED IN ADULT LIVER, SIGNAL = 2.3; EXPRESSED IN FETAL LIVER, SIGNAL = 2.1; EXPRESSED IN BRAIN, SIGNAL = 1.9; EXPRESSED IN HEART, SIGNAL = 1.7; EXPRESSED IN HELA, SIGNAL = 2.9; EXPRESSED IN BONE MARROW, SIGNAL = 2.2
tggatgcaaacatcctcaacaaatattagcaaattaaatctaacggtgtctgaaaataattatatacttcccaaagtgagatttatttcaggtgtgcaaggctggttcaatattttaaaatcaagtaataaaattcctcacatcagaaggctaaagaagaaaaatcacatgattatataaacaaatgtagaaaatttatttgacaaatctaacactcgttcatgataaaaactcttagttaacaacaaatagagggaaccttttaaacttgagaaaaaataatctacaaaaatcctacagcaacatcatactactggtaagacactagaagttctcttacttacattgggaacaatgcaaggatatgtcctcccaccactccttttcaacatcatgctggaagttctggctaatgcaataagacaagaaaagatgataacaggtatactaattgggaaaaaataaataaaactatctttgtttgcagatgatttgatcgtc

SEQ ID NO: 7690 - DNA, 587 bp, Homo sapiens
  MAP TO AL135937.22; EXPRESSED IN ADULT LIVER, SIGNAL = 1.5; EXPRESSED IN HELA, SIGNAL = 3.2; EXPRESSED IN BRAIN, SIGNAL = 1.9; EXPRESSED IN BONE MARROW, SIGNAL = 2.1; EXPRESSED IN LUNG, SIGNAL = 1.5; EXPRESSED IN PLACENTA, SIGNAL = 2.4; EXPRESSED IN FETAL LIVER, SIGNAL =   2; EXPRESSED IN HEART, SIGNAL = 2.2
ctagtctttcccaaaggcccctagattaattgttagtgacattgctaggaaactcccatgaaatcttgtaggtccatggaaaccatgcatcagactctaacatattgtgtagatcacatgctatcatgtgaaaatgttctgttccaaagtcccctggaatttgggatgtatttttcctacagaacaatgttccaagcaaaggtctattggattcctcaagtggctgactgcaacgaatgtgctcagaagctgctgaggcttaaactttcagcccttcgagaggcagctcaagagattgggaaactggaagaggctctgctatatcctgtcctccttttgggagatcttggcagcccttgcgtagagagagggaggagggttggtgggcatgggggtttggtggggaagctaaggtcctcctttggaaacaacggaggaagcctccatgttaaaggggaaaggaggagacaggaaacctccattaaattgtttataagttgaattgtttctaaagccggaactgacaactgtgtttttacaaagtagaaaaggatgcaacgagttccacagccctcattcaggcatat

SEQ ID NO: 7691 - DNA, 543 bp, Homo sapiens
  MAP TO AC016648.3; EXPRESSED IN PLACENTA, SIGNAL = 1.1; EXPRESSED IN HEART, SIGNAL = 1.3; EXPRESSED IN FETAL LIVER, SIGNAL = 0.84; EXPRESSED IN BONE MARROW, SIGNAL = 0.9; EXPRESSED IN LUNG, SIGNAL =   1; EXPRESSED IN ADULT LIVER, SIGNAL = 0.81; EXPRESSED IN BRAIN, SIGNAL = 0.89
atttcatgccaatggaaagcaaaaaacagctggaacagctatacttacatcagacagaatagatttcaagacaaaaactataagaaaggacaaagaatgtcactatagaaaaataagagcaccctaatatgaagcaaatattattagagctaaagagagtgatagactccaaacaataatagctggagatttcaccaccttactttcagcattggacagattttccagttagaaaatcaacaaagaaatattgaacttaatgtgcactatagaccaaatggacccaatatttatagaacatttcattaaatggatgtagaatatacattcttctcctcagcatgtggatcattctcaaggataaaccatatgttatgtcaaaaaaccaatcttaaaacattcaaaaaatttgaagtaatatcaagcatcttctctgaccacaatggaataaaactggaaatcaataacaagagaaattgtgaaaactatacaaacatttgtcgattaagaactaagaaagtgagtgcaaaccaaacccaaaat

SEQ ID NO: 7692 - DNA, 511 bp, Homo sapiens
  MAP TO AP000432.4; EXPRESSED IN BONE MARROW, SIGNAL = 1.9; EXPRESSED IN HELA, SIGNAL = 2.8; EXPRESSED IN LUNG, SIGNAL = 2.1; EXPRESSED IN PLACENTA, SIGNAL = 2.2; EXPRESSED IN ADULT LIVER, SIGNAL = 2.3; EXPRESSED IN HEART, SIGNAL = 2.1; EXPRESSED IN FETAL LIVER, SIGNAL =   2; EXPRESSED IN BRAIN, SIGNAL = 2.1
acgtcacgttgggaggtatctggggaaataagtttttgtaactgggtattttgctgcgtcaaagaaaatcgaggtttagaaggtaggagagaggttattgggtaattagcagacatgatattgatactaacagttgctgtttcatttatctaatgctgtgcaacaaaacatggcaaagtctagtgacttaaacaacgacgacatttaatacgctcaggtctggattgcgacagggatcagctgcagtggctcaaggactaaggctggaataatctgaaatcttgcttcctcacatgtctgggagttgattttggctgttagctgatggctccactgggacagtgcctggaacaccttcactggctcctctatgcagctgcttggcatctgcacagaatggtggctgagctgctttttatgactcagccttggatatcacatggtgttactattgctgtagtcataggcttacctctctattcaaggggagaggacctgaccccacattttt

SEQ ID NO: 7693 - DNA, 561 bp, Homo sapiens
  MAP TO AC013291.4; EXPRESSED IN PLACENTA, SIGNAL = 2.4; EXPRESSED IN FETAL LIVER, SIGNAL = 2.1; EXPRESSED IN BONE MARROW, SIGNAL = 2.2; EXPRESSED IN LUNG, SIGNAL = 2.6; EXPRESSED IN ADULT LIVER, SIGNAL = 2.2; EXPRESSED IN HEART, SIGNAL = 2.1; EXPRESSED IN BRAIN, SIGNAL = 2.2
tggaaatgttggttgttgttgttgttgtttttttcctctagagatggcagatcctgaggtagttgtgagtagctgcagctctcatgaagaggaaaatcgctgcaattttaaccagcaaacatctccatctgaggagcttctattagaagaccagatgaggcgaaaactcaaattttttttcatgaatccctgtgagaagttctgggctcgaggtagaaaaccatggaaacttgccatacaaattctaaaaattgcaatggtgactatccaggtaagcatctcagatcatgagtttggtgaaagcctcttttaattacaaagataactatggacagtggttttttttttaaataacttttaactatatgcaaaatgttgaagagtaacagataagaaaacatacaatcttagacccttctgtcttcaacatttgtgaaagagtttgtcttcttttttcttagtttttttcttgtatcgttcgctaagttataattttagtcacataatctaattaattttcaggaaaagaaaactaatatttggcttccaatgaagaggttc

SEQ ID NO: 7694 - DNA, 582 bp, Homo sapiens
  MAP TO AL139245.2; EXPRESSED IN HEART, SIGNAL = 1.3; EXPRESSED IN ADULT LIVER, SIGNAL = 1.6; EXPRESSED IN BRAIN, SIGNAL = 1.3; EXPRESSED IN BONE MARROW, SIGNAL = 1.6; EXPRESSED IN LUNG, SIGNAL = 1.3; EXPRESSED IN PLACENTA, SIGNAL = 2.3; EXPRESSED IN FETAL LIVER, SIGNAL = 1.6
tttccagctttggcagtctcatgcagtctcacaacttcaaccaccatctttatgtggatgtacgatgtctttcttagatccaaaggcacaattaacacatccatatgggtgtcccatgagcaactcaaatgataacttgtcacctatatttgctctccttgatcttttcatccttttactcttctcattctcactggcctccacatttaaagttgttaaggcctactgatttatccctaaaatatcagtagtttctatggatgcaaattagaactacactaacacatcatttccccttgtcagatatgcaagaatccaaaagtttgatgacataccctactggcatgactgtgaagagtcagagacttgcatgcattgttagcaagaatgcagagtggtataacccctatggaacttttttgcaatgtatggccaaattacctaagccttgatcctttaagttaggaatctatcccaaagacacactagcaatatgtaaaatgatacatgcacaaagctatttgtcaaaacacaatttgtaatagtaaataaatgaaaacaacccccaaatgttcatgaatt

SEQ ID NO: 7695 - DNA, 505 bp, Homo sapiens
  MAP TO AC012241.4; EXPRESSED IN PLACENTA, SIGNAL = 0.99; EXPRESSED IN ADULT LIVER, SIGNAL = 1.7; EXPRESSED IN HELA, SIGNAL =   3; EXPRESSED IN HEART, SIGNAL = 1.3; EXPRESSED IN FETAL LIVER, SIGNAL = 1.7; EXPRESSED IN LUNG, SIGNAL = 1.6; EXPRESSED IN BRAIN, SIGNAL = 1.6; EXPRESSED IN BONE MARROW, SIGNAL = 1.4
gggagaggagaccaggagacacagcaagaaagggactttatatggcacataatgtgttgaatgttttcatttttaacgatatgaaatggaatctattcaaaaaatggatatattaataagtgcacaccatacacggcactgattttcatcagaaaatccaagtgtgatataaaataggagactatctgaactttgatatgaaagttggtaccacgctcacaaaaggccatcatgaagatgccctggaatccaatggtttacccaagacacgacactcatcacggacaccaagaagtcaggaggggcaagagacagcagcaaacaagcagaggtggttaccttcctgtcgcaggttttaggactcccagcagtgttctgcttgaggaagccagctgttgttgaccagcgtgtgggatttttccttgaaggctcttcagaggaaaaattactatcactgacagaagtggagaggccaattagagctgggtcactactgcgtcgaaca

SEQ ID NO: 7696 - DNA, 575 bp, Homo sapiens
  MAP TO AL137022.6; EXPRESSED IN BONE MARROW, SIGNAL = 4.3; EXPRESSED IN ADULT LIVER, SIGNAL = 3.1; EXPRESSED IN HELA, SIGNAL = 6.9; EXPRESSED IN HEART, SIGNAL = 4.4; EXPRESSED IN BRAIN, SIGNAL = 4.2; EXPRESSED IN LUNG, SIGNAL =   3; EXPRESSED IN PLACENTA, SIGNAL = 4.9; EXPRESSED IN FETAL LIVER, SIGNAL = 4.5
tctggttgtcctcactgctgcactcccaccagcaccattgcagtttaccaatgccatggcaatgtcaggaagttatgctatatggtctaaaaagggaaggcatgaataatccactccttgtttagcatgtaatcaagaaataaccaaaaaatgggcaaccagcctcccttggcgctgctctgtctatgaagtagccattcttttattcctttactttcttaataaacttactttgtctttaccctgcagactcaccctaaattcttgtgtgagatccaagaaccctctcttggggtctggatccagacctctttctgtaacactagctctgggaagaatcctaacttaacactgtaagtatgctattcaatttaatctttataacaaccatataaagcaattctcataagctccattttacagataaggaagatgaggaagggttcaagagtttaagtaacttacccaaattcaaactgataataaatagtggtgacatgattataactcacacctatttgtgactcaggaactgattctctcctgacttactatgatgtgcctccatctaaccc

SEQ ID NO: 7697 - DNA, 552 bp, Homo sapiens
  MAP TO AC006054.2; EXPRESSED IN HELA, SIGNAL =  55; EXPRESSED IN LUNG, SIGNAL =  29; EXPRESSED IN PLACENTA, SIGNAL = 5.4; EXPRESSED IN HEART, SIGNAL =  24; EXPRESSED IN FETAL LIVER, SIGNAL =  62; EXPRESSED IN BONE MARROW, SIGNAL =  37; EXPRESSED IN ADULT LIVER, SIGNAL =  13; EXPRESSED IN BRAIN, SIGNAL =  44
taaaggaaaccccaacatgcatgcactgccttggtgaccagggaagtcaacccacggctatggggaaattagcctgaggcttacctttcattgtcactgtctccccggggtgtgcttgtcgaagagatattccgccaagccagattcgggcgctcccatcttgtgcaagttggtcacgtggtcacccaattctttgatggctttcacctgctcattcaggtaatgtgtctcaatgaagtcacacaaatgggggtcatttttgtcagtggccagtttgtgcagttccagtggtgactgattcacatttttttccaaatgtaatgcacactccatctcattcagcccgctcccagtcatcacagtctggtttcttgatatcctgaaggaagattcggccacctcattggttctgcagcttcatcagttcctcagcatgttccctctcctcatgagattggtgaagaaagtatttggcaaagttcttcaaagccacatcatcgtggtcaaagtagtaagacatggacaggtaaacgtaggaggcgtagagctcca

SEQ ID NO: 7698 - DNA, 509 bp, Homo sapiens
  MAP TO AC025738.1; EXPRESSED IN ADULT LIVER, SIGNAL = 2.8; EXPRESSED IN BONE MARROW, SIGNAL =   3; EXPRESSED IN PLACENTA, SIGNAL =   3; EXPRESSED IN HEART, SIGNAL = 2.7; EXPRESSED IN FETAL LIVER, SIGNAL = 2.4; EXPRESSED IN LUNG, SIGNAL = 3.2; EXPRESSED IN BRAIN, SIGNAL = 3.2
ggaccagttccttctccctcatgaaagtcacacacatactgtgtttgggaacttactcttacttgataactatgcatagattaatatatatatataatatatatatttcttatattatcaagtaattccattcaattcaacaaaaatatgcaaaacatctgtcatgtgccaagtactgtgtaaggtgctagggatataagatttgtcagactgaattgtttttgacttgactttcagccccaaaataataaaggcaaataagcaatgtgagaaggacttattttcaatcatttaattcaaatcatttaacttggtaacatggttacatatttgtctcagtatggcatttgcatgcatttcttttatctgtcttacctgaaggatcttatcaccaggctgcagtaggtttgatgctggcccatcaggctgaaccctagtaacaaagataccctataagtcagaagtaacagaggttaggattctattaccaagaaccaggcctacttaaa

SEQ ID NO: 7699 - DNA, 523 bp, Homo sapiens
  MAP TO AL161441.2; EXPRESSED IN HELA, SIGNAL = 3.5; EXPRESSED IN LUNG, SIGNAL = 3.7; EXPRESSED IN PLACENTA, SIGNAL = 3.5; EXPRESSED IN ADULT LIVER, SIGNAL = 3.3; EXPRESSED IN FETAL LIVER, SIGNAL = 3.4; EXPRESSED IN BRAIN, SIGNAL = 3.2; EXPRESSED IN HEART, SIGNAL = 2.7; EXPRESSED IN BONE MARROW, SIGNAL = 2.8
ggtgtgtctgtgagggtgtgtctgtgaaggagattaacatttgagtcagaaggctgggaaaggcagacccacccttaatctgggtggtcatcatctaatcaactgccagcccagccaggatataaagcaggcagaaaaacatgaaaaggctaaattgacttagcctcccagcctacctgcttctcccatgctagatgcttcctgttctcgaacattgaactccaagttcttcggctttgggactggggctggtttccttgctcctcagcttgcaaacagcctattgtgggaccttatgattgtgtgagttaacactccttaataaacttccctatatatctatctgtcttattagttctgtttctctagagaaccaagactaatataatatgtgagtcatgggcagagttgcaaatgacacctctggctttatcaacatatgtcctaaattccacataatgagtttggtgattgttttaggatatactgtatgaattcagtatgccaagccatttcttcctct

SEQ ID NO: 7700 - DNA, 533 bp, Homo sapiens
  MAP TO AC020919.3; EXPRESSED IN ADULT LIVER, SIGNAL = 0.99; EXPRESSED IN HEART, SIGNAL = 1.3; EXPRESSED IN BONE MARROW, SIGNAL = 1.1; EXPRESSED IN LUNG, SIGNAL = 1.1; EXPRESSED IN PLACENTA, SIGNAL = 1.1; EXPRESSED IN FETAL LIVER, SIGNAL =   1; EXPRESSED IN BRAIN, SIGNAL = 0.94
gcgagggatctagactgcacactcctcatgagaatctaatgcctgattatctgaggtggaacagtttcatctcaaaaccatgccccatcatccctggtccacagaataattgtcttccacgtttaggtccctggtgccaaaaaggttggggaccactgatatatagtacatagtacttgataatgataataaatgactatgttactggcttatgtatcaactaatactagactttttattgttattttacagtgtgctccttcaggagcctcaggcaagtccttcaggagatattccaaaagaaggcattattatcatagaagatgacagctccatgcatgttattgcccttgaagagctcccagtgggacaagatgtgggatggaagacaacgatattgatgatcctaaccatgggtaggactaggctaatgtgtatttgtatcttagtttttaataaaaaagttttaacagtaaaaaaattaaaaataggggaaaagctcatagaataaggaaatgaatgacttttgtgca

SEQ ID NO: 7701 - DNA, 529 bp, Homo sapiens
  MAP TO AL139117.3; EXPRESSED IN LUNG, SIGNAL = 4.4; EXPRESSED IN PLACENTA, SIGNAL = 2.8; EXPRESSED IN ADULT LIVER, SIGNAL = 2.3; EXPRESSED IN FETAL LIVER, SIGNAL = 2.6; EXPRESSED IN BRAIN, SIGNAL = 2.6; EXPRESSED IN BONE MARROW, SIGNAL = 5.5; EXPRESSED IN HEART, SIGNAL = 2.7
ggagctcaggtagtgatggccgggatgagggatgggggtcccaagggagggagagacagacagagacaggggatgggcggggagggggagactcagagaaaacagagacagagacactgagggtcccagagggagacctggggaggtgtcagctcagagcaaggtggggcagcccctcgcccatccttcttctctccaggacagttctatgacagagtctccctctcggtgcagccgggccccacggtggcctcaggagagaacgtgaccctgctgtgtcagtcacagggatggatgcaaactttccttctgaccaaggagggggcagctgatgacccatggcgtctaagatcaacgtaccaatctcaaaaataccaggctgaattccccatgggtcctgtgacctcagcccatgcggggacctacaggtgctacggctcacagagctccaaaccctacctgctgactcaccccagtgaccccctggagctcgtggtctcaggtgggggccttgaccctgtcctctctg

SEQ ID NO: 7702 - DNA, 568 bp, Homo sapiens
  MAP TO AP001439.1; EXPRESSED IN LUNG, SIGNAL = 2.1; EXPRESSED IN ADULT LIVER, SIGNAL = 2.5; EXPRESSED IN HEART, SIGNAL = 2.3; EXPRESSED IN BRAIN, SIGNAL = 2.7; EXPRESSED IN PLACENTA, SIGNAL = 2.1; EXPRESSED IN FETAL LIVER, SIGNAL = 2.3; EXPRESSED IN HELA, SIGNAL = 3.3; EXPRESSED IN BONE MARROW, SIGNAL = 2.4
atcaatgcaggttttggtccctgatggatctgaatcccacttcccattctggacattcatgtgcatgttcagtctgccacagaacatggcaatctggggttcagccagcaggccagcattaccatcagtgggtacctgaaagaagaagcttcagttagttatagtatccatagctccaaggcagaggcttggaggaagaacagggataactatcaaaaagagttctattcttgctcattctcaattaggaatcagcccggtcttcaacactcctttagattaagtgttatgtatgctacagatgttcttagccacctataaggcaatgctttcttttatactaaaacagagaaggaaattaccaataccgaaaggaatttattcatgaaaaatttacacgttttcccatatgagattttgtggtacctgctgaaaggttctgacaacaaaattacacgttttcctataataaatataatcactgtggaggctaccgcattcttataataaactccactgactcacacagagcatgatgcctgccaggccctgcctgatgaccaagact

SEQ ID NO: 7703 - DNA, 563 bp, Homo sapiens
  MAP TO AC013497.4; EXPRESSED IN LUNG, SIGNAL = 1.8; EXPRESSED IN PLACENTA, SIGNAL = 1.8; EXPRESSED IN ADULT LIVER, SIGNAL = 1.8; EXPRESSED IN FETAL LIVER, SIGNAL = 1.7; EXPRESSED IN BRAIN, SIGNAL = 1.6; EXPRESSED IN BONE MARROW, SIGNAL = 1.6; EXPRESSED IN HEART, SIGNAL = 1.7
tctccttctccctctccctctgtcacacatgcacacacacacacacattctcacactcacactgaagcactcattacttccctgtagtactcatcatccctggaatgactctctgtgtttgtcttactccctatattgtaaactctgtaaggacaggggtcttgtctgacatttttactgttgttcctaatacctagtagcacactgctggacatgtggaggttgttcattgaatgcgtaggacatgtggagtttcaaatgaagtggaacttctgagcaaaagtgcttagtatgtatatagataagattgaagactttggagctttctccatttagtgacaactgaagtcaaggagtagattgcccacatagaatacagagtggggaaagaactctgaagaatagcaacatcaacagctggtagtaacaaggttacatacagttaaggtctgcgagatgcagttggagggttaaaggaattaagacatgggaggagagatttaagaaggagggaggggagatatgaagtaagggagaaggaagcaagagaaggaagtgccagc

SEQ ID NO: 7704 - DNA, 571 bp, Homo sapiens
  MAP TO AC022860.3; EXPRESSED IN LUNG, SIGNAL = 1.3; EXPRESSED IN ADULT LIVER, SIGNAL = 2.6; EXPRESSED IN HEART, SIGNAL = 1.2; EXPRESSED IN BRAIN, SIGNAL = 1.2; EXPRESSED IN PLACENTA, SIGNAL = 1.2; EXPRESSED IN FETAL LIVER, SIGNAL = 1.6; EXPRESSED IN BONE MARROW, SIGNAL = 1.1
tctccctgccatatgtcctcttccccaaggtactgggggccttatcactggcagaagtcttaccccaggagatcaagcaggagatccaccaggtgctcatggaccatggagtcccatgtcattacacctgcttcttgctgcacccagaagacagcacactggagcgcttcttagttctgcacagcatccaggggctgcaagaggactcagtgctgtgcaaggtggaggtttgtctggaagttgggtggcctgatcaggggagggctcctggaggtccctgcccttttggggtctctgtgtcacagattagcacatcagggcaggattggagcacagctctgcctctcaggccatcacacctgcaccctccaaattcatggcccatgggttaaaaaacagtcatgaggctaaaaatatcggggagtaccaagccaggctggaaatcagcccgatggaattctgtaagtataaatgacattcatttaagaaaaccaaaaagcctcacagctcctgagtgcagaagtcggcctgatccagcacaataagcaggtgtggtgagactggcttggtt

SEQ ID NO: 7705 - DNA, 585 bp, Homo sapiens
  MAP TO AC013691.3; EXPRESSED IN LUNG, SIGNAL = 1.3; EXPRESSED IN PLACENTA, SIGNAL = 1.3; EXPRESSED IN ADULT LIVER, SIGNAL = 1.2; EXPRESSED IN HEART, SIGNAL = 1.4; EXPRESSED IN FETAL LIVER, SIGNAL = 1.5; EXPRESSED IN BRAIN, SIGNAL = 1.3; EXPRESSED IN BONE MARROW, SIGNAL = 1.4
gaactgttcctgccttgctccccacagggtccatatcacctaggctggtgcccagcacatagttggttgtcgattcatatctgtaggattaataaatgggtctgttatatccgttttactgatggtgaaatgaaggaccagagagagtaagtggcctttccaaggcttcacagcaagcttgtggaagaaaccaccaagaaaccagctcttgagacttccagcatttgttccagttcctctgcaagggaaacccccattccctgctctctctttttcccctcctcacaggcagcaggtatgtgcacagacaggcctggagctgggctagggtaggagtcccctgtgaggctccacctctgcctctccagctccttggccgggacccacttctgctccaactcttgctggccattaagtctgtgccccgcctcactcagcccgccgcagccccactgcctgtggagaggtgagtcccacctctctgagcctgctcccttccccagccataagacgaatcagcctaggagattctgaggctccttcagccaggagggcctgtgatgccctgtgaagacggaagaggct

SEQ ID NO: 7706 - DNA, 517 bp, Homo sapiens
  MAP TO AC010363.3; EXPRESSED IN HELA, SIGNAL = 6.9; EXPRESSED IN BRAIN, SIGNAL = 7.5; EXPRESSED IN LUNG, SIGNAL = 8.9; EXPRESSED IN PLACENTA, SIGNAL = 7.8; EXPRESSED IN ADULT LIVER, SIGNAL = 7.8; EXPRESSED IN FETAL LIVER, SIGNAL = 8.5; EXPRESSED IN HEART, SIGNAL =   7; EXPRESSED IN BONE MARROW, SIGNAL = 6.2
ccatccataaacgcacacacaagcagcccactgtaaatggaggaacttctggagaccttgctctctcatcttacatttacagtaaggcccttgggactgagtaaacaaagccaaatttccaaatgaatggaaacttactcagtggacttccttcatttcctgcgtggctgccagtacttgggcagtgatgagaccagtcacaattactctcctctggttaaaaaggaaagcaactctgcctcctgccccaatgtccaaggaaggagacgtcttgagctggcaaaatgtgggtcaacccatagagtgccaacagctgaggcctggattgtgtgagctcagtagcaaggccagctctctcttttatgccctggcaacatttcaaggtctttactcaaacacctgtcaggtgccttgtatgtgccaggcactgtgctagaaactagggggcatatactaagacagtgtaagtcctgactctgcaagagggcagagaatagcctgagatgcaagcatgaaa

SEQ ID NO: 7707 - DNA, 595 bp, Homo sapiens
  MAP TO AC025747.3; EXPRESSED IN HELA, SIGNAL = 2.7; EXPRESSED IN PLACENTA, SIGNAL = 1.3; EXPRESSED IN ADULT LIVER, SIGNAL =   2; EXPRESSED IN FETAL LIVER, SIGNAL = 1.6; EXPRESSED IN BRAIN, SIGNAL = 1.7; EXPRESSED IN BONE MARROW, SIGNAL = 1.6; EXPRESSED IN LUNG, SIGNAL = 1.7; EXPRESSED IN HEART, SIGNAL = 1.6
gctaaatgattgaggggctctataatttggataaaatgagcttttacacataattctatgctgggtgtatgtaatttattctgcatttgtgcattaaaagctctaactcttaagatattttccattctcctggcttaggccatatcatgttctaatattcctgtttttattacaaatattctgctctccatgccaaacactgacccttctataaagcaagagatccttgtcttctcctggaatgcatgggaaatactaatctctaaggccagatgttgagagaatagagagtctaggccaggctcaaatgaggaagcagaattctagaccaaaaagtgaagaactgctctcaaatagatgacacaccctcaggacaataagaacagaaaaccctctacttccaccagatcaacataggttacatcacaaaagaaagatcaatcttacctcggcctctagaacagctccagattcgaatggtttgatctttgcttccagtggctaagtagcaaccttttgttactggagcttgtgctacagcattcccgttggtaatttcagcttcttctatgagataggtggcaattttgttttt

SEQ ID NO: 7708 - DNA, 592 bp, Homo sapiens
  MAP TO AL136306.2; EXPRESSED IN HEART, SIGNAL = 1.6; EXPRESSED IN BONE MARROW, SIGNAL = 2.5; EXPRESSED IN PLACENTA, SIGNAL = 1.1; EXPRESSED IN ADULT LIVER, SIGNAL = 1.1; EXPRESSED IN BRAIN, SIGNAL = 1.8; EXPRESSED IN LUNG, SIGNAL = 1.5; EXPRESSED IN FETAL LIVER, SIGNAL = 3.2
taaattctgtgctgttgccgaacataaactgcagcgaaaccacagttttcctttatccagcatgatttggagacatctgctataatcttcttttctgttgactttacagatgtaactctcacggcaaccacaagttaactggttactggtctctattactggaaaatcatcttcggttttaattgaagtttcagttttttctgacacaaatacataatctatgctgtggtgctcctcataatgactcagaaatgcttcttccacattaaagataagatcacaaagcccacagaagtatttaatctttatctcattgtcatgctcatcttggcaatgtcggtacaatgtttctatcttatgaaaaggctttctgcagtgagcacagctgtatctatgaaacttgtggcttgccaaagacatgcagtgctgttttacatattcctgggaatcaaacatatcttcacaaatccggcattgccatttacccctcggagaactatttgccggggaatgatcaataacagtaatagctgatgaaggcttgttagcagtcaaattatccaatgttgtagaggatgatggcaaagtttca

SEQ ID NO: 7709 - DNA, 591 bp, Homo sapiens
  MAP TO AC013685.3; EXPRESSED IN HELA, SIGNAL = 2.3; EXPRESSED IN LUNG, SIGNAL =   2; EXPRESSED IN ADULT LIVER, SIGNAL = 2.3; EXPRESSED IN HEART, SIGNAL = 1.9; EXPRESSED IN BRAIN, SIGNAL = 2.5; EXPRESSED IN BONE MARROW, SIGNAL = 2.7; EXPRESSED IN PLACENTA, SIGNAL = 2.4; EXPRESSED IN FETAL LIVER, SIGNAL = 2.3
gcaaaggcaatttaaggcagagaagatggttgaaaaacaaatgatgaggaaacacttgatatccacacgtaaaaaacaaatataaagaggctcaacatacatctcaaactttacacaaaataaccaaaagagatcattgacttaaatgtaaaatataaaaccataaaacctctagaagaaaattaatgtaacctttggtttggcaaaaagatatttagttatgaaaccaaaagcaaaatctatacaagaaaaatatattgataaactgagctttattaaaattataaacctttattctttgaaaaataccattaagagattgaaaagaaagcccgttgtgatggttactattgagtatcaacttgactggatagaaagaggcaaagtattgatcctgggtgtgtctgtgagggtgttgccaagggagattaacatttgagtcaatggactaggagaagcagaatcacaccctcagtctggatgggcacaatctaatcagctgccagtgtggccagaagaaaagcaggcagaacgtggaaagaccagactggtttagtcttctggtctacatctttctcccatgctggatgt

SEQ ID NO: 7710 - DNA, 560 bp, Homo sapiens
  MAP TO AC009874.5; EXPRESSED IN ADULT LIVER, SIGNAL = 2.3; EXPRESSED IN HELA, SIGNAL = 2.8; EXPRESSED IN FETAL LIVER, SIGNAL = 2.1; EXPRESSED IN BRAIN, SIGNAL =   2; EXPRESSED IN PLACENTA, SIGNAL =   2; EXPRESSED IN HEART, SIGNAL = 2.3; EXPRESSED IN BONE MARROW, SIGNAL = 2.1; EXPRESSED IN LUNG, SIGNAL = 2.2
tcaaacaaccttcccacctccaccacccaaagtgctgggattacaggcatgagccatgatccccagcctgctggttgtgcaagatgtacactcatacctccaagggctgtcattaccttttaactaaactacattctatgtcataaataattttctaaaatatggcagggaaataatttgagggaggtctccctttctctaatttgcatgtcatcttactgcttagtatcagagcttctgcctctctcctcaaacctcagattcttacctcttctaccaggctcctcactctcaaacagctcacactcactaaagctatcggacagaaacacagtcatcttcccacctgcaaagcagctgctggcatccacaccatgttcttctgtctcatgtatcaactcccttctcagatcggcccatctacccatgttctggatcctccccaccttctcaagagcacagcccatttctgactcttactctttttagattcttctcttcagtattcaaagtgctcctcattaaaaattactcttcactcctactccactggaccgttc

SEQ ID NO: 7711 - DNA, 505 bp, Homo sapiens
  MAP TO AC019284.4; EXPRESSED IN HELA, SIGNAL = 4.5; EXPRESSED IN LUNG, SIGNAL = 3.7; EXPRESSED IN ADULT LIVER, SIGNAL = 3.6; EXPRESSED IN BRAIN, SIGNAL = 2.9; EXPRESSED IN PLACENTA, SIGNAL = 3.6; EXPRESSED IN HEART, SIGNAL = 3.3; EXPRESSED IN FETAL LIVER, SIGNAL = 3.5; EXPRESSED IN BONE MARROW, SIGNAL = 3.5
taaagctaggctgggagtgctttggagacatgtcctcatcagcagggcctggcccccgtggcagtgttttaattcaagaagcctaatttaattagcaccctggcactgggtcagctgctgtgccgccttggatctctggcctgaggagaaatgtgcaacccctgctctttttatttctagttagcctcacaaaagtaggatgtccaaggagagagaggaactttgcttctccatcatgttttgcatatggtgctaattgagctgacagtcttggaccacagtctgttattgctgcagctgagtcttgagctgatacccagtgaagggattgcacatgtcaaatggctcatctttgcccctgtggctcttgaaatatggaagcaaattgatcagggggagctcttcagtctgcatgcttgagtaactgcaagcaaaacaaaactaggaaaaaataaggtattcaaatcctactggtaatggctacaccctctctcctcaatttccc

SEQ ID NO: 7712 - DNA, 536 bp, Homo sapiens
  MAP TO AC019276.3; EXPRESSED IN HELA, SIGNAL = 3.3; EXPRESSED IN PLACENTA, SIGNAL = 2.6; EXPRESSED IN LUNG, SIGNAL = 2.9; EXPRESSED IN HEART, SIGNAL = 2.5; EXPRESSED IN FETAL LIVER, SIGNAL = 2.6; EXPRESSED IN BONE MARROW, SIGNAL = 2.8; EXPRESSED IN ADULT LIVER, SIGNAL = 3.1; EXPRESSED IN BRAIN, SIGNAL = 2.4
tgtcctccaggtcataagcctagtacctgttggggtagtttttcaatcctcaccctcctcccaccctccaccctcaggtaggccctggtatctgttgttgccctgtgtccatgtgtattcagtatttagcccccacttataagtgcaaacacacagtatttggttttctgttcctgcattagtttgcttaggataatggcctccagttccatccctgtagctgcaaacgacatgaccttgttcttttttaggggacagctgtctttgtgcttattgaagcactttaacgaagcagttttcacagctgcatactattccactgttcagactcccgtcatattcttgaccattccctattgatggagatgaggctgcttccagtttcgctcttgtgcgtaaccctgatgaacacatcttgtatgtacatcctcttgtacatttctaattatttgctccaaatcctagtggtgtggctgggaggctgtgatgcatgttgcttatttctgtttcagaaaggtgtgtccgttcaccttcct

SEQ ID NO: 7713 - DNA, 504 bp, Homo sapiens
  MAP TO AC021237.3; EXPRESSED IN HEART, SIGNAL = 9.1; EXPRESSED IN PLACENTA, SIGNAL = 8.9; EXPRESSED IN ADULT LIVER, SIGNAL = 9.8; EXPRESSED IN HELA, SIGNAL =  13; EXPRESSED IN BRAIN, SIGNAL = 8.1; EXPRESSED IN BONE MARROW, SIGNAL = 9.1; EXPRESSED IN LUNG, SIGNAL = 9.8; EXPRESSED IN FETAL LIVER, SIGNAL = 8.2
aatggagcaacaaggctgactataagaggggaaggtatcgttgcttttttttttttttttttgccaaggttgaggtattttcaagcctatttcatatttagagctttatggacaaacaaacaaacaagcaccactggagttatttcttcacttggccagaatagtaaaactctgtcctctttgatagctagtgaaatccccaagagtctttatcaacctgatcatctgaattcttattatactgacttgcttaacatcaagatctggattaatgactgaactaaaaggaatgcaattaacccaactcagcaattatttgctttattcttcatgagtctaataacatttaatttattttaagatcaaataaaacattttgtgggtgttgggtagaatgttgataagaaagtataatagagaaataatatgttaatgaaagaggaaaggcaatagaaaacaaaactttagattccttctcctgccacccaacctcaggcttcataa

SEQ ID NO: 7714 - DNA, 501 bp, Homo sapiens
  MAP TO AC024193.2; EXPRESSED IN HELA, SIGNAL = 4.2; EXPRESSED IN PLACENTA, SIGNAL = 2.3; EXPRESSED IN FETAL LIVER, SIGNAL = 2.5; EXPRESSED IN BONE MARROW, SIGNAL = 2.5; EXPRESSED IN LUNG, SIGNAL = 2.8; EXPRESSED IN ADULT LIVER, SIGNAL = 3.5; EXPRESSED IN BRAIN, SIGNAL = 2.8; EXPRESSED IN HEART, SIGNAL = 2.4
atcggaaatgctccaatcagcatttccttcaagcatcatgttggcactcaaaaactttccaattttggagcattttggatttcagatatttggattagggatactcaacctgtattagcaattccacatttatgaattcatctgctcactaaaacttatttgtaacccccacatcaatactcaggtcattcacaaacgtgcaaaaaatttgagtcattccatgcacactttatcagctgaggttccacaaggcgctctgtcttcttgcttctgcctcatactgcaaacaattatccttccatggtccacttagtgccatggtttttcacatttttgtgcattttgttgattttgctgcttaaaatgacccccaagcacagtgaagtgccgaccagtatccccaagcataagaagaggcgccctatggagaaaaataacatgtgttgggtaagtttcattcagacatgaattataatacagtgctgttggctgtgagttcaa

SEQ ID NO: 7715 - DNA, 539 bp, Homo sapiens
  MAP TO AC018390.3; EXPRESSED IN HELA, SIGNAL = 7.1; EXPRESSED IN LUNG, SIGNAL = 5.3; EXPRESSED IN BONE MARROW, SIGNAL = 5.5; EXPRESSED IN BRAIN, SIGNAL = 4.6; EXPRESSED IN FETAL LIVER, SIGNAL = 4.8; EXPRESSED IN ADULT LIVER, SIGNAL =   6; EXPRESSED IN PLACENTA, SIGNAL = 4.1; EXPRESSED IN HEART, SIGNAL = 4.4
aagagggccacagaaatgagtaatgtactaagagtgatctgacctagtttgttatatggcttggggacatcacttaaattttctgtgtgtgtttcgaagcaagtgctttgaaatgaccagtagcagaagttccagttgacatctttgtggcctatactcacaggcaaactgcacccattgctcaccaggtaacataggtatagtttttatagacatcaaggacaggggcagaagatatctcaatgaaataatgatgttcagctgttgaaaaactcgtaatgaattccagaatgtcagccacagcttctttctacagcacagaaaacactatattcagagaaattagagaaaaatgtgaaataaaatgcctgtaacagtcttaattagcaacctccggaaggatgttaataagaagcaattgtctgaagaggagaaaaattattcactcaatttgtgttggtaatgtcctacacatcactagtaactcttgtagatatagttagcaaaagtcagctaataggctggacatgcattgttta

SEQ ID NO: 7716 - DNA, 551 bp, Homo sapiens
  MAP TO AL136146.5; EXPRESSED IN BONE MARROW, SIGNAL = 1.3; EXPRESSED IN LUNG, SIGNAL = 1.2; EXPRESSED IN PLACENTA, SIGNAL = 1.2; EXPRESSED IN ADULT LIVER, SIGNAL = 1.3; EXPRESSED IN HEART, SIGNAL = 1.3; EXPRESSED IN FETAL LIVER, SIGNAL = 1.2; EXPRESSED IN BRAIN, SIGNAL = 1.2
agagctcttctgctttccccagggagggccagggccaatttctgaccagagctgctgcagaaggtctctctcctggatcagggtggatcatgtgcttgagcagactgtaaaagtcttctgagagctcctgaggaatgtctgggaagttactctcatggttatggtgccttgcagcactgttgatgggtaatgtccttactccttcagccattgcagtgattaatcccaaggcaaataggtctgctttgggaaggtactaataatcctcttgcaaaatctcatttgctaggcagcaactatctgctttttccactttgagtttgcttattgatgtcacatggcctaggtcaccaattttatatatcacatgggcagagagaaactaatcagcttcattttcaacttctgtgactccagaggagtcactttgcatcttgtgacaaaggaaggttttacaaggtttcatgtccgggtgcaccatgccagagttgtggctgtatttaagttcaagggaaatctgtagaaggatgtccttgagttttggctcttgg

SEQ ID NO: 7717 - DNA, 580 bp, Homo sapiens
  MAP TO AC022459.3; EXPRESSED IN PLACENTA, SIGNAL = 4.7; EXPRESSED IN ADULT LIVER, SIGNAL = 6.5; EXPRESSED IN BRAIN, SIGNAL = 4.6; EXPRESSED IN BONE MARROW, SIGNAL = 5.2; EXPRESSED IN FETAL LIVER, SIGNAL = 4.8; EXPRESSED IN HEART, SIGNAL = 4.7; EXPRESSED IN HELA, SIGNAL = 8.7; EXPRESSED IN LUNG, SIGNAL = 5.5
tgatctgtgcagtaggctggccttggatccttgtttgcaaggaaatgggaaaaccagaagtgaattactgtagaatgaaagatgatcatggagactagcaaagagatctcactgagcagatggctgtataaggtagagtagcatggccttcagagtttgacagagcagactttgagattcagttttgaaatcagttgtgaatgtcagctatgacattcagcatggtgtaagctttaattatttatttgcacaatgaaaataatagtacataccttttagagttgtgaagactctgtgacttactctatgcaaagtactgatagggcagtgctggcatatatcatcattgttcaataagtgtttaggatgatagtgaaaaagacaagaaggaggaaatgaaagaggaggaggaggaggaagacttgcattggactggacttgaggagtttatatttatatttatgtatgctgaagcaagattggttgccactgtgcacctccttgttttggcagcttaacactgctgagtatgattgctcatctccatcccaatcttctgtgtggttgcagtgaccatgtc

SEQ ID NO: 7718 - DNA, 532 bp, Homo sapiens
  MAP TO AL139423.2; EXPRESSED IN LUNG, SIGNAL = 4.3; EXPRESSED IN PLACENTA, SIGNAL = 4.2; EXPRESSED IN ADULT LIVER, SIGNAL = 4.3; EXPRESSED IN HEART, SIGNAL = 4.4; EXPRESSED IN BRAIN, SIGNAL = 4.6; EXPRESSED IN FETAL LIVER, SIGNAL = 5.9; EXPRESSED IN HELA, SIGNAL = 5.3; EXPRESSED IN BONE MARROW, SIGNAL = 4.6
atgtagcagcccccacatactctggcattctcctagggccccccgcgggcccctcctccccataccatagtcctggttcccagcctgcaacagctgcacctccacccccagcctgggtcgagtgggtggtgggtctgggctctgtccacatcctgtgcctgcacgggcacccttctcctcccctccacctgcctcatcttcacagtccccaaccccaactctggaagctccacttcaggttttccatactacaaccccgagtgtcaccacagggtccggcccaacctgggctccagctgattaaggatctgcaacaggatgtagggattacagtaaaacctggctccggatctgcaggggcagcaggccaagtcccagccctgggactcccctcccctacccttccagcatccctacccattacccgtcccaaacccagctgccaagtgagggaggaaggctgagccccttggcccttaggggactcctggctggactctagggggtctggactgagaaggggtggcattaa

SEQ ID NO: 7719 - DNA, 510 bp, Homo sapiens
  MAP TO AL139250.2; EXPRESSED IN BONE MARROW, SIGNAL = 1.8; EXPRESSED IN PLACENTA, SIGNAL = 1.5; EXPRESSED IN HELA, SIGNAL = 2.7; EXPRESSED IN HEART, SIGNAL = 2.2; EXPRESSED IN FETAL LIVER, SIGNAL = 2.2; EXPRESSED IN LUNG, SIGNAL = 1.6; EXPRESSED IN ADULT LIVER, SIGNAL = 2.1; EXPRESSED IN BRAIN, SIGNAL = 1.9
atgaaatgaggacccagcagtgggtgtgatgaattctacgctccatgccctgcacggagtaagctctgggtagacaggggcctctgttaccatggggaccctatccaggctatgcttgggtggtggggttataggagattgttttctcttggaggtcacctttttaacaatgaccaccaaacccaaggaacaggcggacactgaacagttccccttcctgctactgcgtggaatggctgaggaggaggcagtgctcagacaagggaggaagaggggaggccccagctcccggctatggggtgtgcccaccagaggcccggagcaggttaggctcagcgacgggaccacccagagcagcccggcattggcacctccctctgccctcagctgcccagctcatcacagcaggtgtcttcctggcttggctaatttagtcagtgcttattagttcccctcccactagggttcaaagtccatctgcccagaggccccactaggaaaccctcctcc

SEQ ID NO: 7720 - DNA, 571 bp, Homo sapiens
  MAP TO AL121586.28; EXPRESSED IN ADULT LIVER, SIGNAL = 2.9; EXPRESSED IN LUNG, SIGNAL = 2.7; EXPRESSED IN BONE MARROW, SIGNAL = 2.7; EXPRESSED IN BRAIN, SIGNAL = 2.4; EXPRESSED IN FETAL LIVER, SIGNAL = 2.7; EXPRESSED IN HEART, SIGNAL = 2.4; EXPRESSED IN HELA, SIGNAL = 3.3; EXPRESSED IN PLACENTA, SIGNAL = 2.7
gttgttctctttcccctccccaaaagggcagctgcctcaccttggcctgcagcttcctcacaagggttgcttgtctctgctgggcctcctgggagttcttcagcttccgccaggaggctgcctgattctctgccatctgctgctgtagtgccagcacctgctcttccagtaccagctgcagtgactggggcttcatgttgttcaacccagggcttcttgtctccatgagggcaccaggtggtaggcccacaggtccctaggtagccagagggtgttcacgcccagcagggtctctaaccattgccatgccacttcaacctcctcttgaactggggaccaaagcacatagtcaaatggaaaggactgttcttttactacacacaagactcctcagaacctttaaaatactaaaagggaccctcatctctgaagggcgctatgatgagcatcattccccaaatttaactgaccatgagacaagctcacaggactagtgtctcctggcatgacttttggaactctgcactaaaccaagagctcctggtttatcactgcatccttagttcctggc

SEQ ID NO: 7721 - DNA, 591 bp, Homo sapiens
  MAP TO AL139805.2; EXPRESSED IN HELA, SIGNAL = 4.4; EXPRESSED IN BRAIN, SIGNAL = 2.7; EXPRESSED IN BONE MARROW, SIGNAL = 3.3; EXPRESSED IN FETAL LIVER, SIGNAL = 2.7; EXPRESSED IN HEART, SIGNAL = 3.1; EXPRESSED IN ADULT LIVER, SIGNAL = 3.6; EXPRESSED IN PLACENTA, SIGNAL = 3.4; EXPRESSED IN LUNG, SIGNAL = 3.7
ttaggatatgatgggggcaggagatgacaaaactgagtgtccaaagttaactaaacaagtgaaatagaaattagcaaagtgcttttgaaacagtagctacgtatccctgagaaagagacaacatggagtggaaacagctgagctacaaatggtgaaaaagaaataccagaacaagattcaaggcagaagaaaagaagggacagaaagcaatgctgaagaagagcgaagaatcacaaagactgaattcagggtgtggcagcaaagttatcaaaaccaaagaggccttggtgtaagtgaaggaggctctccttcatacatgccgactgccacacttggagtgtctgtacctgagagaatgttcactgactagatttctgattctgaatccacgttatcacagaggccccgtctgccttcttcttaggcaccttcaccttagttgggtacttctgttccttcactatctcctccatctccctatacccaaataaaattatatcccagttttaatcttacccctgaatttatacccaagtgtcatctctatgtggattcctgaccatcacagaccctatgggtccctgcttgtgt

SEQ ID NO: 7722 - DNA, 551 bp, Homo sapiens
  MAP TO AC016326.4; EXPRESSED IN PLACENTA, SIGNAL = 1.5; EXPRESSED IN BONE MARROW, SIGNAL = 1.3; EXPRESSED IN HEART, SIGNAL = 1.6; EXPRESSED IN FETAL LIVER, SIGNAL = 0.92; EXPRESSED IN LUNG, SIGNAL = 1.7; EXPRESSED IN ADULT LIVER, SIGNAL = 0.88; EXPRESSED IN BRAIN, SIGNAL = 1.4
tgccacagctgttggactacctctattatgagtttattagaatatgttaattgcagattatatattttttaaatataaataatattgaagaagaaagttatttttaacctcataataaatggtcatttcttggtctttactaattcacatttaaattaaaactgaatgtatataatatgagcacttgaggcattttaaattcattttaatgatctgttaatattctgtattaggttcagctttccctatacacatatttgtctgctgaatttattggaactgctaccatctacaccaccatacgcagagtaggaacagtattacagctaatgcacaccttaaaatattactactgggttattaatcctgctgacagtagtggcattacacctaaaggattaggtatgtataccacttccactgtatttacatttgcctatgattattctgtattctgagtactgttaaagtgagcagtgtacatgactatgaaatcactgaaatgttttctttcttatatagcaaactggcatattgagaattgtttgtgg

SEQ ID NO: 7723 - DNA, 518 bp, Homo sapiens
  MAP TO AC022658.3; EXPRESSED IN LUNG, SIGNAL = 2.2; EXPRESSED IN HEART, SIGNAL =   2; EXPRESSED IN FETAL LIVER, SIGNAL = 1.7; EXPRESSED IN ADULT LIVER, SIGNAL = 2.1; EXPRESSED IN BRAIN, SIGNAL = 2.2; EXPRESSED IN PLACENTA, SIGNAL = 1.9; EXPRESSED IN BONE MARROW, SIGNAL = 2.1
ataaacagcatggctgcctctgacatccccagtgaacaagaagtaagctatgatcatgacacctgcacaactcttaatcagtcatttctttctgaaataaaatcaacaatcactcagactaaacaaaatctgtttacattaaacaggtttgatatctgggatttttagggcattaagctgttcatttctttgaatacaaaaaggtagggctgtcttcaaagtagttatgaaattacatgtcattttagcaggaagaattgcatttattatttttaaaacctgatctaaatgcaaaatagcactcaccggtccgttcaaagagggcaggcaattttctggcaccataacagttgcatattttaactcctatcttctcttggtcatttacaaggacatgttcatttccaggcttggctcctgtttcctcattgctcattcctgaaacgtgatacaataaggtcctattgtctttaagccattctgcttgacaattctgtacaaagccagaaaggaggttg

SEQ ID NO: 7724 - DNA, 532 bp, Homo sapiens
  MAP TO AL121918.15; EXPRESSED IN PLACENTA, SIGNAL = 2.1; EXPRESSED IN HELA, SIGNAL = 2.7; EXPRESSED IN FETAL LIVER, SIGNAL = 2.1; EXPRESSED IN BONE MARROW, SIGNAL = 3.9; EXPRESSED IN ADULT LIVER, SIGNAL = 2.3; EXPRESSED IN HEART, SIGNAL = 2.5; EXPRESSED IN BRAIN, SIGNAL = 1.9; EXPRESSED IN LUNG, SIGNAL = 2.3
tgagaagcagaggtgggaacctagccagtctgcttgcagccccagttctcctaagccctgtactaggcttctgaggaaacccaaacactgtccactggtcttcctaaaacactcccccaaagttcttcatctgcttcactggcaagtgcacagcctgggtgtatgcgtgccacttccctccacacactgagatcactggaagtaacaaggagccaggaaccacatctagagtccaggatcccagagggatggctaccacctgcaccaacaggtaaatctccaagatgctcctcactgacagaatctcctctctgaaggtccccgaaatgacctagagaaggtgtcctcagcgtgccggcctctgacttttctcatcaacagtcataagacttcagggaaatcagaagtagtgacttctcaggaaaaggttgaagaccctccagcaaggatactgtgaaggtgcaaacactcccagctaatgaaccgaggagagacatatcagatttccctctccagctcagtctgcagtgac

SEQ ID NO: 7725 - DNA, 536 bp, Homo sapiens
  MAP TO AC013705.3; EXPRESSED IN BRAIN, SIGNAL = 2.4; EXPRESSED IN BONE MARROW, SIGNAL = 2.5; EXPRESSED IN FETAL LIVER, SIGNAL = 2.3; EXPRESSED IN HEART, SIGNAL = 2.3; EXPRESSED IN HELA, SIGNAL =   3; EXPRESSED IN ADULT LIVER, SIGNAL = 3.2; EXPRESSED IN PLACENTA, SIGNAL = 2.5; EXPRESSED IN LUNG, SIGNAL = 2.9
cggtatttatcttcttgccattgattgatttcacttagtataatgtcctcaaggctcatccgtgttgtagtgtgtgtcaggatttccttccttttgaagctgagtagtattttattgtatgtatatacgtcattttgtttatccattcccacgtcgatgcacgctagcggttgtaataaggctgctgtgaacgcgagtgtcttaacatgtgtttctatcctcagtgtcacaactctcagagttacaactctagctaagtcagcttctttctctggatcttttccagaagtgccactcatcagtttctgtgaaccagaaattaaggataacaatgataataaaatagctcatatttatttagtgtttttatgtgccaacacacagggctgaataattcatttcatcttcacaataaatctgtgaggatggttacattttaccaaagaggaaattgaggtttaaagaggttaaatgagttgcccttcacagccagttaacagcataatgctaggaagaggcagagctggactttgaac

SEQ ID NO: 7726 - DNA, 544 bp, Homo sapiens
  MAP TO AC015662.4; EXPRESSED IN HEART, SIGNAL = 4.8; EXPRESSED IN BRAIN, SIGNAL = 5.1; EXPRESSED IN BONE MARROW, SIGNAL = 4.6; EXPRESSED IN PLACENTA, SIGNAL = 5.1; EXPRESSED IN ADULT LIVER, SIGNAL = 6.8; EXPRESSED IN HELA, SIGNAL = 6.1; EXPRESSED IN FETAL LIVER, SIGNAL = 4.1; EXPRESSED IN LUNG, SIGNAL = 5.7
aaggacggagggagagagagaggctgagggagagagagagagagagagagagagagagacagaataggatgacagtgcaaggaggccctggtgtggcttctaagtggcaaggaaccttcagtaagaaagcaggcacagtctaaagacttgaaaccatggaaattagatagattccagtgaaggctatggtagtgagagaaaagtcaagtaatgttattgaattaaattcttacttggatttcctagggaagagatggatcaagatggtgaaatagaagactccaccaatcatccccttcacacgaacaccaatttaacaactatctacatgcacacacacaaaagcttcatcaatttaacaactatctacatgcacacacacaaaacctttgtaagaactcaaaatcaggtaagtactcatagtacctggttttaacatcatattggtgaaagaggcactgaaaaggtagaaaaaacagtcttgaatcaccagtgtcgcccataactccctccccgaccagcagcagttgcatggtgcagagag

SEQ ID NO: 7727 - DNA, 593 bp, Homo sapiens
  MAP TO AC021486.3; EXPRESSED IN LUNG, SIGNAL = 1.5; EXPRESSED IN PLACENTA, SIGNAL = 1.8; EXPRESSED IN FETAL LIVER, SIGNAL = 1.7; EXPRESSED IN BRAIN, SIGNAL = 2.2; EXPRESSED IN BONE MARROW, SIGNAL = 2.1; EXPRESSED IN ADULT LIVER, SIGNAL = 1.7; EXPRESSED IN HEART, SIGNAL = 1.6
cttgacagtccagggcaatcaccccacccaacactgcaactcccttcttagcctgttgatttaaaggtaggaggagcccaaagtgtccaggtggcaatcttaacttccagtttaatggcatcattgttgtgtctcctggtggcagcattccttcctctggaactaagatctctaggccagcagaaggtaatgttgcaggaacaggaagcaaaacgtttgctaatggatcactaggggtgacggtgagtggtgccacttctacttccactccttgattcctcgaccctgaattctggctatgggagaaacaggaccatatataggatgctgattcagagcatacatggccttctggagaactttgtcccagctctgcagagtattgtcacatagttggcattgtaattgtgacttcaaaaggccattccaaaattctatcagtccagctccttcaggatgatgggaaacatggtaagatcagtgaattccatgagcatgagcccactgctacacttctttagccataaagtgagtgccttggtcagaggcaatgctgtatggaataccatgacagtgggtaaggcattccttga

SEQ ID NO: 7728 - DNA, 548 bp, Homo sapiens
  MAP TO AC009334.3; EXPRESSED IN BONE MARROW, SIGNAL = 3.6; EXPRESSED IN BRAIN, SIGNAL =   3; EXPRESSED IN FETAL LIVER, SIGNAL =   9; EXPRESSED IN HEART, SIGNAL = 1.7; EXPRESSED IN HELA, SIGNAL = 6.8; EXPRESSED IN ADULT LIVER, SIGNAL = 2.5; EXPRESSED IN PLACENTA, SIGNAL = 0.87; EXPRESSED IN LUNG, SIGNAL = 3.7
taagcaacttgcagttcgggctgtattttacaacattaggaatgatgaatttaaagatgttcacattacactggaccaaattaagatggctttctccctcttgcgatgtgcctcagccgtgatagtgaccagcttggagtttacagttacagtatagtctttgccagagacaatctttggtgttctaaggaaaaggctgccatggtggagatccatcatctcgcccttcaatttgtcttccatgacatcaacaagagcaagttcgccttccaagtccttcattaagataccgatggcacaggccatgccaagagcaccaaccccaacaactgtaatcttattctggaggatctgttcttcctttagaagactgtgaataagctgatccttgagcgtatacttgagagtatattggacttggaaacaaaaggaatcgagaatgcacgtccggcgggtgttggggcacgcggcagtgagatccagactcgtcggcagcggctccagcaccttcgctacctttaaatacagtcagtcaaggaaaagcagga

SEQ ID NO: 7729 - DNA, 514 bp, Homo sapiens
  MAP TO AC013317.4; EXPRESSED IN LUNG, SIGNAL = 0.99; EXPRESSED IN PLACENTA, SIGNAL = 1.2; EXPRESSED IN HEART, SIGNAL = 1.5; EXPRESSED IN FETAL LIVER, SIGNAL = 1.4; EXPRESSED IN BONE MARROW, SIGNAL = 1.2; EXPRESSED IN ADULT LIVER, SIGNAL = 0.97; EXPRESSED IN BRAIN, SIGNAL = 1.2
tcaagattcgtccatgttgcagcatgtgtcaattataccacatttttattatccattcatttgttgatagacacagattatttctaccattttgctattttgaagaatgtttctatcaacattgatttatatgtttgttagagtccctctcttcaatttttaggggtatatacctgggagcgaacttgctgggtcatgataattttgtttagctttttgaggaactgacaattttctacggtggctaggccagtttgcatttccaccagtaatgtgtaagagttccatttccccacatccccatcaattcttattgttattactattattattattgccatcctaatgggggtgaaatggtaactcatcatggttttgattttgatttccctacagatgaatgatgttaaacattttttcatgtgattattggtcatttgtatatattattcatagaaatatatattcaaaccctttgcctatttttaattgggtggtttatctttttgctttt

SEQ ID NO: 7730 - DNA, 508 bp, Homo sapiens
  MAP TO AC015592.4; EXPRESSED IN ADULT LIVER, SIGNAL = 1.6; EXPRESSED IN HEART, SIGNAL = 1.3; EXPRESSED IN BRAIN, SIGNAL = 1.6; EXPRESSED IN BONE MARROW, SIGNAL = 1.6; EXPRESSED IN PLACENTA, SIGNAL = 1.2; EXPRESSED IN HELA, SIGNAL = 3.4; EXPRESSED IN FETAL LIVER, SIGNAL = 2.6; EXPRESSED IN LUNG, SIGNAL = 1.8
tagtcccaggaatcaccctgcgtgttcagtataagcttttgtttagtatacagacaaaaacttctgcaaactcatatatagtgattacctctgtactaaatgtactaaatgcttacctctggactgtccttcagggtgtcagaacggggaagttctgagagctgggaaaatcttcggtcataaatacacagatgaagatgtttatcaagtacccgaaaatcttcataacttcttttaacaatccaactttttccctattggtagaaaaaagaaactcatataattcacctctattgggaaatacttatgaatcaggccatattctataatgtgattttattcatgagattttatattttctaatgagaagtttctattaacttgatagttaatagctaaaactgtgaaacactctaataagttatattacattaaaaggccaataattgaaaataagatagaactctccaccatccctcttcctactgctggtcaaaatccactgcct

SEQ ID NO: 7731 - DNA, 571 bp, Homo sapiens
  MAP TO AC027343.1; EXPRESSED IN LUNG, SIGNAL = 7.1; EXPRESSED IN BONE MARROW, SIGNAL = 9.5; EXPRESSED IN BRAIN, SIGNAL =  10; EXPRESSED IN FETAL LIVER, SIGNAL = 8.7; EXPRESSED IN HEART, SIGNAL = 6.8; EXPRESSED IN HELA, SIGNAL =  11; EXPRESSED IN ADULT LIVER, SIGNAL = 9.8; EXPRESSED IN PLACENTA, SIGNAL = 6.1
gagaaaggcacgaccagaagccgaatgcgcagcagaaaacaagaacagaaagacgcacaacgacaagccaccaacacacaggaaggcaaaatgagacaacaaaaaaccaaagatgccgagaagagcagaggacagaaagaaagaaagaccggcccaccacgagacgaatagaggcagggacccagagcagaccacaaggacgacaagaacgaacgagggcgaaacagacagaacggacaagagaaggaagcacaacgccacaaccaccacgcagcgaggatggcggatagcagggcgaagcgccgaagatagcgcgacggccaacaagagctgggggaacaagggtatactgtgcacctggaaaagccacagtcactcaacaccagcccgtgaaagcagccaggagggagtctgtatcctgcaaagccagagtggcggagctgcccaagaccatgggaacccacttcttggatcagcgtgacctggatgtgagacctggagtcaaaggagatcactttggacctttaaaatttgactgccctactggatttcagacttacatgggccctgt

SEQ ID NO: 7732 - DNA, 587 bp, Homo sapiens
  MAP TO AC027304.1; EXPRESSED IN LUNG, SIGNAL = 2.5; EXPRESSED IN HEART, SIGNAL = 1.9; EXPRESSED IN BONE MARROW, SIGNAL = 2.2; EXPRESSED IN BRAIN, SIGNAL = 2.3; EXPRESSED IN FETAL LIVER, SIGNAL = 2.7; EXPRESSED IN HELA, SIGNAL = 4.1; EXPRESSED IN ADULT LIVER, SIGNAL = 2.5; EXPRESSED IN PLACENTA, SIGNAL = 1.8
gcatttgtggtgattgatgggaaggctgctttgaaatagttttgtcccgagacaagatctttggcagactgccccctcaggcttagctctacagaagatgaaaagaaaactgtggaagaaaagagcaccttcatgcaaagggttcactagcgagttgagccctgagaaagagagacaaatcaaaaattgtgacacttagaaatataaatccaggcttataattatctagaaatgaaagtgtaacttgatgaaccttaaggagcactcttctatcatatttcctaaaataacagactcatatggaaatggaaaatggtggcatggtctgacttaaacacgggtttcttttgtgacctgtctccctcccctccctaccctgtcaattcctggcttgatttgcttttcctttcttgccccatctcctcttttcacagatacaaaacagtatccggtgtttgtgggccacaagccaggacggaacaccacacagaggcacaggctggacatccagatgattatgatcatgaacggaaccctctacattgctgctaggtaaggggccttttccccatgtctgccttgagagt

SEQ ID NO: 7733 - DNA, 574 bp, Homo sapiens
  MAP TO AC012405.4; EXPRESSED IN PLACENTA, SIGNAL = 3.3; EXPRESSED IN ADULT LIVER, SIGNAL = 4.1; EXPRESSED IN HELA, SIGNAL = 5.7; EXPRESSED IN HEART, SIGNAL = 3.1; EXPRESSED IN FETAL LIVER, SIGNAL = 3.7; EXPRESSED IN BRAIN, SIGNAL = 3.5; EXPRESSED IN LUNG, SIGNAL = 3.9; EXPRESSED IN BONE MARROW, SIGNAL =   4
gttttcatgcctgcttccacagcatcccttctgcagcccatggatcaaggagtaatttgactttcaactttgactatttaagaaatacgtttcatcatatatgtgccatggtagtgatttatccaatggatctgggcaaagtaaactaaaaaccttttgggaaggattcagcattctagatgccattaagaacatttgtgattcatggcagaaggtcagaagagctacataaacaggagtttggaaggagttccaactctcattgataactttgaggggttcaagatgttgtcactagaggaagtaactacagatgtggtagaaatattaatagaaagcaaactagaattagaaatggagcctgaagatgtgactgaattgctgcaatctcatgataaaccttgaaaagatgaggagttgcttcttatggatgagcaaagaatgtgatttcttaagatgaagtctactcctggtgcagatgctgtgaacattgttgaaatgacaacaaaggattttaaattgtgcataaacgtagctgataaagcagcaacggggtttgagaaggttgacccca

SEQ ID NO: 7734 - DNA, 518 bp, Homo sapiens
  MAP TO AC013657.3; EXPRESSED IN PLACENTA, SIGNAL = 2.8; EXPRESSED IN HEART, SIGNAL =   3; EXPRESSED IN FETAL LIVER, SIGNAL = 2.9; EXPRESSED IN BONE MARROW, SIGNAL = 2.8; EXPRESSED IN LUNG, SIGNAL = 3.3; EXPRESSED IN ADULT LIVER, SIGNAL = 3.3; EXPRESSED IN HELA, SIGNAL =   4; EXPRESSED IN BRAIN, SIGNAL = 2.7
gaagacagagtgctcagggcctaatcatttcctaaaggtcccacctcttaatatcgttgcatcgaagattcagtttcaacatgaattttggaggcaacacaaacattcacatcacagcacatggtaacacctttgggtcttttttctctttctaattatgatgagaagattggaagttttaatcaaaggagtgaagggatctggttgacattttaaatggctcatgctaacagctgcatgaagactagctggtaaaagggcaaagagcaactatttggggaggttactgcaatagtgagggtgagaggtcaaggtgggctgggtccagtggcagcagcagggtggtgagaagtgatttggttctggatatattttgcacatagggctgataggatttgttgatgggttggagatgcagagtgagagggagttgctgatgctgccaagggccctggccccagctgtgtggtgattccgcttatggaggtaggagaagctggggaggaataggcttagga

SEQ ID NO: 7735 - DNA, 570 bp, Homo sapiens
  MAP TO AC012571.3; EXPRESSED IN LUNG, SIGNAL =   3; EXPRESSED IN ADULT LIVER, SIGNAL = 2.6; EXPRESSED IN HELA, SIGNAL = 3.3; EXPRESSED IN HEART, SIGNAL =   3; EXPRESSED IN BRAIN, SIGNAL = 3.4; EXPRESSED IN PLACENTA, SIGNAL = 2.8; EXPRESSED IN FETAL LIVER, SIGNAL = 3.3; EXPRESSED IN BONE MARROW, SIGNAL = 3.4
atgttggcggtctgaaaatcatgtttttagaaatggagaaatgatccacaaaatcccttccacttgcattattctatgataaaaagaagtttacctgactcaccaaattttcggtcgtctctcgtaagtccttaagttgatatgtgttgctttgtccgaaattgttattgatttgtggatctaaaattttaaaggagccatgatagtactcctttttttggtctgcaatggaaatgaaaaataggaaactaaatggtttggacaaagatttcagaactcaattacaatggggccaatataaatcttgaatatgtccctgagcctcttcataattgagttttatttaaaaaataacagttaatgttttatatcaattataatagctgccatttattgagtttctacaatatggcaggcactgtcctgtgcactttttatgtattagcccatttaatccccacaccagctctctaagattggtatcaccttcattttacagataaggaaattaaggcacagaggcattaagtaaattgttctgtaactagtaggtggcctgtccaagtttta

SEQ ID NO: 7736 - DNA, 525 bp, Homo sapiens
  MAP TO AC009334.3; EXPRESSED IN HEART, SIGNAL = 1.9; EXPRESSED IN BONE MARROW, SIGNAL = 0.63; EXPRESSED IN PLACENTA, SIGNAL = 0.59; EXPRESSED IN FETAL LIVER, SIGNAL = 0.5
ccatttgctttgtgggaaacagccttgcttctaatgtttatctgtttagtgtagtagctgttgttttttaaacaaagaaaaggatcagttgagtgtgttttcactttgaaatacttacttgctagttcatagcttgcattttaaacttgttgtcattactgaatgaaaatatttgtatttcaggaaagtctttcagttgtttatacaacttactgtcctgctcagtataccatctatgaaccagtgattagacttaaaggtcaaatgaaaacccaactctctcaaagacccttcagctcaaaagaagttcagagcatcttattagaacctcatcatctaaagaatctccaacctactgaatataaaactattcaaggcattctgcacgaaattggtggaactggcatatttgtttttctctttgccagggtaagaatcactgcttatagttttgtctaaagagaaatgacttacttattattgataaattaaaggatttcttttggaccacacgaaaaagctaca

SEQ ID NO: 7737 - DNA, 510 bp, Homo sapiens
  MAP TO AC015999.3; EXPRESSED IN LUNG, SIGNAL =  10; EXPRESSED IN ADULT LIVER, SIGNAL =  13; EXPRESSED IN HELA, SIGNAL =  18; EXPRESSED IN HEART, SIGNAL = 8.1; EXPRESSED IN BRAIN, SIGNAL =  11; EXPRESSED IN PLACENTA, SIGNAL = 8.3; EXPRESSED IN FETAL LIVER, SIGNAL =  11; EXPRESSED IN BONE MARROW, SIGNAL =  14
ttcacagcatcttcaccaggagtaaattgcatctcaaaaaacctcttcctttgcttatccataagaagcaactcctcattcatcagattttattgtgagattggagcaattcagtcccatcttcagtcttcacttctaattctagttctcttgttatttccaccacaagagaattggtaatcacttcctccaccaaagtgttgaacccctcaaagttatccatgagagttctttacttcaactgcgaatgttgatattttgaccttctcccataaatcatgctctcaatggcatctattatagaatggtgaaccttttccaaaaggctttcaatttactttgcccagatcagaagctaagaattgacttctcctctttaggtatgaaatttctatctagtgtcttcttccagtcaaaagctgtttcatatacaatgaaaatctattttttgatgtagccaccttcatctattattttagctacatctttgggaaaacttgctgcagcttc

SEQ ID NO: 7738 - DNA, 551 bp, Homo sapiens
  MAP TO AC015756.4; EXPRESSED IN LUNG, SIGNAL =   2; EXPRESSED IN PLACENTA, SIGNAL = 2.7; EXPRESSED IN ADULT LIVER, SIGNAL = 2.4; EXPRESSED IN HEART, SIGNAL =   2; EXPRESSED IN FETAL LIVER, SIGNAL =   2; EXPRESSED IN BRAIN, SIGNAL = 2.1; EXPRESSED IN HELA, SIGNAL = 2.4; EXPRESSED IN BONE MARROW, SIGNAL = 1.9
gcaattcaaaagcaggaagcctgctttaatcatttctgatacccccacctctaccatggtgctttgcaaaccacagatacacaatcctgtatgtatatgggtcaagttgaattgttcaaagaacccagtattagaaattcctggagggctagacatcgtgtgggccttctgaagcacaaatggaaaacactttgcccacagtaggaaggaattcatcaggaattcatcttgggcctgcctgtgagtccacttgttttcctcatttttaattacaaacaagctgcctcatgtgttttctttttctgctaccagaacgtactgtcaatgagctttgttttggtccaaatattgatgcagcaagtgttcgtcagcaagtctgagccctggttccagcagcgtgttgagggattccaacactttgggccaatagtcagacttcgttatgacttcctgctcctctccaaaggcctggtggggcacgtaggatgtagtggaaagaacacagagtgcagagactgaagatccaagttgcagacctcccacttgctttt

SEQ ID NO: 7739 - DNA, 528 bp, Homo sapiens
  MAP TO AC019278.3; EXPRESSED IN LUNG, SIGNAL = 1.8; EXPRESSED IN ADULT LIVER, SIGNAL = 1.6; EXPRESSED IN BRAIN, SIGNAL = 2.3; EXPRESSED IN BONE MARROW, SIGNAL = 2.1; EXPRESSED IN PLACENTA, SIGNAL = 2.1; EXPRESSED IN HEART, SIGNAL = 2.1; EXPRESSED IN FETAL LIVER, SIGNAL = 2.2
ctgaaatttgggtcagtgccacacttaattggttgtggtaatgataggaatagtggtagtgttgtattggtggaaacaatagtaataataagcatttattgagtgctgtaaaacgtgtttcaagtacttcgttttctttaatcctcaacaaactttcgaaagatctctgttatttccattttctctatgaaggacctgcccaaagtcagatggatagtaaccttcctgaattcaaggcctatactttgtcgactatttctcatgagggaaaaaaaagccatatctagtattatttgttttcgcatcttataatcatgtttgggcttcaatatgaatttcctctctacaactgctttatcacaggcagttttgctggaagaggctggaatggagtgccaaataatgagcagaaataatttaagcctgggaggtgttaaaaaattaaaaaaaaaactttcgacaaactaaatttaacagaatttaattgagcaaagaacgattcttgaatcagcccccagaacaagaata

SEQ ID NO: 7740 - DNA, 562 bp, Homo sapiens
  MAP TO AC025539.2; EXPRESSED IN ADULT LIVER, SIGNAL = 2.6; EXPRESSED IN FETAL LIVER, SIGNAL = 1.9; EXPRESSED IN BRAIN, SIGNAL = 2.8; EXPRESSED IN BONE MARROW, SIGNAL = 2.3; EXPRESSED IN LUNG, SIGNAL = 2.7; EXPRESSED IN PLACENTA, SIGNAL = 2.5; EXPRESSED IN HEART, SIGNAL = 2.3
atggtggctctgggtatgagagactattccctgatccaaaagggagtgtagtatttgaagcatttgatgacagggaaatgactttgcctcatcgaacctttgtcgccttatctgtcaaacagaattatatttccttatggacttttgttgtgagaatcacatttcataatgtatgcaaagcacccattagagagcctggtatgtagttaagtgtctataatgctgcacttaatagcaatgattatttttcttgctggtaagcctgattttgattgaaaagcagattacaaatgtcatcatagatctagctgcttattgccttccagtccacctctgccttctggccgatcctcccctccaggtggctaaagtgccacagtgtcccaaagcagccgatgtcatcactctgctctaaagtaggaggggagcaaggtgcagaggggctgagaagagaggggctctcttttaatcacagaggaaaatctttctcaaatgccagaatattttccccttgtgtcctcttggccaaaaactaggtcacaggctcacaggcaaaatcatt

SEQ ID NO: 7741 - DNA, 593 bp, Homo sapiens
  MAP TO AC006319.3; EXPRESSED IN ADULT LIVER, SIGNAL = 3.2; EXPRESSED IN FETAL LIVER, SIGNAL = 3.2; EXPRESSED IN BRAIN, SIGNAL = 3.3; EXPRESSED IN BONE MARROW, SIGNAL = 3.4; EXPRESSED IN LUNG, SIGNAL =   4; EXPRESSED IN PLACENTA, SIGNAL = 4.3; EXPRESSED IN HELA, SIGNAL = 2.7; EXPRESSED IN HEART, SIGNAL =   3
aggaccaagtgcaattctgcatagtaacgataatgaagttgtgaacctttaacttagaaaaccaatttaatacactgagctgatggaaaaaatgtctcactctattgcccaggctggggtgcaatggtacaatcatagctcatcgtaacctcaaacttctgggctcaagcgatcctcctgactcagcctcccaagtagctgggacaacaggcacatgcaccatgcccagccttattaatacatatctcttaattcttttcttatatctgaagctccacacggccatgtatacaaccatcacaagcgagactttcttggggcccaaagcagccagctttatgatttctctctacacaccacactgttctcttccatacagctcttgctgtaagttgacgtcccaagttttgcttatctttttactctgccaggggataactactactactttattctgcattagactttcaaatagatcaccttcccctatctgtagaaagaaataaaaacatactgggattatatatatacagagagagagagggagagagacagacagacagagacagagacagagagacaggaagacaggg

SEQ ID NO: 7742 - DNA, 570 bp, Homo sapiens
  MAP TO AL121901.10; EXPRESSED IN PLACENTA, SIGNAL = 1.4; EXPRESSED IN ADULT LIVER, SIGNAL = 1.4; EXPRESSED IN BRAIN, SIGNAL = 1.3; EXPRESSED IN BONE MARROW, SIGNAL = 1.2; EXPRESSED IN LUNG, SIGNAL = 1.3; EXPRESSED IN HEART, SIGNAL = 1.5; EXPRESSED IN FETAL LIVER, SIGNAL = 1.3
ggatcatttaggggtttgggtcaatctggggtaggttcaatgaattctcagaccggcaataggtttcctagtggttatggtcaaactgaggctgggcaatctggtggctacgatcagtttgggacagggtcatttggaaggtatggtcagtctgaggcagggtcaataaatgttcaatctgggtctagaccatctaatggtatgggtcaacttggagcagagtcaatgaacagtcagcctggggctaaaccatctggtagccatggtcagtttgggacagggtcattaggagcgtatagtcagtctgggtctggatcatctggttctttgggtcgatctggagcagggtgagtgaatgatccaactggatataggttatctagtgcttatggtcaaactggggcagggtcactaaatggtcagtctggggttgggttatctggtagtcttggtcaatctggggcagggtcaatgagtggtcagactggggataggttatctagtgataatggtcaaactggggctggattatctggttgtcttggtcagtctgggacagggtcaatgagt

SEQ ID NO: 7743 - DNA, 521 bp, Homo sapiens
  MAP TO AL133405.9; EXPRESSED IN HEART, SIGNAL = 3.3; EXPRESSED IN BONE MARROW, SIGNAL = 3.9; EXPRESSED IN ADULT LIVER, SIGNAL = 4.2; EXPRESSED IN FETAL LIVER, SIGNAL = 3.2; EXPRESSED IN BRAIN, SIGNAL = 3.6; EXPRESSED IN LUNG, SIGNAL = 3.6; EXPRESSED IN PLACENTA, SIGNAL = 3.8; EXPRESSED IN HELA, SIGNAL = 2.8
aatttctagcaaggccagggaagttttcattgattattccttcaaacatgttttccaaacttttagatttctcttcctcaggaacaccaatcattcttaggtttggtcatttaacataatctcaaccttcttggaggctttcttctttttttgttctcttttctttgtctttgttggattgggttaatttgaaaaccttgtcttcaagctctgaaattctgtcttctgcttgtttgattctgttgttgagactttctagtgtattttgcatttctttaagtgtgtccttcatttccagaagttgtgattgcttattatttatgctatgtatttctctggaaatgttttcatccatattctctaactttttttaaattttctttaagtcggtattcacctttctgtggtgcctccttgaatagcttaataattgaccttctgaattcttcttctggcaattcagagatttcttcttggtttggatccattgctggtgagctagtgtgatctttgggggtgtt

SEQ ID NO: 7744 - DNA, 513 bp, Homo sapiens
  MAP TO AL133417.9; EXPRESSED IN PLACENTA, SIGNAL =  21; EXPRESSED IN HELA, SIGNAL =  23; EXPRESSED IN LUNG, SIGNAL =  22; EXPRESSED IN ADULT LIVER, SIGNAL =  20; EXPRESSED IN BRAIN, SIGNAL =  18; EXPRESSED IN BONE MARROW, SIGNAL =  21; EXPRESSED IN HEART, SIGNAL =  20; EXPRESSED IN FETAL LIVER, SIGNAL =  19
aggcatttgagaccatcctgggcaacatagcaagactccatctctacagaattttaaaaatgagctgggcatggtgaggtatgcctgtagtcccagctactcaggaggctgaggtgggaggatcacttgagcccaggagttgaaggttgcagtgaggagctagaatcacaaatctgtatgccagcctaggtaattgagtaagatctcatctcaaaaacaaaagccaaaaaatcctcatctcttcgtgtaacactttccaggatgacactgtcatccagtcacatggcctcaatgccaagtatagattcgtgattcctaactttgtatttctagccaggacatctcctcaccccttcaggctccccacacctccagctgcctacatgacatttctgcctgggtatgtaatcatcatttcaattataagatgtccaaacactaaatctgaccttccccatctctcctccatgaccccctgcctatattcctacctcagaggaaagcaactccagg

SEQ ID NO: 7745 - DNA, 546 bp, Homo sapiens
  MAP TO AL121895.18; EXPRESSED IN LUNG, SIGNAL = 2.1; EXPRESSED IN HEART, SIGNAL = 1.9; EXPRESSED IN BONE MARROW, SIGNAL = 1.7; EXPRESSED IN FETAL LIVER, SIGNAL = 2.1; EXPRESSED IN PLACENTA, SIGNAL = 2.1; EXPRESSED IN ADULT LIVER, SIGNAL = 2.1; EXPRESSED IN BRAIN, SIGNAL = 2.2
aaaggtcatcaaggccacacagccagtcactatcgttcctatttacagagatgatttgctcttagatatacctcaagctaggggcagagccaggcggggtacaaacagcacagtatgtggcggcctaggacattcaggcctgcaaggaaggctcccactggccaaggagccacagaaggccctggctggcaccctcttacctatatgtcttatgcagctccatgatcctctcctccagctcccgggtctggttaggggcgaagcggagctcgctgacatagttgcccacatgctcctcagcatcatagtcacccagctcagcctgcacagcgtaggagcccagtagggcatgcgtgacaaaggagcatggcagccggcccgtgatgatgtctgcccgcagctgcaggcacaggtagtatctggagataggggagagccagcatgggcacagggccctactcctccctagatcccccaagcacagctgtccatcagaactaaatagaacatagctcagcagaaaagtgtgtttgtagacattggcgc

SEQ ID NO: 7746 - DNA, 567 bp, Homo sapiens
  MAP TO AL162171.1; EXPRESSED IN PLACENTA, SIGNAL = 2.3; EXPRESSED IN HELA, SIGNAL = 2.4; EXPRESSED IN LUNG, SIGNAL = 2.5; EXPRESSED IN ADULT LIVER, SIGNAL = 2.4; EXPRESSED IN BRAIN, SIGNAL = 2.5; EXPRESSED IN BONE MARROW, SIGNAL = 2.3; EXPRESSED IN HEART, SIGNAL = 2.6; EXPRESSED IN FETAL LIVER, SIGNAL = 2.7
gctaaaatgcccttccttcccttctctgacagactcttagtcattcttcaagattgagtttaaaatacagcccccatagacaccaccaaacattcagtttgcttagtccttgacaccactctgaaagttgttttttctacctcttttataacaatgacctgaataattcataacaataatttagtaaatgcttgctctgtgtcaagcattatactgagagcttttattttctttaatccttacagtaaccctgttgggcacaattattactatcccattattgatgaaggtatggagacttacagaagtgaaatgtcttgccctgccacacaactagtaagtggagcagcaagactcgagcctgttctcttagccgctgtgctagcctgttagagtagttcctgcctgcttttttcatattgacagatatcaactgacagatcattttcatttgatctgtctctcttgtttgatgaagctccatgagggcagggtctcctcttcctcatcttcgtgtcccctgtctggcaaggtgcccggtgcataagggcttagtgaacaatggga

SEQ ID NO: 7747 - DNA, 550 bp, Homo sapiens
  MAP TO AL121772.12; EXPRESSED IN LUNG, SIGNAL = 1.6; EXPRESSED IN PLACENTA, SIGNAL = 0.9; EXPRESSED IN FETAL LIVER, SIGNAL = 2.7; EXPRESSED IN BRAIN, SIGNAL = 1.6; EXPRESSED IN BONE MARROW, SIGNAL = 1.6; EXPRESSED IN ADULT LIVER, SIGNAL = 1.5; EXPRESSED IN HELA, SIGNAL = 2.3; EXPRESSED IN HEART, SIGNAL = 1.5
gtgcttgagaaaggagcctgcgtgatcaggttcttccagtgtcttcacactcatcagattcttggattcggcttgaaaatgattttgaaaatcatggtcaggtaagcatacttacctctttcttccttaattgtaaatgaataacggtagtcgtgtttatggagtgcttgctgtgtgtcaggcatgatgcggactggactgtgcgttgtgtggtcagagattgaatcctcagcctcaaagtaggtaccgtgcatctccgccctgccgccgagagagaagcaggcctgcaggagcttggggacttacctggacccactcagatgcggttctgcaggcttcctacacccaaacagtgggctgccttacctcccaaagtggcaagtgtttccagaggaatgtttactgatcacatcaggccgtgtgctcattatcaaaggcaggtctctccactgaagaatcagccatctccataacagtgtgcttgtaatgcttacaaaaatagttacacagttgagagaaataataattccctctaggcctcactgctgct

SEQ ID NO: 7748 - DNA, 507 bp, Homo sapiens
  MAP TO AC006038.2; EXPRESSED IN PLACENTA, SIGNAL = 6.2; EXPRESSED IN ADULT LIVER, SIGNAL = 7.8; EXPRESSED IN FETAL LIVER, SIGNAL = 7.1; EXPRESSED IN BRAIN, SIGNAL = 7.9; EXPRESSED IN LUNG, SIGNAL = 7.1; EXPRESSED IN HELA, SIGNAL = 6.3; EXPRESSED IN HEART, SIGNAL = 6.5; EXPRESSED IN BONE MARROW, SIGNAL = 9.5
ttttcttctcaaccatgcccttgttaattcttgctttcaagaaagctgatggtgtgcccgtctacctgaaacgaggcctgcctgaccaaatgctttaccggaccaccatggcgctgactgtgggagggaccatctactgcctgatcgccctctacatggcttcgcagcccaaaaacaaatgagttaggctgcagaggactggtttgttttttggcataaaccctttgaagttcctttttcattgttaaattaaaatttttttttttacttggatggcttaacatttttgcaagaaaaataggaagatatgaagatgatgttttggtttgtttatgaaatgcatatggcttgtcagagctcattcgacagttaaagccattgtttaaagaaatggtgctttgctctgtgtttgtgctcctgatttccctggaggttctggatgaaggctgaacacaggcttgttaatgtcagtctgtgctgaggacctcagggacttgaggttgcatt

SEQ ID NO: 7749 - DNA, 583 bp, Homo sapiens
  MAP TO AL161450.2; EXPRESSED IN ADULT LIVER, SIGNAL = 1.2; EXPRESSED IN PLACENTA, SIGNAL = 1.1; EXPRESSED IN FETAL LIVER, SIGNAL = 1.4; EXPRESSED IN BRAIN, SIGNAL = 0.79; EXPRESSED IN LUNG, SIGNAL = 1.3; EXPRESSED IN HEART, SIGNAL = 1.3; EXPRESSED IN BONE MARROW, SIGNAL = 1.6
catcacacaagatgccaaggtattatacatccactgtggtaaaaactatacatacatattctgtgcatctttaacattgcaaaatttacataataattttttcaggtctcaaaaagctgagttgaaaaagtctattttttttcttttgccagacaagagtgatgttaactgacaatgtttaagaaacttcttacaaaatccttgctaaggaattctcattaatgtcttttactggtggcctcatgaagaaaaacttactaaactttgaaagttttgagcagatattttcacatctttgctggctagcatcatgatttatataataatgatatatgtaataatagtccacagcaatgtgaaatataaaactttgttctgtaaatctactttggtctcagaatgaaggtcatttctttcatccagccatgttatcccttatttgatccactcgaagagctagatccctaaaggaggggcgttgatttacattattgttccagcattctgtcatgatcatatagatctgtaaaggagaaaataaaccaaaattaaatgaacactaagggccatcttttaattggtg

SEQ ID NO: 7750 - DNA, 500 bp, Homo sapiens
  MAP TO AC012429.4; EXPRESSED IN HEART, SIGNAL = 1.2; EXPRESSED IN LUNG, SIGNAL = 1.3; EXPRESSED IN ADULT LIVER, SIGNAL = 1.6; EXPRESSED IN BRAIN, SIGNAL = 1.1; EXPRESSED IN BONE MARROW, SIGNAL = 1.7; EXPRESSED IN PLACENTA, SIGNAL =   2; EXPRESSED IN FETAL LIVER, SIGNAL = 1.7
ctcaccacataagcctgacgaagggagtcgggaccgtgagataatgaccagtgttacttttggaaccccagagcgccgcaaagggagtcttgccgatgtggtggacacactgaaacagaagaagcttgaggaaatgactcggactgaacaagagggtatgtgtggacttcactgttgggctctgttttttttcttctaaagattccaggccttaaaaaaaaaaaaaaagtgggatttcaagggtcagagaagtgcataattgtcactagctaggaaaaagttattcagaggttactatggtgatggcagattttgatccattaggagtgttaaacagatagctccgtttttctaaaactttgtgcattttatttggttcttaagataacaaattaggattttaaactgaccataatcctactctggaaaaaggtaacaagagaattttcctaactgcaactttatttttcattttttctcccctatttccttttggtgga

SEQ ID NO: 7751 - DNA, 556 bp, Homo sapiens
  MAP TO AL158049.2; EXPRESSED IN LUNG, SIGNAL = 1.5; EXPRESSED IN BRAIN, SIGNAL = 1.1; EXPRESSED IN BONE MARROW, SIGNAL =   1; EXPRESSED IN HEART, SIGNAL = 1.3; EXPRESSED IN PLACENTA, SIGNAL = 1.3; EXPRESSED IN ADULT LIVER, SIGNAL = 1.2; EXPRESSED IN FETAL LIVER, SIGNAL = 1.3
tatggcccaagacgtttttctcctctgcagttgtcatgttagtacctgccagcttttcctctcttacataaattccatgccagagcctggaaatgtgtgccctttgtaggaggggcatccacaggctggctcacctcggcagtgccaggcagagccccgtccctctcattgcaggaggcgcatgaagcgtgtctgggaccgagctgtggagttcctggcctccaacgaatcccggatccagacggagtcccaccgcgttgcaggagaggacatgctggtgtggagatggactaagccctcttccttctctgactcagagcgataagccccgggcggggacttgttcccggtcagcctgtcccaggacagcccactccagaggcacaggagggtcaccaggcctgcggtgctgaattcacacttgccttgactttcagtctcgtcctgacacgattccaaaggtctgccatactcttcagaggagttcggctcgcaggaaaatgtgggcttcctttaaagggagggggagaagccagggtgatagcccagactctgc

SEQ ID NO: 7752 - DNA, 577 bp, Homo sapiens
  MAP TO AC026213.2; EXPRESSED IN HELA, SIGNAL = 5.2; EXPRESSED IN BONE MARROW, SIGNAL =   3; EXPRESSED IN BRAIN, SIGNAL = 2.6; EXPRESSED IN FETAL LIVER, SIGNAL = 2.9; EXPRESSED IN HEART, SIGNAL = 3.1; EXPRESSED IN ADULT LIVER, SIGNAL = 3.8; EXPRESSED IN PLACENTA, SIGNAL = 3.5; EXPRESSED IN LUNG, SIGNAL = 3.8
ttccacattgaactccctccctcttcacttaatcacattactaactctgtggtcatataagtcagatatagtcatcaaagtccacaaccacaaactttcctgtgattctcacatctaattggttcacattgcatatttgcattttaaatatccttttccaaatttatctaccccttgtacactgtaggagttaccaatatcttcgtttttttgcctgaattcccacaaaagctttccaataaatttccctgcttccagccttgctccatttccaacccatccttcatgatgacatcaatgtgattttgctgaaatacaaagatgaatatgtgtatacctatttagaatctttcaggggcttcttgactctcacaggctaaagctgaaattctttagaaagacttatgagtctcctcacaatatgacactagtctgcttttctagccccatattctactatcttctacataaattcttagttttaactatgctgaatcacagacagatcctctaaagcagcaaactttcaaacaatttgatgttactactcctgaaaagcctctctcttgcctcaatc

SEQ ID NO: 7753 - DNA, 500 bp, Homo sapiens
  MAP TO AL133284.7; EXPRESSED IN ADULT LIVER, SIGNAL = 6.1; EXPRESSED IN FETAL LIVER, SIGNAL = 6.8; EXPRESSED IN BRAIN, SIGNAL =   7; EXPRESSED IN PLACENTA, SIGNAL =   6; EXPRESSED IN BONE MARROW, SIGNAL = 7.1; EXPRESSED IN LUNG, SIGNAL = 6.9; EXPRESSED IN HELA, SIGNAL = 3.3; EXPRESSED IN HEART, SIGNAL =   6
ctttgaaccctcagtctggcagtctttccaaggcatcatgaataaatcactctatcatctttttacttcctcaatggataccagcttcttagcatctgtattttgtgaattcaagagtctggccttttgaataatcctgagtttacctttcgctcttcctgtcttgtgcctctccagagaccacagagctgggcagcaagaaggagctcaagtccatgcccttcatcacctacctctcaggtttgctgacagcccagatgctgtcagatgaccagctcatttcaggtgtggagattcgctgtgaggagaaggggcgctgtccatctacctgtcacctttgccgccggccaggcaaggagcagctgagccccacaccagtgctgctggaaatcaaccgtgtggtgccactttataccctcatccaagacaatggcacaaaggaggtgagctcccctggcccagccactcagtcaaacttgaccagccctcctacctcctac

SEQ ID NO: 7754 - DNA, 598 bp, Homo sapiens
  MAP TO AC007595.3; EXPRESSED IN LUNG, SIGNAL = 2.2; EXPRESSED IN PLACENTA, SIGNAL = 2.1; EXPRESSED IN ADULT LIVER, SIGNAL = 2.1; EXPRESSED IN BRAIN, SIGNAL = 1.8; EXPRESSED IN FETAL LIVER, SIGNAL = 2.4; EXPRESSED IN HEART, SIGNAL = 1.7; EXPRESSED IN BONE MARROW, SIGNAL = 2.7
atcagggggcgtataccttcttgtgatgtttgtagtatccaggatgagagatgataatattactccccatattgccggggatgtacaacgtcttgagatatggtttttaatatccagagggggaggggatgatatttcttaccatagcgcagggtgtacactttcatgtgatatggttcataatatccagggttatcaaagttagcccacatacatataagcatgtatcaaaatttcttaatcaactaacacatactattattaactgtacaataaaatctagccaacacgaatattcacccatgtgaaaaacccttaatattacggggagtgataagagttgctactcacaccataggggttgtacccccctcgcaatattgtccgtaatattcaggaaggaagaggatgatgttactctccatatcgcagtaggtgtacagtcccctgcaatattgtccgtaatatccagggtggaagaatgtattgcagaatgtatacacccccttgtgacatatttcataatatccaggggtgaagaggatgatattactccccatactgcaggggatatacacccccctgtgctattgttcat

SEQ ID NO: 7755 - DNA, 595 bp, Homo sapiens
  MAP TO AC008065.3; EXPRESSED IN ADULT LIVER, SIGNAL = 1.7; EXPRESSED IN HEART, SIGNAL = 1.7; EXPRESSED IN FETAL LIVER, SIGNAL = 2.4; EXPRESSED IN BRAIN, SIGNAL = 1.5; EXPRESSED IN BONE MARROW, SIGNAL =   2; EXPRESSED IN LUNG, SIGNAL = 1.3; EXPRESSED IN PLACENTA, SIGNAL = 0.94
ttttgatttgcctttcctgggtaggaaacatttacatcattttatacttttgagcatgaattgcctctctttctaggtgtaatcaatttctactcttcagcatacaaaagattttatgaatactattcactgcagaaagagctctaaaaataattttgcaggtagggttttatagaacactgatagtcttatgtggaacattggcaggcaaaaagaacaaaggcacatcagggtaaaggtggtggtaggtggagcatttcatttcatttgcctccaccaaagagcttgcatttactggagaaggaaaacaaataagaaacaggagcatctgcacttgctgttgaaggtttcatttcttatcactgttaagtcacatttgaatggaaccattacagtcttgttggtatgtataactatgcccccactttttttttccaaaaggaaaatcttgaattttatgtttaaaagtacaaagagctgtttttgacattctgcagttcattttggaattcacagtcttaaacctattcattttcagtagggtggtaaagagtgcacagtatatggcatttttacgcctaatagcacctccaat

SEQ ID NO: 7756 - DNA, 530 bp, Homo sapiens
  MAP TO AL133414.3; EXPRESSED IN LUNG, SIGNAL = 6.6; EXPRESSED IN ADULT LIVER, SIGNAL = 4.2; EXPRESSED IN HEART, SIGNAL = 7.5; EXPRESSED IN BRAIN, SIGNAL =   3; EXPRESSED IN BONE MARROW, SIGNAL =  13; EXPRESSED IN PLACENTA, SIGNAL = 3.3; EXPRESSED IN HELA, SIGNAL = 3.6; EXPRESSED IN FETAL LIVER, SIGNAL = 3.4
cggagacacagagaggaaggagagagatagacaccatggaggggaagcctcacttatttcaggtcccatgaatgggatgagaaagggagacgccttctgaactcacaacctctcttcttaggagtccacagaaaaccttccctcctggcccacccaggtcccctggtgaaatcgggagagacggtcatcctgcaatgttggtcagatgtcaggtttgagcgcttccttctgcacagagaggggatcactgaggaccccttgcgcctcattggacagctccacgatgcgggttcccaggtcaactattccatgggtcccatgacacctgcccttgcagggacctacagatgctttggttctgtcactcacttaccctatgagttgtcggctcccagtgaccctctggacatcgtggtcgtaggtgagagaatacagacctgcctctcacccttgctgggagatggagtgaatgatctaggactggaagccccaggtggtcatgaggaagatgagtgtggggttcctatgga

SEQ ID NO: 7757 - DNA, 581 bp, Homo sapiens
  MAP TO AL135936.10; EXPRESSED IN FETAL LIVER, SIGNAL = 4.3; EXPRESSED IN PLACENTA, SIGNAL = 4.4; EXPRESSED IN ADULT LIVER, SIGNAL = 4.8; EXPRESSED IN HEART, SIGNAL = 4.6; EXPRESSED IN BONE MARROW, SIGNAL = 5.3; EXPRESSED IN BRAIN, SIGNAL = 4.9; EXPRESSED IN LUNG, SIGNAL = 4.6; EXPRESSED IN HELA, SIGNAL = 3.3
tgatgctagagccaggtgtggctgcaaatacagataaacattagcagggaggtttggctgcacagagtccataataaatcaattgcttgcagattcatatcaaaaccctatcaatgagtgacaagtgacaattaagctgcatctggtggcaggctttatagtggcaggtgagttgatatacttgaaatgtacagttgcatctagtggcaggctttaagtcagaattcgatgttaattttagtctgcatgtggcccgcccattattttacttaccacttccatctgcgcctctttcctgcactgtgcacttgtctcagtcatagttttggcaagctcaaagcaaactctagccgaaatgagtaaaatacagacatcattggagagcttcttcgtagagggggaaatacccagtgatgagacagcagaagactctaagactgccaacaaaaagaaagctgcatttgaaagaaaataccaagtcttacttaaattataggctcaaggcaacagatgatcacattctccaagctcactttgtataatatgtggtgaccagctatccaacgaagccatgaaacctt

SEQ ID NO: 7758 - DNA, 534 bp, Homo sapiens
  MAP TO AL121914.16; EXPRESSED IN FETAL LIVER, SIGNAL = 2.5; EXPRESSED IN PLACENTA, SIGNAL = 2.8; EXPRESSED IN ADULT LIVER, SIGNAL = 2.4; EXPRESSED IN BRAIN, SIGNAL = 2.7; EXPRESSED IN BONE MARROW, SIGNAL = 2.8; EXPRESSED IN HEART, SIGNAL = 2.5; EXPRESSED IN LUNG, SIGNAL = 2.9; EXPRESSED IN HELA, SIGNAL = 2.5
caaaacaggaaagggcagacagccacagcccattgattgaatctcctatctattttcttccttcccttctttagaatcctggccctcttatacctcagccttcgagtcaacagactcctgagaggaaaccccgcttatctgaacactgccggctctactttggggcgctcttcaaagccatcagcgcatttcacggcagcctcagcagcagccagcccgcggagatcatcactcagagcaagctggtcatcatggtgggacagaagctggtggacacgctgtgcatggagacccaggagagggacgtgcgcaacgagatcctccgtggcagcagtcacctctgcagcctgctcaaggacgtagcgctggccactaagaatgccgtgctcacgtaccccagccctgccgcgctggggcacctccaggcggaggctgagaagctggagcaacacacgcggcagttcagagggacactgggatgaggactgtctacctcccttcctcctctgctcacctctcagcttcacacccaca

SEQ ID NO: 7759 - DNA, 512 bp, Homo sapiens
  MAP TO AL133395.14; EXPRESSED IN PLACENTA, SIGNAL = 5.5; EXPRESSED IN BONE MARROW, SIGNAL = 6.7; EXPRESSED IN LUNG, SIGNAL = 6.5; EXPRESSED IN HELA, SIGNAL =   4; EXPRESSED IN ADULT LIVER, SIGNAL = 5.9; EXPRESSED IN HEART, SIGNAL = 5.6; EXPRESSED IN FETAL LIVER, SIGNAL = 5.8; EXPRESSED IN BRAIN, SIGNAL = 6.4
gtagcaaactcttgcctgccagggaatgtcacagggattctgtcaaaggcaggcagatgctcctagctgtaggagtgagccagggctgccatcatgcctgagccagggactaggacaagccgtagtccccagtcccctaggcaggagcagccgaatactaactcatttcctctgatgttgggttgtttttcagggtgatgttcagcggacactcatccaagtggactttggcgatggtatcgcggtgtcttacgtcaatctcagctccatggaagatgggatcaaacacgtctatcagaacgtgggcattttccgtgtgaccgtgcaggtggacaacagtctgggttctgacagcgccgtcctgtacttacatgtaacttgtatgttattactgttgttggtttatgacctatcttaaatattgtgtccttttcaaattgaattcacaattttatatctagaagaagtacactagttatcttttagcagaaggggaatggggaagaaatgat

SEQ ID NO: 7760 - DNA, 538 bp, Homo sapiens
  MAP TO AC011859.4; EXPRESSED IN HEART, SIGNAL = 1.3; EXPRESSED IN BRAIN, SIGNAL = 1.2; EXPRESSED IN BONE MARROW, SIGNAL = 1.9; EXPRESSED IN LUNG, SIGNAL = 1.2; EXPRESSED IN PLACENTA, SIGNAL = 0.91; EXPRESSED IN ADULT LIVER, SIGNAL = 1.1; EXPRESSED IN FETAL LIVER, SIGNAL = 1.8
ttaacatctgccagtcttgggatttattttgaagaaaaatttagaggaaaaaaaatgctataatgtaaatgtccacatgatttagccagaaaatgagtgcctacacaaagtataaattgttccagcatttgactgatacttaattttgctagaaaatggtaaggcaactgaaattgttgcctgtgttcatttgatccggtgcaataatcactttagtactacaactgagcactttgaatcaaaaacttaatgagtgaagactgaaaacatgcttaccacgggttgtaatggggcaccaggcatcatggcattggctagttgcatttgctgggccaacatggccatgttcttctgctgaatcaagttattgcgtccatttatctccaactgcgtttttaaatgtgggggtggatgaagatatttgcagttctccctggagcaacggccctagagaaacaaaagcagcaaacatcatcttagaaaagaataaaatcagcaaattatgaaaaaaatataatgcaaaccacccacttgaatg

SEQ ID NO: 7761 - DNA, 560 bp, Homo sapiens
  MAP TO AL121935.12; EXPRESSED IN LUNG, SIGNAL = 1.3; EXPRESSED IN PLACENTA, SIGNAL = 1.3; EXPRESSED IN HEART, SIGNAL = 1.3; EXPRESSED IN BONE MARROW, SIGNAL = 1.8; EXPRESSED IN ADULT LIVER, SIGNAL = 1.3; EXPRESSED IN FETAL LIVER, SIGNAL = 1.7; EXPRESSED IN BRAIN, SIGNAL = 1.4
ttgtctgggttctgtctcccgcacatgggtgtaaacaacttgaatcattaaaattatatgtacaggtcaggacacgcggaaccacgtgaacaccctccaaatgtaagtggggatatttctcagtgggttaagaaaagtaccaacatttcctatctgcacttattgcgtgaacttttaaatcggtacttccaggacttggaatgtttccgatatgacacagtgattacaacacacacgtgtgcacacacacatgcacacacacacagaggcacccacagaatacattccagaggagcctgctctgtggtcggttctcccagcatggcaagaacagccacaaattcctctacaagaaattacgggaaatcttggaagtcattcccagtcttcgggagctctgcgagagttttgtttccgtggagatggcttctgctgcctcagaaagaaagcgggtttatcctctcagcacagcaaagtgcccagtccttctgccgaacgacgagtggaagccgggcaggctgttcctccgtcagaggtagagagggagaaattgccacaaa

SEQ ID NO: 7762 - DNA, 578 bp, Homo sapiens
  MAP TO AL121895.18; EXPRESSED IN BONE MARROW, SIGNAL = 4.9; EXPRESSED IN LUNG, SIGNAL =   6; EXPRESSED IN ADULT LIVER, SIGNAL = 6.1; EXPRESSED IN HEART, SIGNAL = 5.7; EXPRESSED IN BRAIN, SIGNAL = 4.2; EXPRESSED IN PLACENTA, SIGNAL = 5.6; EXPRESSED IN HELA, SIGNAL = 7.7; EXPRESSED IN FETAL LIVER, SIGNAL = 4.7
tggctgtctgaggatcactgagcccaaagccccattgtacaggtgctgaaactgaggtccaagaagggaaaggggctggccaagggccacataccgagtaagcagtggaaccaggactagaagtctgcgtggcttctgccttccagtttcccaggaagcctcccttgagaaaggtagaaaaggcggcagaagtgaggctgggatttgggggtatgggggtaaggacagggcagcactgcctcctcaggcctgctccaccccagctcccagccatcgcactgctcatgggtgtggccaaacctgccaaaccagtctctgtgccagagctgagtagcaaagcccagagcttcaggggtgtgggtgaggcggtagacaccaagaaccaggaaggacacagaaaggctcttccagggcctgctagcctaggccacatggccactgcccagagaaaggatgggcgctcacagctgagcggctccaccaccaggaatggtgtacagcaggactcaccaggcctcctgtccccatttggcacaaaggccggccctctgcatcgccccctcctctggacactcaac

SEQ ID NO: 7763 - DNA, 504 bp, Homo sapiens
  MAP TO AC008269.3; EXPRESSED IN ADULT LIVER, SIGNAL = 5.1; EXPRESSED IN LUNG, SIGNAL = 5.8; EXPRESSED IN PLACENTA, SIGNAL = 4.8; EXPRESSED IN HELA, SIGNAL =  12; EXPRESSED IN FETAL LIVER, SIGNAL = 5.8; EXPRESSED IN BRAIN, SIGNAL = 5.2; EXPRESSED IN HEART, SIGNAL = 6.3; EXPRESSED IN BONE MARROW, SIGNAL = 5.6
agatgtcgaaagttgcagccacataatctgcaagtcccttgaagagatccaaattatggtactggaggtctttgcaggactgcaatatgttgatcattattcttaaaggacacccatggatattatcttgaagaatgagttaaataaacaaacaaaaattacctgattgttttgaatacaacatgctttattcttttttcatataaaagcaaagtttttaaaacaaaacaaaaatagtctaaaacagaagctcaggtattgcaaatgatgaaagaaaaattcctcttacctaggaccaccttactgcattcatccaggagtataagagatcggtgattcatggcagctagtacttcaaacatgtgttggctattcaaaacagaaaatctgtctaattccctcaaggctttcatctaaagaaaaaacaaattttaatttaatttactatctgtgacaaaataaattaaacttttatttttattgagacagggtcttgtgctgtca

SEQ ID NO: 7764 - DNA, 595 bp, Homo sapiens
  MAP TO AC022918.2; EXPRESSED IN PLACENTA, SIGNAL = 1.4; EXPRESSED IN FETAL LIVER, SIGNAL = 1.4; EXPRESSED IN HELA, SIGNAL = 2.2; EXPRESSED IN HEART, SIGNAL = 1.5; EXPRESSED IN BRAIN, SIGNAL = 1.3; EXPRESSED IN BONE MARROW, SIGNAL = 1.5; EXPRESSED IN ADULT LIVER, SIGNAL = 1.6; EXPRESSED IN LUNG, SIGNAL = 1.4
tagtcaggttccaagtggggtgtactgaaatatagaactgtaattatgaatgcatgttgttctcaatgtatttatataacttgatgttttatatatttgagactatgttgaatgatcatagtgacgtgctggatcaagtttatactattaatagctcacaagagccaattgtttattttcaggaattttatgagccagttgttacacataataatttttaaaaattaaattatattaatttatgattaagtacagtatagtaaaaacaaaggtaataccaaaatccatacttcctattttactacatttacaaagaaaaaaagatatttttacaattcacaggtctgccagacaccagcttattcaaatgatcaagcacagcatcaccaacagtagaacaaactaaccttaggtgtctctctagtggtgcaatgagactaactgacaacgccttggtagaagcatctgtgtgtctaaaatcaatcttatctagagaaaagagatagatatgaactgttacactatagactaccagacaaacctatcctaaaaaatatgaggtagtaacttcctgtggttttattttccaccaccc

SEQ ID NO: 7765 - DNA, 564 bp, Homo sapiens
  MAP TO AL136300.5; EXPRESSED IN ADULT LIVER, SIGNAL = 2.6; EXPRESSED IN BRAIN, SIGNAL = 2.9; EXPRESSED IN LUNG, SIGNAL =   3; EXPRESSED IN PLACENTA, SIGNAL = 2.7; EXPRESSED IN FETAL LIVER, SIGNAL = 3.6; EXPRESSED IN HEART, SIGNAL = 2.6; EXPRESSED IN BONE MARROW, SIGNAL = 2.5
gggagattttatctttcatctgctatttaatattatctatgagaaaactgatttctacctgttaattatgtggaaagtgacttaaagtcatatcaaatcactgttagagatgatctctttataaggactttagatgtttgataatgtgtgcaagtcgtgcaactgagtctacatgaatttcgcgtccttttaagctggccttgcagggcatctgcttggaatctaccatctggcagtttgggttacagaacatacttgagagtattgcttcatttcttcaagaaaaaaatgatggaaatgccagccatttctgtcaacctagaatatcatctatctgcacatttaatattgttaggaactttgtgaggaacttattaatcaggggtttgtgatcttcctttgtaatcttaactggagtgtttggttctctaacatcaggtgctagcaggggccaagatggatccaagtggagtgagctgtttggaaatatcaggatatggggaaaccagcgattttctaaatgagacaaacatgttagtgaatctgtgaagaaaagttaagtga

SEQ ID NO: 7766 - DNA, 505 bp, Homo sapiens
  MAP TO AL162311.1; EXPRESSED IN FETAL LIVER, SIGNAL = 4.5; EXPRESSED IN LUNG, SIGNAL = 2.5; EXPRESSED IN PLACENTA, SIGNAL = 2.6; EXPRESSED IN ADULT LIVER, SIGNAL = 2.8; EXPRESSED IN BRAIN, SIGNAL = 3.4; EXPRESSED IN BONE MARROW, SIGNAL = 4.8; EXPRESSED IN HELA, SIGNAL = 4.7; EXPRESSED IN HEART, SIGNAL = 2.1
tccataactgctcggtttcccacaggtgttctgctgagagtaactgctctgatcatagctggtaggagggtaggacggaggtgcagtgactggctgcatggggtagctcccaggtacctggggataactgtagttactctgtccatatcttaggccaggctggttggtaacccctgtgctagattgaggttgactagtctcaatgggcttgttaccatcctatggtcttgtaggtgcagtggctgctggctgctgcccataggctgggtaagcaggctgagtgccatatgcagactgagcagcttggaggcctgggtggtggtgactgtagcagtggtggtatcataagcaccagtgccacacccctggacaggctggctgtatgcctggggggcagttggagtagcataaccagtgggaggctgtccataagaagttgcatagcccataggttgcagtggtctgagcctgggtatagctgacatcagtgggctgtccataggtt

SEQ ID NO: 7767 - DNA, 579 bp, Homo sapiens
  MAP TO AC009466.2; EXPRESSED IN PLACENTA, SIGNAL = 3.2; EXPRESSED IN HEART, SIGNAL = 3.3; EXPRESSED IN BONE MARROW, SIGNAL = 2.5; EXPRESSED IN LUNG, SIGNAL = 2.4; EXPRESSED IN ADULT LIVER, SIGNAL = 2.2; EXPRESSED IN FETAL LIVER, SIGNAL = 2.4; EXPRESSED IN BRAIN, SIGNAL =   4
tcagaacctatgggctggactcatctggctgcgctcagaacctacacaaggttcctgcctggaatgtggtacagatgccttcatccatactggaagggtcatgagaaccaggctctgaagcacagagcatgggttggggtggcaataggggcaacaactctacaggcagatatgactttgacctaattctggaggtgcagttcctgattctgtaggaacatgcccaggatggcaggtggggacatctgagtactgaggcactcatgatcccaatggaaacaccaactcgcccaactcaccttccttggcatcataccacttggaatgccatacttcttcaccaactgctctccactcagctttgtatttgaggatgggcaccccacctgtggcctctggttcatcaaactgcacctgggctgtgctggagtatggctccacctggtcgatggatggtgaagagggggtgtctgtggggaagacacatatggagactcaggtgagcccagtttggcccaagaccattaactctcagtcacaaggcacatctctgtcatttctgctcactcttgggaatcc

SEQ ID NO: 7768 - DNA, 570 bp, Homo sapiens
  MAP TO AC025826.1; EXPRESSED IN PLACENTA, SIGNAL = 1.4; EXPRESSED IN ADULT LIVER, SIGNAL = 1.1; EXPRESSED IN HEART, SIGNAL = 1.2; EXPRESSED IN FETAL LIVER, SIGNAL =   1; EXPRESSED IN BRAIN, SIGNAL = 1.3; EXPRESSED IN BONE MARROW, SIGNAL = 1.3; EXPRESSED IN LUNG, SIGNAL = 1.2
acgggcttatgattttgtggtaatatatttcctttttctaaccaggcaggaagaagcaagaaggaagaaaatgccatcgttgtcatcttgtgtctggaattggtgggttcttggtctcactgacttcaagaatgaagccgtggaccctcgcggtgagtgttacagttcttaaaggcggtgtctccagagtttgttccttctgatgtttggatgtgtttggagtttcttccttctggtggggttcacggtctcgctggctcaggagtgaagcttggaccttcgtggtgagtgttacagctcttaaggcagcgcgtctggagttgttcattcctcctggtgggttcgtggtctcgctggctttaggagtgaagctgcagacctttgcagtgagtgttacagctcataaaggcagtgtggacccaaagagtgagcagcagcaagatttatggcaaagagtgaaagaacaaagcttccacagtgtggaaggggaccccagcgggttgtcactgctggctggggcagcctgcttttactctcttatctggccccacccacatcctctgattggtt

SEQ ID NO: 7769 - DNA, 574 bp, Homo sapiens
  MAP TO AC013591.3; EXPRESSED IN PLACENTA, SIGNAL = 1.5; EXPRESSED IN ADULT LIVER, SIGNAL = 1.4; EXPRESSED IN HEART, SIGNAL = 1.4; EXPRESSED IN FETAL LIVER, SIGNAL = 1.3; EXPRESSED IN BRAIN, SIGNAL = 1.8; EXPRESSED IN BONE MARROW, SIGNAL = 1.4; EXPRESSED IN LUNG, SIGNAL = 1.5
gagcatcaagaaggaggcaccccattctacctggcatctggtctggcctctggggctcccttcctgcatccagggctgcccaggcaccctgtggtgcccagccctgagtgtgaagcccctgggctgagtgtacctggcctggtcctgggggccaagcaactcagcaagtggagggactatgagggagggaagcatgtcccaggcaaacgtaccggtgtgaagggatgccagcctcctgctctcatccctgctgccttcccgggaccccgagaaagaaatcggccgggtactcctagagtctacctggggatgggagcccaggagagcctggagatcccctcccccaggtatgtggaggcctgtcttgagcctgtgccttgggctacatgtcggtggtggaccgtggatccgtagccgccctggtgctcactgtgtgataggtagcctgggaaacccagagatagtatcagcacactccactgtcaggggcactgagactgaggaccgcgggatcatcgcacccacacctcctctgctgtgtagggcacacactgcccactctggttcacacatg

SEQ ID NO: 7770 - DNA, 544 bp, Homo sapiens
  MAP TO AL138807.7; EXPRESSED IN LUNG, SIGNAL = 1.6; EXPRESSED IN BONE MARROW, SIGNAL = 1.3; EXPRESSED IN HEART, SIGNAL = 1.9; EXPRESSED IN PLACENTA, SIGNAL = 1.5; EXPRESSED IN ADULT LIVER, SIGNAL = 1.6; EXPRESSED IN FETAL LIVER, SIGNAL = 1.6; EXPRESSED IN BRAIN, SIGNAL = 1.8
ccctacttccctcttcagccaggcggcagaacgggaaagggattagccagctgggatgccagcacacaaaatgtaattccaggtttatgacacataagttatttgacaagaccaacaccaagaggcctgtggatgctgccagggcctggtgggaccccgtcaacctgtcatccagggcagatggaggcctccctggtgctggagtaaccaagcgactgttccgccacgtggcattcccacacctgcggcccgggccttgaactcttctcccctgactgtcagcggcccgtgattgagctgcaaccctgtggcccaggagccagaaggctgacctcgtgctgtgagccggctgtagacctgggagttgacttccttgtcccgcacgtagcatcggatctcctccaccgcctcacggatgacagtgacggccagcacgaagccctgcagagacagacgacagtgagtcttgctacaggcagtgagccctgctgcagccaaccgtcccctcctggtgccaggggcaggaaaggcgagaggtcacttg

SEQ ID NO: 7771 - DNA, 590 bp, Homo sapiens
  MAP TO AC009301.3; EXPRESSED IN LUNG, SIGNAL = 2.5; EXPRESSED IN HEART, SIGNAL = 2.5; EXPRESSED IN BRAIN, SIGNAL = 2.6; EXPRESSED IN BONE MARROW, SIGNAL = 2.3; EXPRESSED IN PLACENTA, SIGNAL = 2.3; EXPRESSED IN ADULT LIVER, SIGNAL = 2.6; EXPRESSED IN FETAL LIVER, SIGNAL = 2.6
acaaaaacgtgaagggcaagggtagggtgataagaaaatcagcaggccaggaagcagtggggagcaaaggcagggctgcctcagctctcaggttttaaaaagtaaaggtgagctggggatgtctggcacagggaagtggtggctctgcaggagccatgtggccgcctggaggggggccggcctggaaatgaggggcagagcctggggctccagacagtcattgtctttgagactgggccctggccagtgggcatcctgcatgacactggtaggtcattccgtttctagaagattgtggcacagatgtctgctaaacagcttccaatgtgctaatggctaggtcagtggaaggggccagggaggcactgttaactgcctccagtgccccaccaaccaggctgtgtgtgcataaactgtcattgcaggtcctagcttagaagggcttgccacgctcctctcttgaatgcttctgctctaaagcagagctagcatctgaaagagcacccccttttcagttaggccccaagttcccttacttggcctcagcagataccactgctgcccaggccaccagccacctgactcttttc

SEQ ID NO: 7772 - DNA, 559 bp, Homo sapiens
  MAP TO AC010338.3; EXPRESSED IN HEART, SIGNAL = 1.7; EXPRESSED IN FETAL LIVER, SIGNAL = 1.2; EXPRESSED IN BRAIN, SIGNAL = 1.3; EXPRESSED IN BONE MARROW, SIGNAL = 1.3; EXPRESSED IN ADULT LIVER, SIGNAL = 1.7; EXPRESSED IN LUNG, SIGNAL = 1.3; EXPRESSED IN PLACENTA, SIGNAL =   1
ggtcttggttaaatcgcagctctgccacgtattagctgtgtgaccttcaacaacctacataacctctctgagcgcgtttcttcctcatttctaaagtgggactattaataatacctacttcataggcttcttgtgaacatttaatcagttaatatatgcaaggcactcagaacagagcctagcacatggtaacctattatatttattgttattactaatagtattgcattaaactctttcattctctctctcaggactccaactaaagtgtccaaggagaagggacaccactcaagaggaaggaagaaaaaggctttggtgagtctcaggccaccccaggaatctctgggtgatggagaagggagctacagagatgtctctgctccagcagaagaacagaaagatggttctaacctggggtgagagacaccaaatgagctaagctttcctgtttcattctttccctaaaggcagtaagacctgagcttgggcggtgggaaggtccgcagacatctggtacaagaagggctccaggcaagcaaagagctgttcctcccag

SEQ ID NO: 7773 - DNA, 571 bp, Homo sapiens
  MAP TO AC022758.3; EXPRESSED IN HELA, SIGNAL = 3.1; EXPRESSED IN HEART, SIGNAL = 2.7; EXPRESSED IN BRAIN, SIGNAL = 2.7; EXPRESSED IN BONE MARROW, SIGNAL =   2; EXPRESSED IN PLACENTA, SIGNAL =   3; EXPRESSED IN ADULT LIVER, SIGNAL = 2.8; EXPRESSED IN FETAL LIVER, SIGNAL = 2.3; EXPRESSED IN LUNG, SIGNAL = 2.7
caggcagttttgggagagactggcaggcacggggcccatgattcagatggagtctgtctttggggcccgtaaaagtgaccaggccctgctcattccctggcccagcagacagcagcagctgcagaagcttaggatacagagccatgtgacgtaggcacccagagtcatgctttgctgcaatgctcaactcatggaaggctttgaggctccacatgcgttcaagcagcgacttttcatggttaccaggtatctccatctaccaatccaaagatcttcaggtgtcagaaaccttcatagctagaatctcagaggtccacagtaggaatatgataccctggggttccttcactgactcctttctcaggtctggatctgggtcttgggcccagtcctagtatctggcaatgctgagcaggcagccctacttcttccctcttaaccacaatttcttccatcacctctcttttgaattttagtgctctctttcaaaagatctgttcaaagtgtgaagattgtcatgttttgtttcctccccacggaagaggtgcattctaactgcctctcaccagcc

SEQ ID NO: 7774 - DNA, 551 bp, Homo sapiens
  MAP TO AC022206.2; EXPRESSED IN LUNG, SIGNAL = 2.1; EXPRESSED IN PLACENTA, SIGNAL = 1.9; EXPRESSED IN ADULT LIVER, SIGNAL = 2.1; EXPRESSED IN HEART, SIGNAL = 1.9; EXPRESSED IN BRAIN, SIGNAL =   2; EXPRESSED IN FETAL LIVER, SIGNAL = 1.8; EXPRESSED IN BONE MARROW, SIGNAL = 1.9
tatctcccaggcaggacaacacatttagtgagcacttctgatattcctttaaacatcatattgtttggtaataatggtacttatatcaagagagtcactgctctggctataagtcactggagagattcaagtgttggttatctgattaaagggatgtcagaggtcaggatgcccacagaatttgaacaaacctcaaattacacgttttaatgaggtgttttcttgggaggaagtgcttttcacacttgctctgccatgcaccctcttggtaaagaccccattatcaacaaaagaagtcccccaggtccagacagattaatcagacagacaaacattgagcaagacatggcagccccaggcagcacgtggccaatatccccttcggcctcccacatctgctttctgcaagaatgcagtctcgtggagttgttcacttcaggcttgatgctggtcttgaaatgaaagggcagcccctggccatgaagagcctggctggtctgacacatgtaagcacctttacaagctaaaccacgaaatgtcttggcatctga

SEQ ID NO: 7775 - DNA, 527 bp, Homo sapiens
  MAP TO AL117341.26; EXPRESSED IN LUNG, SIGNAL = 6.9; EXPRESSED IN PLACENTA, SIGNAL = 6.3; EXPRESSED IN HEART, SIGNAL = 5.4; EXPRESSED IN BONE MARROW, SIGNAL = 6.4; EXPRESSED IN HELA, SIGNAL = 5.2; EXPRESSED IN ADULT LIVER, SIGNAL = 6.4; EXPRESSED IN FETAL LIVER, SIGNAL = 4.5; EXPRESSED IN BRAIN, SIGNAL = 5.7
agaccctggactggacactggccacaccagtcggcagtacagcgtctgtgatgctaagagcagacttgtgccactcagccatatcctgaggctgcaggttatgcctcaatttcctcatctagagaataatgatcacagagttgtggagaatatgaaataggataaccaacaaaataactcagagtggtgcctatcacataatgaataataatgttgttgcttttgttgctgacattacaggaaataaggttgaccttgttttctcagatgtaaaatggggtcaggttaaaggcaacgaaggaactattaatattcaatccctgactatgcagcaaggcaaaagactcctaaggagctaagaacaaaataaatgggattacatctaagaacctattataattcccacaaatatttggcaaacttagggtcatttttctagaataagtagctaatccctttactctctgaataggtgttgttctttggaataaaaacaccattgtaaagccaggtgtggggatcaatac

SEQ ID NO: 7776 - DNA, 592 bp, Homo sapiens
  MAP TO AC009316.3; EXPRESSED IN ADULT LIVER, SIGNAL = 2.5; EXPRESSED IN HEART, SIGNAL = 1.9; EXPRESSED IN BONE MARROW, SIGNAL = 2.1; EXPRESSED IN LUNG, SIGNAL = 2.2; EXPRESSED IN PLACENTA, SIGNAL = 2.5; EXPRESSED IN FETAL LIVER, SIGNAL = 2.1; EXPRESSED IN BRAIN, SIGNAL = 2.1
ttgggaaagggcactgtatcaactccctaggttaacctggggaccagtaagaactccatgagaagcagaggaaagggctcattgctgggatcttggcttctcttttccagcagccagtctacctctaacctctttctcatcataggtcataggaagatcctcgtgacctatgcgatctttccagtcaccgtccttttaggagagaaaataattaggtttgagaaaagcagagagaaactgtttggatctatgaaaattaacatattatatatatatacacacacatatatatatatgcatacacatacacacacacacatacacacattaagaatgtgaaaaacttctttcttaagtcaggggtaattttaaaaagaggtgtatttacacaaagtctttcttgtctttttacacaaagtctttcttgtcttttcttttttaatttttatttttcagggggacatgtgcagcctggttctggaggtaaatttgtgtcataggggtctgttgtacagattagttcatcatccaggtgctaagcctagtacacagtagatgttttttctgttcctctccctcctcaagtaagccc

SEQ ID NO: 7777 - DNA, 595 bp, Homo sapiens
  MAP TO AL133293.14; EXPRESSED IN LUNG, SIGNAL = 1.4; EXPRESSED IN PLACENTA, SIGNAL = 1.2; EXPRESSED IN BRAIN, SIGNAL = 1.1; EXPRESSED IN ADULT LIVER, SIGNAL = 1.2; EXPRESSED IN HEART, SIGNAL = 1.3; EXPRESSED IN FETAL LIVER, SIGNAL =   1; EXPRESSED IN BONE MARROW, SIGNAL = 1.1
tagggtgggtccacagtagccttcacttatgggatagttcctaacctgtgtgacttctaggaattgttcaaattaaaatgcttcagtctttctttgcctggcctcagggaatttcaccctacacacctgaagccttgcacatggcagtgattcaagaggacacatgtagatttctggagctgtttttcttccttcagtcaggtactctgcccctcaacttacagccacctaagcctacctgaactttgttcttggtctcaaagatcaactcagcaatactgctggactctatttgaatttcccctccctgcacctaagatgcctccagacagaaagctgggtgaactgtagagctaacttgatttgcttacctttcttcagggatcactgtcttatgctactgcctgttgttcaatgtctgcaaacaattgtttccaatgttttgcctagtttttttttctaattttcataaagctctttattggttagtagagacattgggagtcatgatcccaccttagagcctttgcacttggttccctctacctggaacgcttcccccagatatccacgtggccaacttgctcacttcaca

SEQ ID NO: 7778 - DNA, 552 bp, Homo sapiens
  MAP TO AC011272.3; EXPRESSED IN PLACENTA, SIGNAL = 0.92; EXPRESSED IN ADULT LIVER, SIGNAL = 1.5; EXPRESSED IN FETAL LIVER, SIGNAL = 1.8; EXPRESSED IN BONE MARROW, SIGNAL = 1.5; EXPRESSED IN HEART, SIGNAL = 1.6; EXPRESSED IN BRAIN, SIGNAL = 1.1; EXPRESSED IN LUNG, SIGNAL = 1.4
cgaccaaaaataaactggggtgggtgctgccatgggtatgaagatttctggtactttcgtaggcaggattacatctctagggctgtagaacgagtgattcaatacagggaagaaggagccttggcccaggatgtagcaggtgagtcctttagaggagcttgcttgtggccagaaatcctaggacggtcacaagtataagaaaatgtggaccctctctcttgtgaataccaggagaggaactcacctgaagcaaatttacatcctcgctatttcccctggtgagcattcacatacaatctagttctagatgtgccagaatggacacagggtggggaagccttgttttgtcattcctgcctctcgttggctgctgtgccagattacttggtgctggcttatggtgtagatagaacactccgaaagtcacctgtagtatgtcatggccagcagagcactggcaacctgaggccacactgtgacagccactggggccatatggcttgctgatggccatgaagcttcatctttgatggaggtcatccctgagaccaa

SEQ ID NO: 7779 - DNA, 507 bp, Homo sapiens
  MAP TO AC009298.2; EXPRESSED IN ADULT LIVER, SIGNAL = 1.3; EXPRESSED IN LUNG, SIGNAL = 1.1; EXPRESSED IN PLACENTA, SIGNAL = 0.95; EXPRESSED IN HEART, SIGNAL = 1.5; EXPRESSED IN FETAL LIVER, SIGNAL = 1.4; EXPRESSED IN BRAIN, SIGNAL = 1.7; EXPRESSED IN BONE MARROW, SIGNAL = 1.3
agcgaatgtcacccaaattcttgagtctcagaatatgcttgccatttgttctgccgaaagccaggtcgttcgtctttgagtctttggtgtttgtcgtagttatttttgataacttggaaacacagtctttctctatctagaaacctcttggtattcctcatgggcagtgtcttttttgccaggtcaagtccctcatcatgcagaaaccacatttctaaacaatttctgagggacagtcctcctccttggccactccaggctgccctgaatccctctgactgtgttagtctgttcttgcgttgctataaagcgatacccaagactgggtaatttataaagaaaagcggttaattttggcttgtggttctgcaggctgtacaggaagcgtggtgctggcatctgcttctggcgagggcctcaggaacctcccaatcatgccagaagatgaaggaggagcaggcgtgtcacatggcgagagtgggagtaagagagagtgaagggggaggt

SEQ ID NO: 7780 - DNA, 585 bp, Homo sapiens
  MAP TO AC015525.3; EXPRESSED IN ADULT LIVER, SIGNAL = 1.8; EXPRESSED IN BONE MARROW, SIGNAL = 1.8; EXPRESSED IN HEART, SIGNAL = 1.9; EXPRESSED IN FETAL LIVER, SIGNAL = 1.6; EXPRESSED IN LUNG, SIGNAL = 1.8; EXPRESSED IN PLACENTA, SIGNAL = 1.5; EXPRESSED IN BRAIN, SIGNAL = 1.7
tgattgggagaaggatgaggaaggctgagtaggctggtggacttggcccaaactgtggaaaaccgtctcagccctggagggtctccgaatggccccttagttggttgagtctaaaatgggcaggaattgatgtgaaccacactcagccataagccctaagacttcacaatacctggaaacactggttcaacgatgatgcctgaccatggtgactggaaaccaatgaactctgctatcactcatgccatctttaccaaagagaagagaagggaatattagaaacttctgccctggatctttgcagagaaaccagagagaaagagaagaagagactcagtgattagggaggttcagtttttaggaaccagcccttcaggggatcagttggtagtatctctctcttaccgtgttctctctctgttttgcagtgtatcattactttgtggatattataacatggaacaagaatgtaagaagaggggacattaccatcaaattgagagacaaagctggaaacaccacagaatccaaaatcaatcagtaagttgagttacaattgtttgcagtgcgctatttccctttttg

SEQ ID NO: 7781 - DNA, 593 bp, Homo sapiens
  MAP TO AL136442.10; EXPRESSED IN PLACENTA, SIGNAL = 5.4; EXPRESSED IN HEART, SIGNAL =   4; EXPRESSED IN BONE MARROW, SIGNAL = 4.3; EXPRESSED IN HELA, SIGNAL =   3; EXPRESSED IN LUNG, SIGNAL = 5.1; EXPRESSED IN ADULT LIVER, SIGNAL = 4.9; EXPRESSED IN FETAL LIVER, SIGNAL = 4.3; EXPRESSED IN BRAIN, SIGNAL = 4.5
caggtgattgaaccttaccaaagtttggatcaaacaattgaatctgatcaaagttgatacctgagtagttcacatttttaaagaactgtagcttgcttatatgtttgtgactgtaaaatcacaggcctgattctacaaatttaaaaagtatattctagtatcaatggagatgaaaaataggaaataaattgagtaagaaatggcaagaatgcatatatatatacaaatagataatatccatccacatttcaaaatatttaatacatattcatccttgtggatgtttctaagtataagctttctgtttcgcttgacagtagctgtcaagtgtaattaatcctctctatagctagagaaactgaggttccagtcagtcaatgtgaatcagggtcctcttcaggtgacgtgtggactcattgtcaagatattcgtgtttatcatcactctctacatttggtttctcctgttggtggaaaatgtaaaagaagacagcaggtgtgtgtatctaattacatgagtatggaccatgtgtataatgaatgctatcacacacaggtagaaagatacatgaaaggtggggtcagtgatccata

SEQ ID NO: 7782 - DNA, 566 bp, Homo sapiens
  MAP TO AL121884.5; EXPRESSED IN PLACENTA, SIGNAL = 1.8; EXPRESSED IN ADULT LIVER, SIGNAL = 1.4; EXPRESSED IN HEART, SIGNAL = 1.7; EXPRESSED IN FETAL LIVER, SIGNAL = 1.5; EXPRESSED IN BRAIN, SIGNAL = 1.8; EXPRESSED IN BONE MARROW, SIGNAL = 1.4; EXPRESSED IN LUNG, SIGNAL = 1.4
aatggacaccaaaagcaagcaggagtagctattcttatatcagacaaaacaaactttaaagcaacagcagttaaaaaagacagagggacattatataatgatgaaagccttgttcaacaggagagtatcagaatcctaaatatatatgcacctaacactggagctcccaaatttataaaaacaattactactagacctaggaaatgagatagacagcaacacaataatagtggaggacttcaaatattaccttttaaaggctactgttcaaacagcctattacttgtattacttgcaattatcctgggttttgatacaaagtgagacattggaggaagcaagcttttcttactagtgtgaactaatttatcatatttgctaattgtcatcttgatgcccaggaagatatagatatcccactccccatagatgtagagaaagctgttggttgtccaaccaaatatctttcccccttctttcatagcaatagagttaatcttgctgtgcaagtaaaggctacatcacacagatttccttgtaactaggtgtggccctataactgagtt

SEQ ID NO: 7783 - DNA, 524 bp, Homo sapiens
  MAP TO AC018535.3; EXPRESSED IN HELA, SIGNAL = 2.5; EXPRESSED IN BONE MARROW, SIGNAL = 1.6; EXPRESSED IN LUNG, SIGNAL = 1.4; EXPRESSED IN HEART, SIGNAL = 1.6; EXPRESSED IN PLACENTA, SIGNAL = 1.1; EXPRESSED IN ADULT LIVER, SIGNAL = 1.9; EXPRESSED IN FETAL LIVER, SIGNAL =   2; EXPRESSED IN BRAIN, SIGNAL = 1.1
tgaaaccagcacattgatccttcttgactacttgtccaagtactgattcttgactttttagaggctattgaagaatcctcagaggaaatcccaatggtgtacgacagatataagatgatacaggaaagtacagttgtgcagagtgcaataaggaacatcggtgtgatgttcatcttggttgtccttaccttcctctctacactggtgacacagctatcaatggtgaggcacacacagaacttataaacaacccctccttctattctccttctatttgccatcttactgtctctaaacttttcttgcatacttatccttgcctattaaacaactcctggtattaaacaaaggcaaattctgctcttcacaagccagcagagagagatactattggttttttgcttgtatataaaaactaagcttggctactgccaaatcagagtcagagatcagaaaatctaacaaaatcctggtacactttctgatttctgtcttcctagagacctttattgactgcctggcct

SEQ ID NO: 7784 - DNA, 560 bp, Homo sapiens
  MAP TO AC010767.3; EXPRESSED IN HEART, SIGNAL = 1.7; EXPRESSED IN BRAIN, SIGNAL = 0.54; EXPRESSED IN BONE MARROW, SIGNAL = 0.48
ctcctttgctggacgttttctgcccttgaacatgagactccatgttcttcagcttttggactcacggacttatgccagtgatttgacgggggggtctcaggcctttggccatagactgatggctgcactatcagcttccctacttttgggattttggggacttgaactggcttcctggctcctcatcttgctgacagcttactatgagacttcaccttgtgatcatgtgagttaattctaataaactgcccttcatacatacgtgtatcctattagttctgtccctctagagaactctcactaatacacagtgtttttacgttttgggctcagaatacacagatcatcaggtttactgcattctcttagcatgtaggagtctactataacatttattatacagaataaaaagttaattttattggtaaaaaagtatttctgatactaattatattaattcccaaagcttcttttggaactgatatgtcaatagttaaagcacttatagtagtcatacctgaaatgtacctttcttaatcagaatgctagatgacccgtcc

SEQ ID NO: 7785 - DNA, 576 bp, Homo sapiens
  MAP TO AC007000.2; EXPRESSED IN LUNG, SIGNAL = 3.4; EXPRESSED IN ADULT LIVER, SIGNAL = 3.2; EXPRESSED IN HELA, SIGNAL = 2.8; EXPRESSED IN HEART, SIGNAL =   3; EXPRESSED IN BRAIN, SIGNAL =   3; EXPRESSED IN PLACENTA, SIGNAL = 3.1; EXPRESSED IN FETAL LIVER, SIGNAL = 3.6; EXPRESSED IN BONE MARROW, SIGNAL = 3.4
tgtgcaccttgataaataaaagacttaatctgtcatctatttaacttactgactcaggttaatgtttatagatactctctagctgtataacatttatgaacatatgataagaaaacattattatacatacctggacgtgactgtatttgttcttggctgggacactttgaacatttgccatccaaactattgacaacaaatgttagatttgccactttgctgtcaacataattttctatgttgttcatatttacaagattcagcttctccaggcgaccatgaagtacattgatctcctctttggcattctttagctcagaggacagcttgttaacctcactctctaattctctaactctgttatcaccaacctctcccggggctcctgtactgggtaacaacagtccgtttctgcctgggtctccgttgtcatcagcctgcagcttgcagtcttggcaagatttctttagactatttacgatttccttgaggttttggacttctttgaacacctcctcgatcctgctgaattgcttcgggagctgaatagtcaaggggggcaggcttacctggtag

SEQ ID NO: 7786 - DNA, 553 bp, Homo sapiens
  MAP TO AL158138.1; EXPRESSED IN LUNG, SIGNAL = 4.9; EXPRESSED IN ADULT LIVER, SIGNAL = 4.5; EXPRESSED IN HEART, SIGNAL = 3.8; EXPRESSED IN FETAL LIVER, SIGNAL = 4.1; EXPRESSED IN BRAIN, SIGNAL = 4.1; EXPRESSED IN PLACENTA, SIGNAL = 4.5; EXPRESSED IN BONE MARROW, SIGNAL = 4.2; EXPRESSED IN HELA, SIGNAL = 2.7
accttacttggtggctgtgggaattaagtaagttgtaaagctttgaacatagtgcctaacataagttaatgttcatatatgttcaatgtttgatgaatgccggccagaaggaggaggaggagggaagaaggaagaagataaagtatagcctcagcttctaattggtctgcctctttcattagctcctctctcccatggctttgctcttggttttctgttggagggtaatggcaggctctgcactcagactgtctgggtacaaaatcagcttcaccattggctgcctggcaatctccttcaggtgtccaaggcttcgttttttcagtctgtaagaggaagaccataatgcacagtaccttcctcacagaagagctgggcaaattaaatgagtgaatgcagataaaagtccctcagtgcctggtgcagtgttattactgttggtggtggtagcactgatgttacaaaaatgagagaagaaatccatagacagagagattaagggcattaagccatctatcttcatgttagcaaatcaattctaggcaggccttca

SEQ ID NO: 7787 - DNA, 529 bp, Homo sapiens
  MAP TO AC013451.7; EXPRESSED IN HELA, SIGNAL = 2.5; EXPRESSED IN LUNG, SIGNAL =   2; EXPRESSED IN PLACENTA, SIGNAL =   2; EXPRESSED IN ADULT LIVER, SIGNAL = 1.8; EXPRESSED IN FETAL LIVER, SIGNAL = 1.6; EXPRESSED IN BRAIN, SIGNAL = 1.4; EXPRESSED IN BONE MARROW, SIGNAL = 1.3; EXPRESSED IN HEART, SIGNAL =   2
agaggccctgctcttctaggacccaagacagggtatccttaccccagggggatgaggggtgctccagaggtaccgcctgttgggtgccatctctctgctcaaggcctggtcccgggggcagggcgttggaagagagctggctactggccgtggcagtcgggtgaagtcggacagtgcgggacaaccccacgtgctgctgggaagggtgggtctggctgaggccactcagggtcctgtggagacaaccgcggcacgggggtttgcaccctgggaacagtgtgtctgtgccactcctcatccagccacccactctctgcctttgcacaagaaaaatgctctctggctgccttctcacccatgtatggctgactcccagacatgaaggtgccctgaggcagaaggactgatctaaggcctgccggctagttttgtagaaataccaacccctatgtggaatcaccaggcttttggtgggttattccgggcaaatcacttagctcctctgggccccaggacccttaactgcaaa

SEQ ID NO: 7788 - DNA, 506 bp, Homo sapiens
  MAP TO AC021641.4; EXPRESSED IN HELA, SIGNAL = 2.4; EXPRESSED IN HEART, SIGNAL = 1.5; EXPRESSED IN BONE MARROW, SIGNAL = 1.6; EXPRESSED IN BRAIN, SIGNAL = 1.4; EXPRESSED IN FETAL LIVER, SIGNAL = 1.7; EXPRESSED IN ADULT LIVER, SIGNAL = 2.2; EXPRESSED IN PLACENTA, SIGNAL = 1.5; EXPRESSED IN LUNG, SIGNAL = 1.6
gcatccacatttcacactggattcccgttctgacgctctggggtgatgtagtgtagaaagaggcagaacggtctgggggtttgcttttcttcttcaactgcagaaaaactgattctaacagtacagaagacgaagagcacaccttgcacatcatgttcagctttaaaaagaacttatccaggagctggagatctggagatggtgtctcttaagtggcctgtgcccacacccccttttgcagtctctgcgtactcctaaagacaggcacacaccagtgtgaaggccactggcctaagacatttatgaaagtcagaatttagaaataaagtttggtgggatgggaaaaggatacaaatatcctctgagaatctatttttaaaaactgactagaaatagttttgagcaagtgacgagatataagacaaacaaaatatatgcaaattaagatttccttcactgtgaaaattggtacttaagtagaaatagaaaagtgcattccattcacc

SEQ ID NO: 7789 - DNA, 527 bp, Homo sapiens
  MAP TO AC027273.2; EXPRESSED IN ADULT LIVER, SIGNAL = 5.2; EXPRESSED IN FETAL LIVER, SIGNAL = 1.9; EXPRESSED IN BONE MARROW, SIGNAL =   5; EXPRESSED IN LUNG, SIGNAL = 3.3; EXPRESSED IN PLACENTA, SIGNAL = 3.8; EXPRESSED IN HELA, SIGNAL = 4.3; EXPRESSED IN HEART, SIGNAL = 2.8; EXPRESSED IN BRAIN, SIGNAL = 3.3
acccacaggcattgattagctgctccattatctatctgaaaaggttggaaaaacaactgacaaaaaatagcaaaataaagacattaatcagcaccaggatgtcctgctttctctcatcctttgtcacagaaagatgtgtcattttttcttggatctagagatactgaagaagaaagccttactgaattgtcttgcttgttatgcaattcaagggtatggcctgcttgctgagggacaaacacagcagcaaaagtgtgaggggtgagaggagaataagtggtggaattgtacctgcattttatttgccaaggaactgtgcagttatatgactctgtggtatcatataagacaggtagaatttgaatacttgctgtacaggagacactgatttataatcagtgttagttagacatgcaagaataataataaaggatgtaactaaaagcaaaaacagggaagtaatatagaatttgttcttactaagcccgtgagaaaggagtaaatatagatattcctgaagcagccca

SEQ ID NO: 7790 - DNA, 600 bp, Homo sapiens
  MAP TO AL158049.2; EXPRESSED IN ADULT LIVER, SIGNAL = 1.7; EXPRESSED IN BRAIN, SIGNAL = 1.5; EXPRESSED IN LUNG, SIGNAL = 1.8; EXPRESSED IN PLACENTA, SIGNAL = 1.7; EXPRESSED IN FETAL LIVER, SIGNAL = 1.7; EXPRESSED IN BONE MARROW, SIGNAL = 1.6; EXPRESSED IN HEART, SIGNAL = 1.5
acccccttacccatcttctggtccctccagacctgttgggggagtacttactccatttccacatgtccatggagaacatgttccaggacggccccttctccctcaccgctcatttcacagaggtaagatggggcaggtggactgaacccattctcctggccctcacccgccagccattgtccattcagtgccctctacgcccacttcaacgctcagcacagcaggagccgctcagcagatgtgttagcggcaagagaacaaggggtggctgggcacggtggctcacacctgtaatcctaacattttgagaggcagaggcagaggcaggaggaatgcttgagctcagaaggctgaggctgtggtaagccataattgatcatgccactgcgctccagctgggcgacacagagagaccctgtctccaaaaaaaaaaaaaaaaaaaaaaaaagcctcccgtgatggggaggctgcagcctgtgtggggctacctacctgcccagctgccttcgggtggctgagctcctctcccatctccactgtgtggatggacgtgggccttcccacacccagagagggaagagccccacagaaataacagga

SEQ ID NO: 7791 - DNA, 594 bp, Homo sapiens
  MAP TO AC011181.5; EXPRESSED IN ADULT LIVER, SIGNAL = 1.2; EXPRESSED IN HEART, SIGNAL = 7.8; EXPRESSED IN FETAL LIVER, SIGNAL = 0.81; EXPRESSED IN BONE MARROW, SIGNAL =   1; EXPRESSED IN LUNG, SIGNAL = 0.92; EXPRESSED IN PLACENTA, SIGNAL =   1; EXPRESSED IN BRAIN, SIGNAL =   1
tctaaatctttggcggcatccttgctttatatattcccttcaaactcccctcctaatcagtaaattctgtggccgctctctataactgtgacttgaattagaacagatttctccatttactactgtaatagcaacaccatatctcacttgaaatatggcaacagcctcttgattcgactatgtctcaacatttcattctctaataataatttaaataatcaaagtccaggataaacactaaatagaacatatcacctcccccctccggcttaaaaatatcgaatgacttaaaaattagtcagggcttttatttgcaaatagtgaaaaccaattcttactaaatctagcagccagtcttcaagatggtcctcacttatccccacctttttggtgtttgtgcccttgtgcagtatacttccatattgaataagtctggcctatgaaaccaataaaatattgttacaatgatgaaatatgtctttggaggctagattatagaagggacttcagtttctaccttgctcttcttggataacttgctctggaagaagccaacttccatgccatgaggaagctcaagcagctccaaggaga

SEQ ID NO: 7792 - DNA, 527 bp, Homo sapiens
  MAP TO AL157777.3; EXPRESSED IN PLACENTA, SIGNAL = 2.7; EXPRESSED IN ADULT LIVER, SIGNAL = 3.9; EXPRESSED IN HEART, SIGNAL = 3.4; EXPRESSED IN BRAIN, SIGNAL = 2.1; EXPRESSED IN LUNG, SIGNAL = 3.8; EXPRESSED IN FETAL LIVER, SIGNAL = 4.9; EXPRESSED IN BONE MARROW, SIGNAL = 3.1
atccttggtttgctcacctgtaaaatggcaacgctttgtggtttgatattaaaatggtgatgataccctcttttattgccggaaccaaggagtgtgccaaagagaagaaggttcctgctttgccaaaaaccctcaagaaaaagcaaagaagttttgcagagctgaagatcaagcacctgagaaagaagtttgcccaaaaggtgcttgtaaaggcaaggagaaagcttatctgtgaaaaactgaagcactttcacaagaaatatacacagatggacagaatggagattcgaatggccagaatggcaagaaaagctggcaacctctatatacctgcagaatccaaactggcatttgtcatcaggatcagaagttccaatggtgtgcacacaaaggtgttctgaaaggtattattgcagcttcttcacctttgtcggatcttcagtggaacctttgtgaagctcaacaagccttcagttaacatactgaggcttgtagagccacatattgcatcagggtacccaaacctg

SEQ ID NO: 7793 - DNA, 558 bp, Homo sapiens
  MAP TO AL132874.14; EXPRESSED IN LUNG, SIGNAL = 1.7; EXPRESSED IN PLACENTA, SIGNAL = 1.6; EXPRESSED IN FETAL LIVER, SIGNAL = 1.4; EXPRESSED IN HEART, SIGNAL = 1.4; EXPRESSED IN ADULT LIVER, SIGNAL = 1.6; EXPRESSED IN BRAIN, SIGNAL = 1.4; EXPRESSED IN BONE MARROW, SIGNAL = 1.4
tctgcccctgaattgttttctggatgagtgtacatattgtaaactctagtaagggagtggtttatttctaatttctggtcctttgtcattttgagtctgtgctcagcatgcaggatgctactgctggactcacttgatgctttttcctaggtgatgacctcactatttacgggattgtaatgcaacggtggaagccctttcagcaagatgtgcgctgtgaagtggagatagtcctgaaagcaaattacatccaagtaaataatgagcagtcctcagggatcatcatggatgaggaggtccaaaaggaattcgaagatttttgggaatactataagagcgatccctttgcaggtttgtgtttaagggctaaaactgattattattaatggtattacattcagtggttaaatatgatgtctgtgatttgacagtcttatatgccgcataactcaatgactgagtttaaagggtaggattagtcattacctctagctatagtctccctttgaagcctttttctgccatactcttctatttagcaacctgcctggagatatt

SEQ ID NO: 7794 - DNA, 513 bp, Homo sapiens
  MAP TO AC007981.43; EXPRESSED IN PLACENTA, SIGNAL = 3.4; EXPRESSED IN HEART, SIGNAL = 3.4; EXPRESSED IN FETAL LIVER, SIGNAL = 3.7; EXPRESSED IN BONE MARROW, SIGNAL = 3.4; EXPRESSED IN HELA, SIGNAL = 3.8; EXPRESSED IN LUNG, SIGNAL = 4.2; EXPRESSED IN ADULT LIVER, SIGNAL = 4.1; EXPRESSED IN BRAIN, SIGNAL = 3.9
cacatcatgaagacctccccatcagcccagagctggccccttgtcctgggccactgagacccagaagtaccaaggctggagtcagcttgcagcacagccagggtcgaggtcactccctccctgaggactctagcacggcacagcccctctgcctctctcctggtggtggcgttgaaacagcaccctctgcttcggtcctctacaggatggcagagaaggaggcagtcaataagatgtccctgcacaaccttggcacggtgtttggccccacgctgctccggccctccgagaaggagagcaagctccctgccaaccccagccagcccatcaccatgactgacagctggtccttggaggtcatgtcccaggtatgggaagacaggctccagcccatgcaaccccagcctgacagaggtggcctctgcctgccccacccccagtcctgcccatcttccgacttgcattgtatgtggtggtggctgagattcagagacagggacttgcctaggtttg

SEQ ID NO: 7795 - DNA, 592 bp, Homo sapiens
  MAP TO AC019126.3; EXPRESSED IN LUNG, SIGNAL = 2.3; EXPRESSED IN ADULT LIVER, SIGNAL =   2; EXPRESSED IN HEART, SIGNAL = 2.1; EXPRESSED IN BRAIN, SIGNAL = 2.1; EXPRESSED IN BONE MARROW, SIGNAL = 2.2; EXPRESSED IN PLACENTA, SIGNAL =   2; EXPRESSED IN FETAL LIVER, SIGNAL = 2.1
aaatcccttccttgacctcccaaactaacattcccttctatacatcccagagtaccacatacttttcttcaatagcacttactgcagctgtaaattatgtttatgtgattatacgaatgacacattaggatttcagaaaatgctatgaatcataaattatgttcataactgttgattctcaaactcagaaacaaaatatagtagacaaaactctcacctgggggcggctcaaagaaggcttcctgctcctcctcgatgggctcagtgtcgttgtgggctgtccgtttgtgcatggccagcgtggagatctgcttgtatgtcttcccacagtggttacagttgtaaggtttggaatgagtgtggacaacatgatgtttgtacaaactggaatattctgtaaaccttttgtcacacccaggaactgtacaaacatatggcttttctcctaaagagcaacaccaaaaaaaagttcaacttttacatatgtaggcaaaatcattccatacttcccccccagggggtaaaatacctctaaaaataaagaattgccaaacccctcctcatcccaccatgaggcagcacacaagaaaag

SEQ ID NO: 7796 - DNA, 584 bp, Homo sapiens
  MAP TO AC018377.4; EXPRESSED IN LUNG, SIGNAL = 2.4; EXPRESSED IN HELA, SIGNAL = 2.9; EXPRESSED IN BONE MARROW, SIGNAL = 1.9; EXPRESSED IN HEART, SIGNAL = 2.1; EXPRESSED IN PLACENTA, SIGNAL = 2.1; EXPRESSED IN ADULT LIVER, SIGNAL = 2.6; EXPRESSED IN FETAL LIVER, SIGNAL = 1.9; EXPRESSED IN BRAIN, SIGNAL = 2.4
ctttgtctggaacacccctccattccactactaccatcacaggcaaaaatgtagtaaagattgtgcattaccaaggtcagtttcctttccagtatgacttttcactttgtattttaattgtaaattaatctgtgctcacacccattcacagatttatttattgctgtatctacagtgcctgaaatgatgcccagcatgcagtagtggccaagtaaatgatgttgactaaataaagaaggcaaaaaaaagttgcttcttgaatgaggtatgacattttcttcctattgactcccagttctatttctctatctggacatcatcatccaaaacatacttgaggcaaataaacacatcgtggacatcaacatgcaatccatacttgagaaagaaagccgtttttcatatggtgtcctgaagagttctggctcaaactcagcatcagaagtatggacttctaccttttccttcaggcagtgatggaaattgattgtcaggagaaatgaggcaatgaagatttacaagtacaagatttactaaatatgctcatcttaactggaattagcaggagaagccacaaattggaa

SEQ ID NO: 7797 - DNA, 538 bp, Homo sapiens
  MAP TO AC019233.3; EXPRESSED IN PLACENTA, SIGNAL = 2.7; EXPRESSED IN HEART, SIGNAL = 2.2; EXPRESSED IN LUNG, SIGNAL = 2.5; EXPRESSED IN HELA, SIGNAL =   3; EXPRESSED IN BRAIN, SIGNAL = 2.3; EXPRESSED IN ADULT LIVER, SIGNAL = 3.4; EXPRESSED IN FETAL LIVER, SIGNAL = 1.7; EXPRESSED IN BONE MARROW, SIGNAL = 2.6
atttcaccaatgttcgaggcatcttcaccaggagtacatgccatctcaagaaaccattttctttgcttactcataagaaataatttctcatccattcaagttttattatgagattatagcaattcagtctcaccttcaggctctactttaattctcacactttccaccacagcttcagttacttcctcatctgaagtcttgaatccctcaaagtcatccatgaaggttggaatcaacttcttccaaactccttttaacgttgatattttgacctccttccatgaatcacaaatgttcttattggaatctagaatggtgaatctttttcagaagcctttcaatgtacttttcccagatccatcagaggaatcactgtctatggcagctatagccttaaacatttatttcttaaataataatacttaacagtcaaaattcctctttaatccatgactgcagaatggatattgaattatacagacatgaaaataacattaatcttgtacatctttatcagagctcttgggtgacaaggtgt

SEQ ID NO: 7798 - DNA, 588 bp, Homo sapiens
  MAP TO AC013746.4; EXPRESSED IN LUNG, SIGNAL = 3.2; EXPRESSED IN HEART, SIGNAL = 2.5; EXPRESSED IN BONE MARROW, SIGNAL =   3; EXPRESSED IN BRAIN, SIGNAL = 2.6; EXPRESSED IN FETAL LIVER, SIGNAL = 2.9; EXPRESSED IN HELA, SIGNAL = 2.6; EXPRESSED IN ADULT LIVER, SIGNAL = 3.2; EXPRESSED IN PLACENTA, SIGNAL = 3.4
atgggctagaaacgtcatcccttacctgttctgtagccagtgttgttaagatatacagcaaaagtccgaggctcatgcatggcctgccacgagggggaagagcagttctcgttgttggtgtagacattgtgattgtgcacatacttcccggtgagcatggaggaccgtgacgggcagcacatgggtgtagtcacaaaggcattgatgaaggtggcccccccatgttccataatctttctcgttttgttcatgacttgcagggaccctgaaaggcacagtgccagcattgtttagcaaagtgcagcacatgaatgcctatttcgattgtgcccctcagtgcctctgtttccctgacttattcatttcctttccttagcttaaaggagtctataatttgatcagctctcatttctacaacaaaattaagcatttgagatcctaccatctcaagtattttgcagaataataaacatacacttctcctccctgtaatcacgaagaaaaaaaaatgcaggctaatctgataattaaagctagaattttagatatggagcagattcaaaggccagcagccctttgaagattacc

SEQ ID NO: 7799 - DNA, 553 bp, Homo sapiens
  MAP TO AC012611.4; EXPRESSED IN ADULT LIVER, SIGNAL = 7.5; EXPRESSED IN HELA, SIGNAL =  10; EXPRESSED IN HEART, SIGNAL = 7.1; EXPRESSED IN FETAL LIVER, SIGNAL = 5.9; EXPRESSED IN BONE MARROW, SIGNAL =   7; EXPRESSED IN LUNG, SIGNAL = 7.2; EXPRESSED IN PLACENTA, SIGNAL = 6.8; EXPRESSED IN BRAIN, SIGNAL = 6.2
tgaaaaaccagaggcaaaggcttttttttgctttgagaaagatgacagaccatttccttgagttattagtgtacagtgtctagggaatgcatataaagagcagatgaatccatttggcatgtccacacagcaatatttggagaggatgggagtatttccagagaatgataaacactaacatgccttcaaaagcctgaacttggggtggagcagagacttagaaagatactagtctgagaatgacataattctaaatgcatgactcacatttactttcactaagcaaagtttctgggtagaatatatacccagggatgtcgttagtattccttgtagaatcattacctgggacaacagttagtcaattactaatactcctgcagattgaaaagagataggctccaagcaggatgagattgagttttacttgaatgtttcctaatttgcttttcttattatatttactgtactagagaagcagtgtgtgcagtggttagaaacttgaagacactctacccatggtgtatcatttagtagctgggtgagcttgagc

SEQ ID NO: 7800 - DNA, 600 bp, Homo sapiens
  MAP TO AL121908.7; EXPRESSED IN ADULT LIVER, SIGNAL = 2.4; EXPRESSED IN HELA, SIGNAL = 2.6; EXPRESSED IN BRAIN, SIGNAL = 2.3; EXPRESSED IN LUNG, SIGNAL = 2.6; EXPRESSED IN PLACENTA, SIGNAL = 2.3; EXPRESSED IN FETAL LIVER, SIGNAL = 2.2; EXPRESSED IN BONE MARROW, SIGNAL = 2.2; EXPRESSED IN HEART, SIGNAL = 2.2
atcatcccaagaggaaaccccatgtccattaagtgctccctccccacttcccctttccctacccctggcaaccgtgaatctactttctgtctctctggacacttcatacaaataggatcgtacagtgtggggtgtgctgtggcagggttgtttcacctaacaccgtgttttcaagttcacctgcattgcggcattgccagtttagggctgatagtattccatgatacatagaccatactctctttatccattcatccgttgatgggcatttgggtttctttcccactttgtgtctattatgagtagagctgctgtgcatattcacgtgcacatttttgtgtggacacctgttttcagttctacgggatctactcaggagtcagatggttatatggtgacccagtcttcggggcaagctcaggagcagaatcatcgtacggtgactcggtcattggggtctactgaggagtcgaatggtcatatggcgactcggtctttgggcaatggtaaggagtgagaatggtcatatggtgactcggtctctggggtgtggtcaggagtagaatgttcatggtgactcggtcctcaaggtctgctcag

SEQ ID NO: 7801 - DNA, 563 bp, Homo sapiens
  MAP TO AC022038.2; EXPRESSED IN PLACENTA, SIGNAL = 0.9; EXPRESSED IN FETAL LIVER, SIGNAL = 0.91; EXPRESSED IN ADULT LIVER, SIGNAL = 1.1; EXPRESSED IN BRAIN, SIGNAL = 0.74; EXPRESSED IN BONE MARROW, SIGNAL = 0.85; EXPRESSED IN HEART, SIGNAL = 1.3
tggagaaagccaaacattcccttcatctagtccaaacatcttggttgtaatgtactaccagcaaaaacaccatttcactacatgcaaatcacacaaaaactgagtctctaactatcaccaggctctgccagttgctacctcttatgtttcaaaaaagctccctctgtcattcccctccacaactgtttccaattcttacttctctttttaacccctgacctgccattccttcccccacctcttgccacattcttgtagatgatctcatctccttcctcacagagaagatggagaccatcaggcagaaactgtctttacatcacctcactctgaaagatccactcagtgttgctatttctggattcatctccaatacccctccttcctatgtacttggggaaaaaggtaattccacttttgagttacattcctttatttgggaaccttgctccttctagtatcctttctctcctgtgtctaccatctttcccttattatgactttttctctttagcatacttttaagtgttaacactcccaggtccgcaagttttagccattct

SEQ ID NO: 7802 - DNA, 517 bp, Homo sapiens
  MAP TO AC021855.3; EXPRESSED IN ADULT LIVER, SIGNAL = 9.1; EXPRESSED IN BRAIN, SIGNAL = 7.4; EXPRESSED IN HEART, SIGNAL = 4.5; EXPRESSED IN FETAL LIVER, SIGNAL = 6.1; EXPRESSED IN BONE MARROW, SIGNAL = 8.6; EXPRESSED IN LUNG, SIGNAL = 5.4; EXPRESSED IN PLACENTA, SIGNAL = 6.3; EXPRESSED IN HELA, SIGNAL = 5.6
atagggcaagctgttgatggatctaccattctggggtctggaggacggtagccctcttctcacatcttcaataggcagtgccccagtggggctcctaccccatgtttcccctctgcacttccttagtagaggttctccatgagggctctgctccctcagcacacttctgcagggacattcaggtgtttccatacatcctctgaaatctaggtggaggttcctaagcctcaccttctgccttctgttcacctgcaggctcaacaccatgtggaagccaccaaggcttgggggttgcaccttctgaagcaatggccagagctataccttggccccttttagccatggctgcagctggcatggctgggacacagggtgccatgtcccatggctgcacagagcagtggagccctgggtctggcccacgaaatcacttttctctcatctggcccacgaaaccacttttctctcctaagtctccaggcctatgatgggaggggctgccacaaacgtctctgaa

SEQ ID NO: 7803 - DNA, 573 bp, Homo sapiens
  MAP TO AL133324.7; EXPRESSED IN LUNG, SIGNAL = 1.4; EXPRESSED IN PLACENTA, SIGNAL = 1.1; EXPRESSED IN FETAL LIVER, SIGNAL = 1.5; EXPRESSED IN BONE MARROW, SIGNAL = 0.92; EXPRESSED IN HEART, SIGNAL = 1.3; EXPRESSED IN ADULT LIVER, SIGNAL = 1.4; EXPRESSED IN BRAIN, SIGNAL = 1.1
ccttagtcccttccctctggttgccatcctcatctctacctttgctgagggagcttacaatggattccagcccccatccttccattatgaggctgcccttctgctcagagttctaggggttctccagagcatcaccaaccttgccagctccaccttccccttgtcacaatgccagctccaccctccccaacacattgggctgtaggtctctgccacctaggaggcctgtggtaggagaaacaggctgcccacgtaccacatccagtgagtagaggccagcaaaggtggcgcggaggcgggccacagcctcaggctggccagggagcaacatctccagcatgcccggcctgcttagctcctgctgcaccttcttagtcccagccagctgggtggcaatgtctgggcacttggcagcatgtgacctctccagcagtagacgtgcttcccaattctgcagagggaagaagacaaaaggaattcgactttattttacttcagctgacgtttactgaacatccatccattaggtgccaggtatcatgatttgtatcttcaccctcattatcacccagg

SEQ ID NO: 7804 - DNA, 596 bp, Homo sapiens
  MAP TO AC021287.4; EXPRESSED IN LUNG, SIGNAL = 1.3; EXPRESSED IN ADULT LIVER, SIGNAL = 2.5; EXPRESSED IN HELA, SIGNAL =   3; EXPRESSED IN BRAIN, SIGNAL = 3.1; EXPRESSED IN BONE MARROW, SIGNAL = 2.6; EXPRESSED IN HEART, SIGNAL =   4; EXPRESSED IN PLACENTA, SIGNAL = 2.4; EXPRESSED IN FETAL LIVER, SIGNAL = 2.8
gagaggatctcagtgccagcaaaaagaacaggaatattgcaggaggccaaaaggagaagcacgacaaaacccatgtttacttttaaagagcccaaagtaagcccaaatcctgaactcttgtcactccttcaaaattcagaaggcaaacggggcactggagctggaggtgattccggaccggaagaagactacctcagcttgggggcagaggcttgtaatttcatgcaaagctcctctgccaaacaaaagacccctcctcctgttgctccaaaacctgcagtcaagtcctcatcctcccaaccagtaactccagtttccccagtctggtctccaggagtggctcccacccaacctcctgccttccccacatccaacccatcaaagggcaccgttgtctcctccatcaaaatagcccagccttcttaccctcctgcccggcctgcaagtactttgaacgtggctggtcccttcaaaggaccacaagcagcagtagccagtcagaattacacacccaaaccaacagtttccacaccaacagtcaatgctgttcagcctggtgcagtgggaccatccaatgagcttccaggaatgagtgg

SEQ ID NO: 7805 - DNA, 581 bp, Homo sapiens
  MAP TO AC018389.3; EXPRESSED IN HEART, SIGNAL = 3.9; EXPRESSED IN FETAL LIVER, SIGNAL = 3.4; EXPRESSED IN LUNG, SIGNAL = 4.8; EXPRESSED IN PLACENTA, SIGNAL = 6.2; EXPRESSED IN HELA, SIGNAL = 6.3; EXPRESSED IN ADULT LIVER, SIGNAL = 5.1; EXPRESSED IN BRAIN, SIGNAL =   4; EXPRESSED IN BONE MARROW, SIGNAL = 4.2
ccaactagagcaggacaggctgaaagaattgttgacaaaaggaaaaataagaagggaagacagagtatttggtttgatggaagggctatgacagtgaggatcacacttggaaaccagagtgccatctcgtgaaacatgaggaatgcagacaccacgtcaaaaagcagaaagagagcacactgaccagaacaaatagcactctccaaacaatgctaggaaataaatctccagatccaccaacagaagctttgataagacctctcctaagtcactagagattggcaaacactatgagtctaaaaacagccagttgtttgctgctacccagaagttcaggaaaaacacagctccatctctctctagctggaagaatattgacctagcaaagtcaagtatcaagatatttgtgtttatgagccccattaagagcaggaccacagagaatggctttcagaacaagagcccccagaaactggaccctgttgagcagggtcaggagaatatggtggtgactgaatagccagttggagctatagaatagcggctggagaatagtaagttggagctttattggacccctg

SEQ ID NO: 7806 - DNA, 581 bp, Homo sapiens
  MAP TO AC013497.4; EXPRESSED IN LUNG, SIGNAL = 1.5; EXPRESSED IN PLACENTA, SIGNAL = 1.5; EXPRESSED IN ADULT LIVER, SIGNAL = 1.4; EXPRESSED IN BRAIN, SIGNAL = 1.7; EXPRESSED IN HEART, SIGNAL = 1.4; EXPRESSED IN FETAL LIVER, SIGNAL = 1.5; EXPRESSED IN BONE MARROW, SIGNAL = 1.7
actgggctccatatccacagccgccagcatggtccaagccattgtcatctcttgcctcaggtcctgcagtagtctccagactggcttttctgcttccactcttgcatcattgtaattctttctccaagtagacctcagagtgattttttaaaaaatatgtcagattcaatcactccttgcgtaaaatattttatttacttcctttcgcatttagaatcaaatcccaattccttacccttgccttcgaggccctgcgtgatgaacgatctagctcctacctcctctttggcttccttgcccattacgctcccctcgtatgatatgctccagccagaccgatctgctggttcttccctgcacatgccaggctcattcatactattataaataaagtttcagtgccgcaaaagaaatagcgctcgaatataaaattttctttttaattctcagcaagacaacgtacttctatagaagggtgcacccttacagatggagcaatcgtgagcgcacacttggacaagggaggggaaggggttcttatccctgaggcacgtggtccctgctgctgtatggttccccta

SEQ ID NO: 7807 - DNA, 559 bp, Homo sapiens
  MAP TO AC025588.1; EXPRESSED IN LUNG, SIGNAL = 7.6; EXPRESSED IN HEART, SIGNAL =  14; EXPRESSED IN HELA, SIGNAL = 9.9; EXPRESSED IN BONE MARROW, SIGNAL = 6.9; EXPRESSED IN BRAIN, SIGNAL = 8.6; EXPRESSED IN FETAL LIVER, SIGNAL = 8.3; EXPRESSED IN ADULT LIVER, SIGNAL =  11; EXPRESSED IN PLACENTA, SIGNAL = 7.3
agagtttcctgagcatcccccgcaacctcaccctactcccatttttgctatctccatgggccctacttctcctctcttagctccaattatgctataatgcagcacatgcatttttgctgatctgctgacttgcctcattggtgtgaagcaacagctgggacagcaactgctccacattcccccggatcctccttcaacttctcccactcctgggccaaaggtgtgcatttagctccatagcaaagtgtcatggcttctgcagaacactctggtcaccaaggcgagaggcaacacaggtggacacgggtttcagtccatctttgtggggctcctgcttgtccttgctctacctggctctacatctatcttctcttcttgacttcctgtcctgtggacttcaagcaccaacatcagaaacaaataaatttccttgcagaatcttcttaaccagctgcacaactgcttaagatcaaattctagagttcctgcctctctgcttgagcactgacatactttggtatcagactatatagttattgcctgcttgctttcctgtctt

SEQ ID NO: 7808 - DNA, 530 bp, Homo sapiens
  MAP TO AC016457.3; EXPRESSED IN LUNG, SIGNAL = 1.9; EXPRESSED IN ADULT LIVER, SIGNAL = 1.7; EXPRESSED IN HEART, SIGNAL = 1.4; EXPRESSED IN BRAIN, SIGNAL = 1.4; EXPRESSED IN BONE MARROW, SIGNAL = 3.1; EXPRESSED IN PLACENTA, SIGNAL =   2; EXPRESSED IN FETAL LIVER, SIGNAL = 1.9
tgctcggggtacaaaatagcttacctaacatatgcagataagctagaaaaccacagtcttgactattacaccgctgccacccttacctggtattttgaatctccaaagaacttaagctacaacctcatcagcaaatgttacaagcaaagtgctatatcaaagtcattttctcctagaaaggaaaataggcagggaagatgagggagtagaaaagataatttacctgcatcaattttctggagagctcattagtgaggaattcttcttctttctcataatttacagcaagggtttctttctccttctgcaaagcctgaattttcttgaataaagtgttactaatgaattcttcttcctgctcagccctggcttgctgtttaaaaaaaaaaaaggaaagaacaaaacaaaacacatgttaaggaaacaggaaatttactaattgaaatatagttcttatttccagaaagggtacccattttaaatagagctctatttttagctgtgaaccaacacacccaagaaatgcaaaa

SEQ ID NO: 7809 - DNA, 565 bp, Homo sapiens
  MAP TO AL162261.1; EXPRESSED IN LUNG, SIGNAL = 2.5; EXPRESSED IN PLACENTA, SIGNAL = 3.2; EXPRESSED IN HEART, SIGNAL = 3.1; EXPRESSED IN BRAIN, SIGNAL = 2.8; EXPRESSED IN BONE MARROW, SIGNAL = 3.4; EXPRESSED IN ADULT LIVER, SIGNAL = 3.7; EXPRESSED IN HELA, SIGNAL = 5.1; EXPRESSED IN FETAL LIVER, SIGNAL = 3.9
gggcgacaactcagagctactggctgagattaaggcaggcaagagcctgaagccgacgccacagagcaaggggctgaccacagtgttctcaggcagcaggcagccggccttccaggtaggcgggcccagcaggagcctgcgacccggcttccctggccctaggccaccaggcgctcagccccaccgcttctccctgcagcccgattcgccgctgccgtctgtgtcacctgcactgttaccagtccagagccccacaccgccagctgcggggtttcagccgctgctcaacggaagcttggttccggtgccgcccactactcctgcgccgggggtgcagctggacgtggaggcgctcatccccacgcacgatgagcagggccgtcccaagcccgagtggaagcgccaggtgatggtgggcaagatgcagctgaagatgtaggaggaggaggagcagaggtggaaagtgggtggggcggggtccccagggagccctggggtctgcatctggatgcacagcccatcccccacgccacccccaacaccaacctcgggacctcctattttc

SEQ ID NO: 7810 - DNA, 568 bp, Homo sapiens
  MAP TO AC022995.2; EXPRESSED IN PLACENTA, SIGNAL = 4.1; EXPRESSED IN ADULT LIVER, SIGNAL = 5.3; EXPRESSED IN FETAL LIVER, SIGNAL = 3.8; EXPRESSED IN BRAIN, SIGNAL = 3.6; EXPRESSED IN LUNG, SIGNAL = 2.4; EXPRESSED IN HELA, SIGNAL =   6; EXPRESSED IN HEART, SIGNAL = 4.1; EXPRESSED IN BONE MARROW, SIGNAL = 3.8
caaggaaagtggctggagagaccagcctgtgggaagggacatgatggacagggctgggagcctgaactccaatcccaagttcatctcccgcctgctgctgactaactgtgacctattaggcaaatcatttaagccttctaagcctcaggcttttgtttttgctgtttttaatctataaaatgtcaagatgactatgtgccagagttgttctgtgaattaagtggtgacaacatacctgatagtattttgcaaactgtataaatataaaatatcatttcaataacacttcctcttattagtaaaatattctatcccgatagaggtttcccattctggccacaaatgtgtttgatgccacttggatcaagattttaaaaagaactggatttccagatctctatgagaaaaatttcataatcatcttcatacagggagttgcagacagaaaaagtggaatcagattagccgggcttaacttcaccctgatgggatatttcaaagctgcaataattatagtttagatgctgaaccacaaacaaatacatttccaatgacgaaaatcagccct

SEQ ID NO: 7811 - DNA, 592 bp, Homo sapiens
  MAP TO AC016706.2; EXPRESSED IN LUNG, SIGNAL = 2.8; EXPRESSED IN ADULT LIVER, SIGNAL = 3.2; EXPRESSED IN FETAL LIVER, SIGNAL = 2.3; EXPRESSED IN BRAIN, SIGNAL = 2.2; EXPRESSED IN BONE MARROW, SIGNAL = 2.5; EXPRESSED IN PLACENTA, SIGNAL = 3.2; EXPRESSED IN HELA, SIGNAL = 2.6; EXPRESSED IN HEART, SIGNAL = 2.7
tacctaggtcagtgggcaggcacaggcccgagggtggagcccttgccaggaaccacgccctcctctatccagcacttccctgccccactcccgtatcaatgtgaccttcttcatattactaaaacgttataatatactggattctttttttaaagctttcttgtcttttccacacatctgacaacttatgtgtcagtttcatactactccgatttttgagtctttgaagtatattttattattcggtaggtctagtttcccctcgttaatatccttttacagggacttcctagattttcttgaatgtttgttccatatactttaatttcatttatctcccaatgtcattatatttatccaatctttatgttgatatggggatacttgacatttgtgtaatgttctgtgtcttagtccattagggttgctataacaaaatatcataagctgggtagcttaaacatcaaagattcttttctcacagtcctggaggttaggaagtccaaggtcaaggcactgggtgagggcctgcttccttagttcatagacagcagtcttcttgctgtgtcctaggatggcagagagaggaatc

SEQ ID NO: 7812 - DNA, 504 bp, Homo sapiens
  MAP TO AL121931.9; EXPRESSED IN HELA, SIGNAL = 2.4; EXPRESSED IN LUNG, SIGNAL = 2.6; EXPRESSED IN PLACENTA, SIGNAL =   3; EXPRESSED IN ADULT LIVER, SIGNAL = 2.2; EXPRESSED IN FETAL LIVER, SIGNAL = 3.7; EXPRESSED IN BRAIN, SIGNAL = 2.7; EXPRESSED IN BONE MARROW, SIGNAL = 2.2; EXPRESSED IN HEART, SIGNAL = 2.3
actgatcaccacaaaaacacacttaaggacatacacaattgacactacaaagcaactacacaatcatgtcagcataataaccagctaaaaacatgatgacagatcaaatccacacatatcaatagtaaccatgaatttaaatgggattgatgccccaattcttgtagaatctgtgaaacacagataaagcaatgttaagaggaaagtttatagcactaagcacctacatcaaaaaagctaaaaattaacaaaaagcttacataccagaattcataaaactacagttgtcatatatcattgcactattaataaactcaatagttatcccatttatatcaataattacagtaagtgtattctgacatctgatttttataattctttgtcggtatctcctgcagttacttctgacagtggatttgcttgaatatacctgtggttactcagagtcttcaacattcttcagtaagattatattaaattcaatttcccacaatcattcca

SEQ ID NO: 7813 - DNA, 584 bp, Homo sapiens
  MAP TO AC015649.5; EXPRESSED IN LUNG, SIGNAL = 5.4; EXPRESSED IN ADULT LIVER, SIGNAL = 4.9; EXPRESSED IN BRAIN, SIGNAL = 4.3; EXPRESSED IN PLACENTA, SIGNAL = 4.9; EXPRESSED IN HELA, SIGNAL = 4.9; EXPRESSED IN FETAL LIVER, SIGNAL = 4.5; EXPRESSED IN HEART, SIGNAL = 4.7; EXPRESSED IN BONE MARROW, SIGNAL = 5.1
aaagggccaacattaaacccgagatccctggaggagggagggaaggggggaggcacagctgaacctaggattttctcttcacacacacaggggttccccttattcctgggatcagatattgactgtccttccaaagggatctcttgggttacaggcccactctttggcatggctttggtggaattcgactcctaacgagctcgtgagttggaaagggttttgcacaccgggtctatttttcagaattgagatttttttaaatccctctacccccagtgtgaaaactccatgtgcttttgatatatccggcatctcccccttcttcctactttcaaatcacatgttctggaacccccgctccctcctgcatgcactgcagagcccacagccgagaatctacaacaggaagatccaaggaaagtctaagttccccacggccacggtgcccagctccccagaaacccagtcccggtgctggagaaggatggggagtggacccaagtggcaagcctgcgggggacaggattattttcccaatagtgagaaataaacaggcatccaaacgccactgtttcccatcaaat

SEQ ID NO: 7814 - DNA, 527 bp, Homo sapiens
  MAP TO AL162260.1; EXPRESSED IN FETAL LIVER, SIGNAL = 1.7; EXPRESSED IN PLACENTA, SIGNAL = 1.3; EXPRESSED IN ADULT LIVER, SIGNAL = 1.7; EXPRESSED IN HELA, SIGNAL = 2.7; EXPRESSED IN HEART, SIGNAL = 1.5; EXPRESSED IN BONE MARROW, SIGNAL = 1.7; EXPRESSED IN LUNG, SIGNAL = 1.3; EXPRESSED IN BRAIN, SIGNAL = 1.4
ttcaccgaggatagtgaggctctaaaaatttcagcatttatctgcagggctgacatgccactttatttagaagttggggtggagatggaaactttccaagtggttgatgccattgagccttgtgaatttgtgagttttgtacttgccctctttctctcttaaccattcttaattttccaatcctgctttttgttggcttcaaatgtgctcaccagaatcctgccagctttagttggaagaaatacatttccgagcttagttggacatcagttttttttgggccctgcccagacttttgacagagaaggtagtgttaagggggttgatggtgtctagacagtaaaatcagaaactttgtaatttatgttgtattacagacgtccacttcccggattggaaaaaggaaactgacttttatctaaggaagttacattaaaaaccaaagcccctgggtatttctgacccatgaaaagttaaagcttgagtaattttacataacattctccagccccttcaaagactggaat

SEQ ID NO: 7815 - DNA, 585 bp, Homo sapiens
  MAP TO AC013612.3; EXPRESSED IN ADULT LIVER, SIGNAL = 2.3; EXPRESSED IN BRAIN, SIGNAL = 1.9; EXPRESSED IN LUNG, SIGNAL = 2.4; EXPRESSED IN FETAL LIVER, SIGNAL = 1.6; EXPRESSED IN BONE MARROW, SIGNAL = 1.8; EXPRESSED IN PLACENTA, SIGNAL = 2.1; EXPRESSED IN HELA, SIGNAL =   3; EXPRESSED IN HEART, SIGNAL = 2.1
aggggtatttgggatggaaggagtgatggagtctcatcaataggtttcagaatggctaagtgattattctaattggaacatggtggagtgaaacccttaatttcacagcttgcttctcacaatcctctgtatctaatatatcctgggtctgttccctgatcctatttttaccacagataactacgtgtctcgaggatgatctgctcagagctcttccatgccattctccacaccaagaagctttatcagttttcctcctgctcccagaatgtcctgtgatgcatgattctaagaactggaagaacctggtggttccatttgcaaaggctgtgtgtgaaatgagtaaacaatctttgcaagtcctaagtaagttttatgtcactttatctgtactctcaatatagagtcactctctgaagtagacgttgtagcaaattttgaatagaagatttcaaaatagacaagtatttgagaacatggcatgtaaattattgaaaagattaataatctaaagctattataattattagttctatcatacaaagcaggtgtagtttttagacttggatgtggctttgacatcag

SEQ ID NO: 7816 - DNA, 515 bp, Homo sapiens
  MAP TO AC010458.2; EXPRESSED IN LUNG, SIGNAL = 1.7; EXPRESSED IN PLACENTA, SIGNAL = 1.4; EXPRESSED IN ADULT LIVER, SIGNAL = 1.3; EXPRESSED IN HEART, SIGNAL = 1.5; EXPRESSED IN FETAL LIVER, SIGNAL = 1.8; EXPRESSED IN BRAIN, SIGNAL = 1.5; EXPRESSED IN BONE MARROW, SIGNAL = 1.8
atctcttgcctccccttctcccagctgaagaaggactaccttgatggcgtgggtgacaccctggacctggtggtgatcggcgcctacctgggccgggggaagcgggccggccggtacgggggcttcctgctggcctcctacgacgaggacagtgaggagctgcaggccatatgcaaggtcctggggaactggggctgatggcagaagcaggagggaaggagattagactcccgggggtatttcctattgcacaacccagaccgaggggtgctcacatccccctgtgaaggatccgttctccccagtttttatttactttttctggttctatgagcaactcttgcttcatatagaaaaacaggctgggatagaaagatgtcaggaatgtgtgtcagtgagagattgagattagctacaaatagtggtggctcacataagaaaagaatttttttgttatgaaatgagaagtgtggagggggcagtctgatgccattagggattcaggttcctcctct

SEQ ID NO: 7817 - DNA, 530 bp, Homo sapiens
  MAP TO AC022918.2; EXPRESSED IN LUNG, SIGNAL =   4; EXPRESSED IN ADULT LIVER, SIGNAL =   9; EXPRESSED IN BRAIN, SIGNAL = 6.2; EXPRESSED IN HEART, SIGNAL = 6.9; EXPRESSED IN PLACENTA, SIGNAL =   7; EXPRESSED IN HELA, SIGNAL =  10; EXPRESSED IN FETAL LIVER, SIGNAL = 6.6; EXPRESSED IN BONE MARROW, SIGNAL = 7.1
agtttggtgcagggcattagacactgtagctctcctgagctgttgcatcttttccatctcacctttttgctgtgggacagaagctgaagtttagctccttaagtttgtgccacattccctccttcagctcctctaaatcctgggccaggtgtgtgctcagccctgagatgaagaaaatcagtttctcctgcaggccacccctgccttatcaaagccggaggactggaggtggtgagaggccagtgtaggctccaatccattctcagaggttccccctttgtcctgcttcctacatcatgtttggctttcctcccaactgccttccctgtggatatttcaggttctagcaagaaacacagaagcaacagtcttacatacatgacttagcttccacaattgtagaaggtccaatcaatacaataaatgtggctcaacgactctacttctctgattgttccctgattgatatggtgtctatacaatgtctgtttatctcccccattcctgaccctggcctccaccacatattt

SEQ ID NO: 7818 - DNA, 556 bp, Homo sapiens
  MAP TO AC018389.3; EXPRESSED IN LUNG, SIGNAL = 1.3; EXPRESSED IN ADULT LIVER, SIGNAL = 1.3; EXPRESSED IN BRAIN, SIGNAL = 1.2; EXPRESSED IN BONE MARROW, SIGNAL = 1.2; EXPRESSED IN HEART, SIGNAL = 1.4; EXPRESSED IN PLACENTA, SIGNAL = 1.3; EXPRESSED IN FETAL LIVER, SIGNAL = 1.2
ctctggctcctcaaggtttggagtccactgtgctggggggtgggctgaggtgcagcagctttaacagagtgccagtggacgtgggggtgcctgtctccctgggggaatttaccacagtggaggaggcaaggcagctggggactctgtgtgctgttgcactggaggtggtgctggcttggggcaaggtgctggccagcacaggtctgggtgccttctttgccctgcaaacaggagtaatagctcagggggtgggaggatcccctgttctctgcacagtgttagcacaagggcagggtactggcagtggtggggtttcctggcttggtgcccaccaaggctctgtctacaatggtggtcagtggagggttggggatgctacacacctgtgtgctggttgggcaagcaaagcaaaacctgaccatgcagacgtgcatgaacaaagtgatctggagagtagccatgggctcaggggaagttccagtacggagagggaacatgtggactggtgcacggctgtaagggccgccttgctggagctctccagcaagctctccat

SEQ ID NO: 7819 - DNA, 573 bp, Homo sapiens
  MAP TO AC015525.3; EXPRESSED IN LUNG, SIGNAL =   3; EXPRESSED IN ADULT LIVER, SIGNAL = 3.5; EXPRESSED IN HEART, SIGNAL = 2.9; EXPRESSED IN BRAIN, SIGNAL = 3.3; EXPRESSED IN PLACENTA, SIGNAL = 3.7; EXPRESSED IN FETAL LIVER, SIGNAL = 2.6; EXPRESSED IN BONE MARROW, SIGNAL =   3
tgtcagtgtctcccacttcggtgctcaatccctccgtaagtgctgagggccactgtgtgccagccccgatacacccactgtcacttttaatcatccccacacaacaatcccatgaggttacaggggagtatccaaattttacagataaggaaacagggttggagggagggcaggacactgaccaggaagctggagccggggatggcaaagccctgtttgtagaggtaggcgccgcagaagagcaggaacacgtaggcctggtgctccttccggtactctcgaaggacctcagagagctcccgcagctctgccaggtcggaggggaaccacagcgacctggggatttggaaaagcagatggaaacatgagttcagatcagtccagtgcccatgaaagtcactcgctgtgtcttcttttcagagtaggtttataaatatgcccatcatctgatctgctgggaacacatacactcccaatgacagatgacctgatacgacgttgcggagacagacaggagagccctagtttggaagcaagagacctgggttagcatcccaaccctgctactttctg

SEQ ID NO: 7820 - DNA, 511 bp, Homo sapiens
  MAP TO AC018525.4; EXPRESSED IN LUNG, SIGNAL = 2.3; EXPRESSED IN BONE MARROW, SIGNAL = 2.1; EXPRESSED IN PLACENTA, SIGNAL = 2.3; EXPRESSED IN ADULT LIVER, SIGNAL = 2.5; EXPRESSED IN HEART, SIGNAL = 2.2; EXPRESSED IN FETAL LIVER, SIGNAL = 1.6; EXPRESSED IN BRAIN, SIGNAL = 1.9
atgtactgttgtggtgggggatctcggtaatgggagggttgtatatatgttggggcagaggtacatgggatgcttctgcaccttcgctctcaattttgctgtaaaactaaaatgactctaaaaaaagacatgacagatagctagatagatagatagatagatagatagatagatagatagatagacagacagacagactttatagggttaaagtaacaaattaaataagaaaatgtgtataggtcatttagcacagtgccaaataattacttaataaaacctgggcaaatgtagtagatgatgataatgatgacgatgatgatgatggtaataatctcctgattcatttcatttattctatagagtttttttttaattcctattatgtgccagatactgttctagtgcagagcttggtaatatctggccctccatctgcttttgtaaataaagtttcactggaacacattcatgtccattaatttatgaatggtctactgctgcatttgca

SEQ ID NO: 7821 - DNA, 544 bp, Homo sapiens
  MAP TO AC007326.28; EXPRESSED IN LUNG, SIGNAL = 1.8; EXPRESSED IN PLACENTA, SIGNAL = 1.2; EXPRESSED IN ADULT LIVER, SIGNAL = 2.1; EXPRESSED IN FETAL LIVER, SIGNAL = 1.5; EXPRESSED IN BRAIN, SIGNAL = 1.8; EXPRESSED IN BONE MARROW, SIGNAL = 1.7; EXPRESSED IN HEART, SIGNAL = 1.2
atcctccatatgctgaacgctggttccccggttccccttatttctttctctatactttgtctctgtgtctttttcttttccaaatctctcgtcccaccttacgagaaacacccacaggtgtgtaggggcaacccacccctacatctggtgcccaacatggaggcttttctctagggtgaaggtacgctcgagcgtggtcattgaggacaagtcgacgagagatcccgagtacgtctacagtcagccttacggtaagcttgtgcgctcggaagaagctagggtgataatggggcaaactaaaagtaaaattaaaagtaaatatgcctcttatctcagctttattaaaattcttttaaaaagagggggagttaaagtatctacaaaaaatctaatcaagctatttcaaataatagaacaattttgcccatggtttccagaacaaggaactttagatctaaaagattggaaaagaattggtaaggaactaaaacaagcaggtaggaagggtaatatcattccacttacagtatggaatgattgggcc

SEQ ID NO: 7822 - DNA, 571 bp, Homo sapiens
  MAP TO AL139187.4; EXPRESSED IN PLACENTA, SIGNAL = 1.3; EXPRESSED IN FETAL LIVER, SIGNAL = 1.1; EXPRESSED IN LUNG, SIGNAL = 1.5; EXPRESSED IN ADULT LIVER, SIGNAL = 1.4; EXPRESSED IN HEART, SIGNAL = 1.2; EXPRESSED IN BRAIN, SIGNAL = 1.3; EXPRESSED IN BONE MARROW, SIGNAL = 1.1
tggcctgtgattgttgaaaggccccaccctcatggagttacataccagaattgtctctttggcattagtatatccatctctgctctccagaatctgcattttccaacagtccgccagcatggagacctttcccatgccctgcagctacagcccgaggaggaggagctgctccctgacttgcctttgatccctaggttaagaacacatcctcagtgacttaggttcctgaatgtcttggagggccccacccggaacactccccagcaggccgggctaggacatacataggagcctgggtgagaagttcaggctgctaggctttaatcagaattgtctgtaagagttgaactcatcatgcccctggttgttatttctctcaagcctttggcaggaatattagaagtatcacaggaaactggtcattaaatcaacacgagagacttcatgaccagtctaaagtctggcagtttagatgtcaaatgggaatctaaactacaaagaaggagagagtcctattgttttcctatacatctgtaggcagagggccgctgggtgtctctccaggcttctg

SEQ ID NO: 7823 - DNA, 565 bp, Homo sapiens
  MAP TO AC011859.4; EXPRESSED IN PLACENTA, SIGNAL = 0.76; EXPRESSED IN ADULT LIVER, SIGNAL = 0.96; EXPRESSED IN FETAL LIVER, SIGNAL = 1.6; EXPRESSED IN BRAIN, SIGNAL =   1; EXPRESSED IN BONE MARROW, SIGNAL = 1.8; EXPRESSED IN HEART, SIGNAL = 1.2
agccttctgtcaccagtcttgcactttaagttaaaatcttcagaaagcttcttcttcttcatgttgactaaacctcatgtacttaatgacctcataggtatgtcgagagtaccaacgtggcaattgcaaccgaggagaaaatgattgtcggtttgctcatcctgctgacagcacaatgattgacaccaatgacaacacagtcactgtgtgtatggattacatcaaagggagatgctctcgggaaaagtgcaaatactttcatccccctgcacatttgcaagccaagatcaaggctgcccaataccaggtcaaccaggctgcagctgcacaggctgcagccaccgcagctgccatggtgagtagagatatcagctctctccttgttagcagtcagaaaagcaaagtgagcaactatatctgactacaagctattcatttagtaacctttttaaaaaaattgctgaagatatgtttgttcaggtatcccagacaatatataaagaagttactttcacagaagtgagggtaactcctcaaatggttcagattgctcctactcttggcc

SEQ ID NO: 7824 - DNA, 578 bp, Homo sapiens
  MAP TO AC021824.2; EXPRESSED IN BONE MARROW, SIGNAL = 3.9; EXPRESSED IN PLACENTA, SIGNAL = 3.8; EXPRESSED IN ADULT LIVER, SIGNAL = 4.8; EXPRESSED IN HELA, SIGNAL = 5.5; EXPRESSED IN FETAL LIVER, SIGNAL = 3.9; EXPRESSED IN BRAIN, SIGNAL = 3.9; EXPRESSED IN LUNG, SIGNAL = 2.5; EXPRESSED IN HEART, SIGNAL = 4.1
gagcatcagaggcattaggcagataagagaggaatgactgtgaggctgggtagcagacttacttactctacacatgtgctgacaatggaccctaattttctctgctcttgtcccaggcatggtcctagcccagcagttctctttgtgattctagctattttcaggtttttcactgccttaaaaaaaataaaactaatgagaaaaaaattgtcaaggttttagaaatactcactgatggttcttatctgtaggcaaatatcaaggagctaaaatcaacagataatgtgatgtgcttttggaaggagatgaaataattatgtctgacaaacaaaagataattgatggtactattccttggatagataggacctgtagtagaggttggccacatgtgtcagtcattttatgttgctataaagaaatacctgaggttaagtaatttataaaggaaagaggtttatttggctcatggttctgcagagtgtacaagaagcatggtgccagcatctgcttctggtgcgggccttaggaagcttacacttatgacaaatggcaaagggggaacaggagtgtcacat

SEQ ID NO: 7825 - DNA, 501 bp, Homo sapiens
  MAP TO AL121917.12; EXPRESSED IN PLACENTA, SIGNAL = 4.6; EXPRESSED IN HELA, SIGNAL = 5.5; EXPRESSED IN FETAL LIVER, SIGNAL = 5.6; EXPRESSED IN ADULT LIVER, SIGNAL = 5.8; EXPRESSED IN HEART, SIGNAL = 4.5; EXPRESSED IN BONE MARROW, SIGNAL = 6.2; EXPRESSED IN LUNG, SIGNAL = 4.8; EXPRESSED IN BRAIN, SIGNAL = 5.5
accagacagtgaccaggacctttttttggtgcaagtttggctttgggaagtgctttggagcttctcagtccacccaccgaggtggtcatcgctggttgtcgtataaaatccactttttgtcgcacatcacaatccgatggagaaatggttcattgttgttgtgtagaataagagaagacgacatttcaaaacgacaatgtttctgattttcgctcagctcatgaggcacccacttatcgagctttttcacctttccagtttgcgtcaaatgccgaatgaccgtagaaaggtggacgttgagttcttcagcagcttctggtgtagttgtaagaggaccagcttccgtgattgctctcagttggtggttgtcaacttccgacgactggccgctacgctcctcatcttcaaggctctcctctcttttgcaaaacttcttgaacccccactgcacggtatgttcattagcagttcctgggccattgatgttgcgagttgtctcca

SEQ ID NO: 7826 - DNA, 580 bp, Homo sapiens
  MAP TO AC015908.4; EXPRESSED IN ADULT LIVER, SIGNAL = 1.6; EXPRESSED IN BRAIN, SIGNAL = 1.4; EXPRESSED IN LUNG, SIGNAL = 1.6; EXPRESSED IN FETAL LIVER, SIGNAL = 1.1; EXPRESSED IN BONE MARROW, SIGNAL = 1.2; EXPRESSED IN PLACENTA, SIGNAL = 1.3; EXPRESSED IN HEART, SIGNAL = 1.2
tgtgaggattcctttggctccactcttgtttccaactattgctggtcctaggcgcccagtcctgagcaaccatgacgatggagactctccccaaggttctagaggtcgatgagaagtctccagaagccaaggacctgctgcccagccagaccgccagctccctgtgcatcagctccaggagcgagtctgtctggaccaccacccccaggagtaactgggaaatctaccgcaagcccatcgttatcatgtcagtgggcggtgccatcctgcttttcggcgtggtcatcacctgcttggcctacaccttgaagctgagtgacaagagtctctccatcctcaaaatggtagggcctggcttcctgtccctgggactcatgatgctggtgtgcgggctggtgtgggtgcccatcatcaaaaagaaacagaagcacagacagaagtcgaatttcttacgcagcctcaagtccttcttcctgactcgctgatggtggtttccgcatctccctgccaccttgactgggagaagatctgatgaccaacatccgacatccctgtctcctctgtggggtgccataaaact

SEQ ID NO: 7827 - DNA, 559 bp, Homo sapiens
  MAP TO AL121920.7; EXPRESSED IN ADULT LIVER, SIGNAL = 0.86; EXPRESSED IN HELA, SIGNAL = 3.7; EXPRESSED IN HEART, SIGNAL = 1.9; EXPRESSED IN FETAL LIVER, SIGNAL = 2.5; EXPRESSED IN BRAIN, SIGNAL = 3.1; EXPRESSED IN BONE MARROW, SIGNAL = 2.8; EXPRESSED IN LUNG, SIGNAL = 1.5; EXPRESSED IN PLACENTA, SIGNAL = 2.1
cttcatccgtccatccattcattcactcatagatccaacaggcctattttggctgcatgggtccaaaaacctaattgaaggaaagaattaatgacttacgtgacagaatcataagccagaggtgaatcaaatctggctttagggaaagctggatgcagggctctagctgaacaaaaggatgaggtttctctctcctctgtattggccccacattttcccatctcacaagatggcggccaggagctccagggccacatgggcttcctgattccagaagaaggaagcagcaagaaccttccggggatcccagtgtcagtctccttgtgagtctttgggttagactgggtcacgtgcttatccccgagctcatggaacagaacgatctgcttggctccggctctcaatattccgcatgggctgggccaaagaaataaaggaacaaaataactgaagggtcaacaaattgaggaaaccaaggaacatggagaaagctgagtggacgctgggtatggaacaagagatgtccaccataacgaattcactcaaccctctagggctg

SEQ ID NO: 7828 - DNA, 556 bp, Homo sapiens
  MAP TO AL139340.3; EXPRESSED IN PLACENTA, SIGNAL = 2.6; EXPRESSED IN ADULT LIVER, SIGNAL = 4.4; EXPRESSED IN HEART, SIGNAL = 3.1; EXPRESSED IN BRAIN, SIGNAL = 5.6; EXPRESSED IN BONE MARROW, SIGNAL = 5.8; EXPRESSED IN LUNG, SIGNAL = 4.6; EXPRESSED IN HELA, SIGNAL = 6.6; EXPRESSED IN FETAL LIVER, SIGNAL = 5.2
cagctgctgtgctcaatttctcaccaggccttagctgccttcccatggggcagggctcaggacctgcagcccaccatgcctgagccccgcattttccgtgggctcctgtgtggcctgagcctctccgatgagcgccaccccctgctccatggcgcccagtcccatcaaccacccaagggatgaggagtgcagcacatggtgcgggactggcaggcaactccacctgcagccccggtgtgggatccactgggtgaagccagctgggctcctgagtctggtggagacgtggagaacctttatatctagctaagggattgtaaatgcaccaatcgacactctgtatctagctcaaggtttgtaaacacaccactcagcaccctgtgtctagctcagggattgtgaatgcaccaatcgacactctgtatctagctactctggtggggacttggagaacctttgtgtcaacactctgtatctagctaatctggtggggacgtggagaacttttgtgtctagctcagggattgtaaacgccccaatcagtgccctgtcaaaa

SEQ ID NO: 7829 - DNA, 554 bp, Homo sapiens
  MAP TO AP001537.1; EXPRESSED IN ADULT LIVER, SIGNAL =   2; EXPRESSED IN HEART, SIGNAL = 1.6; EXPRESSED IN BRAIN, SIGNAL = 1.8; EXPRESSED IN LUNG, SIGNAL = 1.6; EXPRESSED IN PLACENTA, SIGNAL = 1.8; EXPRESSED IN FETAL LIVER, SIGNAL = 1.4; EXPRESSED IN BONE MARROW, SIGNAL = 1.7
tgcacctgcaaaagtagcactgcatagaccccatcaaggtttccagcttgcaccatccacagcagtgggttgagctgcacctgttcctgcctgggcttctggtgaggcagccgaggagcactgcatagaaatgcatgaagcagacactggatgcagtgcaacacagcaaatgctgaggttccctgggtcaccctaggcctctcttttgacatattttcttcccccaggccttggcactctgggcctgtgattggaggggcagtacagaggctcttccaagtgcctttgggatcattcttttattatcctgatgagtagcctctggtttcatttaattcatcccaatctccttatcaaatggtcacttggccacacccttgattttccctcttgaaaatgcttcttcaatctctatcacatagccagaccgaaaatatttcacaaccctaaattctgtttttcttctagttaaaattctgtctttaaatcatttttttcacacagtactatatgcaattaaaagccacacagcatcctgaatgctttgctgctta

SEQ ID NO: 7830 - DNA, 547 bp, Homo sapiens
  MAP TO AL121904.13; EXPRESSED IN BONE MARROW, SIGNAL = 1.2; EXPRESSED IN LUNG, SIGNAL = 1.4; EXPRESSED IN ADULT LIVER, SIGNAL = 1.3; EXPRESSED IN BRAIN, SIGNAL = 1.6; EXPRESSED IN PLACENTA, SIGNAL = 1.2; EXPRESSED IN HEART, SIGNAL = 1.2; EXPRESSED IN FETAL LIVER, SIGNAL = 1.3
aacttttcacaacaatgaaaatgctactgatacctaaatgtgacacattgtacaatatgaactgtatgagcacatctttattatatatttaacaaaggacctctataagttaggtttggcaagttgcaggagacaaagatggaatacacagtttgggtctttaaggtgctcataatacagaagagctgtgcctattgaatttctgcatttttccaacagaatttccttaaaaagtttgttattcatttatccacttgtccacttaacaaataactgtcaggtatctttaaggtactaagcatcttccttgttattatcattgtcatttttatttgcttctttattaagatactaaacatttttcttgttattattatcttttttattatttattatttatttagtgtttactctgtgccggaaccccttttggagcttataattattacttattatgtcatgttgttaccatattcagcatgtgtcagaaattttatatccaaggtgaagaattaaagctttaaaatgtttggtagtgtccaggcac

SEQ ID NO: 7831 - DNA, 575 bp, Homo sapiens
  MAP TO AC010290.4; EXPRESSED IN PLACENTA, SIGNAL = 2.1; EXPRESSED IN FETAL LIVER, SIGNAL = 2.3; EXPRESSED IN BRAIN, SIGNAL = 2.1; EXPRESSED IN LUNG, SIGNAL = 2.4; EXPRESSED IN ADULT LIVER, SIGNAL = 2.4; EXPRESSED IN HEART, SIGNAL = 2.2; EXPRESSED IN BONE MARROW, SIGNAL = 1.9
agatccctggaatttctgcctttctgtctcaagatgcatgtctttgtccagagtacctgtggagaagaaacaatggattccttagaccatatgctgacagatcctctggaacttggtccgtgtggagatggccatggcacgcgcatcatggaggattgcctcctgggaggcaccagagttagtctgcccgaggaccttctggaggatgtgagtagtaacacggttgtgaccttttcctctctgtcagcttccttgtaacagctgtgggaaaccttttccactctacatttccagtcttttgtgctcccttttgttcattttctacattgcaggcagcctgatctcttatcttttttttaagtttagagtctatttaatatccgattaaggaagaaaacaagctacgttctgcatgtttaataacatgccagaataacttgataacatgatttaagccctatttttaacaagataattttcatccattaaaaatggttgtgtattttaaccatggaatactactcagccataaaaaggaatgaaataatggcatttgcagcaaactggatggaatt

SEQ ID NO: 7832 - DNA, 505 bp, Homo sapiens
  MAP TO AC021567.2; EXPRESSED IN LUNG, SIGNAL = 1.5; EXPRESSED IN BONE MARROW, SIGNAL = 1.7; EXPRESSED IN BRAIN, SIGNAL = 1.7; EXPRESSED IN FETAL LIVER, SIGNAL = 1.7; EXPRESSED IN HELA, SIGNAL = 2.9; EXPRESSED IN ADULT LIVER, SIGNAL = 2.3; EXPRESSED IN PLACENTA, SIGNAL = 1.7; EXPRESSED IN HEART, SIGNAL =   2
tttaatgcagcccattttcctaatgcacaatcctacctgggttgattgcaaacaacttcttctgtcattatttgatatggaagagcaccaaagagttatacaagctgctctccagtggctcgagaacaatgagcctgcaggcacaggagatatcaggcagtatgcacaacaagcacttctgatagaggctgtcccaggctgggaccctaaccaggctcaagggccacaaagtttgcagtggtattgagaggcactcctaaatggaataaaggctggagggaaaaaggccaccaatatcagaaaggtctcagaggtccaccagaagccagatgaaagtcccggtgaattttacgagaggctctgcgaggcttatcggcttcatatgccatttgaccctgaggctgctgaaaaacagtacatggtaaatatggcatttgtaaggcaggcccagggaaatatcaggcataaattccagaagttagaagctccacaggcgtgagtgata

SEQ ID NO: 7833 - DNA, 517 bp, Homo sapiens
  MAP TO AL133260.7; EXPRESSED IN LUNG, SIGNAL = 2.4; EXPRESSED IN PLACENTA, SIGNAL = 4.2; EXPRESSED IN FETAL LIVER, SIGNAL = 2.1; EXPRESSED IN BRAIN, SIGNAL = 1.9; EXPRESSED IN ADULT LIVER, SIGNAL =   2; EXPRESSED IN HEART, SIGNAL =   2; EXPRESSED IN BONE MARROW, SIGNAL = 2.1
atgggacaacccatgctaaggtgtaagaaatgtgagccattgtttttactagatcttacctgaacatcatacaggaactggaatcggcttcttttactcgcagcctctctcacagcccgagccaagtccaccgatccttttccaccaaccgaccagtgatagcaggggactgcatcaaaggcaccagcccgctttgcaagctcacacaccaagtcaatctcagcgcgggtgtcggtcctagtgaagaaaatgtttgtggttttgcatctgtatccatttagctatgttttcaaagaaagactcaccatttatacagaacttcgctccctaacactgaatacattttaaacatcaaaagtggtcacatcgtgtttaaataaatcagacttaaagcatggaaaaaaaaagtcctctctaaagtgactcaaatatttcaagtcgttaagggtgttatcaagaaaattccataacatatccctttgatcattcacagtttgtttcagacaaaaatgctggg

SEQ ID NO: 7834 - DNA, 592 bp, Homo sapiens
  MAP TO AL133174.9; EXPRESSED IN PLACENTA, SIGNAL = 1.3; EXPRESSED IN ADULT LIVER, SIGNAL = 0.77; EXPRESSED IN HELA, SIGNAL = 3.4; EXPRESSED IN HEART, SIGNAL = 1.3; EXPRESSED IN BRAIN, SIGNAL = 1.6; EXPRESSED IN BONE MARROW, SIGNAL = 1.7; EXPRESSED IN FETAL LIVER, SIGNAL = 1.6
atttctggatccttctgggcttagaatgatcttgtttcctgcttctttttcagggggattcatggacccctttaagagtctgatctaggtgatctctaagacaattttatgacagaagcccaactaaactgacttatctttaaggggaagaactgaataagccaagaaaagaaccatcttaatttcaaaggtccccttttattcttgagactatgagtctgtaattttgtgtctctgagcaattgctggttttaagtcttccgagtattttcttgacctttttatctcttgctttcttccaatccaggactccattattacagtctttgattggtctttttgagttacccgaagatgataccattcctgatgaggaacattttattgacatagaagatacaccaggatatcagactgccttctcacagttggcatttgctgggaaaaaagagcatgatcctgtaggtcaaatggtgaataaccccaaaattcacctggcacagtcacttcacaagttgtctaccgcctgtccaggaagggtaagtgtgttgtcaaagaactctgtgataaatggagactttaatgggagggc

SEQ ID NO: 7835 - DNA, 506 bp, Homo sapiens
  MAP TO AC013627.3; EXPRESSED IN PLACENTA, SIGNAL = 1.3; EXPRESSED IN ADULT LIVER, SIGNAL = 1.6; EXPRESSED IN FETAL LIVER, SIGNAL = 1.3; EXPRESSED IN BRAIN, SIGNAL = 1.5; EXPRESSED IN BONE MARROW, SIGNAL = 1.4; EXPRESSED IN LUNG, SIGNAL =   1; EXPRESSED IN HEART, SIGNAL = 1.3
tttagggcaaacctggacacacgataataaagctcacctgcatcatgattttcagacggtccaaaggggcagtgcttgttcgagagacagcaccagcaatgcctcctgccaaaagctgcctccaccattgtccggattttttttcgtcttccgtgaattcatctggaatagttaagctatcccctatgtcaattccctgtaaaaatgaaaaaaagatccccatgcgccttagttaaaaataatcccagaagacgttttgttttagagaacaatcatgttattttacagttaatatgaacttcattccctagaatttatactaaaccaatttgagtacatagattataagttgtctactcacaatgaacaaagtacagtatcagttcacaagaaatgaaaataaacagtaattacaaatatacaaaaccaacagttacaactttctttcattcatcatagattcacagtatgttttctcttggtctaggttaaaatgaaagggcagc

SEQ ID NO: 7836 - DNA, 575 bp, Homo sapiens
  MAP TO AC009924.4; EXPRESSED IN HELA, SIGNAL = 5.8; EXPRESSED IN PLACENTA, SIGNAL = 3.9; EXPRESSED IN ADULT LIVER, SIGNAL = 4.3; EXPRESSED IN HEART, SIGNAL =   4; EXPRESSED IN FETAL LIVER, SIGNAL =   4; EXPRESSED IN BONE MARROW, SIGNAL = 4.4; EXPRESSED IN LUNG, SIGNAL = 3.7; EXPRESSED IN BRAIN, SIGNAL =   4
cctgtgactggcttctttcacttaccgtaatatacttactattcatccatattgttccatatgccagaatgtccttctttttgaaagctgagtatttcgagtatttcattgtgtgtgtgtgtatatatatatatatatatatatatatatatatatatatatatatatatatacatgccacattttctttatccattaattcctcaggtgacatttgtcttgaatccttaacatggctattgtaaataatgcttcagtgaacatagggtgcaaatatcttttaaaatcatgctttagtccctttgaatatatacccagaagtgatactgctatatgataaatgaaaatacatcccattttcatggattagactgcttaatattgttaaaatattcatacttcaaaaatcaatctacagattttatataattcttgtcaaaattcaaatgacatttttcacagaaatagaaaacaatcttaaaagttgtatggagctatggaacacattgaataaccaaagcagttttgattaaaacaataacaaagctgtagacatcacgatttctggtttcaaa

SEQ ID NO: 7837 - DNA, 532 bp, Homo sapiens
  MAP TO AC013584.3; EXPRESSED IN BONE MARROW, SIGNAL =   2; EXPRESSED IN LUNG, SIGNAL = 2.1; EXPRESSED IN ADULT LIVER, SIGNAL = 2.4; EXPRESSED IN HELA, SIGNAL = 3.2; EXPRESSED IN FETAL LIVER, SIGNAL = 1.9; EXPRESSED IN BRAIN, SIGNAL =   2; EXPRESSED IN PLACENTA, SIGNAL = 2.1; EXPRESSED IN HEART, SIGNAL = 1.7
atttccagctccattccctccattcccacttaacatcccatgtttctgtaagaacaaatgtttgcagttattcctcaagtactgcataccactgtgccttggcatatgctagtatctcagtctggaagtccctaatcctttcccattgtttacttgaaaaatcttattcgtcttttaaaacccaaataattcattcctctactgggcttcatccaactctacattccccttgggattaatcatatcctgttctaggcagcttctgtactttggacagggttccactgctgcgttcttcacactgtgctgtaactgtttatttgtatgccttcctccctcacaagactctgaaaccttgagggcaggaactgcatcttcatcatctctgcatccctagcgcagagcctggaatatagatatgtgtgtacgtctttgaataagtaaataaacaagcaaacattcattcactcaacacctgttttattcaatgtctcacagagttcaaggaaagagaacacccctacctccaacc

SEQ ID NO: 7838 - DNA, 521 bp, Homo sapiens
  MAP TO AC020991.3; EXPRESSED IN LUNG, SIGNAL = 2.1; EXPRESSED IN HELA, SIGNAL = 2.6; EXPRESSED IN HEART, SIGNAL = 2.1; EXPRESSED IN FETAL LIVER, SIGNAL = 2.6; EXPRESSED IN PLACENTA, SIGNAL = 2.8; EXPRESSED IN ADULT LIVER, SIGNAL = 3.9; EXPRESSED IN BRAIN, SIGNAL = 3.1; EXPRESSED IN BONE MARROW, SIGNAL =   4
acctgcatgacacagcagaggcagtcataagctttctgggaatataactccattgacctgggaaccaaaccttcatcccccacagcagctgcagcaagacccgcgcaaggagagtctgacctcagacacagctagccctgcccaacctggtggtcactccctacccatcctggtaggtgaagacaaagggcatatactcttgggagttctagggccctgcccaccacctgatcctctccatattaccacagctgatgctctttttaaagtaccacctcctggcaggaggccagtgatcacaaaaatggtaagttaaacagccaaaactaaggacccttacagaacccatttcatccccctgccacctccctggagcaggagctggtatccatggctgagacacccacacacagttcacatcacaggactgtgcagacaacccccagtagagcctggagcctggaaaacttgctaggcggctaaatccagaagagagataaccaatcactgcagctcagctc

SEQ ID NO: 7839 - DNA, 573 bp, Homo sapiens
  MAP TO AC025644.2; EXPRESSED IN PLACENTA, SIGNAL = 1.6; EXPRESSED IN ADULT LIVER, SIGNAL =   2; EXPRESSED IN FETAL LIVER, SIGNAL = 1.3; EXPRESSED IN BRAIN, SIGNAL = 1.5; EXPRESSED IN BONE MARROW, SIGNAL = 1.4; EXPRESSED IN LUNG, SIGNAL = 1.7; EXPRESSED IN HEART, SIGNAL = 1.6
ttgaaacagctggtgtggaccgcatttccctgtatctttgcttaccagaagcatttgggaagtcaacagaataacattgcagcagggacttctcttggtaatgaaaattgcagaatggtttcaataagagtgaacatttaaggcccattaagtcatctttcttattgtgcttaacaccatcaaattcaatgagtgaatcaatggccacagctggatgcaagaagcattgaaattcaagaacgatgtcactgcatcagtgacaacaagcctaagaagtagtgggtgaaagatagaaagtcatcactgaattttgattgtagctcagcatcagattagaggatgacttgatatctcacaatgattcattaaacctaagattcatgatgtcaaggggagggaaagacagcacaaacattcttgaatgtttagcagtgagcacttaaggataaatttataatttggttttggcttttgatttagtcaagataatgcaaaccacaggatcttttcatttttatcagacaaatagataaaaaccaattttagaaaacaagccttcaaactccagtgctc

SEQ ID NO: 7840 - DNA, 529 bp, Homo sapiens
  MAP TO AC011022.4; EXPRESSED IN HELA, SIGNAL = 2.6; EXPRESSED IN PLACENTA, SIGNAL = 1.6; EXPRESSED IN ADULT LIVER, SIGNAL = 2.7; EXPRESSED IN FETAL LIVER, SIGNAL =   2; EXPRESSED IN BRAIN, SIGNAL = 3.2; EXPRESSED IN LUNG, SIGNAL = 1.6; EXPRESSED IN HEART, SIGNAL = 1.5; EXPRESSED IN BONE MARROW, SIGNAL =   2
tctaatttggttggtgatgggtatattccatttcaagataaaagtaaatcaaatgtttctttctcacatacaatatacccaaaaaccatgctaagtactataatgaatagaaaatttcaattaaaaatatttaataaatatttattttgctaggcaagaatctgtaatatccaaggctctatctgtccttgaaacaccccagtgtaacccacagatctatcttccatggaatttaacaactcacctttcccacaagctgtacaatttctgccaggtcttcttcttcctgcagaatttccttagctttcgtcctcagaggaacgaactctgtgaagtgtttgtcatagtattcatccaaggcacgcatatacttgctgtagctgatgagccaattgacagaggggaaatgcttacgttgagctagtttcttatctaagccccagaacacctgattaaaaaaaacacacacacaaaaacagtaatttttctcaaaaaacaaagttaaaaaataccgaagcatgtttgtccc

SEQ ID NO: 7841 - DNA, 597 bp, Homo sapiens
  MAP TO AC011686.3; EXPRESSED IN PLACENTA, SIGNAL = 2.2; EXPRESSED IN ADULT LIVER, SIGNAL = 2.3; EXPRESSED IN HEART, SIGNAL = 2.1; EXPRESSED IN FETAL LIVER, SIGNAL = 2.1; EXPRESSED IN BRAIN, SIGNAL =   2; EXPRESSED IN BONE MARROW, SIGNAL = 2.1; EXPRESSED IN LUNG, SIGNAL = 1.9
gtcacctgggctaaccactgatttttgaggcaggtatccattaaaaaggtgatttacttacacgttccagatttgttttcagtactaatggttcatctctttttttctgttcatccattttccttttccctgtttctgtatcctctggtaacagcttgtggatttgatcttcagagggtttttcctcttgtaacttttcttctctcagctaaaaatataaattatgcaaacacagtagttttaggcaactctaaacttaaaaacatattttactctgtagtttattagaacaaacagatcacatggcagttttgagactgtttttcttatcagctatagagccctcttgatttctaagtaaatctacttttacttggctcttgccaaacatactcttcagggctaaagatttaactgctctgcattcttaagcaatatgaaatcataaaagctaagataatacacattatcaaaaaataaagtatagtcacatagccaaaaagggctaagcctgaaaatcttccttattcccataagccagatgtaactgcattggactagaagaagagcagagatggccacagaaagccagagaag

SEQ ID NO: 7842 - DNA, 533 bp, Homo sapiens
  MAP TO AC025747.3; EXPRESSED IN BONE MARROW, SIGNAL = 1.8; EXPRESSED IN LUNG, SIGNAL = 1.6; EXPRESSED IN ADULT LIVER, SIGNAL = 1.9; EXPRESSED IN HELA, SIGNAL = 2.3; EXPRESSED IN FETAL LIVER, SIGNAL = 1.6; EXPRESSED IN BRAIN, SIGNAL = 1.4; EXPRESSED IN PLACENTA, SIGNAL = 1.6; EXPRESSED IN HEART, SIGNAL = 1.5
ttctgaggtgcatggtcaagttttggagtcagaagattgtattacaaaacagattgaaagcctagagactgaaatggaactcaggagtgctcagattgctgacctacagcagaagctgctggatgcagaaagtgaagataggccaaaacaatgctgggagaatattgccaccattctggaagccaagtgtgccctgaaatatttgattggagagctggtctcctccaaaatacatgtcaccaaacttgaaaacagcctgagacagagcaaggccagctgtgctgacatgcagaagatgctatttgaggaacaaaatcatttttctgagatagagacagagttacaagctgagctggtcagaatggagcaacagcaccaagagaaggtgctataccttgtcagccagctgcaggaaagccaaatggcagagaagcagttagagaaatcagccagtgaaaaggaacaacagctggtgagcacactgcagtgtcaggatgaagaacttgagaagatgcgagaagtgtgtgagcaaa

SEQ ID NO: 7843 - DNA, 597 bp, Homo sapiens
  MAP TO AC012683.3; EXPRESSED IN PLACENTA, SIGNAL = 0.68; EXPRESSED IN ADULT LIVER, SIGNAL = 1.6; EXPRESSED IN FETAL LIVER, SIGNAL = 0.87; EXPRESSED IN BRAIN, SIGNAL = 1.2; EXPRESSED IN HEART, SIGNAL = 1.6; EXPRESSED IN BONE MARROW, SIGNAL = 0.91
atacgtggtagcgccttctgctgccaggggtagcatcatcgtctcagcagctgcagcatgcacatgtgcagaccccaccctgcacagacccacgtgctccaggggcctggaaggcatataccgtccaacccgacaaggggcccagggtccatcccgccccttcaaggcccgccagaacccaccaagccaccagccaccaccgcagccctcaccatgccttccatgccatggggcagcagcagcacaatgccattatgccgcacccacttggcctggccggtgctgatgaactggtcgatgatgcactgggccgtgttgtggaagtccccaaactgggcctcccagaggaccagggcattggggctggccatggcatagcccagctcaaagcctaaacagaagacaagatagagcttgctgcacgcagtcaccaagtggcagtggctccagtcaaatttagcctttctcagtatatcctccatgcccccacccatccttctcacaagccaggacgaacccagggattccctgggattcaaagggtacaatgtaccatcctgggggctgacaacatgctcagagatgctaccctcagcc

SEQ ID NO: 7844 - DNA, 574 bp, Homo sapiens
  MAP TO AF241725.1; EXPRESSED IN LUNG, SIGNAL = 1.2; EXPRESSED IN ADULT LIVER, SIGNAL = 1.7; EXPRESSED IN HEART, SIGNAL = 1.3; EXPRESSED IN FETAL LIVER, SIGNAL = 1.3; EXPRESSED IN PLACENTA, SIGNAL = 1.1; EXPRESSED IN BRAIN, SIGNAL = 1.5; EXPRESSED IN BONE MARROW, SIGNAL = 1.4
tgcatatctctagggcaggggcaaaatgccaccagtctgtttgctaaaacataacaagagtcaccttacatccagcttgcaacaagttcctcatctccatctgagaccacctcagcctggattttgttgtcaatattattatcagcatcttggtcaaagccactcaacaagtctctaggaagttccaaactttccacattttgctgtcttctcctgagccctccaaactgttccagccactccctgttacccagttcaaaagtctcttccacatttcctagtatcttttcaacaacgacccactctattggtatgaatttactgtattaggccattttcatacgctgataaatacatacctgagactggacaatttccaaaaaaagaggtttactgttccacctggctagggaggcctcacaatcattgtggaaggcaagcagacacaattcatatcttacatggatgacaccgggaaaagagagagcttgttcagagaaactcccatttttaaaaccatcagatatcgtgagactcatttactataataagaacaatgcaggaaagacctgct

SEQ ID NO: 7845 - DNA, 571 bp, Homo sapiens
  MAP TO AL121910.19; EXPRESSED IN PLACENTA, SIGNAL = 1.5; EXPRESSED IN FETAL LIVER, SIGNAL = 1.2; EXPRESSED IN BONE MARROW, SIGNAL = 1.2; EXPRESSED IN LUNG, SIGNAL = 1.3; EXPRESSED IN ADULT LIVER, SIGNAL = 1.7; EXPRESSED IN HEART, SIGNAL = 1.3; EXPRESSED IN BRAIN, SIGNAL = 1.2
gtagagggcaggcagacaagcccatcaccatggacatgggcaccataatgaccaaatcgcctaagagccttgaactagccccggctttgcctctccacaccttggggtccctctgggatatgctagctttgtccaaattggctgtattttgttagtggagcagcactcttcatacttacacacacacacccagccaattccaggaagagcctcctgctgaccagcagcagggcctttgcgccaatcactaaatactttcctgaaaggcgtttccaggatcatgcatgccttcgggagcccgtggtaccctgggcagcttgttccactgccttacacacccagaggcagcagtgccaggaggctggcccaagaggcctggctcctaccatggttcttctcatcccaccaggctgaccgtggctgggacagcagaggggggctctgaattccctgtggacgccatgcttccagacaagtggaaggagaccgtgtccatctgcagccatcatcgcccggcagatgccctacgtgattgatggcacgtgccagcacaatctcagtgtgcatcgct

SEQ ID NO: 7846 - DNA, 562 bp, Homo sapiens
  MAP TO AC013751.3; EXPRESSED IN PLACENTA, SIGNAL = 3.7; EXPRESSED IN LUNG, SIGNAL = 3.6; EXPRESSED IN BONE MARROW, SIGNAL =   5; EXPRESSED IN BRAIN, SIGNAL = 3.8; EXPRESSED IN FETAL LIVER, SIGNAL = 3.8; EXPRESSED IN HEART, SIGNAL = 3.9; EXPRESSED IN HELA, SIGNAL = 5.7; EXPRESSED IN ADULT LIVER, SIGNAL = 4.6
cagcccttgagtccaaaatctttcccaaatgagaaggaactaaaaaagtaattctagtaatactattaaatgaggttctataacacccccaaaagatcacactagctctccagcaatggatccaaaccaagatgaaatctctgaactgacagatgaagaattcagaaggttgattattaagctactcaaggagccaccagagaaaggtgaaaaccaacttaaagaaattaaaaacaaaaaggaggatatgaatgaaaaattccatagaaagatagatatcgtaaagaaaagacaattacaacgtctggaaatgaaagacacacttagagaaatgcaaaatacactggaaggtttcaacaatagaattgaacaagtagaagaatgaacttcagagctcaaagacaaggccttcgaattaacctgatctgacaaagaaaaaaataattttttaaaaaatgaacaaaggctctccctctccctctccctctccccctccccatggtctccctctccctctctttccacggtctccctctgatgccgagccgaagctggactgtac

SEQ ID NO: 7847 - DNA, 598 bp, Homo sapiens
  MAP TO AL133295.11; EXPRESSED IN HELA, SIGNAL = 4.8; EXPRESSED IN LUNG, SIGNAL = 4.7; EXPRESSED IN ADULT LIVER, SIGNAL = 4.3; EXPRESSED IN HEART, SIGNAL = 5.3; EXPRESSED IN FETAL LIVER, SIGNAL = 5.1; EXPRESSED IN BRAIN, SIGNAL = 4.9; EXPRESSED IN BONE MARROW, SIGNAL = 4.3; EXPRESSED IN PLACENTA, SIGNAL =   5
caagacatggaaggggacagactagtttataatctactaattatataattcatatgtagacccagtgacatttgaatataaactttggtaaatcaaaatatttagtggctacaatttgccatttaaaatatcattagaactgataacaaactcttggtttcctgcaccaaattgtattaggcacttagtacattttgggtgattgtaaaatattttacaatagttatttcttaagtgtttttaaatagtattgatcatgaaactttttgaaatttaccatcaggccaatggtggcagagtctacatagaactatgcttcgtggtgttctggggaaaacctttcgacttgttggctatactattcaatatggctgtatagctcattgtgcttttgaatacgttggtggtgttgtcatggtaagtttttatgttcaagaatattcatcttaaatatatactttctttcaaatggaaggaaagtgtgtttttccttttgaaaacctagttgaagttatttaatgactaaactgtgaaagttaaaacataaaatctttctaaatattggaataataagagagtgtgtttgaattggcactga

SEQ ID NO: 7848 - DNA, 514 bp, Homo sapiens
  MAP TO AC015502.3; EXPRESSED IN ADULT LIVER, SIGNAL = 5.8; EXPRESSED IN HELA, SIGNAL = 5.3; EXPRESSED IN FETAL LIVER, SIGNAL = 2.9; EXPRESSED IN BRAIN, SIGNAL = 2.7; EXPRESSED IN PLACENTA, SIGNAL = 3.6; EXPRESSED IN HEART, SIGNAL =   3; EXPRESSED IN BONE MARROW, SIGNAL = 9.9; EXPRESSED IN LUNG, SIGNAL = 4.6
aatgtgagcccagagacagctggagctagagtcttaaaagaagtataaagtcttctttatttttgaaatactctcataacaaatgaaaaatccttagaaaagggtctctgtcttacttgccttagcttcccagttcctggtgtattattggtgccaaaaaaaagtgttttgaatgaatatatgaacaaaaaaatggacaattgaacaaaataatttttaataagtaatgtcatttttttaatatttctactagtattttccaaagaccaacttttagacaaaatacttgtattttatgctgttaggaaactattatctgtggaaagaagttcagaaatttctcacagagcttaaaacacaactaccatccaatccagcaaaactattaccggatgtatatccaaaagaaaataaattgtcctaccaaaggagacatgttcttgtatgttcatcacagcgctattcatgagaaggaaaacacggactcaacctaagtgcctaagtgcccatcaac

SEQ ID NO: 7849 - DNA, 507 bp, Homo sapiens
  MAP TO AC019276.3; EXPRESSED IN LUNG, SIGNAL =   2; EXPRESSED IN ADULT LIVER, SIGNAL = 2.9; EXPRESSED IN HEART, SIGNAL = 2.4; EXPRESSED IN BRAIN, SIGNAL = 1.9; EXPRESSED IN BONE MARROW, SIGNAL = 1.7; EXPRESSED IN PLACENTA, SIGNAL = 1.9; EXPRESSED IN FETAL LIVER, SIGNAL = 1.8
ttctctccatcccaccactccaccgccccccgcccttagaaaaataaatgcgtgattgactggctttgcaggttttttatccatcgttctttccaaagaatagtgtgaacagctcattcgattcgttcatgtgacgtcctccctctcccaatccctgtctctctctctccttccacagccacatgaaattgaagtgggagaacatggtgtgtgagcattattgggggtggggtgcggagcaggcactggctttggttgaggtctgcaaaggaaagcacccccactgccaggctgctcaggagtggctcccaccctcgactgcggggaagtgctggaaccctccgcacgagggcaacctttcttgggctctgaaggcgcctctcatcctctgagccaagaagacttctgacccagaattctgagttgagttccgacgcaggcgtgggcgatggtgagcaactccaggctaccccgagaaagccgctgtgtgaccccattaggggactt

SEQ ID NO: 7850 - DNA, 522 bp, Homo sapiens
  MAP TO AC023134.3; EXPRESSED IN LUNG, SIGNAL = 1.7; EXPRESSED IN FETAL LIVER, SIGNAL = 1.3; EXPRESSED IN PLACENTA, SIGNAL =   2; EXPRESSED IN HEART, SIGNAL = 1.8; EXPRESSED IN ADULT LIVER, SIGNAL = 1.7; EXPRESSED IN BRAIN, SIGNAL = 1.4; EXPRESSED IN BONE MARROW, SIGNAL = 1.2
cttgagctgctgtggacttgcaagcttagcacaatttttaaagacccagatactgagaatgttttctatgtcagcactgtttcactcaaaaatttcatgtggcttgctacccaaattatcctggaggcactaagaaaatatgtttattttttcttcacttgatattttttaaaaattatgttttaaaaaactgtagcaacattctctgtctctaggattcagcaaaaacactcagattgaataaaacaactgtggatcatttttatatgtgttttatttttattctgaagatctgagaatttgttcaaattgggtttggggaagaaattcaattaacttgtctggactattgctaatactggaagaaacagttacctgaaaagtctgctttgtgattgtctgtcttcctccttctcttcctcccttgctgcttccttcctgctttcctgcctttcttctttccttctttttctgttctctcctttatcttcttcctgtttcccccttttctttctccccatt

SEQ ID NO: 7851 - DNA, 551 bp, Homo sapiens
  MAP TO AC011938.3; EXPRESSED IN PLACENTA, SIGNAL =   2; EXPRESSED IN HEART, SIGNAL = 1.8; EXPRESSED IN BRAIN, SIGNAL = 1.9; EXPRESSED IN LUNG, SIGNAL = 1.9; EXPRESSED IN ADULT LIVER, SIGNAL = 1.8; EXPRESSED IN FETAL LIVER, SIGNAL = 1.7; EXPRESSED IN BONE MARROW, SIGNAL =   2
caagacacctggaatggctctatgaagtagacttaagacaaaactgttcataaagaaaaaagaaaaatagtttaaaattacaaaagggcaaatttatcagaaatatatatctattataaacatataagcacctaacaacagaaaccaaaatatgtgaagcaaaaactgatggaattgaagtagaagatgacaattcaacagtaacagaaacatcaatacccgattctccaccagttaatgtaataaaccatattaacaaaggacaaaactatatgatcatatcgatagaccaagaaaaagcatttgaaaaaatctaatgctcattcaagataaaagctctcaacaaaccaggaatagaagggaacttcctcgacctgataaagggtatctacaaaaaccctacagtcaatatcgcacttaacggtgaaaaattggtgtttcccaccctgtccccacccccaccttagatcaggaacaagacaagaatgtctgttcacatcacttttattccacattgtagtggatgttccagccagtgcaataatgcaaga

SEQ ID NO: 7852 - DNA, 558 bp, Homo sapiens
  MAP TO AC022658.3; EXPRESSED IN LUNG, SIGNAL = 0.95; EXPRESSED IN PLACENTA, SIGNAL = 1.1; EXPRESSED IN ADULT LIVER, SIGNAL = 1.1; EXPRESSED IN BRAIN, SIGNAL = 1.1; EXPRESSED IN FETAL LIVER, SIGNAL = 0.92; EXPRESSED IN HEART, SIGNAL = 1.3; EXPRESSED IN BONE MARROW, SIGNAL = 1.1
aaccaccacaggtaaccagcatcacaaccatttgtagaggtattatttggtgacaattaagtactgttgaagatgctcaggcttcacaaggtaactcaccacccagtgtgttagaaactcctttttggtcacgtccatagaatattctgtcccagaggtcaaagttaagacaagttgcttggtaggtaagacaagcttctttgtgctagtgttctcagcatcacctgggagtctgtagaggtggataattgtactttcaatttgcttaaataccagaattatcttaaataattacagagaatctactatgcatcaggccttcagacactgggctgtggatgagaatgctaagagagaagatggccccaccttcagggtctggtggggttgcagacaggagagcaagctaacctagcatgtgatcaatgctacaaagggaagccatggccgtggtacaaagaagggaggactctgccccagagatgtctacgtgtggctgaacagcctaattatctggagtgctttatgaaattacagactctggatctgaatcgctgg

SEQ ID NO: 7853 - DNA, 557 bp, Homo sapiens
  MAP TO AC022474.3; EXPRESSED IN PLACENTA, SIGNAL =  25; EXPRESSED IN ADULT LIVER, SIGNAL =  45; EXPRESSED IN HELA, SIGNAL =  49; EXPRESSED IN BRAIN, SIGNAL =  23; EXPRESSED IN BONE MARROW, SIGNAL =  27; EXPRESSED IN FETAL LIVER, SIGNAL =  26; EXPRESSED IN HEART, SIGNAL =  25; EXPRESSED IN LUNG, SIGNAL =  23
agcctgggcaacatagtgagatcttgtctctacctaaagtaaaaaattaaaaatttgcaaggtgtggtgatgctcacctgtagtcccagctactctggaggttgaagtgggtggaatacttgagcccaggaggttgaggctgcagtcagctgtaattgtgccattgcacttcaacctaggtgacagagcaagactgtctcaaagcaaaaacaataataaaaactttcccagatgaaaaataaataaataacataagctgagggaattcaccaatgtccaacatgtcttgcaagaaatgctaaagggagtccaatcttaaaaaaaaggatgctaagatgtaagagaaaaatacctgaaaatataaaactaactggcaaatagaagtatatggaaaaatttagaatgctttgctactataattgtgatgtgtaaaccacttataactttaataaagacaaaaagtgaaaaatgtcaaaagcaataatagctgcaattgtttaagagataagcaacataaaaagatgtaaattgagagtcaaaaagtcaaaatgtgggga

SEQ ID NO: 7854 - DNA, 552 bp, Homo sapiens
  MAP TO AP000946.3; EXPRESSED IN PLACENTA, SIGNAL = 0.63; EXPRESSED IN FETAL LIVER, SIGNAL = 0.5; EXPRESSED IN ADULT LIVER, SIGNAL = 0.71; EXPRESSED IN HEART, SIGNAL = 1.2; EXPRESSED IN BRAIN, SIGNAL = 0.74; EXPRESSED IN BONE MARROW, SIGNAL = 0.61
aaagggatggaaggaaccagtaaatctaaaatattaataagcacaaatcatacccccttcagtttgacagtgaaattatccctaaatcactcacccattggtgacatttattatgatccaatgtggaactcctgtgtgctctactgcagaaatgtggttaataagcatggctgctctgcaaatcacaggcaaggtatatttactgaacaggcatactggctgcacatccttccaatagagctagtatacttggctccaggcatcctctttgtgctgaatccccttgctcaaatctcacctttgattctcataaccacattatcaacagagaaggatgttgtggcagagagagagtaagagacacaggacatatgaatattgtgtaactcagggtacattgtggtcattccacccaacatgtgccctattctaactgtgttaacctatcccatttctttgctattgatttatattattctttaaattgattcagtagacaatgtaattcaaaatcttaaggagatgtgtgtgactttcaactccaggagctcc

SEQ ID NO: 7855 - DNA, 571 bp, Homo sapiens
  MAP TO AC013612.3; EXPRESSED IN ADULT LIVER, SIGNAL = 4.5; EXPRESSED IN HEART, SIGNAL = 3.5; EXPRESSED IN BRAIN, SIGNAL = 3.7; EXPRESSED IN BONE MARROW, SIGNAL = 3.6; EXPRESSED IN LUNG, SIGNAL = 3.3; EXPRESSED IN HELA, SIGNAL =   5; EXPRESSED IN FETAL LIVER, SIGNAL = 3.2; EXPRESSED IN PLACENTA, SIGNAL = 3.6
cctgaccccagtgatttttcatgtttaatgtgttaactcaacatacactattagaaaaaataaaggatctctcctatttatgtagagcttgtgtttcacagagtgctcccgtattaactcttgtatgacacttaatcagtaagcttttagttaccttgttaaacctgaaattaatttgattcttcctttgctaagcaggacgggaaagtgttcacatttggagacaatcgctctggacagctgggatacagccccactcctgagaagagaggtccacaacttgtggaaagaattgatggcctagtttcgcagatagattgtggaaggtaataggcttcttcttcttctttttcttagcatgtgtagaaagtgttatattttattacttagaaatgactcatatggaatgttatcaaaccttaaaattcctgcctgaaaatttacttatttcaaatatagtttaatttttcagtttttaatctttattctggatattttatttatttaataagaaataattggaagtctactgtgtatagaacactgtaccaggtgctggagaatgggaagt

SEQ ID NO: 7856 - DNA, 557 bp, Homo sapiens
  MAP TO AC013657.3; EXPRESSED IN PLACENTA, SIGNAL = 2.3; EXPRESSED IN LUNG, SIGNAL =   2; EXPRESSED IN BONE MARROW, SIGNAL = 2.9; EXPRESSED IN BRAIN, SIGNAL = 1.7; EXPRESSED IN FETAL LIVER, SIGNAL = 2.9; EXPRESSED IN HEART, SIGNAL =   2; EXPRESSED IN HELA, SIGNAL = 3.8; EXPRESSED IN ADULT LIVER, SIGNAL = 4.5
ccttcattttattaattgcacagcatgtggtatttggtcacctgttatgagcctgactccatgccaagtgctgaggccgtcaccctggttaagatccccaccatctgcagcctactgcagtggaggaggctacattcccgaaggtaagttacagtgtcagcaaagtgctgtgggcccctgagcaggcggttgggaaagcctttaccaaggcaacgatacttgatttgggtcttatgggaggacagggagtgtaatccaaagtgaaagggcaagggaggtctagctagagggagggtggcaggggatcggggcctggtgtggaagtcatgcgttgcactcatgtgtgcatggaccccagcagggtaagtgtgaggccacaggcgggaccccatgtgccatgcttaggggttcagacattgtcctggagatgatgaagaacccctgagagttttaagcagagttgggtgtgaagatggatctgagaggccaagaccgagcagggagacaagtcatgatggtcctgatccgagacggtgtgggaggtgggaactgacttt

SEQ ID NO: 7857 - DNA, 544 bp, Homo sapiens
  MAP TO AC018529.4; EXPRESSED IN HELA, SIGNAL = 2.7; EXPRESSED IN LUNG, SIGNAL = 1.5; EXPRESSED IN ADULT LIVER, SIGNAL = 1.7; EXPRESSED IN FETAL LIVER, SIGNAL = 1.7; EXPRESSED IN BRAIN, SIGNAL = 1.5; EXPRESSED IN BONE MARROW, SIGNAL = 2.1; EXPRESSED IN PLACENTA, SIGNAL = 1.6; EXPRESSED IN HEART, SIGNAL = 1.8
taacttgcccaagatcacccaactagctggtggtgaagccggaattttcatgtacaaagtttatcactgtcctatgcagagtgggcacataataaaaagtatttttaatatgtgtgtgtggggatggatgaatgcaggaatgaacaagcatttaaaacattcctttcagtcctaaacagctaattttcacctgcatttggaaagagcacgatcgatccactcatgaattaaaaacaggctgtgtgttgtcagagaaaattcgtggcaagacagcttgataaatgtcatgacacctgcagggctcagccacagctcttggttcagaagctgtgctaaggtcccaggtctgagcctttaccgtaagggcttgggagggctttgaggcaccgccaaggcagggcagagtgggacgtggggctggatgcccttcggcaaacatcactctcaccggccctaaacggcctctgagtctgggcagatttaaacgggccgttccttgttcctcctccgcgctgcatttttatccacggcaatccttacaact

SEQ ID NO: 7858 - DNA, 548 bp, Homo sapiens
  MAP TO AC016706.2; EXPRESSED IN PLACENTA, SIGNAL = 1.4; EXPRESSED IN BONE MARROW, SIGNAL = 1.3; EXPRESSED IN ADULT LIVER, SIGNAL = 1.6; EXPRESSED IN HEART, SIGNAL = 1.3; EXPRESSED IN FETAL LIVER, SIGNAL = 1.1; EXPRESSED IN BRAIN, SIGNAL = 1.3; EXPRESSED IN LUNG, SIGNAL = 1.3
gattccccaaacatcacaggatgcactttaaggtctcagaaggctttcttagaattctctttcttgggataatggtgagaatgaggaatctccaactcctcactcttgaggaaggtgagattcacgggaaagctcttgccaatgaatttattttaaaactccttccactcaatctctgactcctgatccttttgaaatattggtggtgttggaagatttagcagtttgggggtgattttttaaaaaattttgccttacagtgtgatatgtcactttggaatatagtagctattttttacttggtctctcatgggaaacctcatttaacttgctgttatatttccatctttttgtcattgccacaatctgcaacttgccttgctcctccctttttatggaataagcaattcctttacttatttatttgaagaaagtggagtgcatttttattatggtttaatttcacattcgccttgttgaaactcttctcacaatccactggaacatttgctcaaatcttctttaagccacatttcccagctggtttt

SEQ ID NO: 7859 - DNA, 593 bp, Homo sapiens
  MAP TO AC012571.3; EXPRESSED IN ADULT LIVER, SIGNAL = 8.2; EXPRESSED IN HELA, SIGNAL = 8.2; EXPRESSED IN FETAL LIVER, SIGNAL = 4.2; EXPRESSED IN BRAIN, SIGNAL =   4; EXPRESSED IN BONE MARROW, SIGNAL = 3.9; EXPRESSED IN PLACENTA, SIGNAL = 6.2; EXPRESSED IN HEART, SIGNAL = 4.6; EXPRESSED IN LUNG, SIGNAL = 4.5
aacaatcaccctacctccccagcaatgtttcttaaccagactgaaaagactgaaactacagatatagaatgtagaatccggatagcaaggatactcattgagatgcaggagaaagttgaaatccaatccaatgagtccagtaatatgatccaagaggtgaaagatgacatagccactttaagaaaggactaaactaaactcctaaaattgaaaaatttactacaggaattttataatacagttggaacaacagaatagaccaagctgaggaaagaatctcagagctcgaagaccagttctttgaatcaacttaggcaaaaataaagaaaaaagaaattttaaaaaagaacgaaacctccaagaaacatgagattatgtaaagagaccaaacctatgatccactggcattccagatatacaagaagagagaggaacaacttgcaaaacatatttaagcataggatccacaaaaatctccccaatctcactagagaagttgacatgcaaattcaagaaatgcaaagaactcctacaagaggcaatataagacaacaatcctcaaggcatacagtcgtcagattcaccaaggtcgc

SEQ ID NO: 7860 - DNA, 515 bp, Homo sapiens
  MAP TO AL161730.2; EXPRESSED IN LUNG, SIGNAL = 2.5; EXPRESSED IN ADULT LIVER, SIGNAL = 2.6; EXPRESSED IN HEART, SIGNAL = 2.9; EXPRESSED IN FETAL LIVER, SIGNAL = 2.5; EXPRESSED IN BRAIN, SIGNAL = 2.9; EXPRESSED IN PLACENTA, SIGNAL = 2.6; EXPRESSED IN HELA, SIGNAL = 4.6; EXPRESSED IN BONE MARROW, SIGNAL = 2.7
aacaggtgtgttctccctgcccacaggtgaaattggccgcagatcctctgattccaaaatatgtgtaagcattgcctccagggaggattgggactcattttcttttcctcactctgtttcccacaggaaaagccaagtttgagaaggagaatttcttagatgtcctggacgtgctcatcctcaccctctctagaagattcaaggtagaatcattttagaaagatttcattgtgtgcatgtatttgtcagcctaagtaatcataaaaaacataaaagaaattttaattcgagttttgaattagcaacagattctcccaagttatataaaaggacatataattattactatagttactacttagctatgtagtgatatggttaaaatatggtttagcctagtgtttctcaaataaaatatggtttagcctagtgtttctcaaatttgaggatctgtcagaattttttccagagcttggttaaaaaaaaacaaaaaaacccacagaggtccagatttt

SEQ ID NO: 7861 - DNA, 598 bp, Homo sapiens
  MAP TO AC015897.3; EXPRESSED IN PLACENTA, SIGNAL = 1.2; EXPRESSED IN HEART, SIGNAL = 1.2; EXPRESSED IN FETAL LIVER, SIGNAL =   1; EXPRESSED IN LUNG, SIGNAL = 2.1; EXPRESSED IN ADULT LIVER, SIGNAL = 1.5; EXPRESSED IN BRAIN, SIGNAL = 1.6; EXPRESSED IN BONE MARROW, SIGNAL =   1
gttcatgaggctcccttgagggcgtggaagccaacagcagagcagccagaattggcagaagagtttacagaaaaaagggagatccctccaggcatagaaaggggggcagagggagcagcagaagcagaaggggtcagaaggctgggtgaaggggggtcagaccccataggacaagcagcagcaaaagatgctgtgggtctgagtaaagatgaggctcctgaaaagcaagccttgatgctcacagtgcttgagacagacaaagcagcttctgaaggggaacagggtttagagaaggcagtgcttgcaaatgaagcagcagccctgaacttggagcatcttcatgaagtagcagccctgagagaggcagcgacatcggaggagggagaggctgagggtggggtggctgtgagtgatgtcggagaaagtgaagaggaagcatccatagacctagaggacacaggacccatggaggacacagcatcaaagagagaggacggttctgaagaggcaattcttgggggagaggaaccagccaaagagagaaaagaggttatgagaacagaaacacgcttgagccccttcacaggagaggcagagg

SEQ ID NO: 7862 - DNA, 534 bp, Homo sapiens
  MAP TO AC013611.3; EXPRESSED IN LUNG, SIGNAL = 1.9; EXPRESSED IN ADULT LIVER, SIGNAL = 2.2; EXPRESSED IN HELA, SIGNAL = 2.7; EXPRESSED IN HEART, SIGNAL = 1.9; EXPRESSED IN FETAL LIVER, SIGNAL = 1.7; EXPRESSED IN BRAIN, SIGNAL = 1.9; EXPRESSED IN PLACENTA, SIGNAL = 1.9; EXPRESSED IN BONE MARROW, SIGNAL = 2.2
agcagtgtggatgcagtgacagaacaccccagggtgccatctctgctcagtgtgactccctgggctctcttgccaaccacacctggcatctcaggcagttaagcagtcacggctctgctgggacattttctcgcatgtcgatgtttctcaggagagctgctcagtgatttcccatcaccatcttcaccagagactccatgtcttcatcattagtgaccattgctttcccaccatttcccactggtaccctgagaggcaatgccagctaaagagccagcttctggaatgggggctggtggggcccttgacatggagcagggctcgaaatcaagagagccttcgaggtggagaagacacagggggaagaggggcaccctgggccagtggtgggaaggaggacatggaccaggaggtgagggaatgctacttccacccctagcatctctatcaccatagctaccatttactgagcacctacgacctgccaggcactgtcccatgcaatggacacccagcatagcacctgagctcctc

SEQ ID NO: 7863 - DNA, 503 bp, Homo sapiens
  MAP TO AC016498.4; EXPRESSED IN HELA, SIGNAL = 4.4; EXPRESSED IN FETAL LIVER, SIGNAL = 3.9; EXPRESSED IN BONE MARROW, SIGNAL = 3.3; EXPRESSED IN LUNG, SIGNAL = 3.4; EXPRESSED IN PLACENTA, SIGNAL = 3.6; EXPRESSED IN ADULT LIVER, SIGNAL = 3.3; EXPRESSED IN HEART, SIGNAL = 3.8; EXPRESSED IN BRAIN, SIGNAL = 3.2
gaagggagaatgaaggggagagaggaggggaggggagcagggagtacctgggagggctaatgcccattctcatccaggagcgaggaaggaccagctcccaggctggccttctgttaggatagatcctgctccataagaggccatggaagcaggacctgccacagaatttccaggacccagggaaagatgtccatgtaggaccccttgttcaaaagttaagaatttcaagacagcaacagcagagcattaaaccaagctcagggcccaggaagtggggcgtgttacatgcagagggcaatggagcccttgaaaatgcaaaaggcatctacccccgtgcacaggctctgtgtgtgcttgtgtgaacttgtatatgggtacatgtgctgtgtgcatgcatgtgaacgtgtgtgtgcatgtttggagggcaggtatgtggagaagtgtcatcaggtacaactctcctctacttcagtggaccctgggctcacccagacccttggata

SEQ ID NO: 7864 - DNA, 562 bp, Homo sapiens
  MAP TO AL161724.2; EXPRESSED IN HELA, SIGNAL = 3.6; EXPRESSED IN LUNG, SIGNAL = 4.6; EXPRESSED IN PLACENTA, SIGNAL = 4.2; EXPRESSED IN FETAL LIVER, SIGNAL = 4.2; EXPRESSED IN BONE MARROW, SIGNAL = 3.7; EXPRESSED IN ADULT LIVER, SIGNAL = 4.2; EXPRESSED IN HEART, SIGNAL = 3.9; EXPRESSED IN BRAIN, SIGNAL = 4.1
ggctggaacagagaacttgggagagtacagcatgcctgatgaggcttgagaattaagtagaggtcaggccatgcaagcttttgcatcttcatcctaagagcaataaaagccactgaaattgtaaaacagaagagtatcatgatttttactgagcagccacttataggtacaggctagcctcctgtctgaactcatctcttcactcacctcacttactccatctgccacataagcctcctgcttttcatccagcattccagaatcattctcaacccaggggtttcgcacttgctgctccccatgtctggaacctttttttccagtgcccatatgtctcaccccttacttcacctcaggtgtctgctcgaatgtcttcttaaacaaacctttcctaaaagccaaaatttaaggcccatactattccttctcccatttatcctcctaatctgcttcctatagtttcactatttttatccctaataggaactatgttctaaatttaattgttaacttcataaaacacacatgtgcatatacacatgcacacacacatgcgcaaata

SEQ ID NO: 7865 - DNA, 582 bp, Homo sapiens
  MAP TO AC016851.3; EXPRESSED IN PLACENTA, SIGNAL = 5.3; EXPRESSED IN BONE MARROW, SIGNAL =  11; EXPRESSED IN ADULT LIVER, SIGNAL = 5.3; EXPRESSED IN HEART, SIGNAL = 3.4; EXPRESSED IN BRAIN, SIGNAL = 6.2; EXPRESSED IN LUNG, SIGNAL = 4.2; EXPRESSED IN HELA, SIGNAL =  13; EXPRESSED IN FETAL LIVER, SIGNAL =  12
accccaataattcctcctgctagactctgatgaatcaacagcctcaactcgcagtcaaagtcacttcctttatagtgttggtaacttaagcattccacagcaacagattcgagcggcagctggctggttgcagtgggtgatggaaactgcaggccctcttccaaggtagggatgattttcttcagaatttctccaattgtgtcaataccagcactgatactcaatatgtgctcggggccactgctgtctgggactgaaacactggcattgtagtctgtacggagagccttgatattcttgcctccttttccaatcactgccccagcattcttggtctgaagcagaatgcgtaattcaaccatctcatcagtgtttctagatcttttaaatgcttgttactcttccatatcttctgcagggtgtttaccaaattcaccattggtttcagtgttcgggaaggtttcttccggctgttcagtttacatattcttttattaaatgggcacaccaatcagttattatatatccttgcagagcagaactgaagcgttctgggtgggaccaacaactgacaccccagtg

SEQ ID NO: 7866 - DNA, 587 bp, Homo sapiens
  MAP TO AC013771.3; EXPRESSED IN PLACENTA, SIGNAL = 1.7; EXPRESSED IN ADULT LIVER, SIGNAL = 1.4; EXPRESSED IN HEART, SIGNAL = 1.6; EXPRESSED IN FETAL LIVER, SIGNAL = 1.3; EXPRESSED IN BONE MARROW, SIGNAL = 1.2; EXPRESSED IN LUNG, SIGNAL = 1.4; EXPRESSED IN BRAIN, SIGNAL = 1.6
gacttggactggcttccttgctcagtttgcagatggcctattgtgggacttcaccttgtgattgtgtgagtcaatactccttaataaactccccttcatatatacatctatcctataagttctgtccctctagagaaccctgactaatacactaggacattcagctagtaaattacagagctagaaatcccataaaatttatttgaccatgttcttaatgattatgtaacacttccttactgctgaaataatagttttaaaggacttataaatctcagttcacatttacaaaaaattaccatctctgccaatctttatgaattattctccctcaggtctcattagcagagaccacatcattggtcaaaaccacggtggaaatcttggcagttatgttattgactgccttagggaaagcaggatgagagaaagtgcagatgcatgtccaactcacatgaacataaagaaataaaatatttaatgttttaaccacacaataattatataatattatcatcaaaatcatgtatgtaacataatcctgagttatggaaaacttaatgaataccaatgaaccagccacagta

SEQ ID NO: 7867 - DNA, 574 bp, Homo sapiens
  MAP TO AC025324.2; EXPRESSED IN BONE MARROW, SIGNAL =   4; EXPRESSED IN LUNG, SIGNAL = 4.2; EXPRESSED IN PLACENTA, SIGNAL = 3.9; EXPRESSED IN ADULT LIVER, SIGNAL =   4; EXPRESSED IN HELA, SIGNAL = 4.8; EXPRESSED IN HEART, SIGNAL = 3.1; EXPRESSED IN FETAL LIVER, SIGNAL = 3.5; EXPRESSED IN BRAIN, SIGNAL = 3.5
caggtaggccagttctcaggccctgggtgagtgcatgccaagtgtgatggctccactggttgtgggggcagggcaggatcattggcagtgggggccccggtcaggtgagtagttggaccctgggaagcacatgcagtgtgtgatggctttaccagttgaagcgtcagagtcaccactggtgatgggcattgggcggccagtcctcagtccctggggagcacacatgttagtttcctcagtcttgggggtggccttcccactgttcttgattgcttttttttggttggggggcgatgagggggtgcaggatgctgtgtgggcttcagtgccagagtcacagttgtacttctggatctaactggggttgtgtaattatagcctgttgtgtgggtttggtgagaataagtcaggccctcagaaatgtggagatgcaggggctattaactcctagggcaggatgcattctagccatagttttgttccaaaaatggcattgtgctgtggcagcttggatcctgggtagtggggggtgactaagtgttagttcattccctggagtgatggagctgtgtga

SEQ ID NO: 7868 - DNA, 542 bp, Homo sapiens
  MAP TO AC025863.2; EXPRESSED IN LUNG, SIGNAL = 4.5; EXPRESSED IN ADULT LIVER, SIGNAL = 4.1; EXPRESSED IN HELA, SIGNAL = 2.9; EXPRESSED IN HEART, SIGNAL = 3.3; EXPRESSED IN FETAL LIVER, SIGNAL = 3.1; EXPRESSED IN BRAIN, SIGNAL = 3.4; EXPRESSED IN PLACENTA, SIGNAL = 3.5; EXPRESSED IN BONE MARROW, SIGNAL = 3.3
aagggtacctaggaggcaggcactaagttgaatttaaaccctaaccaaaggttacaaacaaatggaagccactcactgagaattggatacatcagaaggacttttctccggtaaatgtctggggggaatttggcataatatactttggctctttgtgtctcctcatcactctgaatcaggatctttccaattcgtatggatcgacagcagtctcgtaaaccttgttccattgcctcaccttgaagaagaaaaaagaaagaaaaaagattaggggaaagagagagaaagtccaagaacaggccaaagtatagtttgtcactgttattaatacaaaaaggaaggaagatgaaaataattattttgaagctgacagcttttatttctgatatgctcatatttcatacttagtggaggttaatgaaaccaggttaagggctggttaatgaaactagaataagctagttttattgctagcttacaagttttagagctgtcatgcttccgtgattataggaaataaagcattttgttgagcagctccc

SEQ ID NO: 7869 - DNA, 522 bp, Homo sapiens
  MAP TO AC018583.3; EXPRESSED IN PLACENTA, SIGNAL = 1.1; EXPRESSED IN ADULT LIVER, SIGNAL = 1.3; EXPRESSED IN BRAIN, SIGNAL = 2.5; EXPRESSED IN BONE MARROW, SIGNAL = 1.2; EXPRESSED IN LUNG, SIGNAL = 1.2; EXPRESSED IN HEART, SIGNAL = 1.2; EXPRESSED IN FETAL LIVER, SIGNAL = 0.93
tctgtgttgctggaaggatgaacaatgtaaaacccgttcttttgtgccacagctgtctcgagctgaacagcgaatgaatagattggatcagtgctattgtgaaaggacttgcaccatgaagggaaccacctaccgagaatttgagtcctggatagacggctgtaagaactgcacatgcctggtatggcttctatttgagttgagactaagggaactcagatgctcccactctttaaaaatttattaaaacaatgtaatcatgaaaatttcaagacccatttcctcaagacacaacactaaagtgtcaacaaacctggtcatatctaaagaactgtgttgcattattaaaaacactttctagcttctaaagatgattatggtttaggaatgctataaagtttaagtttattggtacacacatgaagttagcaatttaaattaggtaaagtgattcctaaagaagactatcctcttatccttaacatttccagagatttttctcccttgtgttttcatgaatgc

SEQ ID NO: 7870 - DNA, 532 bp, Homo sapiens
  MAP TO AC015842.4; EXPRESSED IN PLACENTA, SIGNAL = 2.4; EXPRESSED IN BONE MARROW, SIGNAL = 2.3; EXPRESSED IN ADULT LIVER, SIGNAL = 2.6; EXPRESSED IN HEART, SIGNAL = 2.2; EXPRESSED IN BRAIN, SIGNAL = 2.5; EXPRESSED IN LUNG, SIGNAL = 2.2; EXPRESSED IN HELA, SIGNAL = 2.3; EXPRESSED IN FETAL LIVER, SIGNAL = 2.1
tggatctcctgcttacaccctttttctcttcgaattttccagaccattgacctattatagttgacccttgaacaatgcagggaataaggtcacccatccccagcacagttgaaaatccacctataacttttgactctcccaatacttagccacttgatagtctactgttgactggacaccttactgataacacaaacagttgattaacacatttttcatatgttatattatattatatactgtattcttacaataaattaagctagagtaaagaaaacattattaagaaaattgtgtggaaattatatttactattcattaaatggaaatttatcaacacgagtgtctcatccttgttgtcttcatgttgagtaggctgagaaggaggaggaagagaggggttggtcttgctgtttcagaggtggcagagtcagaagaggtggaggaggtggaaggggaggtaggagaattgcacttggtgtaactttcattgaaaaaagatctatgtataagtggaaatccgtgctgttct

SEQ ID NO: 7871 - DNA, 562 bp, Homo sapiens
  MAP TO AL138956.3; EXPRESSED IN LUNG, SIGNAL = 1.6; EXPRESSED IN PLACENTA, SIGNAL = 1.3; EXPRESSED IN ADULT LIVER, SIGNAL = 1.4; EXPRESSED IN FETAL LIVER, SIGNAL = 1.1; EXPRESSED IN BRAIN, SIGNAL = 1.4; EXPRESSED IN BONE MARROW, SIGNAL = 1.2; EXPRESSED IN HEART, SIGNAL = 1.2
gaggtgaactccccttcctccactgatgtttcttgaacttccatctcatgctcagttggtgaagcataaccactacaagccaaaccaaaattatagtatttttctcctcatcaaaatcagtgagcatgttttgaatgaagaaatgggaaaaaaggtaaatttgagtttctcattattattttaaatcgtgatcattttagagtcaaagatcgaggtattatcaaatgaatttaaaatgactaagacatggagggctcagaggcagagcaagatggcagaatagaatgctccaccaatcatccccgcttcaaggacaccaatttaacaactatctacattttagaaaagcaccttcatagggaccaaaaatcaggtgagcattcacagtacctggttttaacagtacctggtttaaactttaatagtgctgaaagaggcactgaagagataggcaaagcagtcttgagttgctaatgccattcctcttccatttcctggcagcagctgcttgtcacagagaaagaatctatgtgcttatgagaggaagagtgcagcaattgtg

SEQ ID NO: 7872 - DNA, 551 bp, Homo sapiens
  MAP TO AC015914.3; EXPRESSED IN PLACENTA, SIGNAL = 0.99; EXPRESSED IN FETAL LIVER, SIGNAL = 0.57; EXPRESSED IN BRAIN, SIGNAL = 0.84; EXPRESSED IN BONE MARROW, SIGNAL = 0.85; EXPRESSED IN ADULT LIVER, SIGNAL = 0.66; EXPRESSED IN HEART, SIGNAL = 1.3
agaatgatagccccatgctgcctcctcagggttggtggtgttgtgtgtagctataaacagggccctcaaaagaattgcatcacctcccattaatagcctctgggaatgatctcacctgacattttagctgggcccctctgctcagtggctggcactgctgggccaggaggagggtgggattctcattaacgagattccccacacctgcaagttgaccttccagccatgggcttagctcttcctcccctgggtgagggtgccaatcagtaagtgggcaaaaagaaatctcttctcccccagagtctactaatcccatctgagcaaactctccttgtgaggtgcaggtgcccctgtgagggttaggctcaaaggtcattcatgcccaggggaattgcagacatcagtgaagttagacttagaaatggttgatgggttggggagggtgctaagcaccttggaaacgagattctaggagcttggaggtgcaagggagagaggactaacaaaaaacaagcagtcagccctccctacctgcaagttccacatcctca

SEQ ID NO: 7873 - DNA, 578 bp, Homo sapiens
  MAP TO AL121918.15; EXPRESSED IN LUNG, SIGNAL = 1.5; EXPRESSED IN ADULT LIVER, SIGNAL = 1.5; EXPRESSED IN BRAIN, SIGNAL = 1.2; EXPRESSED IN BONE MARROW, SIGNAL = 1.2; EXPRESSED IN PLACENTA, SIGNAL = 1.4; EXPRESSED IN HEART, SIGNAL = 1.2; EXPRESSED IN FETAL LIVER, SIGNAL = 1.1
atttgtgttcggtgagagggaagagtcccatttcattctttggcatatggctgtccctaaaccatttgttggtaagactcttttttctctattgaatagttttgacatccttgtcaaaattcagttgaccatagacacaaggttttatttctggactctcacttttactccatttatctatacgtctatccttatgccaggaccatactttcttgatgaccatttcattgtagtaagttttgaagtcaagaagtgagtctgcctatttgattcttcttcttcaaaactgttttcgatatttatggttcatcacaattccatatcaagtttagaaacagcttgttaaaaggtatgcatactgattgggattgcttttaacctataaatcaatttgggctgtattgccgtcataacaataccacttcttcctgtccatgaacatacattttttccatttgtttggctcttctgaaatttccttcaacacagttttgttgttttcagagcatgagttttacacctcttttgttattattcttaaatattttgttctttttggtggtattgcaaatggaatt

SEQ ID NO: 7874 - DNA, 560 bp, Homo sapiens
  MAP TO AC020991.3; EXPRESSED IN PLACENTA, SIGNAL = 1.6; EXPRESSED IN FETAL LIVER, SIGNAL = 2.4; EXPRESSED IN HEART, SIGNAL = 1.4; EXPRESSED IN BONE MARROW, SIGNAL = 1.5; EXPRESSED IN LUNG, SIGNAL = 1.8; EXPRESSED IN ADULT LIVER, SIGNAL = 1.9; EXPRESSED IN BRAIN, SIGNAL = 1.4
  unsure 371
ttccaagacacctctgtcccactcaagctgtgacttttcctgtgtttaacctaagttgaaattttctcatctgtaaaaagctggtgataaatgtaaagcaagctcttaaagataggcccagaaataaaattaaaaaatacaaacctcgcatggcaatgtctgagtgatgacacgcagtaagtatggtgaagcttcagttagctgatgaggatatattagttttctcaaaacatcatctcttaagtaggaatggccatccacagtgactttaaccttccatatcataggacaacaactaccaatttaggcttatccagttgttgccgaatgagtggcattcccagagcacttcagaaactgagtatgtaganaataagaggaaacactcttatcttgaccagacaatgctatatccaaccatgaataggattgttatataaaagtaaatgtatttgagatagctcttgcctggcccaatcagttttgtaaaaacgtattttcagatagctcacttaaagcatctgcctttctcattgaaatctaaccaaaaggtggcggta

SEQ ID NO: 7875 - DNA, 568 bp, Homo sapiens
  MAP TO AC006319.3; EXPRESSED IN HELA, SIGNAL = 3.4; EXPRESSED IN HEART, SIGNAL = 2.4; EXPRESSED IN BONE MARROW, SIGNAL = 2.4; EXPRESSED IN LUNG, SIGNAL = 2.8; EXPRESSED IN PLACENTA, SIGNAL = 2.8; EXPRESSED IN ADULT LIVER, SIGNAL = 2.5; EXPRESSED IN FETAL LIVER, SIGNAL = 2.2; EXPRESSED IN BRAIN, SIGNAL = 2.4
tttagcatggacttcccacccaaaacctctcatcatgctgtctcctagcacattacagtatcagatttctctagtgcactctgcctctccttgccacatcccaaactgaagataggaacaaatgatgaagaacaaggccccatggctggagaggtaggggcttcaccacaacacatggaaagagcacagaaacagcaggtaggagaggaccctgcagcatttctcaaactaacagctggcatcacggtcttctcttcagagaggtaaagacatttcctgaggggaaacattgttaccagttgaaataatgataataataaaaagaagcctaatattgtactcagggacatgaaaactgatgactgggctctgccctcttctcagtgtggaagaggtccatactcacatacccccagagacaaacttccagaagcacccccatccaagtggccccaagagtttcttcaaggtctgcaattaggtaaactatgatctagtttcaagcatctacattcaatatgtactctcttttctgttccctccagacagaccctgccatgtctcctta

SEQ ID NO: 7876 - DNA, 564 bp, Homo sapiens
  MAP TO AL121901.10; EXPRESSED IN LUNG, SIGNAL = 3.1; EXPRESSED IN PLACENTA, SIGNAL = 2.6; EXPRESSED IN ADULT LIVER, SIGNAL =   3; EXPRESSED IN HELA, SIGNAL = 4.1; EXPRESSED IN HEART, SIGNAL = 3.1; EXPRESSED IN BRAIN, SIGNAL = 2.4; EXPRESSED IN BONE MARROW, SIGNAL = 2.9; EXPRESSED IN FETAL LIVER, SIGNAL = 2.5
ccaaaggcctatttaaggggttttcagagtcactctggctacagctgttttctctttaatcactgacttcaggatttaactgggcctagtttgttgaaaggactcagagtgccaggggaagccctaacggtggacagtgcccgtctttgccaatacggagatttctactctttctctacctcctccccttgcccttcctcctcttcctctctcatctgcaggtccttcgataacaacatcgtaaagatgtgtgcacatatgagcatcgttgtggagttctggctggagaaagacgagtttggccggagggatctggtgataggcaaatgcgatgcagagcccagcagtgtccatgtggccatcctcactgagtaagaccccagctgcccctccccagagctgggcctccttcctgatgagccccagctgcagggtcacttcctgaccgtctcctaaattagtccaaagcagatctcatccttcccccgggatctgctcctcctcccatgttcccatccgtgatgaccctaccaccctcccagaagccagactcttctccctcct

SEQ ID NO: 7877 - DNA, 510 bp, Homo sapiens
  MAP TO AC007923.2; EXPRESSED IN LUNG, SIGNAL = 3.4; EXPRESSED IN ADULT LIVER, SIGNAL = 3.7; EXPRESSED IN HEART, SIGNAL = 2.9; EXPRESSED IN FETAL LIVER, SIGNAL = 2.9; EXPRESSED IN BRAIN, SIGNAL = 2.8; EXPRESSED IN BONE MARROW, SIGNAL = 3.4; EXPRESSED IN HELA, SIGNAL = 3.4; EXPRESSED IN PLACENTA, SIGNAL = 3.2
tggaagctttgttctttcgctcttcacaataaatcttgctgctgctcacttttgggtttgcaccaccgttaagagctgtaacactcaccatgaaggtccatggcttcatccttgaagtcagcaagatcacaaacccgccggaaggaagaaactccagacacatccgaacatctgaaggaacaagctcaggacacaccatctttaagagttgtaacactcaccgcgaaggtccgcggcttcattcttgaagtcagcgagaccaggaacccaccagaagtaataaatttcagacacaggattatgggcatgcaccaccatgcccagctaattttgttttttttagtagagatggggtttctccagttggtcaggctggtcttgaactcccgacctcaggtaacccacctgcctgagcctcccaaagtgtattcctttactttcttaataaacttgctttcactttactctatggacttgccccaaattctttcttgctcgaggtccaagaac

SEQ ID NO: 7878 - DNA, 565 bp, Homo sapiens
  MAP TO AL121895.18; EXPRESSED IN LUNG, SIGNAL =  11; EXPRESSED IN ADULT LIVER, SIGNAL =  11; EXPRESSED IN HELA, SIGNAL =  14; EXPRESSED IN FETAL LIVER, SIGNAL = 9.1; EXPRESSED IN BRAIN, SIGNAL = 9.2; EXPRESSED IN PLACENTA, SIGNAL =  11; EXPRESSED IN HEART, SIGNAL = 9.9; EXPRESSED IN BONE MARROW, SIGNAL =  10
tttccttctttcctccctccagaaaaaatactggagccctaagaactggacctggaggacggtctgggcaggaaaggtacgcccatgctctcgggcacacacctgttcagcaggccgcgtgtcctgctgggatggatgcttctcattggagttggcctctgggtggccgtggcctgcaggggtcacaggggtggtcacagcggcagcagcctcgggctgctgcggggcctcctcctgagctttcttcacctcagagtcggggcctgtctctgttgtcatggtgaccagcacgcctgcattggcatgaaggagatcatgtgacagggagggacagcaatggtatgacagcgagaggggcaggaaccacacgcggagagagacagatggaggcaaacggacaaagagtcacagggcaaagggaggaggaagggagagacagaggaagtggggaggagggagggtcatgggaggtgaggggttagtggctgaagtcacaggcacccctcccaccctgtgtctgcagctcttcagggactcaaatctctgggcctttcatagggatgat

SEQ ID NO: 7879 - DNA, 541 bp, Homo sapiens; identical to SEQ ID NO: 7474
  MAP TO AL133232.9; EXPRESSED IN HELA, SIGNAL = 4.5; EXPRESSED IN PLACENTA, SIGNAL = 3.6; EXPRESSED IN HEART, SIGNAL = 3.4; EXPRESSED IN BONE MARROW, SIGNAL = 3.3; EXPRESSED IN LUNG, SIGNAL = 3.4; EXPRESSED IN ADULT LIVER, SIGNAL = 4.5; EXPRESSED IN FETAL LIVER, SIGNAL = 3.1; EXPRESSED IN BRAIN, SIGNAL = 3.6

SEQ ID NO: 7880 - DNA, 558 bp, Homo sapiens
  MAP TO AC009466.2; EXPRESSED IN PLACENTA, SIGNAL =  11; EXPRESSED IN HELA, SIGNAL = 6.7; EXPRESSED IN HEART, SIGNAL = 5.8; EXPRESSED IN FETAL LIVER, SIGNAL = 8.2; EXPRESSED IN BONE MARROW, SIGNAL = 5.5; EXPRESSED IN LUNG, SIGNAL = 6.6; EXPRESSED IN ADULT LIVER, SIGNAL = 6.9; EXPRESSED IN BRAIN, SIGNAL = 6.2
tcccttcacactgacagcactcatgagatcacacacatctctggcttacactcatttatcatttcagtcaggatctcaatccccccagcatagaacaaggggatctggtcaggcttggaaagggtctccaggaggttcttggtggtcacggctgtgttctttcctgaatccagcagttcgtgggcttccttttcttgaaggtctgctttttcctgaagatctacttgattcaggtaacctagaaaaacaagaaaggaaagcaaaacaaaaccctaacaatcaacaataccacacaagaagcaacctttttttttcctttcttttgaggatgggagtttgagaagcataaagcattaaaataattaaaactcttcgttagcaaggaaaattttagaaacagtctaaatctacaaccagaatcttaaaccttgttggggattcaagggagtctaaaagtgtctaagggaggatggtgtagaaaatgaagaaggaaaatattactatttgcaagggagcacagcaaacagaggagcagagtgggctggttaacacagagga

SEQ ID NO: 7881 - DNA, 523 bp, Homo sapiens
  MAP TO AL157997.2; EXPRESSED IN LUNG, SIGNAL = 7.3; EXPRESSED IN ADULT LIVER, SIGNAL = 7.4; EXPRESSED IN HEART, SIGNAL = 6.5; EXPRESSED IN FETAL LIVER, SIGNAL = 7.4; EXPRESSED IN BRAIN, SIGNAL = 6.6; EXPRESSED IN BONE MARROW, SIGNAL = 6.1; EXPRESSED IN HELA, SIGNAL = 6.7; EXPRESSED IN PLACENTA, SIGNAL = 7.3
gacacacacacacactccccaaaattgttgagcaaatgtcaagttcacagaaattctaagaatcaaagttttgagaatctacttctccccactcaaaactgagtctataaaatgctctaagtaatccaaagggcaattataaaaagtcatgggggcagagaattgtttactccaagagcatccatggaacagaaataaaagggaagggaataaagccaaaggatatgcaaaatatctactcactgcagggcatgctcctcaagcttggtactcagtatcatttacctcaattaagtgtgagcagctcaccttgtaagactccccagcccatgtcacctggctttgagactgtcaactatctctgggttcagtcacatcaagaatctgttcataggaataatcaggttgtgctggctgagagcatgtgagcaatttctggtgcgtgagcctgtgtgcgtgggatgccttcaaatccatttcatttgggcagctgcttatcaagacttttccccagaaaccgatt

SEQ ID NO: 7882 - DNA, 549 bp, Homo sapiens
  MAP TO AC011815.2; EXPRESSED IN LUNG, SIGNAL = 1.4; EXPRESSED IN PLACENTA, SIGNAL = 1.4; EXPRESSED IN HEART, SIGNAL = 1.4; EXPRESSED IN FETAL LIVER, SIGNAL = 1.2; EXPRESSED IN BONE MARROW, SIGNAL = 1.2; EXPRESSED IN ADULT LIVER, SIGNAL = 1.4; EXPRESSED IN BRAIN, SIGNAL = 1.2
tgatggggaggaaatgagaccagatgggctggtgaagtagtttgtctcagaaaagaaggaagtgatttgttcctgaataggaggaaagtggagggtgagtgcaagagaaaagggagaagttgaagatgtttatgtcagatgactctgaccacaaaggtgttaatcagaagatgttacagttgagccagactttgaagaatgttacaacggccaatgactggaagagacgacttcaagtgatgttctgtatctactatccaatatggaagccattagccatttatggctatgtgtaggaaagctgcctgttgcatggcaagagtaatgctatcttgaagtgaaacatcataataaccagtgtttgactcttgcataccaaggcattcccccagcaaggtgaagaaacaatgcctataacatagataacccctcataaagaaacaatacctgtagcatagaaaacccctcataaagatccttatctaattttcccactggtcagagttttgcaagagggtctcagacatgacaagctgcacgttttaccaa

SEQ ID NO: 7883 - DNA, 569 bp, Homo sapiens
  MAP TO AL161642.2; EXPRESSED IN PLACENTA, SIGNAL = 2.3; EXPRESSED IN HELA, SIGNAL =   3; EXPRESSED IN FETAL LIVER, SIGNAL = 2.8; EXPRESSED IN HEART, SIGNAL = 1.5; EXPRESSED IN BONE MARROW, SIGNAL = 5.3; EXPRESSED IN LUNG, SIGNAL = 2.3; EXPRESSED IN ADULT LIVER, SIGNAL =   3; EXPRESSED IN BRAIN, SIGNAL = 3.4
caaacgccctttgagaagacagggactcgccaggatacccctctctcccctcatccagcctccagcccacccgattcctccccacctcctccacctccccaggccccactcacctcctccaactcctcccgggaaacccaagccctgccgctcatggaacagaagaactggaaccgaagtttctggaacagggctatctgagagcggttcttcctggccctcgggttcatgcaacggcataactggaaccgacggttacggaccaagggtatgcgagagcgggtcttcccatacaggaagtagaagatgttttgtttggggtcctcgtcgtcctcctccatgtcattggccaggtagctgaggacagaaatcaggttgctgctcaggggcaccaccaggagaggcctccggctgaggtcagcttcccagagaggaaggtaagggaccgtccctagctcaggactggcacccaccctgcagagagccacgccttcctcaggagggctctgctggacagagacctgatcaagggcgtctcccactccttcaggatggagacaaaaacccaa

SEQ ID NO: 7884 - DNA, 568 bp, Homo sapiens
  MAP TO AL161732.1; EXPRESSED IN ADULT LIVER, SIGNAL = 2.1; EXPRESSED IN LUNG, SIGNAL = 1.8; EXPRESSED IN PLACENTA, SIGNAL = 1.9; EXPRESSED IN HELA, SIGNAL = 2.3; EXPRESSED IN HEART, SIGNAL = 1.7; EXPRESSED IN FETAL LIVER, SIGNAL =   2; EXPRESSED IN BRAIN, SIGNAL = 1.7; EXPRESSED IN BONE MARROW, SIGNAL = 1.8
cacatcaaacccatggacacccgtttcaaacctaactgccaaaacttttgcttttattcaaacagaagaataatgacagtcattacaaagtaatcctgctgaacattttgtagtgcatcacattcaggtgacctcacaatgataaaaaaagaaattgcttttgtggtgttcattttaaaaatgttttctgaaatattcattttatgattgtattagtctgcctgggctgccatcacatgctactacagactgggtgacttaaacgacagaaatgtattttctcaaagttctggaggttggaaatctggaagtccaaggtcaaggtgccagcaggcttggtttctggcgaggcctttctcctcagctcgcagatcgtacctccttgctctgtcctctcattgcccatctctctgtggcacacatgttgagagagagctctctgttgttgcttcttcttataggacatctgtcctactggactagacttaatattcattaccttcttaaaggccctgtctctagagtcacataggggttagggcttcaatgtatgaatttgtggggctgg

SEQ ID NO: 7885 - DNA, 571 bp, Homo sapiens
  MAP TO AL158176.5; EXPRESSED IN PLACENTA, SIGNAL = 2.8; EXPRESSED IN ADULT LIVER, SIGNAL = 2.8; EXPRESSED IN HEART, SIGNAL = 3.1; EXPRESSED IN FETAL LIVER, SIGNAL =   2; EXPRESSED IN BONE MARROW, SIGNAL = 2.9; EXPRESSED IN LUNG, SIGNAL = 2.9; EXPRESSED IN HELA, SIGNAL = 3.6; EXPRESSED IN BRAIN, SIGNAL = 2.3
gccaaatgtgaaaaaggcacagtttcaaactattctacttgtatttttacccccactgtctcttgaaacaggtaaccatgaaggataacattaatacctttgtttctaggattatagaattatgtcaccagttccctcatggaatcacagaccaagtaattcagaatgaaatgcctcatatagaagcccagcagcgggcagtagccatcaataggttgttgtctatggtaaggtgaatctaactattttgcataattactgatatgctgattatcactggtttttattatgtagttgtgatggttaatttcatgtcaacttgactaagatacaggattcctacatatctagttaaatattttattggagtgtctgtgtgggtgtttctgaaagaggttagcattttgaattggtgaacggagtaaagtagatatgggtccagttgggtgagcatcatccaatccattcagggcctaaatagaacaaagtggcagaggaagattgaattcactctttgaattcaatcttgagctgggctatgaatcttgtgccctcagcactcctggttctc

SEQ ID NO: 7886 - DNA, 518 bp, Homo sapiens
  MAP TO AC023296.2; EXPRESSED IN LUNG, SIGNAL = 3.5; EXPRESSED IN HEART, SIGNAL = 3.3; EXPRESSED IN BRAIN, SIGNAL = 3.3; EXPRESSED IN PLACENTA, SIGNAL = 3.4; EXPRESSED IN FETAL LIVER, SIGNAL = 3.4; EXPRESSED IN ADULT LIVER, SIGNAL =   4; EXPRESSED IN HELA, SIGNAL = 4.3; EXPRESSED IN BONE MARROW, SIGNAL = 3.5
cagcttttctctccacccagtttatcctgtgataaaatcaaggaggaggaatccatgacaccacttggccagggatccatttacaatgaattgataagcaaattaaatgtggagtcaggaaaaggagtttgaaggaaacaaaacgggaaggagatcaaaaaaggaaagcgtgaacatggcacctctcctgttctctttctttgtataggcaaaactgaaagtttgctgttcccttttacagtgaagattaaacaggtgtatattgtgacctaataacaaaagacaatgtggcaaaaggaagcatcgatgaattcgtccacaaagagtgcacttacggacacagacaggcgtttgtccagaccacttgtggtcttgcaggcatatcctcacggaagttcccacaagccggaaaccaggattgcactggtaaaccaccgtgtctctgtaactgaagccatctccactaatgtgaccgttcacaatcgggtctggggaaccgcagtggccagctaaaaatg

SEQ ID NO: 7887 - DNA, 547 bp, Homo sapiens
  MAP TO AC018530.4; EXPRESSED IN ADULT LIVER, SIGNAL = 5.4; EXPRESSED IN BRAIN, SIGNAL = 4.8; EXPRESSED IN HELA, SIGNAL = 6.5; EXPRESSED IN HEART, SIGNAL = 5.3; EXPRESSED IN BONE MARROW, SIGNAL = 5.2; EXPRESSED IN LUNG, SIGNAL = 4.5; EXPRESSED IN PLACENTA, SIGNAL =   5; EXPRESSED IN FETAL LIVER, SIGNAL = 7.2
tggtaggaggtgattggagcagggggctagaattctcatgaatcggttagcaccaccctcttggtgctgttcttgtgacagtgagtgagttatcctaagatctggttgtttaaaagtgtgtagcccctccctctccctcttggtcctactcctgcatataggatgcctgctcctgctttgccttccaccatgagtaaaagctccctgaggcctcctgaaaagtagttgccaccatgctttctgtacagcctggagaatcatgagccaattaaacctcttttaaaaattaatttacccagtctcaggtatttctttatagcagtgtaggaaggaactaatacagaatggggcattgctatgaagataactgaaaatgtggaagcaactttggaactaagtagtgggcagaggttggaagagtatggaaggctcagaagaagacaggaagatgatggaaaatttgggactttctagagacttgttaaatggttgtgatgaaaatgctgatagtgatatggacagtgaatccaggctgagaaggtttcag

SEQ ID NO: 7888 - DNA, 591 bp, Homo sapiens
  MAP TO AC022038.2; EXPRESSED IN ADULT LIVER, SIGNAL = 1.5; EXPRESSED IN BRAIN, SIGNAL = 1.1; EXPRESSED IN LUNG, SIGNAL = 1.2; EXPRESSED IN HEART, SIGNAL = 1.3; EXPRESSED IN BONE MARROW, SIGNAL = 1.2; EXPRESSED IN PLACENTA, SIGNAL = 1.6; EXPRESSED IN FETAL LIVER, SIGNAL = 1.3
tcacacaaggcaagacgaagataagaaaggatcatgaaaagatgccgcatttcctgattttcaccactgtgaaattttttccggactactatagtatctacaagaggcaaatgaactattccatgacatggcaaatccattcttttttgcccatctacacaatcgataccaatcgccacagccaaattgatctggctgcaattcacatcaattcttagaaggctgaaaggaatggattggctgtgccataggccagccatttcacatcctcagacatgccctcttctgcctcaagagttgttaggccagtggaagaagggaccaaggttgccactctattcattcattcaggctctaatatcacatttaacttctaacctagaagttaacttaaccacagctgcttaagtaattttgatgtgaaaattaagtatcaatttgtttcaatgttgtaaaactaataattttttagcatcttctgtgtgtcccgtcttggacaaagtaaagtttattaaatggaagatactctaatgggaaacaaagagaagcatgccaacatacaattgctatgcaactccattcaagccccta

SEQ ID NO: 7889 - DNA, 540 bp, Homo sapiens
  MAP TO AL133419.11; EXPRESSED IN LUNG, SIGNAL = 3.1; EXPRESSED IN FETAL LIVER, SIGNAL = 3.6; EXPRESSED IN BONE MARROW, SIGNAL = 2.6; EXPRESSED IN HEART, SIGNAL = 3.2; EXPRESSED IN PLACENTA, SIGNAL = 3.3; EXPRESSED IN ADULT LIVER, SIGNAL =   3; EXPRESSED IN HELA, SIGNAL = 3.9; EXPRESSED IN BRAIN, SIGNAL =   3
ttaatgcctgctttgaaccccttcctcttttttatgaaaacaggataacagcctctcctccctcttgagaacttagcctttctctattccatgtggctttgatgagaataattcacatttttcccttggcaccaggttacaagtgtgggccacctgtcatgaaccttgtctatagagatcagtacataacctgagcctatgacccaaaagggccaattgagatcattcaagaagatatcatatgttgataatagaagagttcattcagtcaactctgtctcctgtcactgtaaggctgaaataacataagttgagcttttggtagccacttctgcttctctcttttcaaataaatggaggtattttgcagtcggaaggaattcaacaaatatagggaaagccaagaaatgcagagagaagtagaggaggaagaagaggaggaggaagaggaggaaaaagaagggaaaagagaaagaaggaaaaagaaaaaagggagggtgagaaagccattattttctatctcaggatcgccttgtgttt

SEQ ID NO: 7890 - DNA, 594 bp, Homo sapiens
  MAP TO AC021287.4; EXPRESSED IN LUNG, SIGNAL = 3.7; EXPRESSED IN HELA, SIGNAL =   5; EXPRESSED IN HEART, SIGNAL = 3.6; EXPRESSED IN PLACENTA, SIGNAL = 3.6; EXPRESSED IN FETAL LIVER, SIGNAL = 3.5; EXPRESSED IN ADULT LIVER, SIGNAL = 4.1; EXPRESSED IN BRAIN, SIGNAL = 3.2; EXPRESSED IN BONE MARROW, SIGNAL = 3.4
gagagcgctcaaggatgaagcattatttgtattgctaggactgctaagcagtgaaacacactttaagggcaaagtttcctttctggtgaacaaacaaaagagaattatattatcgtgtaatatcatgtaatatcgtgtgtattttaggtattttctatgtgtctgatgatgagaaaattaatcatgaaaactttaaaaaattgtaattcttgcttcttaggagccagagaatttcagtaaaccagagttaaaacaggcaagtttacatgtctattagttgctatcctgttttaaatgagtattaatatcttagtgcctggttcaaaagttacatctcacagagaaagtcaccttagagtgtgactcaagatcactgaggtctgtgctagtttcagctgtgtcagttgctgtgcaacctttaacagggatcttaacttctctggatctcagttgttctgtctgtgaaaaatagagggtaggtgttttaatgttttcaatctttcacaactctgcaactttgtgagtctgtgaagtattattccaataaatggatcaaagtttgagattaactcttcttccttctccatccctcct

SEQ ID NO: 7891 - DNA, 575 bp, Homo sapiens
  MAP TO AC023032.2; EXPRESSED IN LUNG, SIGNAL =   6; EXPRESSED IN ADULT LIVER, SIGNAL = 7.4; EXPRESSED IN HELA, SIGNAL = 8.6; EXPRESSED IN BRAIN, SIGNAL = 5.4; EXPRESSED IN BONE MARROW, SIGNAL = 6.1; EXPRESSED IN PLACENTA, SIGNAL = 6.3; EXPRESSED IN HEART, SIGNAL = 6.5; EXPRESSED IN FETAL LIVER, SIGNAL = 5.9
agagggagagagagcaagccatttggaaaacatattagagtaattgtccacaaaaatttttccaaccacactagagaggtgaacatgcaaataccaaaaattcagagaaactaggtgagatactgtactggaagaccatcctcaggtaacgtaatcatattctccaaggtcaacatgaaacaaaagttaaaggcagctaaggagaatggacatgacacctacaaaggaaaccccataaggctaagaatagaccttttagcagaaaaccaacaaagcagaagacaaagggggcctatgtttagcattcttaaaaaaatttcagtgaagaatttcatgttcaggtaaactaagattcataaaggaaggagaaataaattattttttaggcaagtaaacattaaaaagttgttaccaccagatgggccttacaaaagatccttaagagagagctaaatgtggaaatgaatggtaagtattggcaacaataaaacatacttaaggatatagcccgctgacaccatatacaacaactatgcaatcaagtctgcataacaaccagcaaacgacacaatgac

SEQ ID NO: 7892 - DNA, 537 bp, Homo sapiens
  MAP TO AL162458.1; EXPRESSED IN LUNG, SIGNAL = 1.1; EXPRESSED IN PLACENTA, SIGNAL = 0.77; EXPRESSED IN BRAIN, SIGNAL = 1.1; EXPRESSED IN BONE MARROW, SIGNAL = 1.2; EXPRESSED IN FETAL LIVER, SIGNAL = 1.3; EXPRESSED IN ADULT LIVER, SIGNAL = 0.9; EXPRESSED IN HEART, SIGNAL = 1.2
ttttcctactgacgggttggcctctggtggggaatttggttctgcactccctgggcctgcctgggaggggtagctatagctcatggccagtgctgccctccatttaaccaccctccaattgcctcacccatccccaggagcccccatgacatcaccaatgtccagttccaccttggcccacagcctagcagccattgaggccctggcagatggccccacatccacatccacatgcctggaggcacagggtgggcccagctccccggtgcagctgcccccagcctccggtgccgaagagccggacctgcagagcctggaggccatgatggaggtggtggtggtgcagcagttcaaatgcaagatgtgccagtaccggagcagcaccaaggccacactgctgcgccacatgcgggaacgccacttccgtccaggtgcgtcagtagcagcctacctgcttggactgcatgggtaggggtggggtgctgggagccagacatggcaagcttgtcttaccctccctccacttccagtagcagc

SEQ ID NO: 7893 - DNA, 559 bp, Homo sapiens
  MAP TO AC011859.4; EXPRESSED IN BONE MARROW, SIGNAL = 6.4; EXPRESSED IN ADULT LIVER, SIGNAL = 5.9; EXPRESSED IN BRAIN, SIGNAL = 5.2; EXPRESSED IN LUNG, SIGNAL = 5.8; EXPRESSED IN PLACENTA, SIGNAL = 5.6; EXPRESSED IN HELA, SIGNAL = 7.7; EXPRESSED IN HEART, SIGNAL = 6.4; EXPRESSED IN FETAL LIVER, SIGNAL = 5.8
ttaaagggaaggagggaaggcttaaggaagaatggatagatggatggaggacaaatgtataattaagaatatcaactttgagctgagacctgcatgttaaattttgcttttattttatttttcagccaatgttttcagttgcaccaagcttagccaccaatgcatcagcagccgcctttaatccctatctgggacctgtttctccaagcctggtcccggcagagatcttgccgactgcaccaatgttggttacagggaatccgggtgtccctgtacctgcagctgctgcagctgctgcacagaaattaatgcgaacagacagacttgaggtaggaatgactagttggtgtctttatatactacattctaattctcaaagtgtggttttttgtttgtttgtgtgtttccatggccaaaaagttgtaaaaattttaaaacagattttggcttagggtttggaacattttactagagtatagataatgctgtatttgattaatgtaacgtttataaaggctacaacatccatgtttagaatagtggataagaggttggacgc

SEQ ID NO: 7894 - DNA, 514 bp, Homo sapiens
  MAP TO AC015570.5; EXPRESSED IN LUNG, SIGNAL = 1.8; EXPRESSED IN PLACENTA, SIGNAL =   1; EXPRESSED IN HEART, SIGNAL = 1.4; EXPRESSED IN FETAL LIVER, SIGNAL = 1.6; EXPRESSED IN BRAIN, SIGNAL = 1.5; EXPRESSED IN BONE MARROW, SIGNAL = 1.7; EXPRESSED IN ADULT LIVER, SIGNAL = 1.6; EXPRESSED IN HELA, SIGNAL = 2.4
ttgtctggtcttctgggtcccctagggtcacccttagatggcagatgaattggggaagccaaaagctactctttcttggttaatctcctttctttattagctttctctctcctgtccctattattgaaaaccttataagtctctgttaccagggtcaacagtaggatctggggttctgtctatattcagctttctcctgatgtctggaacagactgagtaatgaaatgtgtggcaagcggtgccctcccttctgtttactctgggacagcattggtgtattttcggaaagctgtcatgacccagttgaggaagactgctggaattttctcctctttttcctgagtaatatctctaaccttatgatagttcatgagatttactatgcacttgtccattgccttagcaaagtaataaaatgacccatctagctttgtcagtagcatcttcataatcccactgggggttttgctctgggactacatctcagcgcactcagatgacagccttgtggtg

SEQ ID NO: 7895 - DNA, 526 bp, Homo sapiens
  MAP TO AC021824.2; EXPRESSED IN ADULT LIVER, SIGNAL = 5.1; EXPRESSED IN HELA, SIGNAL = 6.3; EXPRESSED IN BRAIN, SIGNAL = 4.4; EXPRESSED IN BONE MARROW, SIGNAL = 4.1; EXPRESSED IN PLACENTA, SIGNAL = 4.8; EXPRESSED IN HEART, SIGNAL = 4.7; EXPRESSED IN FETAL LIVER, SIGNAL = 4.2; EXPRESSED IN LUNG, SIGNAL = 4.6
aatggatcttgggagagcacactgaaaatcttcgggaaagtactcagcattccagatgccattaagaacattcatgattcatgaaaagaggtcaaaatatcaacattaacaggagtttggaagaagttcatttcaaccatcatggatgactttgacggcttcaagatttcagtgaaggaaataaatgcagatatgatgaaaacagcaagagaactagaattagaagtggtgtctaaagctgtaatcaaattgttgcactcttgtgataaaatttgaatggttagggagttgtttcttatggataaataaataaagtggtttcttgagatgaaatgtactcctggtgaagatgctgtgaatatttttgaaatgataacaaataatttataatattacataaaatttagttgataaagcatcagaagggtttgaaagttttactgtgggtaaaatgctatcaaacagcatcttacactacaaaaaaaaaaaaaactatttcatgaaaggtagtgtcagttggtggggg

SEQ ID NO: 7896 - DNA, 507 bp, Homo sapiens
  MAP TO AC013777.3; EXPRESSED IN LUNG, SIGNAL = 3.4; EXPRESSED IN HEART, SIGNAL = 4.1; EXPRESSED IN PLACENTA, SIGNAL = 3.4; EXPRESSED IN FETAL LIVER, SIGNAL = 3.9; EXPRESSED IN ADULT LIVER, SIGNAL = 4.2; EXPRESSED IN HELA, SIGNAL = 4.9; EXPRESSED IN BRAIN, SIGNAL = 3.8; EXPRESSED IN BONE MARROW, SIGNAL = 4.4
ttcatgagccactggatttggtttgcttgtattttgttgaagatttttgtgcctatattcatgaagtatgttgagtagttttcttataataactttgtctgcttttcatatcagtgtaattttggctttgtagagtgaattgcaatgtgttaactccttttctgtattttttgggggaggggaaagaatttgtaaaggattggttattggttaattgttttttaagcatttggaagaaataccactaacgacatctggtcctaggattttctttgtggaaagttttctgattactaattcattttcttcttgttctttcttctttcctcctcctcctccttctcctcctcctgctcttcttcttcctcctcctccttcttctttttttttttttggatagagtctcgctctatcactctgtcaccaggctggagtgcagtggcaaaatcatagctcactgtaggctcaaccatcctcatacaatcttctcaactcagccttctgcct

SEQ ID NO: 7897 - DNA, 592 bp, Homo sapiens
  MAP TO AL137853.3; EXPRESSED IN PLACENTA, SIGNAL = 1.6; EXPRESSED IN ADULT LIVER, SIGNAL = 0.84; EXPRESSED IN FETAL LIVER, SIGNAL = 1.5; EXPRESSED IN BONE MARROW, SIGNAL = 1.4; EXPRESSED IN HEART, SIGNAL = 1.6; EXPRESSED IN BRAIN, SIGNAL = 1.7
ttttcctgtctaaacatcttggtgtcatttctatttcagtttatgctaaaggaatttgaagcacgcaggcaacagcatgagcaactgaatgaggcagctcagggcatcctaacaggccctggagatgtctctctgtccaccagccaagtacagaaagaactccagagcatcaatcagaaatgggttgagctgactgacaaactcaactcccgttccagccaaattgaccaagctattgttaagagcacccagtaccaggaactgctccaggacttatcagagaaggtgagggcagttggacaacggctgagtgtccagtcagctatcagcacccaaccagaggctgtaaagcagcaattggaagagaccagtgaaattcgatctgacttggagcagttagaccacgaggttaaggaggctcagacactgtgcgatgaactctcagtgctcattggtgagcagtacctcaaggatgaactgaagaagcgtttggagacagttgccctgcctctccaaggtttagaagaccttgcaggtaagttggggtgaagaacatacttctgccattattagaggcaagcagaaagaagga

SEQ ID NO: 7898 - DNA, 584 bp, Homo sapiens
  MAP TO AC008065.3; EXPRESSED IN LUNG, SIGNAL = 2.2; EXPRESSED IN PLACENTA, SIGNAL = 1.4; EXPRESSED IN ADULT LIVER, SIGNAL = 2.9; EXPRESSED IN BRAIN, SIGNAL = 3.5; EXPRESSED IN FETAL LIVER, SIGNAL = 7.6; EXPRESSED IN BONE MARROW, SIGNAL =   7; EXPRESSED IN HELA, SIGNAL = 4.1; EXPRESSED IN HEART, SIGNAL = 3.3
gaaacgtgcaaatgaaaggcacagtaaaatactactacacacctatttgaatagctgaaattaaaagtactgagcttaccaagtgttgataaggatgtagaggaactggaactttcatacactgctggtgggaatataaaatggtataaccattttggaatacaacttggcagtttatttgtttgtttaggttgtttttactcaccactatgctaacgaggaacttggcagtttctttaaaagataaacatatatctctggtccgtgcctccaagatgacaaagaaaagaaggaacaacggtcatgccaaaaagggccgcggccacgtgcatcctattcgctgcactaactgtacccgatgcgtgcccaaggacaaggccattaagaaattcgtcattcgaaacgtagtggaggccgcagcagtcagggacatttctgaagtgagcgtcttcaatgcctatgtgcttcccaagctgtatgtgaagctatattactgtgtgagttgtgcaattcacagcaaagtagtcaggaatcgatctcgtgaagcccacaaagaccgaacacccccaccctgatttagacct

SEQ ID NO: 7899 - DNA, 566 bp, Homo sapiens; identical to SEQ ID NO: 7782
  MAP TO AL136363.4; EXPRESSED IN LUNG, SIGNAL = 2.3; EXPRESSED IN PLACENTA, SIGNAL = 4.7; EXPRESSED IN BRAIN, SIGNAL = 3.2; EXPRESSED IN BONE MARROW, SIGNAL = 2.9; EXPRESSED IN HELA, SIGNAL = 2.7; EXPRESSED IN ADULT LIVER, SIGNAL = 3.4; EXPRESSED IN HEART, SIGNAL = 3.3; EXPRESSED IN FETAL LIVER, SIGNAL = 3.8

SEQ ID NO: 7900 - DNA, 590 bp, Homo sapiens
  MAP TO AC025115.2; EXPRESSED IN LUNG, SIGNAL = 5.2; EXPRESSED IN BRAIN, SIGNAL = 5.4; EXPRESSED IN BONE MARROW, SIGNAL = 4.4; EXPRESSED IN HEART, SIGNAL = 4.6; EXPRESSED IN PLACENTA, SIGNAL = 5.1; EXPRESSED IN ADULT LIVER, SIGNAL = 5.3; EXPRESSED IN HELA, SIGNAL = 6.4; EXPRESSED IN FETAL LIVER, SIGNAL = 4.6
agccgtgactgaaataaggcagagatccaagaaagatagattcttcaagaagaaatacacgggggtgtggagatgatggtccaaagttgtgatcatgataatgaggacattccccatcagggcacacaaataaatcaacaagaagagaatcgaatgcaaaatgcacatatttttattggtagaaaaccccataaggataaattcagtcacgattgtgagatttgccattattgcaggagtaatctgcaggaaaaggagaagactgaagtaaaatatcaatgtccactctttaaatattaaatatatataacacatatattatttagcatactgaaacacacacacgtaccacacgtatggtaattccatgccaatttgccacaaaaaatactttcatctagttcttttttagtgcattgatcaccaagcatttcctgattaatttcatgttattgaggcaatttagttcacataaatgcagttataatattatccaaatatatcttatgaaatatactgaaagattaaaaattttctacggatgttatcaaaacttaaaaacaaagttttcctgcccatctctcttgaaa

SEQ ID NO: 7901 - DNA, 507 bp, Homo sapiens
  MAP TO AL121575.24; EXPRESSED IN HELA, SIGNAL = 2.7; EXPRESSED IN HEART, SIGNAL = 1.9; EXPRESSED IN FETAL LIVER, SIGNAL = 1.6; EXPRESSED IN BRAIN, SIGNAL = 1.6; EXPRESSED IN BONE MARROW, SIGNAL = 1.6; EXPRESSED IN PLACENTA, SIGNAL = 1.8; EXPRESSED IN ADULT LIVER, SIGNAL = 0.92
actagggaatgcccacagcagtctaaaatacagtaatcaacaggtgaagtcactccgaccataagatttagtacataccttctgatgaagagaaagcaccatatgtggaaaacttgcaaactggaaaagcacaaagaaaatgagctgacttgagagatgctgccacaggagttggcttgttcccccatcgtcaaacttctcctcggtctcagatcgctccatggcataaacaaccagatccaccaactggtcctccagcacagggcagcgctgcttgtgctgtagggcagagattaaatacagtattccaaaagcctctcggttagtttcagaagttaccagttaatgggcattaattgtaacaagaggctgagaagcacggaatgaagttgaacttaagaagtcaaggttagatttagtctattaaagctgcatcatgttatattattatacaggataagcttcatgaaaaaatgttttcaggtttcctacaaaaccgacttccca

SEQ ID NO: 7902 - DNA, 533 bp, Homo sapiens
  MAP TO AC022664.2; EXPRESSED IN LUNG, SIGNAL = 5.5; EXPRESSED IN HEART, SIGNAL = 5.6; EXPRESSED IN PLACENTA, SIGNAL = 5.4; EXPRESSED IN FETAL LIVER, SIGNAL = 5.8; EXPRESSED IN ADULT LIVER, SIGNAL = 5.8; EXPRESSED IN HELA, SIGNAL = 6.6; EXPRESSED IN BRAIN, SIGNAL = 5.1; EXPRESSED IN BONE MARROW, SIGNAL = 5.8
ttaccctgaagaccacacccacctccttgcattcacataccaattttgtcctgattcactctctgttctctcatccccagcctgaacctctatactcagctccatttggaggtcctggtggtacctgcagctcaaatgtccaaaatgcgacttttcatcttgcttctcattcctgactttcctctattatttcctaacgatgataatgatgccattatccatccaaccctccagaccagaaacctgcgattgattcttcccgactttctttccacagcagttgagcctcaggtcttgctgatgttttctcctgaacagcttcagtattttcccacttatctccatttcctttgcaatttgaatcagaatcaccattatttctcatcttagtaactataatactcttttgcaagtacaaatctcatcagtccctctagatgctcactcagagattctcaattgcttctaaagtcttaatttttaaaaatgacttccaaggatctatatgaccccagcattgtggcctagaattc

SEQ ID NO: 7903 - DNA, 597 bp, Homo sapiens
  MAP TO AL161756.1; EXPRESSED IN FETAL LIVER, SIGNAL =   6; EXPRESSED IN PLACENTA, SIGNAL = 5.8; EXPRESSED IN ADULT LIVER, SIGNAL = 4.3; EXPRESSED IN HEART, SIGNAL = 5.2; EXPRESSED IN BONE MARROW, SIGNAL = 4.1; EXPRESSED IN LUNG, SIGNAL = 4.7; EXPRESSED IN BRAIN, SIGNAL =   6
agccattatacttgcccacgaatctttgagaacattataatgacctttgtgcctcttcttgcaaggtgttttctcagctgttatctcaagacatggatataaaaaactcaccatctagccttaattctccttcctcctacaactgcagtcaatccatcttacccctggagcacggctccatatacataccttcctcctatgtagacagccaccatgaatatccagccatgacattctatagccctgctgtgatgaattacagcattcccagcaatgtcactaacttggaaggtgggcctggtcggcagaccacaagcccaaatgtgttgtggccaacacctgggcacctttctcctttagtggtccatcgccagttatcacatctgtatgcggaacctcaaaagagtccctggtgtgaagcaagatcgctagaacacaccttacctgtaaacaggtaagtccagtcttcattctgaattatagttgctagccatttctcaaatcactttatggttgagtgagaaggaaataatatgttagacaaggtctttattgtattaattacatagtttacttacagcacccaaaacacaggat

SEQ ID NO: 7904 - DNA, 559 bp, Homo sapiens
  MAP TO AC013550.4; EXPRESSED IN HEART, SIGNAL = 3.3; EXPRESSED IN FETAL LIVER, SIGNAL = 0.57
agtggtgaacctgttccctgctgtcctctgcctgctctgtccagagcggcgctcatgtacataaaggcttgtttctaaacaaacgattgaaggaccaataaatgtaactgagtgtgacctggagcccaccgtccgagggggtgacatgactttcctttttctaactcttccttctccaccaacctcttccgtccaaagaccttgaatctgacctgcacggtgtttggaaaccctgaccccgaagtgatttggttcaagaacgaccaggacatccagctcagcgagcacttctcggtgaaggtggagcaggccaagtacgtcagcatgaccatcaaaggcgtgacctccgaggactcgggcaagtacagcatcaacatcaagaataagtatggcggggagaagatcgacgtgacagtgagcgtgtacaaacacggggagaagatcccggacatggccccgccccagcaagccaagcccaagctcatccccgcgtctgcctcagcggcaggccagtgaaggcgttttcctagcctggagatgggaaaatatgcttggcaga

SEQ ID NO: 7905 - DNA, 515 bp, Homo sapiens
  MAP TO AL161747.1; EXPRESSED IN FETAL LIVER, SIGNAL = 5.5; EXPRESSED IN LUNG, SIGNAL = 4.5; EXPRESSED IN PLACENTA, SIGNAL = 4.8; EXPRESSED IN ADULT LIVER, SIGNAL = 4.7; EXPRESSED IN HEART, SIGNAL = 5.4; EXPRESSED IN BONE MARROW, SIGNAL = 4.5; EXPRESSED IN HELA, SIGNAL =   4; EXPRESSED IN BRAIN, SIGNAL = 5.5
agcctgtcacatgcactcacttagcttctcttccttctcatcctcactctcatcagtgctggagctggagctggatgaggatgaggaagaagaagaagatggtgacagcttgctcaagtccagctcagagtccgaatcatcctcatcctccagtttgactggtggaacactccgggaaaccagaggggtagtatcagagggggatactcgcatctcatagtcttgtggggttggtcggctcctggccaccacctcgtgctctagctttaaagtcagactctccagactggggacctgggtagctgtctcctcgggtgacttttcaacaggagcatctgggcgcaggggcagtggtgaggcagtgcgtgaggtatactgctggtgcagcagtggagtagagcagcgtgacaaggatggagctggtgctcctgcttgatggttctgcatataattcatacgggcagccagaaaagagaagtctgggtcctgcatgatgttgcagtctgtttggctca

SEQ ID NO: 7906 - DNA, 525 bp, Homo sapiens
  MAP TO AP000404.2; EXPRESSED IN ADULT LIVER, SIGNAL = 1.1; EXPRESSED IN FETAL LIVER, SIGNAL = 0.99; EXPRESSED IN BRAIN, SIGNAL = 1.3; EXPRESSED IN BONE MARROW, SIGNAL = 1.1; EXPRESSED IN LUNG, SIGNAL = 1.2; EXPRESSED IN PLACENTA, SIGNAL = 1.3; EXPRESSED IN HEART, SIGNAL = 1.3
tctggaaactgcagagaagcaaagaaagaacaaaatgcctttaaataattgcccctgggaatgggtgcaccaggagtgtgctgaagtttcatactcatgtctctctgggcctgattaattttacatacctcacatagcacagaccgctctgagctacttttctttctcactttcttctaaggagatcacaagtatttcatgtattaccttatgttcatgacattcttactattgtatatctgctttatattgtggcattgaaggttcatctccatggtggcagagatgaacatgactctgagagcaatgactttcccatcaatcatgaaagacatatttattcaccaccattctgtattagggatcctattgtgtactgagttactgcagtacccacaagggagtctctgaaaattctgacccccaggacctctatagggcacacttggcatcagatttaattggaaaagcataaggcaagccatgcagcatgccagaatgacagcatcaggcacccctttttaa

SEQ ID NO: 7907 - DNA, 594 bp, Homo sapiens
  MAP TO AC015999.3; EXPRESSED IN PLACENTA, SIGNAL = 7.5; EXPRESSED IN FETAL LIVER, SIGNAL =  11; EXPRESSED IN ADULT LIVER, SIGNAL =  14; EXPRESSED IN HELA, SIGNAL =  16; EXPRESSED IN HEART, SIGNAL = 8.4; EXPRESSED IN BONE MARROW, SIGNAL =  11; EXPRESSED IN LUNG, SIGNAL =  11; EXPRESSED IN BRAIN, SIGNAL =  13
aaaaatggggtcagtttccctcatactgttcttctggtagtgaataagtctcatgaaatttgatggttttataaatagaagtacccctgcacaagctctctttcttgccaccatgtaagacgtccctttgctcttctttaatcttctgccatgattgtgaggcctccccagtcatgtggaacagtgagtccattaaacctctttcctttataaatttcctttataccagtctaaggtatgtctttattagcagcatcagaatagactgataagtaaattggtacagggtagtggggtgctgctgtaaaaatacccaaaaatgtggaagtgactttggaactggttaacaggcaaggattggaacagtttggaggactccaaagaagacacgaaaatgtgggaaagtttggaacctcctagagacttgttgaatggctttgaccaaaatgatgatagtgatatgggcaataaggtccaggctgatgtggcctcagaaggaaatgagaaacttgttggaactggagcaaaggtgactctctatgttttagcaaagagacaggtggcatcttgcccccgccctagagatctgtggaa

SEQ ID NO: 7908 - DNA, 594 bp, Homo sapiens
  MAP TO AC013657.3; EXPRESSED IN PLACENTA, SIGNAL = 2.4; EXPRESSED IN BONE MARROW, SIGNAL = 2.5; EXPRESSED IN ADULT LIVER, SIGNAL = 3.3; EXPRESSED IN HELA, SIGNAL = 4.1; EXPRESSED IN HEART, SIGNAL = 2.5; EXPRESSED IN BRAIN, SIGNAL = 2.2; EXPRESSED IN LUNG, SIGNAL = 2.4; EXPRESSED IN FETAL LIVER, SIGNAL = 2.8
ttatttttggccacagagccacaaggctcggtccccagtgagccgcccgaggacatcttgtggcaccatctgttcgcccccacccaccctcaccaactgccaggctccgattgttgttggtggtggtggtgtgtttttttttttgttttttttttttaagtttttgttgattttataaattctgtagctctgtgttttttagactcggcttgctcgtgtcaacgcaaaaccaggacaagcagaataaacaaagagatgctggcagaaggctgggtgtgtcgcctcaggtctacagatgtgctggggccacactgaggaaggccctcgtgtgcatgcagggcgctggccggagcgccttaggacgcatctgaaaacttctcattgcctcagggtttaaaatagccacacttcctgctcctcggagagggtatgcacagaatgtgggtgactcaccgtcggtggttttcgatgtgtctgtcataaggaggtatcatcaaaagcccggcctgtttcagatgttatttttttccaccctcagccatgcggtgctgggagagcagaatgcctaaacccagtgtttgttttgagcgcaga

SEQ ID NO: 7909 - DNA, 587 bp, Homo sapiens
  MAP TO AL162171.1; EXPRESSED IN FETAL LIVER, SIGNAL = 0.99; EXPRESSED IN LUNG, SIGNAL = 1.4; EXPRESSED IN PLACENTA, SIGNAL = 1.3; EXPRESSED IN ADULT LIVER, SIGNAL = 1.2; EXPRESSED IN BRAIN, SIGNAL = 0.79; EXPRESSED IN BONE MARROW, SIGNAL =   1; EXPRESSED IN HEART, SIGNAL = 1.3
tctgggtttattggcaaaggagaacactccctctgtgtgttcctggtcttcagtgcattgaaacttcttttcacaggggttgtatttgtgtatatttcatatatacatataaatccttttacagggaatgaaaaagactcgagtagatgcaaaaaaaattggtcctcttaaactggctgccctaaatggactctccctatctcgagtgcctctgcctgatgaaggaaaggaagtggctaccagagcaacgaatgatgaaagggtatgtatgggacacacagggctttgtgccttctctggaacaaccggtaaatactacgcaaatgccttcatgagattttggtgaattttctaacacaatttaataataaatgagtgttaaggaattttgtaatatgggcctcaaaattggggcaaatgtatagctaatgtcttaatagataatttcaggttcgaatgctgattttttgtttgtttgtttctcagtgttcttttttaccttctcctggccttttggagcagtcttgattttgatggccttaaagtgagaagaaatctacaaaaatacaggagcatacaggggaaaa

SEQ ID NO: 7910 - DNA, 591 bp, Homo sapiens
  MAP TO AC023602.5; EXPRESSED IN PLACENTA, SIGNAL = 3.9; EXPRESSED IN HEART, SIGNAL = 3.2; EXPRESSED IN BONE MARROW, SIGNAL = 3.7; EXPRESSED IN HELA, SIGNAL = 2.8; EXPRESSED IN LUNG, SIGNAL = 3.9; EXPRESSED IN ADULT LIVER, SIGNAL =   4; EXPRESSED IN FETAL LIVER, SIGNAL =   3; EXPRESSED IN BRAIN, SIGNAL = 3.4
ttggtacttctcagcctccgtaatcatgtcagtcaatttcttataataaaactttctttgtacacacacacacacaccctctactggtttgattctctggagaatcctgactcgtataccaagtattggtgtgggctgcttaagactaaggagagaaaggccaagatgaggagcagttgtgccatcatgtgagagtggacatcgtgtgcatcagtgacaacacacaacaggagaaatgtttctgcctaatgtggcacaaaataaagcaagtgagagaaagtatggtctactccttcaacacaaagattctaaaacatcactgccttaaatcaaataacaattctgtgccctacaaactatgtaaccttaggcaagtcatttaaccattctctgcctcagatttttaaaatgtaaaatatgaataataatggtgtgtactttatagatgtgttgtgagaacatgagctcaatacatgctcatgctgctatgtgacttcaaaatttcagagcttctgcctcccttggatggcagctccatttgaatattgcttcattggaactggcatctttacaaggtgagatcatgggtcc

SEQ ID NO: 7911 - DNA, 536 bp, Homo sapiens
  MAP TO AC026206.1; EXPRESSED IN LUNG, SIGNAL = 2.8; EXPRESSED IN ADULT LIVER, SIGNAL = 2.9; EXPRESSED IN HEART, SIGNAL = 3.1; EXPRESSED IN FETAL LIVER, SIGNAL = 2.6; EXPRESSED IN BRAIN, SIGNAL = 2.9; EXPRESSED IN PLACENTA, SIGNAL = 2.7; EXPRESSED IN BONE MARROW, SIGNAL = 2.9; EXPRESSED IN HELA, SIGNAL = 2.4
acaacggggattgaactgtgcaggtctatttatacttgagtttttttcattaaaagttatactgactgtgcctgcctctcctgcctctcctttcacctcctccacctctttcacctttgccactcctaagagagtgagaccggacacctcctcttcctccttctcctcagcctactcagtgtcaagatgatgaagaactttattatgatcctcttccacataataaatagtaaatatgttttctcttccttatgattttcttagtaacatgatatcttctctagctgactttattgtaaaaatacattgtataatgcatataacatacaaaacttgttcatggactgtttatgttatcagtaaggctgctggtcagttggagactattagtagttaattttaggaagtcaaaagttacaggtggaatttcaactctgtgagaatgttggcaccccaacccctgcattgttcaaaggccaactccatttctttgcatcaacttttgtactgctttaaggggcatcagcaaactaaca

SEQ ID NO: 7912 - DNA, 532 bp, Homo sapiens
  MAP TO AC022050.2; EXPRESSED IN LUNG, SIGNAL =   4; EXPRESSED IN BONE MARROW, SIGNAL = 7.8; EXPRESSED IN BRAIN, SIGNAL = 7.8; EXPRESSED IN HEART, SIGNAL =   4; EXPRESSED IN HELA, SIGNAL = 5.8; EXPRESSED IN ADULT LIVER, SIGNAL =   6; EXPRESSED IN PLACENTA, SIGNAL =   3; EXPRESSED IN FETAL LIVER, SIGNAL = 7.6
ggggaaaatgtctctagggcatgtccgagatcttggtggcagccccttccatccaaggcctagaggcttaagacagtaaaatggtttgttgggctaggcccaggacccctctgctctgtgctgcctcaggatgtggtgtcccatgttgcaacttcttcagctccagcataactaaaagaggtcaaggtacagcttgggctgttgcttcagagggtgcaagccttaagccttggtggcttccatgtggttttcagcttgcaggtcacagaagtcaaaaattgaggtttgggagcctctgcctatgtttccgatgatgtatggaaacacctggatgtccaggatgaagtctgctgcaggggcgaagtcctcatggagaacttctgccatggcagtgcaaacaggaaatgcagagttggagcccacacacagactccccaatggggcactgcctagtggagctgtgagaagagggcctccatcctccagacgccagaattgtagatccaccaacagcttgcactatgcacctgaa

SEQ ID NO: 7913 - DNA, 589 bp, Homo sapiens
  MAP TO AC022555.2; EXPRESSED IN PLACENTA, SIGNAL =   4; EXPRESSED IN ADULT LIVER, SIGNAL = 4.1; EXPRESSED IN HELA, SIGNAL = 4.1; EXPRESSED IN HEART, SIGNAL = 3.7; EXPRESSED IN FETAL LIVER, SIGNAL = 3.8; EXPRESSED IN BRAIN, SIGNAL = 3.5; EXPRESSED IN LUNG, SIGNAL =   4; EXPRESSED IN BONE MARROW, SIGNAL = 3.6
tgtctcaactccaaaacccactcctcccgcatttctggtttctgtgatgggatcaccattcttgtagttgcccaggcttgtaccgttgggttcaccttttacttcttcctcttcattgctgcatgccaaactcattcaacttctttatcctgaggctacattacagcatgcattctgtccatccccatctctccattcccattgcccttgtcctagttgaagttctcaattcttattgccagagccaaggcaataactttgtaatcacccttccatcatcttccccaaaccatcatacctgtggctaccaaattcatttttataaagtattattttattatcaccatggcatgacacagcaagaaggccctccccagatgctagcctctcaatcttggacttcccagcctccagaactgtgagccaataaatttatgtttattagaaattcctagtctcaaatattctgttatagcaacacaaaatagactaagacaaactctcaaatgtggagctccctatctaaatcctttccacatctcgttcttttccatggaacatattgtccaccaggcaacagttggagttt

SEQ ID NO: 7914 - DNA, 591 bp, Homo sapiens
  MAP TO AC016057.3; EXPRESSED IN PLACENTA, SIGNAL = 1.6; EXPRESSED IN ADULT LIVER, SIGNAL =   2; EXPRESSED IN HEART, SIGNAL = 1.7; EXPRESSED IN FETAL LIVER, SIGNAL = 1.6; EXPRESSED IN BRAIN, SIGNAL = 1.6; EXPRESSED IN BONE MARROW, SIGNAL = 1.7; EXPRESSED IN LUNG, SIGNAL = 1.8; EXPRESSED IN HELA, SIGNAL = 2.3
ctgggtggccacattttaacataacaaaagatgctcaggcaatttctcaatttctctaagattgttctcggacatttttttgtatcaactttgattagagcaggtataccaggtaacatgcaaacagacacaggatgtgactcctcaggattaagaaggtatccatgctaagtaactgtgctcttaaaaaaggaagtaacgataatggtgttaattccagtaagtttaaataaacgtgatgcagacaatacctaacttaggttggtttgactcatgatttttgactttatgatgtgtgaaagtgatgcatattcagtagaatctgtacttcaaattttaaactttgatctgttctgggctagcagtatgtggtattctcctgggatgccgggcagtggcagcgaggaacagaacccagtcagccacatgatcaggagggtaaatggcacatactttacagtgtaagtagtataaatttataactggcatattcctacaaaatgcccatttttgacttgtaatatttttaacttattgtgggtttaccagaagataacactgtaataagtggggaggcactgcacttacctg

SEQ ID NO: 7915 - DNA, 600 bp, Homo sapiens
  MAP TO AC010769.3; EXPRESSED IN BONE MARROW, SIGNAL = 3.4; EXPRESSED IN LUNG, SIGNAL = 3.4; EXPRESSED IN BRAIN, SIGNAL = 3.5; EXPRESSED IN HEART, SIGNAL = 4.3; EXPRESSED IN HELA, SIGNAL = 4.7; EXPRESSED IN ADULT LIVER, SIGNAL = 3.7; EXPRESSED IN PLACENTA, SIGNAL = 3.4; EXPRESSED IN FETAL LIVER, SIGNAL = 3.9
cttccccatcctcttccttcctcagtgctcatcttcaaactctatcagcgggcaaagcatgtgtacagcgaggctgcgcgagtgctccagtttaagaagatatgtgaagaagcacctgaaaacatggtccagctgctgggagagttgatgaaccagagccacatgagctgccgggacatgtatgagtgcagctgccccgagctggatcagctggtggacatctgtcggtgaggcagcctggtgggggccaagggatgccatcaaataatattgtttaaattaatggaaaaaaatgcaacatttcataatctacgggaatgaagatcattccccacttcctatatgaggagtctctgatgatacagagctacacttgttcccttctaaatacctgtaggatgaaagatttgctacctggctccatgattttatgaggctctgggtttggagtcagtttggagtcagctctttacatcatgagaaagacctttccgtctttggatgattaggcctttcaggatggtaactttgctcagagctgggccctgttaactttcttatgatatgttttattatactgctgctctgccagaaactcct

SEQ ID NO: 7916 - DNA, 522 bp, Homo sapiens
  MAP TO AC022758.3; EXPRESSED IN LUNG, SIGNAL =   4; EXPRESSED IN ADULT LIVER, SIGNAL =   3; EXPRESSED IN BRAIN, SIGNAL = 4.4; EXPRESSED IN PLACENTA, SIGNAL =   4; EXPRESSED IN HEART, SIGNAL = 2.8; EXPRESSED IN FETAL LIVER, SIGNAL = 4.2; EXPRESSED IN BONE MARROW, SIGNAL = 3.7
gatgccatggaccacttacctgactctgaccttccttgcaccaatggccagcccccacctggagtctggttgcagtgggtgcagatgacaaaggggaagtgaagtggggcccagggccccaggcagtaagaggaattgaggatctactcaggggaagtgagaggcatttggagggagactgcctgtaaggaaaggttttaaaacctctccccatctctctctctctctctcacacacacacagacacacacagacacacacacacacacaccccttacattgtcctgccaggctttatttagaaagcacaaattcaagacaatgactacaaatcattgaaaccccagtgtagagcccttctgagagtgaggccctatgtgactgcagtaatcatagtcctcttaagttgcccagcaagcaggagagagtaaatggataattagaaagcactgcgaagattcagcaacagggtattgtggagacccagaagaggaacagccatctcaatgtgggtttgcctct

SEQ ID NO: 7917 - DNA, 565 bp, Homo sapiens
  MAP TO AC018528.3; EXPRESSED IN HEART, SIGNAL = 2.5; EXPRESSED IN BRAIN, SIGNAL = 1.5; EXPRESSED IN BONE MARROW, SIGNAL = 1.1; EXPRESSED IN LUNG, SIGNAL = 1.4; EXPRESSED IN PLACENTA, SIGNAL = 1.3; EXPRESSED IN ADULT LIVER, SIGNAL = 1.5; EXPRESSED IN FETAL LIVER, SIGNAL =   1
cctcactccctgcaaagttcttactgttgttactgttaacataaacaactcagcacagataaactctgtattgttctgtaccacattagcaaaattagttagaaattccaaagcatttagctcgccagtccttggtctgtacaagaggaggattgtttaaaaccttaattacataacttactaaaatatttcctatgaaactcataaatgaatctctgcaagttccagttaatcacttccatgtcttctagaaatgatggtatcttggataagtttatttaaaaactcaatatttattgtaatattcaacattttggaaacatctaccataatttgatgttctttcaaggcccatcttcctagtgtctgttgtcattttaatcacccttttcttctctcagtgacttcagaacctccttttttattttctgaggattctgagggactgtgtgttgggattgtgtggagtgagtccaagggatgccaggctgcatcgtagctctggaatttacttgcaaccacaggctctcccaaccctgttatggggcttcagagtttggaggtg

SEQ ID NO: 7918 - DNA, 552 bp, Homo sapiens
  MAP TO AC013552.3; EXPRESSED IN ADULT LIVER, SIGNAL = 1.3; EXPRESSED IN PLACENTA, SIGNAL = 1.3; EXPRESSED IN BRAIN, SIGNAL = 0.89; EXPRESSED IN BONE MARROW, SIGNAL = 0.99; EXPRESSED IN LUNG, SIGNAL = 1.1; EXPRESSED IN HEART, SIGNAL = 1.3; EXPRESSED IN FETAL LIVER, SIGNAL = 1.1
actgttctcccaaccaggtgtcatctcccttttctctgaaaccccatataacctctctgttattttaaataagattttagatgtgaaagcccggcataagatctgggacataggcacccagaaatctcagcttaaccacttgttttatcttattttgtggccacttgtatatatgactattttgcttttggcatttaatggagtaaacttgacttttctacctgtttttttaaataatactttatttgataaatatatcatatatgcaaaaagctttaaattgaatgcacagtttaaagaatcataaaatgagcacttttgtctttgactccgagcttaagaaagggattagctgtactgcatggagccctccctgaccacacctcctccctcctggatgaaccaccatcctgaattttgtggttataatttccttgctttcttttatagttaatctgcatgtggacgattttgtgatttgctttctttctcgcagtattttgcttttgagatgcatccatacagctttaatgttgcagtccatcactgctg

SEQ ID NO: 7919 - DNA, 599 bp, Homo sapiens
  MAP TO AC021239.3; EXPRESSED IN ADULT LIVER, SIGNAL = 4.5; EXPRESSED IN HELA, SIGNAL = 3.8; EXPRESSED IN HEART, SIGNAL =   2; EXPRESSED IN BRAIN, SIGNAL =   2; EXPRESSED IN BONE MARROW, SIGNAL = 2.2; EXPRESSED IN LUNG, SIGNAL = 1.3; EXPRESSED IN PLACENTA, SIGNAL = 2.5; EXPRESSED IN FETAL LIVER, SIGNAL = 2.5
cttgagaggggacagaggtgagttggtgctgacaaaagcttaaagttcatgaatgggaaagatgaataacccaagatattacaaggaagggtgggacacagacaggaccatgatgatggtgcataacttgaagattcgccaggtaaagaatttcttccctaattatggaagcaattcatttttatcagcaaatatttctggaatatccacacattctaggcagaaaacaagcagaaaaagaaatacgctctctgaccttatgaagattaaattacaaacaggttggaggtttgatgtgatacccaacctcagttttcgcgattccctagagggctctcaggacacagaaaggctgccacagtcattattacagtttattatatctaaagaatacagattaaaatcagcaaaggtagatggcatggcaagaaaccaggtgcaggcttccaagtgtctcccatggaggaacacagacaggacttaattttctgagaaactatgtgtgataacatgtacaaaatattgccaaccagagaagctctcctgagctttggtgtccaagttttttattggaagtcagttacataggcatggggcac

SEQ ID NO: 7920 - DNA, 538 bp, Homo sapiens
  MAP TO AC018516.3; EXPRESSED IN HELA, SIGNAL = 7.6; EXPRESSED IN HEART, SIGNAL = 4.8; EXPRESSED IN FETAL LIVER, SIGNAL = 4.7; EXPRESSED IN BRAIN, SIGNAL = 5.5; EXPRESSED IN PLACENTA, SIGNAL = 4.1; EXPRESSED IN ADULT LIVER, SIGNAL = 5.4; EXPRESSED IN BONE MARROW, SIGNAL = 5.2; EXPRESSED IN LUNG, SIGNAL = 4.1
atttgtttggggtttgttcgtttagtatgttttagtttggggcacagttaatgatgccctctcaggtctaataggttaccacttgtctccaagacacttgacaacttgctcatggagtgctctagatgccactgccatccccgaaacctccttatctgctagcatagcctccactgtgtctgccacggctgagccagaggcgctccggtggacagaccccattactggaacctgcgtgtattagtctgttctcacactgctattaaagacatacctgagactgggtaatttataaaggaaagaggtttaattgactcagttcagcatggctggggaggcctcaggaaacttacgaccatggcagaaggggaagcaaacatgtccttcttcacatggcggcaggagagagaagtgctgagcaaacagggaaatgttccttataaaccatcagatctcatgagaactcattcactaccacaggaacagcataggggtaactgcctctgtgatttcattacctcccactgagtacctccca

SEQ ID NO: 7921 - DNA, 547 bp, Homo sapiens
  MAP TO AC022714.2; EXPRESSED IN LUNG, SIGNAL = 2.6; EXPRESSED IN PLACENTA, SIGNAL = 2.2; EXPRESSED IN ADULT LIVER, SIGNAL = 2.9; EXPRESSED IN HEART, SIGNAL = 2.2; EXPRESSED IN FETAL LIVER, SIGNAL = 2.4; EXPRESSED IN BRAIN, SIGNAL = 2.7; EXPRESSED IN BONE MARROW, SIGNAL = 2.7
aagaaggggagctcagaagcatcagggtaacaatgggacaaacatggggtctggttcgttccaccttggaactttctcacactgataatgaggaggaaggagagtataatgaagtaacagaagaggttacagagcaggtttatttgccagccaaagctaaagcggcaaaggagggagaggttcatccctacccttctagacgccctcattattattttgaagaaaaagaccctccagatctttcttttctggaggacactgggcgaaaactagttaccccggtgactgttcaagcagtgccttgagcgaccactcttaggtttattcaggcaggaattcagcaagctagatgagagggtgatttagaggctcagcagttccctattagaatacaccccccagatcaacagggaaatattatagctacatttcagtcttttattttaaattactcaaaaaatttaaataagctataaatcagtatggaccaggttctccttttctaatgggactgttaaagaatgttgccatttccagtcggatgatt

SEQ ID NO: 7922 - DNA, 524 bp, Homo sapiens
  MAP TO AC021641.4; EXPRESSED IN BONE MARROW, SIGNAL = 2.6; EXPRESSED IN LUNG, SIGNAL = 2.2; EXPRESSED IN ADULT LIVER, SIGNAL = 2.4; EXPRESSED IN HEART, SIGNAL = 2.2; EXPRESSED IN BRAIN, SIGNAL = 2.3; EXPRESSED IN PLACENTA, SIGNAL = 2.2; EXPRESSED IN FETAL LIVER, SIGNAL = 2.1
ggtcctgccattcattaagcaacatatttgttttagtttatccagggtttagttgaactttagtgggaaggcctgccaacgggctcgaaccagaagtttctaaaagcattcttttgttaactgttctcaaattaataaagccaggagttaacacatcacttttgattttataagatgaatagttctgaaaaccttatttttccccatccctcctattttctacctcttgtggtttatatttagctttattaaatagtgctgttcagttcctgaatgactcggtggggtaaacactggatgctttgtctcggatagtggcgggtctgtctgccacgcgtggcgaatttgaatggccaatgccagcagtgccagccgatcaagctggcaatgatggaacttctgcaggttctggaagaagtcctgctgtcagtcttagctctttatctctttctgggcctttacacatattttagtggcaatttgtaagagccacttaatttgcatctttgggaaaaatcagccag

SEQ ID NO: 7923 - DNA, 554 bp, Homo sapiens
  MAP TO AC009334.3; EXPRESSED IN PLACENTA, SIGNAL = 0.99; EXPRESSED IN ADULT LIVER, SIGNAL = 1.7; EXPRESSED IN FETAL LIVER, SIGNAL = 2.2; EXPRESSED IN BONE MARROW, SIGNAL = 1.9; EXPRESSED IN LUNG, SIGNAL = 1.7; EXPRESSED IN HELA, SIGNAL = 3.6; EXPRESSED IN HEART, SIGNAL = 1.2; EXPRESSED IN BRAIN, SIGNAL = 1.3
ttgggatggacttctagcaacagcttttaccctattattggagggactctgtcattttaaaaacaggttaagaatccttactcccccaacttgtttttatgacttcaaaatcaagttagcaagatgacccatagttgctatcatattttcttattttgtgattgtttctaatgtgctcttaactgtattatttattatagatttgatctggaagatgtgagaaacatgggattgtttcagaagtggtctgtcattcctattctgggactaatagagacctctctatatgacaacatactcttgcataatgctcttttacttcttctccaaattttaaattcttgttctaaggtagcagatatgttgctggataatggtctactctatgtgttatgtaatacagtagcagccctgaatggattagaaaagaagtaagtttaaaattattatttaaaattacatctgataaatactttagaacaggaaaactttagtattagtttactttactacatgagtttacctatgtaagaagcctttctgtgtacctctga

SEQ ID NO: 7924 - DNA, 535 bp, Homo sapiens
  MAP TO AC013657.3; EXPRESSED IN ADULT LIVER, SIGNAL = 2.6; EXPRESSED IN HELA, SIGNAL = 2.2; EXPRESSED IN HEART, SIGNAL = 1.4; EXPRESSED IN BRAIN, SIGNAL = 1.2; EXPRESSED IN BONE MARROW, SIGNAL = 1.4; EXPRESSED IN PLACENTA, SIGNAL = 1.5; EXPRESSED IN FETAL LIVER, SIGNAL = 1.4
tgggtccatttgctcttaggaacttccagggcaccccagcaccacttgtttttgcctttgtctttgctttccttccccacatccctacaaaaccaaacagacttgctctcccagcttcacaaagagaaacggattccaagaggaaatcacttcacagcaagtgagccctgggaagaattaaagactgaggagcccttgtaatgagattaagggaaaaatgcttttgtgcatccaactcagacccgtcctcagtatgcaggacgcgagtggtgccaaaacaaacatgggcattgttttgggaaggaaaaggttaacaagctatgaaaacaaaattagagatattttcaaagcatgaccctcagcagaatgagtagaatgcagtctacccaggcagcagcattccctcctcacttgacatttatcctgcagcttgtgggggagcagcttcggctgttatgttcccaacggatgaggagggagctgcactccttgcggcggagaagccgcatccactgggcagaggcataaaagcttg

SEQ ID NO: 7925 - DNA, 557 bp, Homo sapiens
  MAP TO AC022637.3; EXPRESSED IN PLACENTA, SIGNAL = 1.1; EXPRESSED IN ADULT LIVER, SIGNAL = 1.4; EXPRESSED IN HEART, SIGNAL = 1.3; EXPRESSED IN FETAL LIVER, SIGNAL = 1.2; EXPRESSED IN BRAIN, SIGNAL = 1.4; EXPRESSED IN BONE MARROW, SIGNAL = 1.3; EXPRESSED IN LUNG, SIGNAL = 1.4
tgtgtccaaagccattgttgacatttggcgaattgcctcatgaattttcacttgtgagtttttgattactttccattttacaatgtaaactgagatgctgtgtgcggctgtttgatccaagatcatcaggtggccatgtgcggtttccacgggaaccagaactttatccagcatatcataggccaccatttttttctctattataaagaagctatttttctaataggggtgtactgcacactgcaaatgttatccttgaaactgcctgttctctgagaaaggaaaatgttttcactcttctgaaaattaaaaaatattatgattattgtccataagcccagaagtagaaaggaaatattgtcattatttattatagatgaaacttagagcttgaaatataacttagaaaattattctcctatctaatgggctaaaagcaacaagcagtcaaagtagtaaaggcaaaaaactgagtgagaagcaatttaatttggaaaatttatggtaggaaacataattttttctcgataaccttccccaatgccccactcttacac

SEQ ID NO: 7926 - DNA, 547 bp, Homo sapiens
  MAP TO AC007326.28; EXPRESSED IN HELA, SIGNAL = 2.6; EXPRESSED IN BONE MARROW, SIGNAL = 2.2; EXPRESSED IN LUNG, SIGNAL = 2.3; EXPRESSED IN ADULT LIVER, SIGNAL = 2.2; EXPRESSED IN BRAIN, SIGNAL = 1.9; EXPRESSED IN PLACENTA, SIGNAL = 2.1; EXPRESSED IN HEART, SIGNAL =   2; EXPRESSED IN FETAL LIVER, SIGNAL = 2.1
aacaaggggacacaggagtgtgtttggccaggtgggccacctgctgctgctgcctccaaatgttcatcccagccccccacgcactcgggggattttcaaagggtctcacgtgttgggtgccagagacaccctcctgggccttggattcctcctctgtgatgaaggccggggctgctggctcctccacaccacactcggcccccagcagacaggcaacaggggccttgtcccactgtagctgtggtcaggtggtccagggctagacggtcctatggggagctgaggcccccacctcgagatctccctgcccaagacaccagtggggttggggtgggtcaaaggcctgttcctccagggcccatagcaggggcttcttaatctgagggtgagagggtttgggaggtgacaccccaactcccaccccaattctcaccctccacttctcaccccacaagctatcaccatgactgcccacctccacttctcacccccacctctcacccctacctctcacctgccgctctcacctaccacttctcacccccaa

SEQ ID NO: 7927 - DNA, 534 bp, Homo sapiens
  MAP TO AC027350.1; EXPRESSED IN PLACENTA, SIGNAL = 1.9; EXPRESSED IN ADULT LIVER, SIGNAL =   2; EXPRESSED IN BRAIN, SIGNAL = 1.7; EXPRESSED IN LUNG, SIGNAL = 1.7; EXPRESSED IN FETAL LIVER, SIGNAL = 1.5; EXPRESSED IN BONE MARROW, SIGNAL = 1.6; EXPRESSED IN HEART, SIGNAL = 1.5
gaagtcccacctccagtttgccacaatagacagcatatgctcagggactagctcacaggtcaatttgaatggagtggcaagaagaggaaggcctcactcaagggcctctatttcctgacatagtactaccagctccaagaagacacctgggccctgaagaacatggcagtggcatgccattttcattctgcctgtttttgttctgacttctctggtcaaaatcccaggtaagtcaaagtgctctagacttggagtcataaaacctgggtttcctgccactggccagctgttacttttagcaagaggtgccccttcggcaaaatgggcataacaatatctacctcagatatcaattgtaaggattaaatgagataatgggtaaagaatgcttactctgggaccagcagcctataaaaactagatgtcactaggatcactttgatgacaaggaaactgatgctttgagcaactagcaagcgcagcatcttgaattcaaacccacacctcccagactcctacatccatggccttcac

SEQ ID NO: 7928 - DNA, 500 bp, Homo sapiens
  MAP TO AC016113.4; EXPRESSED IN BONE MARROW, SIGNAL = 2.4; EXPRESSED IN LUNG, SIGNAL = 2.1; EXPRESSED IN ADULT LIVER, SIGNAL = 2.6; EXPRESSED IN HEART, SIGNAL = 1.8; EXPRESSED IN BRAIN, SIGNAL = 2.3; EXPRESSED IN PLACENTA, SIGNAL = 2.3; EXPRESSED IN FETAL LIVER, SIGNAL = 2.1
ctggtctgatggtgtgttggaattggttccttctggtgggttcttggtcttgctgaatgaagccacggaccctcgcggtgagtgttacagttcttaaagatggtgtgtcgggagtttgttccttcagatgttcgacagtgtttggagtttcttccttctggtgggttcgtggtctcgctggcttcaggagtgaagccacagaccttcgcagtgttacagctcttaaaggtggcgcatccagagttgtccattcctcccggtgggtttgtggtctccctggcatcaggagtgaagctgcagaccttcgcggtaagtgtgacagctcataaaggtagtgcagacccaaagagtgagcagcagcaagatttattgaggaagagcaaaagaacaaagcttccacatcctggaacgggacccaagtgggttgccgccgctggccccggtggcctgcttttatcccttatttggccccaccgacatcctgctgattggtccatttt

SEQ ID NO: 7929 - DNA, 557 bp, Homo sapiens
  MAP TO AL139352.8; EXPRESSED IN HELA, SIGNAL = 2.5; EXPRESSED IN PLACENTA, SIGNAL =   2; EXPRESSED IN ADULT LIVER, SIGNAL = 2.1; EXPRESSED IN HEART, SIGNAL = 1.5; EXPRESSED IN FETAL LIVER, SIGNAL =   2; EXPRESSED IN LUNG, SIGNAL = 1.8; EXPRESSED IN BRAIN, SIGNAL = 2.5; EXPRESSED IN BONE MARROW, SIGNAL = 2.9
ctctctgaagctctcacggccacaggtgcccaggcctggccattcctccatgggaagcttctgcactcacttcctcagtgctggcctgggtctgcggggcaagctgagtgtcccggggcagaatgctttctggagaggactccgctaccagctgtggctgaaggacctggcacagggcctgttcctggggcccttggcacaccatcctcctccagccgagagccgtaaggaagaagtttccctagtgaagggcatcaacaggccccaggaggtcctcctgcctgccaggacacccgtggtcctccccatcctaactagttacaattaaaatgaatctagcaaacacagacagccaggccctcccacgccctgctctgggatccaggaacaacgacggcgcccaggggagcccacacacttaaggggagcagcttacagtctcactgtttattgagcagctactgtgttcttgatgcttttgtaaaccagaaagtgtctgagacaggtctcaatcagtttagacatttatttttccaaggttaaggacacgcccagta

SEQ ID NO: 7930 - DNA, 510 bp, Homo sapiens
  MAP TO AC027304.1; EXPRESSED IN PLACENTA, SIGNAL = 1.8; EXPRESSED IN ADULT LIVER, SIGNAL = 2.1; EXPRESSED IN FETAL LIVER, SIGNAL = 1.6; EXPRESSED IN BRAIN, SIGNAL = 1.6; EXPRESSED IN BONE MARROW, SIGNAL = 1.5; EXPRESSED IN LUNG, SIGNAL = 1.8; EXPRESSED IN HEART, SIGNAL = 1.6
catcagaggaagcgttaggccgtaaatagtgttattttagacactctaggacattttaaagagcaagaacaagcctatagctcaccttgcagtgctctccaggttaatcagtgattctttgactggtgtcagggacatttggtgggtagtgattggcatgcctgtattttcctttgtcaccatttcttcaggttcatgtagaaaactgcagtcagaatctacagacaagatcctgtgactggttctcaggagaatccttgtgacaaacatctggcagatatgttttaaagtcctacgatagctgtcagaaagttgatggctcctgatacgttacattgtcagtccagacacactaattctttagtgggattattgatgttgttgtagcacatctgtgtttaattgcagacaggaagctgaaagagaaagcttgttgtgattacgacctctgagatacctattatatctgaacttaacaatcaggtcaaaacttagtggtgggtgggaatg

SEQ ID NO: 7931 - DNA, 572 bp, Homo sapiens
  MAP TO AL133232.9; EXPRESSED IN PLACENTA, SIGNAL = 1.8; EXPRESSED IN ADULT LIVER, SIGNAL = 1.9; EXPRESSED IN HEART, SIGNAL = 1.4; EXPRESSED IN FETAL LIVER, SIGNAL = 1.6; EXPRESSED IN BRAIN, SIGNAL = 1.8; EXPRESSED IN BONE MARROW, SIGNAL = 1.9; EXPRESSED IN LUNG, SIGNAL = 1.8
gtcaccgtctcctaactggccccggttttggaacttttctctctagcctcccatctttccaacatgtgtccagttttcttccacaatataaacacattaattcttcccggagtgctgaggggccatgaccatgatgatctcaacactctgggcattttgggccagatgattctctgctggggtgcggtgggaacatctcttgtacattgtaggatgttgagcagcacctccagcctcaacccgcaagatgccagcagcaccctccccgagagtgtgacaaccaaaaatgtctccagatgttgccaaatgtcaagggcagtaccggccctgcttgggaacctctggttggaaggatctctctatttccaccacctctcccaccatcccagcatccctccctcagccacggttatcattggtgtctcagttcccacccttgatttcttccagtctattccccagaacctgccagggagatgttttctggaaagaaaacctgatctcccgtcactcctttgtctgaaactcttctagtctccatggtgctcttggctaacatcccaccattcgct

SEQ ID NO: 7932 - DNA, 571 bp, Homo sapiens
  MAP TO AC026414.2; EXPRESSED IN LUNG, SIGNAL = 4.9; EXPRESSED IN HEART, SIGNAL = 4.1; EXPRESSED IN FETAL LIVER, SIGNAL = 4.5; EXPRESSED IN BONE MARROW, SIGNAL = 5.4; EXPRESSED IN HELA, SIGNAL = 5.8; EXPRESSED IN PLACENTA, SIGNAL = 5.5; EXPRESSED IN ADULT LIVER, SIGNAL = 7.3; EXPRESSED IN BRAIN, SIGNAL = 4.9
gacagtggccctcttctcacagctccactgggcagtgcctcagtccccactggggactccaaatatgaagcctccaacctcatattcccctcagcaccgccttagtagaggttctccatgagggctatgcccccacagtaagctgttttctggacatccaggctttccatacatcctctgaaatctaggcagaggctcccaagcttcagctcttaccgtctgtgcacctgcaggattaacacaatgtggaagctgccaaaacctttggcttgcattctctggagcagaagcttgagatgtatctgggtatctcttaaccaaggccaaagctggggcagctggaatgcagggagcagcatcctgtggttatgcagggcagggggtccctgggcagggcccaggaaaaccattcttccctcctagtcctcttggcctgtgataggaagggctgccacagtggtctctcaaatgccttggaagcatttttcccattgtcttggctattaatatttgattccttttgtgcaaatttctgcagctgacttgaatttctcccccaaaaattggattt

SEQ ID NO: 7933 - DNA, 587 bp, Homo sapiens
  MAP TO AL157997.2; EXPRESSED IN ADULT LIVER, SIGNAL = 1.5; EXPRESSED IN BRAIN, SIGNAL = 1.5; EXPRESSED IN LUNG, SIGNAL = 1.5; EXPRESSED IN PLACENTA, SIGNAL = 1.5; EXPRESSED IN HEART, SIGNAL = 1.2; EXPRESSED IN FETAL LIVER, SIGNAL = 1.2; EXPRESSED IN BONE MARROW, SIGNAL = 1.6
gtcagtgctctgctccactgggtccagcacatagataaaccattggttctttttttttccctggagacctcagccctggccaactcagttctgctccaacctggaccagttgctctctgggcctggagcccagctgtctttctaggatctcctgtcactgtcctgcccacagtcctccatatctttcatgtcttggtttatttccttattgcactgaatcatctcctctgcagaagacaaaaagtacaatttttgagacatggctgtctaaaaacactctattctatccttacactggattaaattccacgttgaaagttgttttccctgcagtatattgagggcaatgctctactttcttgtactctccactgctggttttgagaagttcaatcccattctcatttctgatcctttgtaaaatgaccttcgtttctctgtggaatctcaggtttttctctttatctctgatgttctgaaaactcacagtaatgtccttggtctggttctttttttattcatggtattggtcaaaggaggaatatttcaattcagaccaagagtcagccaacttttcctgtaaaggg

SEQ ID NO: 7934 - DNA, 527 bp, Homo sapiens
  MAP TO AC021037.4; EXPRESSED IN ADULT LIVER, SIGNAL = 4.5; EXPRESSED IN BONE MARROW, SIGNAL = 3.9; EXPRESSED IN PLACENTA, SIGNAL = 4.2; EXPRESSED IN HEART, SIGNAL = 5.1; EXPRESSED IN FETAL LIVER, SIGNAL = 3.5; EXPRESSED IN LUNG, SIGNAL = 4.3; EXPRESSED IN BRAIN, SIGNAL = 4.1
gaagatgggaggagtggagctcaaatttaacacaaatgccaaagtataattcatctatgttttcttcctctagtactttggaagtgttgctgaaatcatcaggaatcatcaacatagtcctttggttcttattgacagtcagaataacacaaaagattccaccagactgaagtatgcagttaaagtttcataaagggggaaaaaaaagatcaataccattgcttcagacactttcccaaagtttctccttttgagaaaaagtcccaaaacttcatattttggattatgaatcatccagtaataaaatggaagatggagtcagctattgaagtggtcatccatttctttttaagaagctcatgtggacttgttctattgcctgacctgatgaactgttaatatctggtgaggttgagttatcatgctactaatattttccaaataaatatttttatttttaaaaataagtgtaaagtatattatcaaaataagaaaataatgctcttgcataaaacaaagtggctgga

SEQ ID NO: 7935 - DNA, 540 bp, Homo sapiens
  MAP TO AC022429.2; EXPRESSED IN PLACENTA, SIGNAL = 1.8; EXPRESSED IN BONE MARROW, SIGNAL = 1.3; EXPRESSED IN LUNG, SIGNAL = 1.7; EXPRESSED IN ADULT LIVER, SIGNAL =   2; EXPRESSED IN FETAL LIVER, SIGNAL = 1.4; EXPRESSED IN BRAIN, SIGNAL = 1.3; EXPRESSED IN HEART, SIGNAL = 1.3
ggctgagagggtcacagaagttcacaaatgtgaaagtgcttggcagactataaagcactgaagatattctgcgttttgctactattatgtctgtttgttcactagaagaaagcatctatgcagatattgaaacagccaaagcgaggaagaactccatgatctcccctcgcctcacagacttaagccaggaaggcagtccaggaatccacaataaacaactgcagctggcctgttctgtttctcgcacagtggacctgagttcttttctagaatctgttctgcagcagggaaggtaaagctggtaagccgtggagggacccagccagtggcttgtaggtggtcaagctaaggaaagccgtgggctggtgatgccctacgagttaggagtagaaagccatcctatttgctaaatgcaactcagaaacagggtagaccctcttcatctctgcaccggctgtccacccaagtgaggtgacaacacactgcaaaggcagggggctggtcctgtggtttcccatctggtcttgtttgccttttgga

SEQ ID NO: 7936 - DNA, 525 bp, Homo sapiens
  MAP TO AL161642.2; EXPRESSED IN HEART, SIGNAL = 1.2; EXPRESSED IN PLACENTA, SIGNAL = 1.8; EXPRESSED IN ADULT LIVER, SIGNAL = 1.7; EXPRESSED IN FETAL LIVER, SIGNAL = 1.6; EXPRESSED IN BRAIN, SIGNAL = 1.9; EXPRESSED IN BONE MARROW, SIGNAL = 2.3; EXPRESSED IN LUNG, SIGNAL = 1.4
gtccagccagactgaccttcatctaagagtttccatgttggttcccatggaggtgatagattatagttgtctaaggacatgaaccctgccctgtttacagtagagacacagtagtgcttgctggactatgctatgtgagtgcacggggcgggtggtatacagtcgtccccacccgacacagtcagtactaattctgaccttccatctgaccaccacaccacgaccagatattgctttcttcttttattcggaagcagacacagggtgggaggcagtgcgacacctcctggtgagaaccaggataacagcagtcagagtcagggacaccaccacagccaggcctacgcccagcagcaccactgaggtgtcagaaggcaaagcccactgctctacttcatggtcacccctcctgtccaggaagatcagtggccccacggtgacatctgcttcttctgtcactgtgaaaggagaacacacaaccaagggtcatcttagtccctaaccgggaactgggttggaggtttt

SEQ ID NO: 7937 - DNA, 559 bp, Homo sapiens
  MAP TO AL135936.10; EXPRESSED IN HELA, SIGNAL = 3.3; EXPRESSED IN PLACENTA, SIGNAL = 3.8; EXPRESSED IN ADULT LIVER, SIGNAL = 4.1; EXPRESSED IN FETAL LIVER, SIGNAL = 3.5; EXPRESSED IN BRAIN, SIGNAL = 3.7; EXPRESSED IN LUNG, SIGNAL = 3.4; EXPRESSED IN HEART, SIGNAL = 6.7; EXPRESSED IN BONE MARROW, SIGNAL = 3.8
tttgataatgaagcaggccctgatactggctcccagggcttatccccacctctgctacacccacatgagcatcagaacaatgtggcctttaattttttacagacaaaccctagggttttcttcccaaggaatcacatcgactagcatttatccagaataatttgctgttggtttagaagttcatatgtggggacaagaatgtttctgaaaaaggcccagaaatggctggagaaaataatctgtttgtttgctcccctgcaacaatagaagcaagtgtaatgattcatggctcctgagggaagacagctctgcttcctgcaggattctccctgggcagcacctctccaaaagcatttgccagggtcaaggtgtctataaaagattgggaactagatggaagaagtgttgcagagggaatttgggagaaaaggtcttggaggtgccgcaggctgcaggtgcactggccaggaaggtagacaccaggggtgcggtgatggatttcagacacagaccgctgcgggggagggagggaagaatgcctgccctaatggacccacta

SEQ ID NO: 7938 - DNA, 594 bp, Homo sapiens
  MAP TO AC005481.3; EXPRESSED IN HELA, SIGNAL = 2.5; EXPRESSED IN PLACENTA, SIGNAL = 4.7; EXPRESSED IN ADULT LIVER, SIGNAL = 4.4; EXPRESSED IN HEART, SIGNAL = 4.2; EXPRESSED IN FETAL LIVER, SIGNAL = 3.6; EXPRESSED IN BRAIN, SIGNAL = 3.9; EXPRESSED IN LUNG, SIGNAL = 3.7; EXPRESSED IN BONE MARROW, SIGNAL = 3.7
tttgcccaggaatctctgtctcctgctgccattcatggcacccaggctgtttgtgccaaggggcacctgcaggccagagctgagctgccctcagccctccttcggcttccctcccatgcttgttggtgcccaaagtccagagggggctgaggtggcagggggctggtgtgtcagcactgcccagagtgtcacacctgctgggctgtgacagcgcccgggctcagccctgactttgctccaagatcagcatgggtgccaacagcagggagaatccaggtagcaggaacaggcacttcctgcaggggcaaggatcttcttcctgggtgcctaagtgtgcagggctgcctgggtctgcagctacggtttgggcagctgtagctcctccccagcgtgggggtgggggtggggtcctgcctgccgcgtggaacaggatgcccaggttacgcctccctgctgcagctggtgtgatggtagtggccactccagagggcctgtcactgccatccctggctgaaatctggaagcaacaacatctcggctctgctgccgtttgtcccagggaaaacctcttggtgctgcacacaacaccaattt

SEQ ID NO: 7939 - DNA, 547 bp, Homo sapiens
  MAP TO AC022317.4; EXPRESSED IN ADULT LIVER, SIGNAL = 1.9; EXPRESSED IN FETAL LIVER, SIGNAL = 1.7; EXPRESSED IN PLACENTA, SIGNAL = 1.2; EXPRESSED IN HEART, SIGNAL = 1.5; EXPRESSED IN BRAIN, SIGNAL =   2; EXPRESSED IN BONE MARROW, SIGNAL = 2.2; EXPRESSED IN LUNG, SIGNAL = 1.3
tatgccacttccctttttcctgatgagttctcactcatctgtcaggattccagcacaaatgtcacttcatccttccctgattcttccaggaagtaaaccccatttctctactatattttttattgtagcatctttcacttgtatttacctgtctcccttacctgggcacgggaaattcctaagagcatcaagactatcttatgcatctttacaactgatttctcaatccctctcctctctagctactatacagttcagaacaatgttttcacagagtagacacatgacaaaagtaagtagaacatttctataatgataaaatatttagatttgaaaaattaaattttaacaattattcattaatctatttaatagctgcctcgagtaagatttagtaaaataaatttacgagttaacaaaggaaataagtaagcattatatggtttattattgatatttcagtaactagatatataattgggtttaactacattcactttgagagtattagtagtaattagaaagctgaagacattcatgtcagaca

SEQ ID NO: 7940 - DNA, 600 bp, Homo sapiens
  MAP TO AL138954.5; EXPRESSED IN PLACENTA, SIGNAL = 1.3; EXPRESSED IN BRAIN, SIGNAL = 1.6; EXPRESSED IN LUNG, SIGNAL = 1.3; EXPRESSED IN ADULT LIVER, SIGNAL = 1.6; EXPRESSED IN HEART, SIGNAL = 1.3; EXPRESSED IN FETAL LIVER, SIGNAL = 1.3; EXPRESSED IN BONE MARROW, SIGNAL = 1.7
tcccctgtctcccttactttcctggaacttcactattccctgagacataataacatgaacattagacataataacattaatatcaaatattactaatttgatattagtaatatcaaatactctttaagtatttgagtgaaagtaaaagtcacacttcatttctcttatgttgaaacaaaaacccagaaatgattaagtttagtgtggaaggcatgtttacggaaagaagccataacataaaagtgcaaggtgaagcaggaaatgttgatgtagacgctgcagcaagttatccaaaatttctagctaagaccattgaagaaagtggccacactaaacaacagattttcaatgtagacaaaacagtcctatgttggaagaagatgccatttaggacttttatagctagagaggagaagtcaatgccttgcttcaaagctttgaaggacagactgactctcttgtctgaggctaacgtagttgctgacttctgtttgacgccaatgcttatttaccattctgaaaatcctagggccactaataattgtgttaactccattctacctatggcctataaatgaaacaaagcctgatgacagcaca

SEQ ID NO: 7941 - DNA, 506 bp, Homo sapiens
  MAP TO AC011824.4; EXPRESSED IN LUNG, SIGNAL = 1.3; EXPRESSED IN PLACENTA, SIGNAL = 1.2; EXPRESSED IN HEART, SIGNAL = 1.3; EXPRESSED IN BONE MARROW, SIGNAL = 1.4; EXPRESSED IN ADULT LIVER, SIGNAL = 0.86; EXPRESSED IN FETAL LIVER, SIGNAL =   1; EXPRESSED IN BRAIN, SIGNAL = 1.1
tcaaaattgaaccccagagctcagctcccaagaaggttaacataatggttttgctactcatcgtaacaacacctcacatcatgccttcagatcactccccagcatcattcttcaaattcaaacgcgaaccagaagtgacaaatgattcttgtaatgcgctctttgacacaaatcatttctgattgctcgggaccccagacaaccttgagcatgcagaatcaagctgagagggagaagtcttagaaaatgaacagcttcaacttcttgccgatgagaaccctctctctgctcacgaggcaggagcagtatgtgctgattgccaaacagatcatttttaaaatgatgcagatctgtgggggattggtccgtgtggtgatgtgtctcatcttacaatgtcctatgcagccttcaaagcgtttttagatcctggcaaggaaacagacattcatgtgcgtagggtttgcaaggcctctgcatatgatgttgctcttcatcctcccagcaag

SEQ ID NO: 7942 - DNA, 516 bp, Homo sapiens
  MAP TO AC022813.3; EXPRESSED IN ADULT LIVER, SIGNAL = 1.3; EXPRESSED IN PLACENTA, SIGNAL = 1.6; EXPRESSED IN HEART, SIGNAL = 1.5; EXPRESSED IN FETAL LIVER, SIGNAL = 0.99; EXPRESSED IN BRAIN, SIGNAL = 1.4; EXPRESSED IN BONE MARROW, SIGNAL = 1.2; EXPRESSED IN LUNG, SIGNAL = 1.4
aggtgacaagtcagggttgggtgcatgccaaaacagagagaggtggagagaaatgtttcatatttttctttacactaactcaaggcttcttaactggagatgaagaggtttgagtgttaggggtaataaaaaaaagcatattttacattttttactaaaccccaggctgtttgtcatggagggtcatctgagagacatgttggttatgagaatgcagagtgcgattcaatttggcagacatttggatattgtaagaagttgaattagatcttgtagttcatctttagccaccaaaaggagtggagatattgttgttgtttggctctggcctgtcaatattaaatatctccttgctatactatatatactttaaaactgtaagacaagtttcctcttatatccagttttgtaaattatgtccagataacttcaatagaaagagagaaacaagcctgagagacgtatcacacatgacaattcctgctcctctgaaatacccacctcactgtgacaaaa

SEQ ID NO: 7943 - DNA, 550 bp, Homo sapiens
  MAP TO AL133227.7; EXPRESSED IN LUNG, SIGNAL = 1.5; EXPRESSED IN PLACENTA, SIGNAL = 1.7; EXPRESSED IN ADULT LIVER, SIGNAL = 1.7; EXPRESSED IN HEART, SIGNAL = 1.6; EXPRESSED IN FETAL LIVER, SIGNAL = 1.7; EXPRESSED IN BRAIN, SIGNAL = 1.7; EXPRESSED IN BONE MARROW, SIGNAL = 1.6
tttctgtccaatgatgctgcctgcttctcctcttcccaggtaacattgctagcagagtgactgtatccatctatatctttcttcatgctcataaaatcatatctaaatatatacatatatatgtagatttctcttcctatagcttacaaaaatagaaccacagtttataaatttctctgcatctttcagaaatggaagatggaagtgctctccagtcagtagacagaggtttcagttattcttgttaaatggctgcattatgtcatgatataaatgtactgcaatttactcaataattctactgtctatgggcattcacattgttttcaggttttttcctcccattgcaatcatgatcactgttgatgtgaacatccatagacacatatattctggtgtttttatttctatgggaagaattcccatgcgtgggattgccgggtgaaagaatgtgtggagttgttttcttttgatatacgttgccagattgctctccaacaaggtcacagctgctggcgatgtggtgaagagtgtccctttccagcctgta

SEQ ID NO: 7944 - DNA, 547 bp, Homo sapiens
  MAP TO AL136300.5; EXPRESSED IN LUNG, SIGNAL = 2.3; EXPRESSED IN PLACENTA, SIGNAL = 2.5; EXPRESSED IN ADULT LIVER, SIGNAL = 2.3; EXPRESSED IN HEART, SIGNAL = 1.9; EXPRESSED IN FETAL LIVER, SIGNAL = 1.9; EXPRESSED IN BRAIN, SIGNAL = 1.9; EXPRESSED IN BONE MARROW, SIGNAL = 2.1; EXPRESSED IN HELA, SIGNAL = 2.8
aaaaagttttggtgccatgctgttgtaatagactctactatcactattgacagctaaactgcatcataagctttgtggctcatgtatataccataactaattttcctttatcgctgagttttgtttcctgtggagtcaatggttatcttgcttttcctttgcttcattttccacatatgtatctaattaattctgaaactctcacctgttgtctaaatcgacttttagtctcttcagattaatcagatcattagatatcctgtttcatccttgagagatccttgtccagaagtcttcagactgggccaggtttctcactggcctggtcagcgtcctggggtctcccctactgtaatctactgggggggttccccttgcctctatcacctgatgtaggatctttgtcctggacagcttcagggatctccccatgaccctgatgatcccctttgcttctctttcttgaaatttgtttcctggagcttatcttctgatttctgtgttttttttcccccttcattctggtagagcccttcccaaagtgatt

SEQ ID NO: 7945 - DNA, 512 bp, Homo sapiens
  MAP TO AC009334.3; EXPRESSED IN PLACENTA, SIGNAL = 2.6; EXPRESSED IN BONE MARROW, SIGNAL = 2.4; EXPRESSED IN ADULT LIVER, SIGNAL = 2.8; EXPRESSED IN FETAL LIVER, SIGNAL = 2.2; EXPRESSED IN BRAIN, SIGNAL = 2.3; EXPRESSED IN LUNG, SIGNAL = 2.4; EXPRESSED IN HELA, SIGNAL =   3; EXPRESSED IN HEART, SIGNAL = 2.2
catctgagttccaacccaccaaaggggaagagttcactgaacacacaggcattcaactgcgaccccagaagagtcacaccctagtaggaaggctaaactagtcctagaataaactaatcctataataatggctacgagcctttaagacaaccatcaaaaggatcgaacatctgtaaataaccaccttccaaaacaaagtccctattctttaaaagaacacagcatctactagaaatacaaaaattagctgggtgtggtggtgcacttatggcacaatatcaaatggtctatcatatctgtgattggagtcccagaaggagaagagcaagataatgggtgaaaaatttttaatttgatatattttgataaaaattgtaaacctacagatccaagaaatccaatgaacaccaagcagcataaacacaaagaaaaccacatcaaggcacatcataatcacactgttgaaaaccagtgatagaaaacttgacaatcagccatagaaaaagagacgc

SEQ ID NO: 7946 - DNA, 564 bp, Homo sapiens
  MAP TO AL137141.7; EXPRESSED IN ADULT LIVER, SIGNAL = 1.3; EXPRESSED IN FETAL LIVER, SIGNAL = 1.3; EXPRESSED IN PLACENTA, SIGNAL = 1.6; EXPRESSED IN HEART, SIGNAL = 1.4; EXPRESSED IN BRAIN, SIGNAL = 1.5; EXPRESSED IN BONE MARROW, SIGNAL =   2; EXPRESSED IN LUNG, SIGNAL = 1.6
agcgataactgagccaggagtacttttaggtttggaaaacttggaagaaagaattaaaatgttttctagccttttttcagtataaacatctttcatagttttaaactttcttgaactttccattttgtttgtttgtttcccaaaaattcgagtagaagctgaattacaatgtggaaaaaatatggaaccagtagcagtatctggaatctgctcacggacatgcttagtagatttctggggtgatgaaattgcagtcactctttcttgtacacagtgatcaagaaagatattttggatattgataggtgttagtgattgatttcttaaaacatcaggaaaacgagttctatccattttaatggaagtggtttcatcttcagtgaatgctacatgtagtgactcaattttaccagttttagctaaaccaaaagaaaaaaagaaaaattaaattatatttatcaatatgtcacagacaaaatatcttagcattcacttttctttacccactcacccctttctcaccttctaaaaatgtttctgtatacacttgctcagctaccagga

SEQ ID NO: 7947 - DNA, 557 bp, Homo sapiens
  MAP TO AC013593.3; EXPRESSED IN LUNG, SIGNAL = 1.5; EXPRESSED IN PLACENTA, SIGNAL = 1.5; EXPRESSED IN ADULT LIVER, SIGNAL = 1.5; EXPRESSED IN HEART, SIGNAL = 1.4; EXPRESSED IN BRAIN, SIGNAL = 1.3; EXPRESSED IN BONE MARROW, SIGNAL = 1.4; EXPRESSED IN FETAL LIVER, SIGNAL =   1
tggtcaaaaccaggaaaaggagtttacttcagtacttgacatagtaatggttgttcggtgctgctggcctgcttgtctaatttacgtctttagtggattccataactttatttatttccactctaggatatcctgtaccttcacaactctttagaggaggtaaacagtgccctagtggggtaccagagacagaatgatcttaaactcgagggaatgaacgagacagtcagtaatcttacccagagagtcaacctgatagaaagcgatgtggttgctatgagcaaggtagaaaagaaagcaaacctgtccttcagcatggtaagccttttctgatcttttgtgacatgcagtgtgttttgtctgtgcatggataacattctaccaccttttgagaacagccttctggcatatttgagaggccacacatttgtgttgtgcttaatcctcacaatgtgttgtctcatttaatcctcacactagctgtgtgatgtgaatggccaggcagtgtttgtcctgatttggagagggagatgcggagaggtcgagtcgcttaccaa

SEQ ID NO: 7948 - DNA, 555 bp, Homo sapiens
  MAP TO AL136984.7; EXPRESSED IN LUNG, SIGNAL = 5.8; EXPRESSED IN PLACENTA, SIGNAL = 5.4; EXPRESSED IN FETAL LIVER, SIGNAL = 4.1; EXPRESSED IN ADULT LIVER, SIGNAL = 4.9; EXPRESSED IN HEART, SIGNAL = 4.9; EXPRESSED IN BRAIN, SIGNAL = 4.4; EXPRESSED IN BONE MARROW, SIGNAL = 4.3
ctgccctcgtagaggttttgcatgaggcctctgctcctgcagcagagtcctgcctggagtttccatacatcctctgaaatctaggcaggagctcccaagcctcaactcttgccctctgtgcacccgcaggcttaccaccacgtggaagctgccaaggcttacaacttgccccatctggagcagcagcctgagacgtatctgggccccttttagccacaaagaattttctttctcttggcctcaggccagtaccttttatgccttgcctattatgtctggcagaagtgtggcagttgttgggaaagtaactgggagctctcataggcttctgtatgaaaagctaggataaccacgttatgagtagtgtatggacaagaacttgaacttgtggtctttcccctctcatcagcttcatattgcttaagatagaaaaataagggatttcaaaatgtaagagtgaaagaaattagagtttgacaaagatataaaagccatagtttaaaataaatgtgttttattttcttcctgaataattgagcctgaaccaggagcata

SEQ ID NO: 7949 - DNA, 599 bp, Homo sapiens
  MAP TO AC025812.4; EXPRESSED IN PLACENTA, SIGNAL = 0.64; EXPRESSED IN ADULT LIVER, SIGNAL = 0.82; EXPRESSED IN HEART, SIGNAL = 1.5; EXPRESSED IN BRAIN, SIGNAL = 0.59; EXPRESSED IN BONE MARROW, SIGNAL = 0.68; EXPRESSED IN FETAL LIVER, SIGNAL = 0.63
tgcaagcagtgcaaagagacccattttaattttgcacgtgtattgtcaagaatcattatgaagatctacaagtaagggttgaacagttgttcctgatggaaatgacgcagacagaaagaaaaaggaattgaggagcctctcagtctaaaaacaggcatataagtgatatcttagtaattcgtgtcagaatgccccaaaatctgttttacgttttctttgcttcatggaaaggctacagactgggttaagtatttttgcagagatttctattccacatagccttgactccttcaaagcaaatttgttttctcttttacctttagtttcctcaaacaaattgggactaaagtcaccagtgaaataatgcgggatgtattgacttaggggagatatgtttttaattttaacttcttgggaagttgagttgacgtaaatcctctttaccatagtctgctgagttttgcgtactctagttctaatcaaaagtcagacaaagtcaaaagaatctggagttaataaaattctcctatttgttttccttcacaacagtgatatgtcttagacttttacgctttaatacccctcatgaagacatacca

SEQ ID NO: 7950 - DNA, 600 bp, Homo sapiens
  MAP TO AL161450.2; EXPRESSED IN PLACENTA, SIGNAL = 1.9; EXPRESSED IN ADULT LIVER, SIGNAL =   2; EXPRESSED IN HEART, SIGNAL = 1.8; EXPRESSED IN FETAL LIVER, SIGNAL = 1.7; EXPRESSED IN BRAIN, SIGNAL = 1.5; EXPRESSED IN HELA, SIGNAL = 2.7; EXPRESSED IN LUNG, SIGNAL = 2.1; EXPRESSED IN BONE MARROW, SIGNAL =   2
ttggagatggaggcagaaaccagctcatggaaggctctatatgctacatttgttttaggctttatcttataaatgatggaaaactattaaggatggtattgttgctattaattatcattgccttcttacatgctttttcataaaatcaacttttaaaccacttttgtaggctgagaaattgtaaattgcccttttgaggaactaagtacttctatcactatactggcactacatcggattcatggttcaaatgtttattctgttgcttgttcttgagatatcattttgtcagaataatcactgtgatgtccattgtgactatccctccctttctttataattaaacttatacagcgagaaaatgtcattgaatataaacactgtttgattacaaaaaatgagaatgaagagtacaacctcagtgggacaaagaagaacttcagcagtcttaaagatcttttgaattgttaccagatggaaactgttcgctcagacaatataattttccagtttactaaatgctgtcccccaaagccaaaaggtaagataattttctagttatttttaaattactggtcatggattgtttatgtggcgtga

SEQ ID NO: 7951 - DNA, 540 bp, Homo sapiens
  MAP TO AC026707.2; EXPRESSED IN PLACENTA, SIGNAL = 1.6; EXPRESSED IN BONE MARROW, SIGNAL = 1.2; EXPRESSED IN ADULT LIVER, SIGNAL = 1.9; EXPRESSED IN HEART, SIGNAL = 1.2; EXPRESSED IN BRAIN, SIGNAL = 1.4; EXPRESSED IN LUNG, SIGNAL = 1.3; EXPRESSED IN FETAL LIVER, SIGNAL = 1.3
gcagcccacttacctgctacaacagtagccccattgaggtacagagccatgcccacgagcatcatgactcccagggtgaggatgtagggtctccggcggccccacctggaccggcagtggtcgctggccgatccgaccacgggctgcagcaggaatcccaggatggggctgaggaaccacacaatgctgtacaggctgctgggcagaacctacgctgagcaggactgggtcacatacgctgcctccaccgcgtagcagaactctcttccgaacatggccatgctgtgcatgatgagtctgctggtgggtcttttaggcggctccacagagtcaaaggggccatcatcagctagggatttatagatgtggcggccagcctgcccactgttgctacccatggccactgggagaggaaccttcctgcgagcccaccacctcctgcgtggtcctagggtctgtgtttcaaactggatttgacgtggagcctggccgagcaaccaacagagatggtcaggctgggggaggggctcaaattctttc

SEQ ID NO: 7952 - DNA, 592 bp, Homo sapiens
  MAP TO AC022637.3; EXPRESSED IN LUNG, SIGNAL = 1.7; EXPRESSED IN PLACENTA, SIGNAL = 1.6; EXPRESSED IN HEART, SIGNAL = 1.7; EXPRESSED IN FETAL LIVER, SIGNAL = 1.6; EXPRESSED IN BRAIN, SIGNAL = 1.9; EXPRESSED IN BONE MARROW, SIGNAL = 1.8; EXPRESSED IN ADULT LIVER, SIGNAL = 1.6
aaagctggcattcatatggggtggacaacagtgttccttatggtattactatggggctctactaactctcctgacatctgtcatatgatagtaccaaagtatctggaccatatggactttttgcagaaaatcacaccagtctaccatatggataatatcatgttaatcagaccagatgggcaagaaatggaaagtatattggaaaccttggtaagtcccatgtactgcagaggattggctataaacgtcatagggatataaatgactaccacatcaatgacaattttagagttcctgtagcttgtgccatactgtagcattctttccaaagcagagaacaaattatgtcatcttgatcctaccaccactgaaaaagaaagcatagtacctattagaatttttagattttctgaatacagcatatatcatgctttggaatgctcctccaactcaactaccaagcgacttcaaagaccagcagctttcagtgggcctcacagcaaaaagatttctggagtagtgcaaaaaaattatatgtactagagttatctgtaatagtaaaaaaaattcatgaggagcttatggcaagacc

SEQ ID NO: 7953 - DNA, 594 bp, Homo sapiens
  MAP TO AL135924.5; EXPRESSED IN LUNG, SIGNAL = 1.8; EXPRESSED IN ADULT LIVER, SIGNAL = 1.1; EXPRESSED IN BRAIN, SIGNAL = 1.7; EXPRESSED IN BONE MARROW, SIGNAL = 1.5; EXPRESSED IN PLACENTA, SIGNAL = 1.1; EXPRESSED IN HEART, SIGNAL = 1.3; EXPRESSED IN FETAL LIVER, SIGNAL = 2.3
acacttcgctattgcccttgcaaggaaagactgaacatagttatttgaatttctcaccatgtcaaaggaagttaaaagttccttttccaggttaacgtgatagactctgtaagagttgactgtgtcttatcaccaggaagtggaagaaaagagttcactgtcttttatgttacaaagcaatgaaaatctggttccttttctatagtgactaaggcttttttttcttttaattgcctcaagttctcaaatgactctacttcttcgtttgtacagggtttgactgccgatgtggaaatttgttttgtggacttcaccgttactctgacaagcacaactgtccgtatgattacaaagcagaagctgcagcaaaaatcagaaaagagaatccagttgttgtggctgaaaaaattcagagaatataaattacttcttgtgaagagactgaaactttgtttttattttaatatatcgtaggaaaacattaaagagcagatgcatggccatttttctttgatgttctccagagttttacattacacttgtctgtcttataattgatattttaggatgtttgggtgtttgttacaggcagaa

SEQ ID NO: 7954 - DNA, 532 bp, Homo sapiens
  MAP TO AC025443.2; EXPRESSED IN PLACENTA, SIGNAL = 1.6; EXPRESSED IN ADULT LIVER, SIGNAL = 1.7; EXPRESSED IN BRAIN, SIGNAL = 1.3; EXPRESSED IN BONE MARROW, SIGNAL = 1.2; EXPRESSED IN LUNG, SIGNAL = 1.5; EXPRESSED IN HEART, SIGNAL = 1.5; EXPRESSED IN FETAL LIVER, SIGNAL = 1.2
ctgcccactagacagaaccctttgtccacggttctttaggaactctggcttttaactctgagaagtttttgttgcattactctccttggccatttataaactgagggatgaagacgaccccatgctccttgagggttccacaatgagcctctgctttcctgaaagaaagataagaaccaaggctttttttttttttttttttttttttggtcttgaatatttaaaggcttgtatagataagccttggacttacccagttctccctgcttatttgattatagttctcaagaataactgtagaatgttatcctgagatagaaagggactggctagaacagaccaggctctgttccagtgccccccggaaacaggatgcacttcaatgctttagtccagcgaatcacgttcctctggagtataaaaccaagggcaggctgctttaccggatccttcaactgcaggaccagtggggcacacacagagaagactccatctactttaggcagctttccggagccttgggaaaaagttc

SEQ ID NO: 7955 - DNA, 520 bp, Homo sapiens
  MAP TO AC016212.3; EXPRESSED IN BONE MARROW, SIGNAL = 1.2; EXPRESSED IN ADULT LIVER, SIGNAL = 1.1; EXPRESSED IN LUNG, SIGNAL = 1.4; EXPRESSED IN PLACENTA, SIGNAL = 0.93; EXPRESSED IN HEART, SIGNAL = 1.3; EXPRESSED IN FETAL LIVER, SIGNAL = 1.2; EXPRESSED IN BRAIN, SIGNAL = 1.2
cacccaataggcaactggacactctcaggctggagtgtgtcagtcaagcaaacaatgatccaacaagtcccatgagacagcagccacacatcccgcccaggctgtgggagccacttgccaggacagtggcatcaccagtacctgagagcagaccagctagaaaccagtggctgggctttgctgaagaatactttattccatcccggttgatcaagttcatttccattcatgcatccttacctgtgggagcagacaccttccctcttcccttcccctccagcaatagaaaggcacaggcaacccgaagtcccagagggggtaagggaaaacctttgagaagagggcagaaaccataaaactagtgttttttggacagcaaataattatatcaatatctaatttgaattggatatttatttgatattcaagtattttagaccacgagtgatttaaaaattttaggatcagatctaatttaatagtttggattaaatcaggtgggaaatgggaacctgtgaaa

SEQ ID NO: 7956 - DNA, 520 bp, Homo sapiens
  MAP TO AL133324.7; EXPRESSED IN LUNG, SIGNAL = 1.5; EXPRESSED IN PLACENTA, SIGNAL = 1.3; EXPRESSED IN ADULT LIVER, SIGNAL = 1.2; EXPRESSED IN HEART, SIGNAL = 1.3; EXPRESSED IN FETAL LIVER, SIGNAL = 1.5; EXPRESSED IN BRAIN, SIGNAL = 1.2; EXPRESSED IN BONE MARROW, SIGNAL = 1.1
aaatcattgcaacctggagcatcactgctggctagaaatggatgctaccaggcccagcccccagacagaagtccctgcattcctctctctggggctctcaagatattgttccctctgcctgtacaatggagggacaggactagatgagctatgaggtcctttttctccctgacataccaaggatctcattacaagtggaaactgctgtcggggtggccaggggcaacatgtgacccggggcccaggaaagcacaatcatagctggagttccctggcctagccagtgactgtacacccatcagcatgtcaccccacaggtatgccgggggctgcccaggggacccaccggtgcacagctggggtccgggaggccaggcccccaaagctggcagagatggtgttgatttcgatctgtttcagggctggggagccatctgcgctgcgctggaacatgtagtctgagcgattcaggcccaggaacacagtctgtggggaaaactgaaggctgacagtacctgcc

SEQ ID NO: 7957 - DNA, 580 bp, Homo sapiens
  MAP TO AC019221.3; EXPRESSED IN ADULT LIVER, SIGNAL = 0.85; EXPRESSED IN PLACENTA, SIGNAL = 0.7; EXPRESSED IN HEART, SIGNAL = 1.2; EXPRESSED IN FETAL LIVER, SIGNAL = 0.93; EXPRESSED IN BONE MARROW, SIGNAL = 1.1; EXPRESSED IN LUNG, SIGNAL = 0.88; EXPRESSED IN BRAIN, SIGNAL = 0.95
atgcagaccccacaaaagtcaggagcagcagctccacgccccaggggccttggaagagtgcagtcccagggaccctgggggaggctcatgcgcaacgcagaggggtaggagcccacctgtgaatgaggacccctgctgcctgcccaaactggtccatctgggtggcctcctcctcggacagcatctccgggtgcagggaacaggatggagggcggggcagctcgcacttctgcttgtcttcccaggacttcagggtgctctcaaatgcctatggacccgaaagcccaattacacctgctgctctgaagcatgcatctgactgcgacagacactatggggatgccaacgagatcacaactagaaagagacaaataggacttttttttttttttaacattaggggaaggagatggtcctagaaattactgccctattagcttaatcattgtgtcttaaaaaaaaaaaaaatcctagaacaaaacacaaaaagctccagctcttaacagtgcacacaagagcccacaggtgagccctgtaccccacccaggtaccgcgggcagccgctcttaccctgtctctg

SEQ ID NO: 7958 - DNA, 528 bp, Homo sapiens
  MAP TO AC021366.3; EXPRESSED IN LUNG, SIGNAL = 2.5; EXPRESSED IN PLACENTA, SIGNAL = 1.5; EXPRESSED IN FETAL LIVER, SIGNAL = 1.4; EXPRESSED IN BRAIN, SIGNAL = 1.4; EXPRESSED IN HEART, SIGNAL = 1.7; EXPRESSED IN ADULT LIVER, SIGNAL = 1.6; EXPRESSED IN BONE MARROW, SIGNAL = 1.8
gctgatcactgaaagccttgcattctgatttctaagtctctcattacattgttatatccttctgactaggctcagtactggaatcaagactacccctgaggctgccactgtaaaattcaccgatcttgtgataccctctacaatgattcaaaaggccaagctaatgactgtttacaatatttagtgacataggtcttattaggtcaaatctatagacacattttccccaagataaatgcatgagaagtctcaattttacttccaaaaaatagagaccttagaactcctcactcttataaagatgattctgtacaaactaaaagtcaagaacttttcttgaacccttcagagaatctaggtctcagggcaaactgccactgagaaatttggagagattgggcaatctagaatatagagatatacaactcccaagaattgttaactagaggcagaggacacttgaagccaaaaactagtaggaacactgacatgctcatgttgaattgctggtgggctgtgtagggacta

SEQ ID NO: 7959 - DNA, 554 bp, Homo sapiens
  MAP TO AC021880.2; EXPRESSED IN LUNG, SIGNAL = 3.8; EXPRESSED IN PLACENTA, SIGNAL = 2.9; EXPRESSED IN HEART, SIGNAL = 3.1; EXPRESSED IN FETAL LIVER, SIGNAL = 3.4; EXPRESSED IN BRAIN, SIGNAL = 3.1; EXPRESSED IN BONE MARROW, SIGNAL = 3.8; EXPRESSED IN ADULT LIVER, SIGNAL = 3.9; EXPRESSED IN HELA, SIGNAL = 4.8
tcccttgactccaaggtcaccagaaggtttccaagaaaactgtgagactttcctgtcccttcacagcctggatgccaaggtcccccaccatgcaacagacaaaggcctttattgacatcgggtattcctggaaaaacggacccaaaccctgccttcaagctcacagtcctgcaggaagcaggaaggtatacaggtggcaaacccaacacaagagaagcggtagccacagtaatgacagtgatggtgacggtgacggtgacagtgatggtgatggtgatggtgatggtgatggtgacagtgatggtgacggtgacggtgatggtgacagtgatggtgacagcggagatgacagtaatggtaggggtcatgatgatgatgatgatggtagcaaacatctgttgagcacatgccacgtgtccacactctactaagtactttccatgtattctctcctttattctcagaattccatgtattctcccctttatcctagggagtggctactcttatatccccagctttcagatgaggaaactgagagctggatcacacca

SEQ ID NO: 7960 - DNA, 573 bp, Homo sapiens
  MAP TO AC011666.18; EXPRESSED IN ADULT LIVER, SIGNAL = 1.2; EXPRESSED IN HEART, SIGNAL = 1.3; EXPRESSED IN LUNG, SIGNAL = 1.4; EXPRESSED IN PLACENTA, SIGNAL = 1.1; EXPRESSED IN FETAL LIVER, SIGNAL = 1.7; EXPRESSED IN BRAIN, SIGNAL = 1.2; EXPRESSED IN BONE MARROW, SIGNAL = 7.1
gaggtggtatggaacatgggcaactgaggctgatttttttagacgttagacagtattatatgttttctcctccccatcctatccacacatgagaagttcaccatggatcaaacagagcagagaccacaaaatagatatggaggatgttatgttttctttaggcccttgattcagaaagagaggggagagtggaggttgaggggtgggggagaaactgcctctagacttcccttgtttccttgaaggttaacattaggctgggaagatgacaaaacttgaagagcatctggagggaattgtcaatatcttccaccaatactcagttcggaaggggcattttgacaccctctctaagggtgagctgaagcagctgcttacaaaggagcttgcaaacaccatcaaggtaggtgatgcccctctcactgcaaacttgcccatgaccctgcactgaggggagtggcaaggcctggcagaggatggtgggacaaggactggggtggggttggccccagtttgagctcccaaaggatgctctccccgctgctgtgggagaggtcctttgcttccctctct

SEQ ID NO: 7961 - DNA, 556 bp, Homo sapiens
  MAP TO AC013550.4; EXPRESSED IN HEART, SIGNAL =   2; EXPRESSED IN PLACENTA, SIGNAL = 0.67; EXPRESSED IN BONE MARROW, SIGNAL = 0.43
actcactgtcaggcccactccatcactgagctcccttcttcactgcttctcagaaagaaaaagaatatgattcctaggatctttttagctccaaaacttcatgatctcatgatgctattttttaatccatttttgtgtctgtatcaaactatctaatgtcatcaaacgcagaaacattgccaaaaatgtaaagaaccacccaggcaaaaatagacgaaggaataaaaaccaactgaccgttaggattgtcggtttgctgggtgaggaattgacctcgtgccagtttttatggtgaacttcacgcttgtccaggtagtagcccaggatgggcgagccaccactgaatttcgggaccttccagccgagggtcatggagtggccgtcacagttgaggagcgtaatcccataaggatgggacgggacggctgcaaggaagcacaaccagggagttaccgagggcctcagttgggggctttgtccccggggcagccagctccagtgtggcagagggaggaggaagcaacgtggagacgggcctgaacactgtgccctctga

SEQ ID NO: 7962 - DNA, 503 bp, Homo sapiens
  MAP TO AC021811.2; EXPRESSED IN ADULT LIVER, SIGNAL = 1.9; EXPRESSED IN HEART, SIGNAL = 1.7; EXPRESSED IN BRAIN, SIGNAL = 1.8; EXPRESSED IN LUNG, SIGNAL = 1.5; EXPRESSED IN PLACENTA, SIGNAL = 1.6; EXPRESSED IN FETAL LIVER, SIGNAL = 1.7; EXPRESSED IN BONE MARROW, SIGNAL = 1.5
aagaaaagccctagatgcccctagaaactcaagaactttcttctagatacttacctgtccctcctggacaaagggataaaaaatgtctctgaccaaagaagctttgagaagactacttgcagagaattaccaacttacccatcagatttgagttcatgaaaggtgttggggacaagccttcatgggctcctaatcgactgtcattcaagtgatcactgtaatgagggctgtctgtaaaaccctagggggagaaaaagatcagagtattaaagagattatttggcagtcccgctaattgagcataatgacactcacctaattaatatacagacttacacatggtcatttctgaccaagtttcttgttcattatttgaaaagctaacagcagaagtgcttcttttattccttttaagattttaagtcaaaaaacattttctttattgatcgtaaagaaaagtgggtttctataaataaacactaaccatgagcacgaatgttttc

SEQ ID NO: 7963 - DNA, 544 bp, Homo sapiens
  MAP TO AL122006.5; EXPRESSED IN BONE MARROW, SIGNAL = 2.4; EXPRESSED IN ADULT LIVER, SIGNAL =   3; EXPRESSED IN HELA, SIGNAL = 3.7; EXPRESSED IN BRAIN, SIGNAL = 3.1; EXPRESSED IN LUNG, SIGNAL = 2.4; EXPRESSED IN PLACENTA, SIGNAL = 2.3; EXPRESSED IN HEART, SIGNAL = 2.8; EXPRESSED IN FETAL LIVER, SIGNAL = 2.5
aatgccaccagtctctttgctaaagcatagcaagagtaacctttgctcccgttcccagtaagttccttatctccatgtgaggccacctcagcctggacttcactatccgtatcaccatcagcactaggaagttctaaattctccttcatctctgtcttttctgagccctcaaaactatttcaactcttcccattacccagttccaaagctgcttccatattttccagtgtctttacagcaatgtcccacttctctggtaccaattttctttattaggccattctcacactgctataaagaactcttgctgccatgagaacagcaagggggaaatccacccctgttatccaatcacctcccatcaggcccttcctccaacagtgaagatcataattcaatattagatttgggtggggacacagagccaaaccagataatgtggtggatgatattggttgatttttcaatccagacctgggcaaagaaacccacttagtcgtaatatattatgccacttatatattggtggatttgatttgccaat

SEQ ID NO: 7964 - DNA, 501 bp, Homo sapiens
  MAP TO AL109976.21; EXPRESSED IN LUNG, SIGNAL = 1.3; EXPRESSED IN PLACENTA, SIGNAL =   1; EXPRESSED IN FETAL LIVER, SIGNAL = 2.1; EXPRESSED IN HEART, SIGNAL = 1.4; EXPRESSED IN ADULT LIVER, SIGNAL = 1.1; EXPRESSED IN BRAIN, SIGNAL = 1.2; EXPRESSED IN BONE MARROW, SIGNAL = 1.4
ctcttgccttctattcccccaagggcaccggctacctgcaagttggcagcattgaaatgtctgtgttgaccctttcagaagccaagacccctgtgttacataatgcgaggcatcctgcagagagagcacacccacaaagcctagggaagcaagcacaaatactgaagcagccacttacaatctcttttgttccacagataatccatcttcctggatcacttttaaagagatccctgagttatcctgctgtttccagagggagaagacctaaacaaaacagaatttgagcaaagaacactttaaacccaacaacaggatatggaagccacatggggatttgatggttgttgaaaatctagactgtcactgcagagaaaatgactataacaaacaagtttgcttcaaaaatagaggcctgaagcaattttgttctgtatttttaaaaaccagaatgtctttctgggttactcccccagggattctgctccttgagaggtcagg

SEQ ID NO: 7965 - DNA, 526 bp, Homo sapiens
  MAP TO AL162387.2; EXPRESSED IN ADULT LIVER, SIGNAL = 1.7; EXPRESSED IN BRAIN, SIGNAL = 1.7; EXPRESSED IN HELA, SIGNAL = 2.4; EXPRESSED IN HEART, SIGNAL = 1.9; EXPRESSED IN BONE MARROW, SIGNAL = 1.7; EXPRESSED IN LUNG, SIGNAL = 1.9; EXPRESSED IN PLACENTA, SIGNAL = 1.8; EXPRESSED IN FETAL LIVER, SIGNAL =   2
acctcttcacctgccatcagcttcctgccagggtgttggctgcttcacctgggaggtgcagaactgagcccaaggcaaggtgggagctgtgcctctgatgggagacctggagggttcaccatctccccaggcctgcaaatccccgagggccctccagggtggggttgttcccaaaccgtggtcagtagggcctgaggctgaggccgcagtgagactcccacccatcacattggcacaggaccaaggttttgtcccaccccagccctctgcagtgacacccatgctgtcaccgaggaacccccagtcctttggaatttcaagggagcaaggggtggtggagaagctgacataatcctgcaagacagaacctgagcagacccctggactgcaattaagagaagcatatacacacgaaagtcaggggaagtaaggaattcactggaagcataaaggggaatcttctagaacctaaagatgggaagcgcagccaggcctggtaagggactggaactgggtctgagagctg

SEQ ID NO: 7966 - DNA, 587 bp, Homo sapiens
  MAP TO AL121771.17; EXPRESSED IN ADULT LIVER, SIGNAL = 4.1; EXPRESSED IN BRAIN, SIGNAL = 4.5; EXPRESSED IN LUNG, SIGNAL =   5; EXPRESSED IN HELA, SIGNAL = 4.7; EXPRESSED IN PLACENTA, SIGNAL = 4.5; EXPRESSED IN HEART, SIGNAL = 4.5; EXPRESSED IN FETAL LIVER, SIGNAL =   5; EXPRESSED IN BONE MARROW, SIGNAL = 5.1
aacctagcagctcccaaacctggctgggcagctggcttcctggtggagcttgttaaaaataatgaatcagcaaccctagggggtgggctctgggaatctatatttttaacaagttccatggacgtgtttgagacacagccaggccaattctggccgactcccccatgctccagctgtacctgtgattgtctgggtctccgaggtgatggttctggtggtggtctgagtctgggtggcaggcactgtttcctccgatacaaactggaccgtgctgggggctgctgcggatgtgcctgtcagctggcagccactttgcttgtgagctacaaaggcatccaggttgttaaactgctgcttgcagatgccgcagatatggatgtcgggagtcagctccaccagcaccgttgtgccacctggaactccatgggacaaagggaaagtaacggattaattccaaacagctttgaattgtaatgcagaccagattcatggtaggaagaaaaggcatggtggcagacatggctgggtagtggcccagtatccactccaccttcctcttcctgcgaactgcatcctaattgtgccct

SEQ ID NO: 7967 - DNA, 564 bp, Homo sapiens
  MAP TO AL162458.1; EXPRESSED IN ADULT LIVER, SIGNAL = 1.7; EXPRESSED IN BRAIN, SIGNAL =   2; EXPRESSED IN LUNG, SIGNAL =   2; EXPRESSED IN HELA, SIGNAL = 2.2; EXPRESSED IN PLACENTA, SIGNAL =   2; EXPRESSED IN HEART, SIGNAL = 1.9; EXPRESSED IN FETAL LIVER, SIGNAL =   2; EXPRESSED IN BONE MARROW, SIGNAL =   2
atgtggttaagccaccaaccccaccagacctttccgccacactctcatcctgcaggtactattacaagtcgcccaaaccacttttgaggcccttcctgtgccgcatctgtggttctcgctttctgtcccacgaggacctgcgcttccacgtcaactcccatgaggctggcgatccccagctcttcaagtgcctgcagtgcagctatcgttcccgccgctggtcctcgctcaaggtgcgggagccaaagaggcttggggctcatgggagggtgaagaaggcaagcagaggccagctggtgccactgagggagaatggagtcacagagcattctgggtcacgctctcctgctgctcttcagaacgcgtgtctggctcactggcgtaccgaagaacgctcagctcctcagagcttgcgggaatgtggggaggggctgggaagggctgccacaggcggttttgcaggcggcacagtgcacagtggcagcatatcttcaccaccacagacgccataaaactgttttcatctgattccatgtgttagaaagatttccagcagatggcagt

SEQ ID NO: 7968 - DNA, 569 bp, Homo sapiens
  MAP TO AL136438.8; EXPRESSED IN PLACENTA, SIGNAL = 9.7; EXPRESSED IN ADULT LIVER, SIGNAL =  13; EXPRESSED IN FETAL LIVER, SIGNAL = 8.8; EXPRESSED IN BRAIN, SIGNAL = 9.2; EXPRESSED IN BONE MARROW, SIGNAL = 5.9; EXPRESSED IN LUNG, SIGNAL =   7; EXPRESSED IN HELA, SIGNAL =   5; EXPRESSED IN HEART, SIGNAL =  15
tgaaggttaaacgccaggtcctcatgcccagctatcatctctcaacaggacagggcagctggacgcccaagctgctgacctgtgcgatggcgtaatccgagttgttggtggcctgcatgccttcattcccactgattcccacacccacgtgggctgtctggatcatcccgacatcgttggcgccgtctccgatggcgagggtgatggccttcacccgcttcttcaccacatccactatctcagacttctgcagaggagacactctgtgagaaaagagagggaaatcagagctatgcatgtctttccagaggaaacagctgtaatctacattccgctgcattaaaaggacagttactggacgatctccaaattcaatacatccattttatgctcatgtgcaaagaagctttcagaaaacagtagcttgtggctttcaagtatttgccaacttctcagatgaaatatacaacagaaaactaacttaaaacacagcctatttgtaatcactctgctaagtgggaggcatctgcacaaactcctcgggggtacgtgtgccctgctgaatgata

SEQ ID NO: 7969 - DNA, 507 bp, Homo sapiens
  MAP TO AL139296.2; EXPRESSED IN LUNG, SIGNAL =   3; EXPRESSED IN PLACENTA, SIGNAL = 2.9; EXPRESSED IN HELA, SIGNAL = 3.7; EXPRESSED IN HEART, SIGNAL = 2.7; EXPRESSED IN FETAL LIVER, SIGNAL = 2.8; EXPRESSED IN ADULT LIVER, SIGNAL =   3; EXPRESSED IN BRAIN, SIGNAL = 2.9; EXPRESSED IN BONE MARROW, SIGNAL = 2.9
tgatgtgttaggtggagggccttccattcgcaagttccacggagggtccccctggttagcaaagtccctcattttcagatagctaattgtaagtcgaatgatggatgccttgtcgagctggctggtaatggctgcaggaagaggcaacaacttggccaattcatagaactcaaagttttcttttccccggcgggagcgagcagcatctcgggatttctcctttctcaatgcttgtaaactgaaatcaaaggagtgagaatgtgtggtttagaatatgtgactctgtcatcattcaaatactgctttctttgtatttccttttttcccaccaaaattctaccaaaaactatttcaaaactagagagtgacagtaaaatgagttccagaaaatgtccactaaagccataaactctaactctggccttacattttgtaaactcaagtccaatgagtaaaaattgtgttttacttgttaaggtttttttccttcaattgtccatgcattga

SEQ ID NO: 7970 - DNA, 580 bp, Homo sapiens
  MAP TO AC019221.3; EXPRESSED IN LUNG, SIGNAL = 1.8; EXPRESSED IN ADULT LIVER, SIGNAL = 1.8; EXPRESSED IN BRAIN, SIGNAL = 1.7; EXPRESSED IN BONE MARROW, SIGNAL = 1.7; EXPRESSED IN PLACENTA, SIGNAL = 1.7; EXPRESSED IN HEART, SIGNAL = 1.7; EXPRESSED IN FETAL LIVER, SIGNAL =   2
acacggaatcctcagtccagaccccggccttccctcagctaaaacactgtgtgagaacatacttcacatgtaaaagtgaatactggtattgacagtagtaaatacagaaataccagcattgggttgtttgctttggttctctctctttcttccttcactaatgcaatgacaatgtttgtagatttttttaaaaaaatcatggcactatacctgtgagcccgagcttttggttagaagcaggtgggtgggttaatttggattggcttattgattggatgctacagtttcaaggtactggggcttctgtgggtgcttgttagggatcattggggtgtggtgggcagcgctggctagtgcttagggatgtacctgtctttatgtgccttagtccctgtgtttgtctctttctagtcaatcatatttgatgaggtggatctgacagatgccagcgtagctgaatccagtaccaaaaacgtcaacaacagttttacggtaagattcctcagtcatgcctttcttgattcttcactgaagttggctttcctttttgatctgaacatgtgtccaagcagttcaaacg

SEQ ID NO: 7971 - DNA, 508 bp, Homo sapiens
  MAP TO AL121903.13; EXPRESSED IN ADULT LIVER, SIGNAL = 2.5; EXPRESSED IN HELA, SIGNAL = 2.5; EXPRESSED IN BRAIN, SIGNAL = 2.5; EXPRESSED IN LUNG, SIGNAL = 2.7; EXPRESSED IN HEART, SIGNAL = 2.5; EXPRESSED IN BONE MARROW, SIGNAL = 2.5; EXPRESSED IN PLACENTA, SIGNAL = 6.4; EXPRESSED IN FETAL LIVER, SIGNAL = 2.5
tcatgccttgcacatagtaggagctcagtggatatttcttcagtattggctgaatcattattagggttaatctttatcatctaacatagatcagaaactgtttgccagcctcctcatcaagtgtgtggtccagttggaattgatacagaccattgacaacattgtgttctaccctgcgacgagcaaaaaggaggatgcagagcacatggttgccgcccaggtaagaacaggaggcctcaggaagagcatccctgtccatagggaggttgctttgatgtagtggtgtgcggaagccagcttgtactggctttccagagcctgtcatgctcatctctttccaacctcacattcagtgatggcatgttgatgcttaaaattggccttgatgggagttatttacatcagagaaaaacagcaaacactaaacatcagggcttcattttttttatgtatataccccagagagtgagtttatgagcataccactgctcaaatgccaccccactag

SEQ ID NO: 7972 - DNA, 552 bp, Homo sapiens
  MAP TO AC017086.3; EXPRESSED IN LUNG, SIGNAL = 2.2; EXPRESSED IN HEART, SIGNAL = 2.3; EXPRESSED IN PLACENTA, SIGNAL = 2.2; EXPRESSED IN FETAL LIVER, SIGNAL = 2.7; EXPRESSED IN ADULT LIVER, SIGNAL = 2.4; EXPRESSED IN HELA, SIGNAL = 2.5; EXPRESSED IN BRAIN, SIGNAL = 2.5; EXPRESSED IN BONE MARROW, SIGNAL = 2.6
agaaacacaagccagatgcccaaagtcacctagtgactcagtgacaggcctgggagggaactgaagaatttggatccaacatccttccggctctagtattcaatatctataaaacatgaagagagcattgcaaaatgtagacaccacacacgtatacacacatttattaagagactaaagtgtagcacactaaaacaagaaagtttgagtaaatgtacaatttattttttaaaaaattaggttgatttgtcgtgtgacaaggctgaaaaaactctaagttactaccaagcacgtctattgtctttacggatgaagacctgcacgcaagctgcatctcacagtggcatggcagccacacaccagaaggcagtgaaaataattgcatacaaaaatggggatgggtatcgtaatgggaagttaattgtggctggaacattccccatggtaagtggctatcacttaaatgctgcttgcatcttcagaggtaatgacaatggcaattcttcttaaagaaaaagcagtgggattgagtgataaatgtccctggccaga

SEQ ID NO: 7973 - DNA, 545 bp, Homo sapiens
  MAP TO AC011472.3; EXPRESSED IN LUNG, SIGNAL = 1.4; EXPRESSED IN ADULT LIVER, SIGNAL = 1.7; EXPRESSED IN BRAIN, SIGNAL = 0.97; EXPRESSED IN BONE MARROW, SIGNAL = 1.3; EXPRESSED IN PLACENTA, SIGNAL = 1.7; EXPRESSED IN HEART, SIGNAL =   2; EXPRESSED IN FETAL LIVER, SIGNAL = 1.6
aggaatcccttcagtcctgggcaaaccaggatggttggttaccctagacacgaactcctctttggactcctggccaccccacagtgtcgcagctacggtgcccacctgagtctccaacaggcttgcccgaagttcctgggctgcatcccggccccggctgacctcctgccccaggagttctattgtgcggccatagagacccaggctgttcctggcctttgtcagccgtccctccgtggtcctgtacacaccgttgagggcctggcccagctgcagggtcccatggaagagcagggtcagctcctcatgctgtgccagttctgggccgcccatgggggccgctgaggcaggccgggtcaccattgccagggcccagagcaggcacagagcaggcactggcatgactgagggtctaaggtatagccacagcactgtcactgaagccttttatgcctcatacccccactgatccccagtcaatcgttaactggccgacctggtgccccgcattgcacaagggcctggcagtggtgcgatagttgcat

SEQ ID NO: 7974 - DNA, 519 bp, Homo sapiens
  MAP TO AL121673.27; EXPRESSED IN ADULT LIVER, SIGNAL =   6; EXPRESSED IN HELA, SIGNAL = 5.9; EXPRESSED IN BRAIN, SIGNAL = 5.1; EXPRESSED IN LUNG, SIGNAL =   6; EXPRESSED IN BONE MARROW, SIGNAL = 6.1; EXPRESSED IN PLACENTA, SIGNAL = 5.9; EXPRESSED IN HEART, SIGNAL =   5; EXPRESSED IN FETAL LIVER, SIGNAL = 5.9
ctggatgaacccaccgtaagtcaaaaatcctataagttgaaggcttagctggacatagccctatcgtaagttgaggagcacctgtattttgttaagggtttctatgtctttgttcataaggaatatttgctctgtaatgtcatttacttggaatgtcttcatcatcaactctggtatcaggattatgctggccttggtatgcaggagccaactcaccatggcccccaggggccaactgtgtgcatctctccccacctcacacaccagtgtcacgttggtagtgacgtcagccatggtgcaagtatgtacatcactggaattggcaaacactgcaaatcatacgtttcccccagaaagctaattgttaaatatttaccagtgaaccattggctggcctcataaaacaaatcatttttcttcatcctctattttctgagtttgtgtgagatttataatatctcttccttaagtgtttgacagaattcaccagtgaagccagctgtgcctggagtcttcctt

SEQ ID NO: 7975 - DNA, 541 bp, Homo sapiens
  MAP TO AL161646.3; EXPRESSED IN ADULT LIVER, SIGNAL = 2.5; EXPRESSED IN HELA, SIGNAL = 3.2; EXPRESSED IN BRAIN, SIGNAL = 3.1; EXPRESSED IN BONE MARROW, SIGNAL = 3.1; EXPRESSED IN LUNG, SIGNAL = 2.7; EXPRESSED IN PLACENTA, SIGNAL = 2.6; EXPRESSED IN HEART, SIGNAL = 2.9; EXPRESSED IN FETAL LIVER, SIGNAL =   3
cctcacaccttgtttcctggttctgccctgagtgtcccacctggggtctgggcccaatgtggcttgtcttgcactgtcatgggctctttttggctcccttctttaccttggatttgtatgacttcttgggtcatgtctgattcaggctcctccaggaaatgacctggttggactcccaggaccctcccctggcccatgtagctggaattcttgctgatttgggcccagcccttgcatggaaggaatggaatctcatttttaagggagacatgaatagaaagaaaaaaaaaatttccctcttgaggcgaagagaatatggaaagggccacatcttaggcagaatatatagggctgtttctctggaggatactgggactggtgagctaggttctccacttgctggggctgctgtgcattctttttctggatctctggtcctgctactagaaatggccaatggactggatttattcggaagtggggcggggctccctcttcttcatctcataactgttccctgtggatgcagtggtgtcttcct

SEQ ID NO: 7976 - DNA, 541 bp, Homo sapiens
  MAP TO AC021782.2; EXPRESSED IN LUNG, SIGNAL = 2.8; EXPRESSED IN PLACENTA, SIGNAL = 2.4; EXPRESSED IN ADULT LIVER, SIGNAL = 1.9; EXPRESSED IN HELA, SIGNAL = 3.5; EXPRESSED IN BRAIN, SIGNAL = 3.9; EXPRESSED IN BONE MARROW, SIGNAL = 4.5; EXPRESSED IN HEART, SIGNAL =   4; EXPRESSED IN FETAL LIVER, SIGNAL = 4.6
atagttttggcaatggcagctttcctggcttggcatttttcgttgtagtatttattcagatggtagaccagcttggcctgggccgcaatcatgttggggcagagatccggattgtacaccggagtctcgcagtaagctgtgggatccaatgcggctgctagagctggagccaacttcggtggagaaacgggccgcaacactcagaaatggatcaaaaatgcctttcggaagtgctgcagcgttggtttccctgctgctgctgctgctgctgctgctgctgctgctgctgctgctgctgctgctgctgcttttcccttccttttatctttgagcccagccgttcttaaagtgaaagactgtcctcccccctctgcttgtctctcttcctcttttaaagaatccttgtgtgagagaaccgcatggagagatcaccttctcaggaataaaaaacaaaagttgcgctgagacccagcaaagctcttccagtagtcaaaataagcacccctttccgtatttatttgcgctttcccgtaatcattgt

SEQ ID NO: 7977 - DNA, 572 bp, Homo sapiens
  MAP TO AC025588.1; EXPRESSED IN HELA, SIGNAL = 7.5; EXPRESSED IN BONE MARROW, SIGNAL = 7.7; EXPRESSED IN LUNG, SIGNAL = 3.5; EXPRESSED IN ADULT LIVER, SIGNAL = 3.8; EXPRESSED IN HEART, SIGNAL = 3.7; EXPRESSED IN BRAIN, SIGNAL = 3.7; EXPRESSED IN PLACENTA, SIGNAL =   2; EXPRESSED IN FETAL LIVER, SIGNAL = 8.8
accattctttccgtgagtggctgaaagtgcctcctgcaatcagccagttcacccaggcctcagactctcacgcagccacccaactgcttaagctggcccagtacacaccagaggtaaagcagaaggagaagcagagactgttgtcctgggctaagaagaaagctgtcagcaaagggaacacccctacgaagagaccacccatccttcaagcagggttaacactgccaccaccatgttcacacacagcaagaaggctcagctgatggtgactgcgtgtgacatggatcccagcaagctgtctgtcttcctgcctgccctggattgtaagatgggagttcctgactgcattaatgaggggaaggcaagactggggtactgagtccacaggaagaccagcaccactgttaccttcacgccagttaacttgggagacaaaggagctttggctaagctggtggaagctaccaggaccaattaaattaacagatatgatgagatctgtagtcactggggaggcaacatcctgggtccaaaatccctggcttgcattgccaaagctggaaaaggcaaag

SEQ ID NO: 7978 - DNA, 589 bp, Homo sapiens
  MAP TO AC012405.4; EXPRESSED IN ADULT LIVER, SIGNAL = 1.9; EXPRESSED IN BRAIN, SIGNAL = 1.5; EXPRESSED IN LUNG, SIGNAL = 2.1; EXPRESSED IN PLACENTA, SIGNAL =   2; EXPRESSED IN HELA, SIGNAL = 2.8; EXPRESSED IN BONE MARROW, SIGNAL = 1.7; EXPRESSED IN HEART, SIGNAL = 1.7; EXPRESSED IN FETAL LIVER, SIGNAL = 1.5
cctccaagtgcagaagaaccttttaatccctcacttcctctcttcctcctatcaatttctcttaattatttcatttcctacagagattcatgtgctgcctttcttagtcctcagggaattatagtttatcttctgtcctcagtctattcttacccttctcttcatcatctgtctccatccacttcttgggcaaaggataaaaggcagggaagcagacaatgaatgttctcctttttgccatattcatctctaagtgatgattttttttgcaaatggttatgaaagggcaggaatgataattcaaggaaatcatgatgagaaacatgagaagggtgtatttcagctccttacctgtggtgtaggagagacatgaagaaaaaaaagaataaaattcccagtgataatcccttctcttttcttctcttccattgagtttattaaaatgcagggggtcatgagtccttgaaatattaagctgggcacactgcctaatattacctttcctccccaatactaggaaactgtgggatctttgtgggctagttccaaaattatataatattcaagtgcccacttcgggcaataatta

SEQ ID NO: 7979 - DNA, 562 bp, Homo sapiens
  MAP TO AC018425.3; EXPRESSED IN ADULT LIVER, SIGNAL = 1.4; EXPRESSED IN BRAIN, SIGNAL = 2.4; EXPRESSED IN LUNG, SIGNAL = 1.9; EXPRESSED IN PLACENTA, SIGNAL =   2; EXPRESSED IN BONE MARROW, SIGNAL = 2.1; EXPRESSED IN HEART, SIGNAL = 2.6; EXPRESSED IN FETAL LIVER, SIGNAL = 2.1
taggggacatcacagggaaggagctgagaattgaccttgctcttcttctccacttggtctagctagggtgcaagggtagaagttggtgtagtccctccaggtcaccctcttcaggcagagagcaggcagcagaagggtggatagtggatccagaggagcaagtgaacggaagacccctgccacatcaactatttacagaaactgcacctaaattagagtgacaaagctttgattgtagggatgggaaaaggtacctgtcttggtccttttctgttgttatatatgcaacagaatatatataataacatattatataaaacatattgtgtgtgtgtgtgtgtgtatatatctctttatgtatataaaggaatttctttcttatagtttagaggctgaaaagttcaagatcaaggggctgcatcagttgagggccttcttgccgatggggactctctgcagagaccagaggtggcacagggcaggcatcacatggtgagggggctgagtgtgctagctcagttctctcttcctcttcttaaaaagctaccagcccctctcctat

SEQ ID NO: 7980 - DNA, 522 bp, Homo sapiens
  MAP TO AC015750.4; EXPRESSED IN HELA, SIGNAL = 2.3; EXPRESSED IN BONE MARROW, SIGNAL = 2.5; EXPRESSED IN LUNG, SIGNAL = 1.5; EXPRESSED IN PLACENTA, SIGNAL = 1.2; EXPRESSED IN ADULT LIVER, SIGNAL = 1.5; EXPRESSED IN HEART, SIGNAL = 1.6; EXPRESSED IN BRAIN, SIGNAL = 1.3; EXPRESSED IN FETAL LIVER, SIGNAL = 3.5
gggatttcattacttcgctttcaacaataaatagattgatcagacataaaaataattttaagaatatagaactttaattacatttttgcccaaatggacttaaccgacatatacagaacttaccatccaacagcaacagaatacacatttttttttctctagagcacatagagtactctctagaatagaccatatgttagaccaataaacaagtcttaccaaatataggaagattgatgtcaaacacagtatcatttcagatgacaatggtatgaaactagaaattaataacaggatgaaatttttaaaaagtacaaatatatggaagttaaaccacatgttcctggacaacaaatgggtcaaagacctaatcaaaaggatttttctttaaatcttgatacaaacaaggaaagtacaacataccaaaacatatataacataacaaaagcaattctaaaaggaaagtttctgtaacaaatgtgcacattcaaaaagaagaaacatcccaagttgtctcaagga

SEQ ID NO: 7981 - DNA, 545 bp, Homo sapiens
  MAP TO AC007325.51; EXPRESSED IN HELA, SIGNAL = 3.1; EXPRESSED IN BONE MARROW, SIGNAL =   3; EXPRESSED IN LUNG, SIGNAL = 2.8; EXPRESSED IN PLACENTA, SIGNAL = 3.3; EXPRESSED IN HEART, SIGNAL = 2.9; EXPRESSED IN FETAL LIVER, SIGNAL = 3.5; EXPRESSED IN ADULT LIVER, SIGNAL = 3.2; EXPRESSED IN BRAIN, SIGNAL = 3.7
cacattcgaggagagttcccaaaagtttccagtggctgtcccaggcaggtatcaggttcggcccacacctgagtgcccatactctgggcagggctgggaggcacctgacctcacctccagcagctctgcaagtgtggggtgaaaaaaggtgaatctgtgtgaggatggggttggctgcagctgtggtgatggcctgggcgggggcggggggtgctggaggctgagggtgtgctggcgggtgctaggcagggcgatggaagaggttgccagttcggagccgcctcaagagctccagccacagcaactgccgctcccgatgggtgcccttcatgaggctgctgttctccagggcacggcgggacaagtagggcagcacctccatcacggggccatagggcacgtacttgtacacggggtagccggcctggcctgcatgggggcagatacaccatgaggcccaggcccagcaccgtaccccatcgcaccagggagggccccactcacccagcgggaagctgatctggtcacacatgcctagcagctgt

SEQ ID NO: 7982 - DNA, 539 bp, Homo sapiens
  MAP TO AC010474.2; EXPRESSED IN LUNG, SIGNAL = 4.6; EXPRESSED IN PLACENTA, SIGNAL = 3.1; EXPRESSED IN HEART, SIGNAL = 3.6; EXPRESSED IN FETAL LIVER, SIGNAL = 3.5; EXPRESSED IN ADULT LIVER, SIGNAL = 3.8; EXPRESSED IN HELA, SIGNAL = 5.3; EXPRESSED IN BRAIN, SIGNAL = 2.7; EXPRESSED IN BONE MARROW, SIGNAL =   5
ctcaggaatagctggccttggaaatggcagagctgacagctcaaatctctcagctggaactggcccgacagaagaaagagagtgaggctatggagtggcagcagaaggcccagatggtacaggaagacttggagaagacccgtgctgagctgaagactgccatgagtacatctcatgtggcagagcctgctgagaatgagcaggatgagcaggatgagaatggggcagaggctagtgctgacctacgggctgatgctatggccaaggaccgcagtgaggaggaatgtaacactgaggcagagaagaatgagcgtgtgcagaagcacctgaaggcccccacttcggagctggccagtgcccgagatgagtccaagaagactgccaatgacatgatccatgctgagaacatgtgactgggccgagataaatacaagaccctgcgccagatcgtcagggcagcaacaagcagcacattgacgaatttgagtccaagtaatgggcacccagcctctagggaccgctcctccctttttccttgt

SEQ ID NO: 7983 - DNA, 529 bp, Homo sapiens
  MAP TO AC022206.2; EXPRESSED IN LUNG, SIGNAL = 5.4; EXPRESSED IN PLACENTA, SIGNAL = 5.6; EXPRESSED IN HEART, SIGNAL = 5.5; EXPRESSED IN FETAL LIVER, SIGNAL = 5.9; EXPRESSED IN BRAIN, SIGNAL = 5.5; EXPRESSED IN ADULT LIVER, SIGNAL = 4.9; EXPRESSED IN HELA, SIGNAL = 6.1; EXPRESSED IN BONE MARROW, SIGNAL = 5.4
acctaccagaatgcacagcccttgagagcaagacattactattctcctagtggtgtatgtagtatatgctcaataaaagcttttagaataatctaattcctctgtgatacctaagaaccaatactagtcaaaacggaagcttcagggtagcagccgagaagctccacttgtgaagaaattgtaatgtgttaagccagatgggaccctcctttctcaggctttgagtaaagataggcttgtgaagggctatgctgttttttgaagttcatttctcttaatggcaaatgtagcttgaggacaacttgacaacatgccactctgggcaaaattgcttgcactaaggattttccaaattccaagctgagtcctgcttactagctcatgaacccttcacctacccaacaaccacagtcttgtcagtgctggttttgtcacccttggtcaatttggtgtctgtgcagttaggttccagtttcccaatccgcaccacctgaatggctaaggggaagggggatggctaaacctcaat

SEQ ID NO: 7984 - DNA, 588 bp, Homo sapiens
  MAP TO AC015525.3; EXPRESSED IN ADULT LIVER, SIGNAL = 5.1; EXPRESSED IN BONE MARROW, SIGNAL =  18; EXPRESSED IN PLACENTA, SIGNAL = 2.9; EXPRESSED IN HELA, SIGNAL =  13; EXPRESSED IN HEART, SIGNAL = 6.1; EXPRESSED IN FETAL LIVER, SIGNAL =  21; EXPRESSED IN LUNG, SIGNAL = 5.5; EXPRESSED IN BRAIN, SIGNAL = 8.8
aggtttgcaccaaccaaaacctggcgccgttggcatcgtagagtgaacacaacccaaaaacgatatgccatctgttctgccctggctgcctcagccctaccagcactggtcatgtctaaaggtcatcgtattgaggaagttcctgaacttcctttggtatttgaagataaagttgaaggctacaagaagaccaaggaagctgttttgctccttaagaaacttaaagcctggaatgatatcgaaaaggtctatgcctctcagcgaatgagagctggcaaaggcaaaatgagaaaccgtcgccgtatccagcgcaggggcctgtgcatcatctataatgaggataatggtatcatcaaggccttcagaaacatccctggaattactctgcttaatgtaagcaagctgaacattttgaagcttgctcctggtgggcatgtgggacgtttctgcatttggactgaaagtgctttccggaagttagatgaattgtatggcacttggcgtaaagccgcttccctcaagagtaactacaatcttcccatgcacaagttgattaatacagatcttagcagaatcttgaaaagccca

SEQ ID NO: 7985 - DNA, 582 bp, Homo sapiens
  MAP TO AC008506.4; EXPRESSED IN LUNG, SIGNAL =  20; EXPRESSED IN ADULT LIVER, SIGNAL =  22; EXPRESSED IN HEART, SIGNAL =  17; EXPRESSED IN BRAIN, SIGNAL =  16; EXPRESSED IN FETAL LIVER, SIGNAL =  20; EXPRESSED IN PLACENTA, SIGNAL =  20; EXPRESSED IN HELA, SIGNAL =  32; EXPRESSED IN BONE MARROW, SIGNAL =  20
ttgcatttccaataaggttgcttacagggtgaattatgcaataggcataattacagtgcctatcgttcaaatacggctttgcagacactggaaatttctgacagcagaggaggtatgggttctgatatatgtgtgaggtccaactttatagtccaagtatgtaggttcaagatatatatgggagttagactaataagtttttagcaatagtttccatattttatatagcaaggtaaggaagaaggaagaataaaagatcactcccacatttctaatttgaacatctcagtgaatactgttcactgagatggagaaaacagggtcagttcatttataaaaaattttttctcaaatattttatcttacagttcatagtggaatgtaaaattaatataattttattttctagaactagttaactacatatttgggcaaattggtccaaatttctatgtgagtaatacatacattttctttaaaatatgcaacttggctgggcttggtggcttacatctattatcccaacactttgggattaagagatcagaacatcacttgagcacaggagtttgaaaccagcct

SEQ ID NO: 7986 - DNA, 599 bp, Homo sapiens
  MAP TO AC027273.2; EXPRESSED IN ADULT LIVER, SIGNAL = 8.8; EXPRESSED IN HELA, SIGNAL = 8.5; EXPRESSED IN HEART, SIGNAL = 7.9; EXPRESSED IN BRAIN, SIGNAL =  11; EXPRESSED IN BONE MARROW, SIGNAL = 9.1; EXPRESSED IN LUNG, SIGNAL = 7.7; EXPRESSED IN PLACENTA, SIGNAL = 6.9; EXPRESSED IN FETAL LIVER, SIGNAL =  10
tccggagtttgttccttcagatgttcagatgtgtccggagtttcttccttcatgtgggttcgtagtctcacttgatttcaggagtgaagctgcagaccttcgcagtgagtgttacagctcttaaaggtggcgcgtctggagttgtttcttcctcccagtgggttcgtggtctcactgacttcaggggtgaagctgcagaccttcgcagtgttacagttcataaaggtagtgtggacacaaagagtgagcagcagcaagatttattgtgaagagcgaaacaacaaagcttccacagcgcggaaggggacctgagcgggttgccgctgctggctcgggtggccagcttttattcccttatttggccctgcccacatcctgctgattggtccattttacagagggctgattgatacgtttataaacctttgactagacacagagcactgattggtgcatttttacaaagtgctgatttgtgcatatacaaacctttagctagacacagagtgctgattggtgtgtttacaatcctttagctagacagaaaagttctccaagtccccacctgacccaggagcccagccagcttcacctctcat

SEQ ID NO: 7987 - DNA, 540 bp, Homo sapiens
  MAP TO AC007956.5; EXPRESSED IN BONE MARROW, SIGNAL = 1.6; EXPRESSED IN LUNG, SIGNAL = 1.6; EXPRESSED IN BRAIN, SIGNAL = 1.4; EXPRESSED IN HEART, SIGNAL = 1.5; EXPRESSED IN HELA, SIGNAL = 2.4; EXPRESSED IN ADULT LIVER, SIGNAL = 1.6; EXPRESSED IN PLACENTA, SIGNAL = 1.4; EXPRESSED IN FETAL LIVER, SIGNAL = 1.6
gcaaagaccagctccatctcactcatgtcattgttgaggataaaacaaactttagatttgtagaattctgggtcatctgtttcaaagtactgaggaggcagaaagacacagaacagaacatgaatactcttgccctgaaaggtgtaactgcttagaaccacttatcccttcaaccttaaaaattatttacaagcccaggaggagagatttcagggttaatggccaggggccttagtaggaaatgcacacccaagatgttaccttgtaatgcatacgcagtcctatgatttgggccaggaaagagcgggtgaagcgagctcggaccaactgcttgtaggctcctcctagagaggactcatagagacacttgcccacgagccgtcccgcaaactcatacattttcaggcgcagatgagcggggcgattagggttgggatgcacctgtccaagaaagagactgaaaggccctgggccatttttcttcaagcccagttctggaaggacccttccttccccaaccccatgccaaaggaacaagat

SEQ ID NO: 7988 - DNA, 544 bp, Homo sapiens
  MAP TO AL135844.8; EXPRESSED IN FETAL LIVER, SIGNAL = 1.4; EXPRESSED IN BONE MARROW, SIGNAL = 1.5; EXPRESSED IN LUNG, SIGNAL = 1.7; EXPRESSED IN PLACENTA, SIGNAL = 1.8; EXPRESSED IN ADULT LIVER, SIGNAL = 1.8; EXPRESSED IN HEART, SIGNAL = 1.3; EXPRESSED IN BRAIN, SIGNAL = 1.4
tcagcaagaaaaatgaggggaaaagctcccttactctgccatttttacctaggaacatggccatgagcttcttatcctgaagcaggatggctcctttcaccaagtactcaaagtaggagtccacgccagccccgatgcctgcgtcctgggccacccacttgccagtgagcacatcaatgtggttgccgacctgagagagagaaagacacacggtcccaacgggaaggccgatggccaaagaaggatctactcacccccaaccctgactgcccagggagatgcagggcaggtgccccagtgcttcttgggaaacatgcagaccctgagagggaagggcaatgctggatcatggccagccttcctgtacatctgcatagtagagatgcatctcatgcacatttatgaggacttaattatacacattgagcaaaaaatgaaaaagaaaaatgatttggagtgtttatgtcctgcctagagtgagtgtgagatgggagatgagaatttgctgttgccgcaatctgtctgatttctcagcacccagcat

SEQ ID NO: 7989 - DNA, 510 bp, Homo sapiens
  MAP TO AL121930.8; EXPRESSED IN PLACENTA, SIGNAL = 2.2; EXPRESSED IN ADULT LIVER, SIGNAL = 2.3; EXPRESSED IN HEART, SIGNAL = 1.5; EXPRESSED IN BRAIN, SIGNAL = 1.7; EXPRESSED IN LUNG, SIGNAL = 1.7; EXPRESSED IN FETAL LIVER, SIGNAL = 1.6; EXPRESSED IN BONE MARROW, SIGNAL =   2
tgtaaatcaaattgcaggatgctgaaaatagtctatacatttcaaagttcactgcccaaatgactgcctaaacaagttgctaatgtgttaattctctttagttccaaattcttgccacataattcgggtgattggactattttactgaagtgttcacaatgactggctgcttttctatttaataaccttttaaattcagtggtattatactgaaatataaaccaggtttagtccaggaattaaacaaagattgcttcatataatggtattatgtaatggtataggatagtgtatttatcctatatacacacaactactatataatggcataggaagcagagatacctattttggatatagatttgccttccttgcctgtaatacttctgcaagcaccaccatccatggactcacagaatgccttaatcactatcatggaagtttccatacaattgttcctgatcaagaaatttatttcataataaaggaagtttggaaatgggtgcagac

SEQ ID NO: 7990 - DNA, 599 bp, Homo sapiens
  MAP TO AC022562.3; EXPRESSED IN PLACENTA, SIGNAL = 0.97; EXPRESSED IN BONE MARROW, SIGNAL = 0.82; EXPRESSED IN ADULT LIVER, SIGNAL = 0.7; EXPRESSED IN HEART, SIGNAL =   2; EXPRESSED IN FETAL LIVER, SIGNAL = 0.51; EXPRESSED IN LUNG, SIGNAL =   1; EXPRESSED IN BRAIN, SIGNAL = 1.2
aacagcctctggtgacatcccatctctgagtagctgtttattcctaactcttcattttcttgcccaaataagaatccacttaattctgttcaagagaggagagagttatatttatattctcaagggaatgtggagggggggaagtctaactcactggaacaatgtctgaactcaaagcgcaggtgggagccccggaaccggtcaatggggataggcaatttgataatttctccccagcgaggactattactgtggtagaggacaaaggagtggtaggaactcctatttggctctcctgaacccaagctgatgcaatcctggaagaaagaaacaaaataagatgtcatcttcctggtaggaatgtctggatttctgtgtcactaggacacttttctttctcttgtctaaaggtctcatttttgctctaagcaaaatctatgagataagaaaatgcatttgatttaaattcaatgcttttggaagcagttacatagatggtatatgaaatcagcagtcacaatgctccttgttttccttggggtgaacgtaaccacatgtactcctcaaaaacagagagaagcagggtggtgcatctaaat

SEQ ID NO: 7991 - DNA, 583 bp, Homo sapiens
  MAP TO AC013396.4; EXPRESSED IN LUNG, SIGNAL =  25; EXPRESSED IN ADULT LIVER, SIGNAL =  25; EXPRESSED IN HELA, SIGNAL =  16; EXPRESSED IN HEART, SIGNAL =  25; EXPRESSED IN FETAL LIVER, SIGNAL =  24; EXPRESSED IN BRAIN, SIGNAL =  25; EXPRESSED IN PLACENTA, SIGNAL =  26; EXPRESSED IN BONE MARROW, SIGNAL =  26
gagaccagcctaggcaacacagtgagaccccaactctaaaaaagtttttgttttaaattagctggatgtagtggcatgcacccacagttctagctacttggcgggggctgaggcagaagcattgcttgagcccaggaggttgagactgcagtgagctatgattgtatcactgtactctagcctgggttacagagtgagatcctgtctcttaaaaagaaagaaagaaagaaagaaatctgcatacgcaagaagcctcagtactcagtgcaaggagtcagtaatgataaaaagaataaaggttcaaaattagagatctgcacagtgccttgccagtctccctatacttcagtctttctccctaggatgtcggtccagcagtgtgccgtatgctgtcattgtggtttccagtcccatctcctccactgtggacatttttactgctagcaaaccaggtatcacctactatgtttgccctacttggttaactccaagtggctgtgagtaggtgagggcttaggccagcagggatagaagagccattactggaaaacatttccatgtcagaaagccctgaagagaaggc

SEQ ID NO: 7992 - DNA, 590 bp, Homo sapiens
  MAP TO AC013593.3; EXPRESSED IN BONE MARROW, SIGNAL = 1.5; EXPRESSED IN PLACENTA, SIGNAL = 1.4; EXPRESSED IN ADULT LIVER, SIGNAL = 1.7; EXPRESSED IN HEART, SIGNAL = 1.5; EXPRESSED IN LUNG, SIGNAL = 1.8; EXPRESSED IN FETAL LIVER, SIGNAL = 1.4; EXPRESSED IN BRAIN, SIGNAL = 1.8
gtttgttctgtgcaccatcctaggttagaatttttcaaataataggttgtgaaatacatttagtggattgtgatcagagttttttaaaagatgaaagagaataaaaagtaataagaatggactgcatgttgtaaaagttagcattattttatacatttttttttcagttacaatcatatacctacatgtgtactgaattgcaatgtaaaatatatttcttattgtggtcatggtcaaaaagtttgaaaaacactgcattagaataatcttcccagacacagttttcaacatgcttttcctcagctttgattcctatttaaggataataatggctaatatatattaagtacttatgccagagacggcgctaaagagttttaaatggtattatctcttcagcacaactctgtgaagtaggtactgttattattcctgttttacagataagcaaactgaggcatggagaagtaacaatttgctcagagtcacccagctagtaagtggaagggttaggattcagtccttggcatctggccccagagcccatcctcttagcagctaaattatcctgcctgtactccttaagccca

SEQ ID NO: 7993 - DNA, 558 bp, Homo sapiens
  MAP TO AL160060.3; EXPRESSED IN PLACENTA, SIGNAL = 1.4; EXPRESSED IN ADULT LIVER, SIGNAL = 1.6; EXPRESSED IN FETAL LIVER, SIGNAL = 1.2; EXPRESSED IN HEART, SIGNAL = 2.5; EXPRESSED IN BRAIN, SIGNAL = 1.3; EXPRESSED IN BONE MARROW, SIGNAL = 1.7; EXPRESSED IN LUNG, SIGNAL = 1.7
tccttgaatttataagggttccacaatacttctaatcttaggagatggaaaaatcttttgatgaacaaaatgttccaaagcgacgctcaagaaacacagctgtggagcagaggctacgccgtctgcaggacaggtccctcacccagcccatcaccactgaagaggtggtcatcgcagccacgtaagtgcccacaggacttctcagccttgtctatagtgtctttttttaaaaaaatacatttaaagagtgttcaatgaaaatgaggcattggggaggtgatttagctagaagccacagagaagttagtactaagggattttgtttactgtggtctctctaaactttgtaatgggatgtgtatcttctagaaaaacttgaaaggagtttttgttctattttgtttctgtctctgcatattgatattttaaaaatctctttgacaacggaaaatagaaacatgaaacttggtggattgctgtgatgaaaccccagcttccacggtcacccgctcctggccggtgatgctcagcccgtgtgccattcatttcccctttcct

SEQ ID NO: 7994 - DNA, 508 bp, Homo sapiens
  MAP TO AL137143.6; EXPRESSED IN PLACENTA, SIGNAL = 3.5; EXPRESSED IN FETAL LIVER, SIGNAL = 3.2; EXPRESSED IN ADULT LIVER, SIGNAL = 3.9; EXPRESSED IN BONE MARROW, SIGNAL = 3.2; EXPRESSED IN LUNG, SIGNAL = 3.4; EXPRESSED IN HELA, SIGNAL = 3.3; EXPRESSED IN HEART, SIGNAL = 3.2; EXPRESSED IN BRAIN, SIGNAL = 3.7
attattatacccgctggcccctaaggccaattttcactattttttccccatattgctgatatatatctccaaaataggatattttcttatcaacttgctgaacctgtgacttcatctctctcctccaggacccctatagggcttagttcttcatcagtaatgctgaatttcgctattagtcagtcctaggcaagaaactagactttttttcaacccttcattgttgttcatccaaattgctgctaaaacttgtcttgttttcttcctcgaatgacatctcccacatctggatcttcgtcaccatcacctctgccaaggcctggttccaggtctgcatcacctcccatctggagcactcacaattccttctcactggctatctgctgctactgcctttccaggacagtctttcctagaagtccttcccatagctttgaacgttgatctccacctttttactcttgtaattgtgcatcagcctccatagacagggattgcatgacaaatg

SEQ ID NO: 7995 - DNA, 506 bp, Homo sapiens
  MAP TO AC019101.3; EXPRESSED IN LUNG, SIGNAL = 1.6; EXPRESSED IN PLACENTA, SIGNAL = 1.1; EXPRESSED IN HEART, SIGNAL = 1.2; EXPRESSED IN FETAL LIVER, SIGNAL = 1.4; EXPRESSED IN BONE MARROW, SIGNAL = 1.9; EXPRESSED IN ADULT LIVER, SIGNAL = 1.5; EXPRESSED IN BRAIN, SIGNAL = 1.3
agagaggcctcaggaggaaccagccctgccctcacctggatctgggacttccagcctccaagacttgggagaatcaatgtctgttgtttataagccactaagtctatggtattctgtgctagcagcctgaaatggactaagacatcccataagcagaggagatgaagattcagacgcacacagagggacgaccctgtgagaacacagggagaagacagtgtctacaaccccaggagagacgcctcaggaggaaccagccctgcccacaccttgatctcagatttctagcctccaggactgtgggaaataagtatatattgtttaagtcacccagtctgtggtgatttgttatggaggctttagccaagtaatatactcctcaaaaccctatttctattgggagatttctattggaaggaagattcagagtgcaaatttgtagtatccctgctgatctatctcctaaatgaaacacatcattcccaagcacttgtctttgtgcgaag

SEQ ID NO: 7996 - DNA, 543 bp, Homo sapiens
  MAP TO AC007595.3; EXPRESSED IN LUNG, SIGNAL = 2.1; EXPRESSED IN ADULT LIVER, SIGNAL = 1.7; EXPRESSED IN HEART, SIGNAL = 2.2; EXPRESSED IN FETAL LIVER, SIGNAL = 1.5; EXPRESSED IN BRAIN, SIGNAL = 1.7; EXPRESSED IN PLACENTA, SIGNAL = 1.9; EXPRESSED IN BONE MARROW, SIGNAL = 1.7
tcataaggtccagggtggagaggaagatattacaaccaatatcccagaaagtgcacagcacttctgtgatattgttcctgatttccaggggaggagaaggtgatatgactgtcaaaattgcaggaagtgtatacctgtctgtgatgtggttcctaatatccaagagtggaaaaaaagatattatttccattatctcagagggtctaaaccccctcctggtgatattgttcgtaatatccagtgagggaaagatgatattaaacccaatatcgcaagaggtatatactcccctgtgatattgctactaatatccaggaaagaagagggtgatattactcctcatatctcagctggtgtacacatccctgtgttattcttcctaatatccggaaaggagagaatgatatttctctttatattgcagggggtgcagactcctccatcatatggagatgatatttcttccagtgtcggaaacacggcgaacgagaggggcgaacagccatggctcctaacagtcagggcgggataggagggttagtc

SEQ ID NO: 7997 - DNA, 583 bp, Homo sapiens
  MAP TO AL117381.9; EXPRESSED IN BONE MARROW, SIGNAL =   2; EXPRESSED IN PLACENTA, SIGNAL = 1.4; EXPRESSED IN ADULT LIVER, SIGNAL = 1.1; EXPRESSED IN HEART, SIGNAL = 1.5; EXPRESSED IN LUNG, SIGNAL = 1.8; EXPRESSED IN FETAL LIVER, SIGNAL = 1.8; EXPRESSED IN BRAIN, SIGNAL = 1.2
tcatctggctcattcactgctgtcacctgttcctggtcatgctgtgcatatagtacgtgctcagtaagaatttgctgaatgaacagcatctgctgcagggagggggaagccgggatcacttagagtggacgcacctgaggccccttccccacacccaactgcctccagtgtaccggctccagttcaatgagacctttgcggagatgaaccgtcgctccaatgagtggaagacagtgatgggttgtgtcttcttcttcattggattcgcagctctggtgatttggtggcagcgggtctacggtgagtggcaacacctcatctggctgcagtcctgggccatgcccttgtggtcacggccaccagacagtttcttaaaggaaccatgctggcactcatctgaagagctgaaaatttctgaagaggtgtagggtgaaggacagagcatggctgtctaggtttgaatgcaggaactttacctctctgggcctcagtttcgtcatctctaaaatgggaatagtaatgttccatctcagggtacttaagaggattttaatgagagagggctgtaggccagtgtttggct

SEQ ID NO: 7998 - DNA, 590 bp, Homo sapiens
  MAP TO AC025749.2; EXPRESSED IN PLACENTA, SIGNAL = 1.1; EXPRESSED IN ADULT LIVER, SIGNAL = 0.76; EXPRESSED IN FETAL LIVER, SIGNAL = 0.92; EXPRESSED IN BRAIN, SIGNAL = 1.3; EXPRESSED IN BONE MARROW, SIGNAL = 1.1; EXPRESSED IN LUNG, SIGNAL = 1.1; EXPRESSED IN HEART, SIGNAL = 1.4
tttaaccagcagtgacctggtccgttccatcctgctgtggatgggaagtagagctctgctcacagctgtggccctaccctccctctgcagacttggcagtggatcaacccagtggacttccaggaagaggcatccctgcaggaggccctggtggtagagatgtcctgggacaaaggcgagaggactgagcctctcgagaagacagagctacctgagggtgcccctgagctggccctggatacagagttgtccttggaggatggagacaggtgcaaggccaaggtcctggggcccagtgggccagacggtcaggggtgcaaccctgcccggggggtgggggggctagacatccatcgctcctgggatatcagggcctggaggcctgagggagaaacgaaaacatccactttgtcttacagacacgaagagcgactatctcaatcacaacggctggttattaagcacttatggcatacccagcccattccatccactcacatgattccctaccaaatccctacaaccaccccctgaaaggaaccatgactgttgtactttacagatgtgatcgttgaggctcagagagggtg

SEQ ID NO: 7999 - DNA, 535 bp, Homo sapiens
  MAP TO AC024252.3; EXPRESSED IN ADULT LIVER, SIGNAL = 1.4; EXPRESSED IN PLACENTA, SIGNAL = 1.7; EXPRESSED IN HEART, SIGNAL = 1.2; EXPRESSED IN FETAL LIVER, SIGNAL = 1.2; EXPRESSED IN BONE MARROW, SIGNAL = 3.9; EXPRESSED IN LUNG, SIGNAL =   2; EXPRESSED IN BRAIN, SIGNAL =   2
acatttggagcaattggaggcctatggtggaaaaggaaatatcttcatataaaaagtagacaaaaggcacagcaccgccgcaggcaccgggagtgcagagcatgccccaggcgctgggaggcacacagcaccaccacaggcccaggctccactccccagctgtgaaaggatcactgactgaacccccaaggtagcccaccaggcctccatagagctgcccagcatggccatggccagtaccaagagtcggtgggagacgggtgaggtacaggctcagtctgcggccaagactccgtcctgcaagatgaaggtaatgaaacagaagtgcagccacaacaaaacagccagttaatgtggaaacaaagtcgacaactactcagacaaaggtatttcactttctccagattaccacagaagacagctctgtggatcctcctcagatgagatgatttaatatggtactggggaaatgagaagccatacgagcacaagtgctccctgagggtgggccaccactccggctcatcttccataa

SEQ ID NO: 8000 - DNA, 508 bp, Homo sapiens
  MAP TO AL133354.8; EXPRESSED IN LUNG, SIGNAL = 1.6; EXPRESSED IN PLACENTA, SIGNAL = 1.4; EXPRESSED IN ADULT LIVER, SIGNAL = 1.4; EXPRESSED IN FETAL LIVER, SIGNAL = 1.5; EXPRESSED IN BRAIN, SIGNAL = 1.6; EXPRESSED IN HEART, SIGNAL = 1.5; EXPRESSED IN BONE MARROW, SIGNAL = 1.7
ttatgtttttcccccagcagaaaatattatttgtataaaatatatatttgtggagacagtgggtgctgtcgcactggccacaaattggggaccatgtgccatgtcccaggtccagacagacagagttcatttccctctcctctctcagactccaggggcctgaagcccctgcaggaggacaccccacagctgatgcgcacacgcagtgatgttggggtgcgtcgccgtggcaatgtgaggacgcctagtgaccagcggcgaatcagacgccaccgcttctccatcaacggccatttctacaaccataaggtaaggtggacagggggacggggagggtggaagacctcttcctgggtagatgccacctcagggctacagccatatggtgggtggtgtggatgcctgggaagccaagtgtttgctgctgtttagtctttgggttgtgggtgggctgcaagccctgctggcttcctgagggctgagggaccccaggtcagaagcctcaaag

SEQ ID NO: 8001 - DNA, 540 bp, Homo sapiens
  MAP TO AC018774.3; EXPRESSED IN ADULT LIVER, SIGNAL = 2.1; EXPRESSED IN BRAIN, SIGNAL = 2.8; EXPRESSED IN PLACENTA, SIGNAL = 3.4; EXPRESSED IN FETAL LIVER, SIGNAL =   3; EXPRESSED IN BONE MARROW, SIGNAL = 4.1; EXPRESSED IN LUNG, SIGNAL = 2.4; EXPRESSED IN HELA, SIGNAL = 2.9; EXPRESSED IN HEART, SIGNAL = 1.6
acagatggggacgttgagagaacgaggaggaaggagagaaaatggcatccatggattacagtacctatagccaagctgcagcgcagcagggctacagtgcttacaacacccagcccactcaaggatatgcacagaccacccaggcatatgggcaacaaagctatggaacctatggacagcccattgatgtcagctatacccaggctcagaccactgcaatctatgggcagaccgcctatgcaacttcttatggacagcctcccactggttatactactccaactgccccccaggcatacagccagcctgtccaggggtatggcactggtgcttatgataccaccactgctacagtcaccaccacccaggcctcctatgcagctcaatctgcatatggcactcagcctgcttatccagcttatgggcagcagccagtagccactgcacctacaagactgcagaatggaaacaagcccactgagactagtcaacctcaatctagcacagggggttacaaccagcccagcctaggatatggac

SEQ ID NO: 8002 - DNA, 581 bp, Homo sapiens
  MAP TO AC013591.3; EXPRESSED IN LUNG, SIGNAL =   1; EXPRESSED IN PLACENTA, SIGNAL =   1; EXPRESSED IN HEART, SIGNAL = 1.2; EXPRESSED IN FETAL LIVER, SIGNAL =   1; EXPRESSED IN BONE MARROW, SIGNAL = 0.92; EXPRESSED IN ADULT LIVER, SIGNAL = 1.1; EXPRESSED IN BRAIN, SIGNAL = 3.1
ttctcagactccagttgggccggactctccaaacctgcttccgcaatgggtgggttgtgagtgctggtaagacctgctagccaacattcagctgctctgtcctctccatgcctggccggcccggcccatgcctgttcttttctcccctgtgctgccgccgcccgtggccgcccctctcctgaacttaccgccactcaggtaatgaggagccgtgggtgcagccagccttggagatgccgaagagacgggacatcctagcgatcgtcctcatcgtgctgccctggactctgctcatcactgtctggcaccagagcaccctcgcacccctgctcgcggtacataagggtgagcacgcacgcatgccctgcctgcccagctgggccttggtagtgacagtgaccacagctgacacgcagggttcttgcttgcactcacttagcagctaggaggaaccacgggatcatctaggccccttcatgagtcttgcacccctttgggaatgggaagctaatggaagctacccacacagttttaagatgcctgggatggtaggttggcagacaccaagacagttgccttga

SEQ ID NO: 8003 - DNA, 584 bp, Homo sapiens
  MAP TO AC008572.6; EXPRESSED IN ADULT LIVER, SIGNAL = 1.5; EXPRESSED IN BONE MARROW, SIGNAL = 1.5; EXPRESSED IN HEART, SIGNAL = 2.5; EXPRESSED IN LUNG, SIGNAL = 1.8; EXPRESSED IN PLACENTA, SIGNAL = 1.3; EXPRESSED IN FETAL LIVER, SIGNAL = 1.3; EXPRESSED IN BRAIN, SIGNAL = 1.2
tggaactacctcctcatgcccattgccgttgacatcccaatttctccagggcgaagagctggtgatccacctgcgctgaccacaacagcttgtctgcttcctccatgagcttcagcatcccatccagtgtgctcacggcaaagatgccagagccactactctcagtgccatggccttgtttgttgttgccagttaggtgagtggagatattcttgttgtggatatggccagatgtctggtgcagtaccacatctcgggcagctagggtctccctactgccatccatgaccccttcagaggcaggaggggaccctgtgtcctttttccacatacacgttagaattgcataagcacagcctggctaagacaccatcagttcaggaacacccagcggccccagagtcactgagaggctgtccacctgaccctccagcaaccacttcttgagggacaccagctgcccagtcagatgttcaggaccctcacctagctcctcccagcaaaaagctcacaccacacagtctgtgtagcccaccaccactcacaacacccatctccgtctgtgggcgtgaaagacacaaatt

SEQ ID NO: 8004 - DNA, 537 bp, Homo sapiens
  MAP TO AL121884.5; EXPRESSED IN LUNG, SIGNAL = 0.92; EXPRESSED IN PLACENTA, SIGNAL =   1; EXPRESSED IN HEART, SIGNAL = 1.4; EXPRESSED IN FETAL LIVER, SIGNAL = 0.87; EXPRESSED IN BONE MARROW, SIGNAL = 0.96; EXPRESSED IN ADULT LIVER, SIGNAL = 0.72; EXPRESSED IN BRAIN, SIGNAL = 1.2
atcatcgtggaagccaaaaggcacttcttacacggtagcagcaagagagaaacagagagccaagcaaaataggtttcctcttataaaaccatcagatcatgagacgtattcactagcaagagaacagtatgagggaaactgcactgcacatgtattcacagatgtgctaactctaagctgggttttcagttacttagactatttatcttcctgtctgtaattttccaagacagattattgcacattcacctgttataactatagactgtcacttttcgtatgaattacagcgcgttggaaattaacaaaatggcttttgcaaacaatatcttaggtgaggcaggtagggaaggcccccatgattcaattatctcccaccgggtccctcccacaacatgtaggaatcatggaagctacaattcaagatgagatttgagtggggacacagccaaaccatatcattctacccctgaccactcccaaatctcatgtcctcacatttcaaaactactcatgccttcccaacagtcctccaaa

SEQ ID NO: 8005 - DNA, 511 bp, Homo sapiens
  MAP TO AC006159.3; EXPRESSED IN BONE MARROW, SIGNAL = 1.1; EXPRESSED IN ADULT LIVER, SIGNAL = 1.1; EXPRESSED IN BRAIN, SIGNAL = 1.2; EXPRESSED IN LUNG, SIGNAL = 2.2; EXPRESSED IN PLACENTA, SIGNAL = 1.5; EXPRESSED IN HEART, SIGNAL = 2.3; EXPRESSED IN FETAL LIVER, SIGNAL = 1.6
ccctaagagaagaggcggacgccctggcacgtccttccctcctgcttcccccgcccaaagcgctcccggttcccggggcgtcaggttggctgacagttcggggtccctgcgtcctgtctcctcagctgggcttcgaggatgtgatcgcagagccggtgactacgcactcctttgacaaagtgtggatctgcagccatgccctctttgaaatcagcaaatacgtaatgtacaagttcctgacggtgttcctggccattcccctggccttcattgcgggaattctctttgccaccctcagctgtctgcacatctggtgagacggggcacaccgggtggaccggctttctgaaacatgggcatattctccgccacctgccccctactctcctcttatcccaggccggcgtcaggaggaggaacgcgcatcagttcccaagcagtaggaagaactggaaggccttgaaaggcaatgcgcttcctttagaataacagtttgggcttggagtttcaa

SEQ ID NO: 8006 - DNA, 534 bp, Homo sapiens
  MAP TO AC019126.3; EXPRESSED IN BONE MARROW, SIGNAL = 1.3; EXPRESSED IN PLACENTA, SIGNAL = 1.3; EXPRESSED IN ADULT LIVER, SIGNAL = 1.1; EXPRESSED IN FETAL LIVER, SIGNAL = 1.3; EXPRESSED IN BRAIN, SIGNAL = 1.1; EXPRESSED IN LUNG, SIGNAL = 1.2; EXPRESSED IN HEART, SIGNAL = 1.4
atgtgtttgcatttttcccccaagagtgtgtattactttgtaatttaaaaaataaacatcctcaaatttagcagtttattctctgaataggtcccaaacttaaatgtggtattagacactttgattaagtcctatttttcacctaagtcatctttgaggtgtaatcttgttttattttgaccatgtttacattcctttaaaaaattgttttaattttacagaattatacccatctaccaaaagcagatatttttgcgcttgccctcacagtggtatgtgctgctggtgctgaacctcttccgagaaatggagatcaatggcatgaaatcagacagggtagattacctcggataccacaagtgctttcccaagaatttacagagttgctaaaagtgagcattttatatatgaagccctttattgacatggttctatattttattaaatgcatgtctttaccttcattttacttttctttttaaggttatgattcatccagatccagagagaagaccttcagcaatggcactggta

SEQ ID NO: 8007 - DNA, 532 bp, Homo sapiens
  MAP TO AC019263.4; EXPRESSED IN BONE MARROW, SIGNAL = 5.3; EXPRESSED IN PLACENTA, SIGNAL = 5.7; EXPRESSED IN ADULT LIVER, SIGNAL = 5.7; EXPRESSED IN FETAL LIVER, SIGNAL = 3.8; EXPRESSED IN BRAIN, SIGNAL = 5.2; EXPRESSED IN LUNG, SIGNAL = 6.1; EXPRESSED IN HELA, SIGNAL = 5.1; EXPRESSED IN HEART, SIGNAL =   5
gaaaccagaactgaggccagattgataacaatctcattatggccttattattgttctggtcctggagatccataacttggttttctattagcccattactcaaatgagactgttggaaagcaaaagcttctgttgtgaggcagcatgagccacctggcttttggaaatgcctgtttggatgcactgaagatgagaaagctatgtggagtggccagcacaaaggatgctttttcttccttgtgcatctgtattcgtgtgaggatacagtctccctggaaagagagatgcataagacctattaacatttagaggataaatgcacactcactaagaggtaaatatgcctattaacgtaagaaacatgcatcaatttcactggcaatctcacacaggcaaacactaatgttgtgaggacagaaagatccaagggcggcttgaaatggataggttttaatttaagaaacattataaggaaaaaaaagttgtgaccttaaaaagatgaagaaaacttggcattggaatctgaacaaga

SEQ ID NO: 8008 - DNA, 576 bp, Homo sapiens
  MAP TO AC026407.1; EXPRESSED IN HELA, SIGNAL = 2.5; EXPRESSED IN LUNG, SIGNAL = 2.2; EXPRESSED IN PLACENTA, SIGNAL = 2.3; EXPRESSED IN HEART, SIGNAL = 2.2; EXPRESSED IN BONE MARROW, SIGNAL = 3.1; EXPRESSED IN ADULT LIVER, SIGNAL = 2.3; EXPRESSED IN FETAL LIVER, SIGNAL = 2.9; EXPRESSED IN BRAIN, SIGNAL = 1.9
tctgattcacaaccttccccaaacaaaccaaaagtgtcatttctactttcatagaaagtacccaatcattcagcaattggacaggtttctcccctcaaagagatttcttattattaatgtctcttggtaatacatgccagatgatccataattaatatgattgcctagaaatgcccaagcctactaatgcaggaattcgaagagcggtttataaaaataaaaccatgtataatgtgtaaactactgccattcccaccttaactgaagactgaggtgtgtgggttgaagcattctgatctggacttgctttgtcccctgtgtaatgtgctgctgctccaagatcaatggttttggaaggatttgctgtgcgcttgtgtctggttgtggtggtctctgtggcctgtgtgatatgaatatgctttgtcgtcacagtctcctcttcatctttgaattcacctttgggagatctgcctcttctcgctttcttttcctcatcgctgtcgctaaaagatattaaaaatgaagcaaaataataagacgggattattttaaaatgggtccctcagtgatttgagc

SEQ ID NO: 8009 - DNA, 586 bp, Homo sapiens
  MAP TO AC015649.5; EXPRESSED IN BONE MARROW, SIGNAL = 2.1; EXPRESSED IN LUNG, SIGNAL = 1.4; EXPRESSED IN ADULT LIVER, SIGNAL = 1.5; EXPRESSED IN HEART, SIGNAL = 1.4; EXPRESSED IN BRAIN, SIGNAL = 1.4; EXPRESSED IN PLACENTA, SIGNAL = 1.7; EXPRESSED IN FETAL LIVER, SIGNAL =   2
aaactatcatgccgtcgctccttcccttcccatcatctgctctgcctcctgtggctccatggtctttgccttgctttcttccctgctctttctttcattctcatcagtttcaggatttggagtaagtatggcagtcactccagtccttcttttcctctctgtaaccccagtttaggctcttctctcctactctgctgcagggctgcagacctgcaaatgtaatatattctgttgtggtctcactccacaaacaaggaccaataatagagcaaagctagaggtcacacatgtacaagttggttgctatttggggaattaagcttctgtgacatcgagtatagcacttgcttgtttataataactcaacagagaatccaaattgaataggaaagtgggatatgaaatatatcccactaacctaggatattaaatagaggagtccactatgtagacaacttcctccttatcacaggcaagatcttctgcctggatctttgctgcctgcatgggtaaaggtaaaagcatctaggcatttcttttctcatctttcattttattcactctggggtcctcagactccttggtg

SEQ ID NO: 8010 - DNA, 513 bp, Homo sapiens
  MAP TO AC021677.3; EXPRESSED IN LUNG, SIGNAL = 1.7; EXPRESSED IN ADULT LIVER, SIGNAL = 1.8; EXPRESSED IN BRAIN, SIGNAL = 2.1; EXPRESSED IN PLACENTA, SIGNAL = 1.4; EXPRESSED IN FETAL LIVER, SIGNAL = 1.5; EXPRESSED IN BONE MARROW, SIGNAL = 1.6; EXPRESSED IN HEART, SIGNAL = 1.6
tcttttgaccctgggaattggttaacctaagaattcatgctaaactctcttcttgctcttgagggaccagtcaaatcagtccctgatatataggttatcccagctgtgcagcacatgcagattgtgtgaacacccatgcgggcgcatgtacatactatggttctacatgccccttgtcaaagggaggatgtggctgtccagaggctgaccagagcttacagtggctctcagtgtgtcctgctcagctgtgcacccattgtagagttgcctgcatgagaagccttccctgaggtttaagaaaatggagcactcatttactgtccccttggtaaccttcagctctactgggctggagggcagggggacgtctttgtgcagtgcagctgcagaggagactcacaaggtgagagggttgggggaaaggagacgtgaggctggagcagtggtcattcttccagctctctggcttggaccttccaagttcactgccattccagagaccttgccagagtc

SEQ ID NO: 8011 - DNA, 501 bp, Homo sapiens
  MAP TO AC007956.5; EXPRESSED IN PLACENTA, SIGNAL = 1.6; EXPRESSED IN ADULT LIVER, SIGNAL = 1.8; EXPRESSED IN FETAL LIVER, SIGNAL = 1.3; EXPRESSED IN BRAIN, SIGNAL = 1.2; EXPRESSED IN BONE MARROW, SIGNAL = 1.4; EXPRESSED IN LUNG, SIGNAL = 1.6; EXPRESSED IN HELA, SIGNAL = 2.2; EXPRESSED IN HEART, SIGNAL = 1.7
ctcagtcaggctcttgtccccagtcactcattcttgctgggcctcaggttcttctctgatcccataagctcaagttgaagttatatcatgccgggtgtcacaatatacatctccaagcccacctgctcttcggcctccctcatagctttgcttcatagatagagaagccttatgtgcttgacatcaaacagatacctgaggagtgcctggtgcatttcagccattatttcttgagtatccctttgtcaggcatcagagttgccaagaagaataaggctaaggacggtccctaccctcaagcagctgccagtatagtaggaaaggcagacagtacatatcatggtaagtgctgtgagtgagataagatcagggtacaatgtgaatacaaggacagggtacctaatccagcctgggagcataggatggtcagggaaggtcctagagaagatgctgtctgagctggggctggaaggctgggcatgtctcagccaggagaaggtg

SEQ ID NO: 8012 - DNA, 558 bp, Homo sapiens
  MAP TO AL121889.3; EXPRESSED IN PLACENTA, SIGNAL = 1.4; EXPRESSED IN ADULT LIVER, SIGNAL = 2.1; EXPRESSED IN FETAL LIVER, SIGNAL = 0.97; EXPRESSED IN BRAIN, SIGNAL = 2.3; EXPRESSED IN BONE MARROW, SIGNAL = 1.1; EXPRESSED IN LUNG, SIGNAL = 1.6; EXPRESSED IN HEART, SIGNAL = 1.2
tcacagctgaggcacaagtcatccttgagccggaggacctccagcgcaggcagccgtgggtgagtccggggcagggcagccaggagtccctgtgtgtgctcctgcctgtggtgcctgggtgcagcctctaggacccactttgtcctctcaggaaggtggtgcggcgagccagcctgtcggacaggaccaacctgtataggaaggagtatgagggagaggccatcctgtggcagcggagtgcagctgaggatcagcggacctccacctacaacggggacatcagggagaccaggacagaccaagagaataaggaccctgtgagtggcctcacgccctgccctagtgtcagccactgcaatgggaggagaacagggcccagcctggccttgcctcttcaactgagagccttcagagggaagtagccaggcactgcccttaaactagcatatccagtctgatgatgatggctactgtagttaaaccagcagattcagtctgatggtggtggctgctgtagttaaggaggtgatcggggagtgtgttagaggctgagctggg

SEQ ID NO: 8013 - DNA, 566 bp, Homo sapiens
  MAP TO AC019214.2; EXPRESSED IN LUNG, SIGNAL =   3; EXPRESSED IN HEART, SIGNAL = 2.5; EXPRESSED IN BONE MARROW, SIGNAL =   3; EXPRESSED IN PLACENTA, SIGNAL = 2.8; EXPRESSED IN ADULT LIVER, SIGNAL = 3.2; EXPRESSED IN FETAL LIVER, SIGNAL = 2.4; EXPRESSED IN BRAIN, SIGNAL = 2.6
cttcccctgaaggtagtcccacagcacctgtgcggggagcacggtgaggagggcagcggtggtccaaagccccccatcagttggtggctctagaggctcaagcctccttttgccactgtcaccccccagccaccacagacccacacccttgtggggagaggggcttggaggtcgcccaggcaggaagccgcgccctcaaactgcagcagcagctcggaggcaggcaggctgacctggctgtagtgggtgctgatgtaggtggagttatcgaagtgcagtggggtctcccagtggagccgccggctgtgcaggctcacgtcctggtccactaccacgctgttgaggtattcggcgggctgcaggggccgcaccagctggcctgcatggggagcctaggtccactgctgctcagaccacacacacccggccctgccaccccagcagaaaccaaaccacctcacccctgggcaggggagtggccccaccgtgaggctccgtccccaagcttactcttctctttgatgaggaagagggcgaattcctgcacttcctgaggctccgtgata

SEQ ID NO: 8014 - DNA, 590 bp, Homo sapiens
  MAP TO AC019214.2; EXPRESSED IN PLACENTA, SIGNAL = 5.4; EXPRESSED IN FETAL LIVER, SIGNAL = 3.9; EXPRESSED IN LUNG, SIGNAL =   5; EXPRESSED IN ADULT LIVER, SIGNAL = 5.2; EXPRESSED IN BRAIN, SIGNAL = 4.4; EXPRESSED IN BONE MARROW, SIGNAL = 4.5; EXPRESSED IN HELA, SIGNAL = 5.6; EXPRESSED IN HEART, SIGNAL = 4.2
cagagaagaggcatgctgtgatcccagatctggaacagagggcccgaagggcactgcccagagctgtggcgcccagccccgccctcacccagctctgtggggttgatgctggcggcatgagtggcaaagccaggccgctgcatgttgttggtgaccttccagcggaccacgtcacggcccttgaggttcccgctgcgcagcatgggcgtgtccaagtggtcagaggccatcaggttctcccgcagcatgtagtggtcttccttaaagcccaccatgtgacctgcaggatggggtcctcagcacggcacccctccctagacccgcacagcccaacctcttcaggtgggaccccagagcctccagcctctgccgttccaggttcagcttccctccaccccagctcagagaaagagcagtcagagcccctgctgcccctgcgatgccaggcccatacctcggttgcagcacgggagaagtgccaggcaggcctaggagacaaggtgggtgagggtgaggcctgagacagctgccctggcccaggtaagcccttccagccaccccgccccatgccaatggtcaagaggggtgac

SEQ ID NO: 8015 - DNA, 585 bp, Homo sapiens
  MAP TO AL121712.19; EXPRESSED IN LUNG, SIGNAL = 4.1; EXPRESSED IN HELA, SIGNAL = 5.2; EXPRESSED IN HEART, SIGNAL = 1.7; EXPRESSED IN PLACENTA, SIGNAL = 9.1; EXPRESSED IN ADULT LIVER, SIGNAL =   3; EXPRESSED IN FETAL LIVER, SIGNAL = 5.5; EXPRESSED IN BRAIN, SIGNAL = 1.3; EXPRESSED IN BONE MARROW, SIGNAL = 1.6
cctcgatctctgtctccagctgcagccaagtgacattggtgtcatcagtgaccttgcagagcccatggatgtcgctctccacagactggcgcatggccagctctgtctcctacttgactgtaaagtcatcagcagcaagacaggcattgttgatctgcagaacaatgcaggcattgtccacagtatttgtgaagatctgagccctcaggtcctcgatggttttgaagtgatggctccagtctctgacctggggtcccttcttctccaggtgctcccggattttgctctccggcttccagttcttggtctccaggctcctcattctgtccaggtaggaggccagatggtcgttcaggctttgcatggtctccttctcgttctggatgcctcccattcctgccagatccccagccatccccccggccaggtccccggaccccatgccgccccagaagctggtggagtgggactcggagatccgggaaccagagccccgggcacctgcatagacgctaaccatactgctgaccggccgggcgccatagctgggcgcctggacagaacccagggaccgggtagttagtg

SEQ ID NO: 8016 - DNA, 582 bp, Homo sapiens
  MAP TO AC015525.3; EXPRESSED IN LUNG, SIGNAL = 1.6; EXPRESSED IN PLACENTA, SIGNAL = 1.4; EXPRESSED IN ADULT LIVER, SIGNAL = 2.2; EXPRESSED IN FETAL LIVER, SIGNAL = 1.4; EXPRESSED IN BRAIN, SIGNAL = 2.2; EXPRESSED IN HEART, SIGNAL = 1.3; EXPRESSED IN BONE MARROW, SIGNAL = 1.6
tccaaatgaaggtacatgcgtgacatccatttgccataatgcattaggacacagacctctgggattaactcctgcctcttgagtgggcaggtgtaagacttgacactgggtgcaatgttgtacaatatcttttgcctgtttccatgtgacatcaaatttgttttttaatcctgctgcatttacatgagtcaaagcatgaagttcttgtgcttttatgagtgcagatgataccagtaagtcagcttcttcatttgctttagtcaaaggccctggtaaattagtgtgtgctcgaatatgagtaatataaaatgggaaatttctttttcttacagtttgttgtaataaattgaatagctggtttaactgatcatccatgctatatttaattagagctgtctcaacatcccttgtagcctgtactacataggcagaatctgatataatattgataggttggtcaaaatcttgtaacactgtaatgactgcaaccaactctgctctttgagcagattgatatggagttttgattactcgttctttcggccctgtgtaagctgcttttccattgctggaaccatcagt

SEQ ID NO: 8017 - DNA, 536 bp, Homo sapiens
  MAP TO AC021976.3; EXPRESSED IN ADULT LIVER, SIGNAL = 1.9; EXPRESSED IN BONE MARROW, SIGNAL = 1.3; EXPRESSED IN HELA, SIGNAL = 2.6; EXPRESSED IN HEART, SIGNAL = 1.7; EXPRESSED IN LUNG, SIGNAL = 1.5; EXPRESSED IN PLACENTA, SIGNAL = 1.8; EXPRESSED IN FETAL LIVER, SIGNAL = 1.6; EXPRESSED IN BRAIN, SIGNAL = 1.3
ttaggaatcccatgctggtcacagagccaaaataacacattattatgatttcttacaagcagaagttcctgaacaatattttgaccagtagttattttaatatctgcaagagcttttgcccaagcgagcttttgaagtgctcaccaatcgcaaaagatggcaacaagagtaatgacaaagccaatcatgggaagtttatgactaccctgatataggttcctgtaaccaacataaagcacgacagcaatgcagtacaggaagacagagactgcaaatgtaatggaattgtgcagaagcacagtcatctcctaggaggacttgactttccaatttatatcatacacattaatacctggaggtgactgaaagatgtcctgatttaacctgaatggataatcagaagtagctgtaatagtttcgtcagtaactgtagaggacaattcacttgaatttctgtttgctcttaaaaacctccacaggtgcaaaagagaagatggaagccatctactccaggcccttgaggaagctgagcagct

SEQ ID NO: 8018 - DNA, 510 bp, Homo sapiens
  MAP TO AL121898.10; EXPRESSED IN LUNG, SIGNAL = 1.2; EXPRESSED IN HEART, SIGNAL = 1.6; EXPRESSED IN BRAIN, SIGNAL = 1.3; EXPRESSED IN PLACENTA, SIGNAL = 1.1; EXPRESSED IN FETAL LIVER, SIGNAL = 2.3; EXPRESSED IN BONE MARROW, SIGNAL = 2.1; EXPRESSED IN ADULT LIVER, SIGNAL =   1
ttccatcttttcaattgcccaggcacaaaaccttggaatccccttcaccacctcttccttcctcataccttacgtggaatccatgatcaaatcctactgactctatcttcaaaagagatcgagaatctcacctcttcaaaccacctccatccctccaaacctcgttaaaatcaatatcccccaatctcccttgattacacaggaacataacctcctgattctccttcttctggacgtgctccctcacagtgtactctgaactcagcagccaacgtgagtcttctcaaaagtaacatcccagcactcttgggtcccaattctccaaaggctccctattccatttacagcaggagtcgaagtccacacagaagactataagaccctcctccctacgccaccctcctgcccaatctcccagcactctcctcatgttcaatccggggcttccttgctcttcttcagaaacagcaggctcacctctgccttatggcattggcatttgctacctcc

SEQ ID NO: 8019 - DNA, 551 bp, Homo sapiens
  MAP TO AC024252.3; EXPRESSED IN BONE MARROW, SIGNAL = 3.5; EXPRESSED IN ADULT LIVER, SIGNAL = 2.4; EXPRESSED IN HELA, SIGNAL = 2.8; EXPRESSED IN LUNG, SIGNAL = 3.3; EXPRESSED IN PLACENTA, SIGNAL = 4.3; EXPRESSED IN HEART, SIGNAL = 3.7; EXPRESSED IN FETAL LIVER, SIGNAL = 3.3; EXPRESSED IN BRAIN, SIGNAL = 2.8
ccgggaagaagatcaagacctcggggcccaggacagccgccccgctgcccgccactcctccacctgctcccctcgtccccaggacccccagcccccactctgaaggggcgatcctcccacagccgcctcctcctcctgcagccccggctcaggcacggtctggtacctcttcttcgcatctcttatgttcaggtccattgtcgtcttcttcatcatcctctccagcttccaggcttggccacgggaggcagctttgtggatcttcctgagatccccatggtgaatcacgtaagagccattgttggtgtagaccagctgactgaaggggctccggcgctccgggcccgtctggcccttgacagcggcggcagagagcctctccatggctgcagccacctgctagacagagcccgcacctcccgctgctcgcccttccccagtccccgccgctcgccctcgcccttcttcagtccccgcacccgccctgacaccagtagaaatctcagtcgggccaagcttttggacactccagcctctcctgggagaaaatc

SEQ ID NO: 8020 - DNA, 523 bp, Homo sapiens
  MAP TO AC019126.3; EXPRESSED IN BONE MARROW, SIGNAL = 2.7; EXPRESSED IN LUNG, SIGNAL = 1.9; EXPRESSED IN ADULT LIVER, SIGNAL = 1.6; EXPRESSED IN PLACENTA, SIGNAL = 2.1; EXPRESSED IN HEART, SIGNAL = 2.2; EXPRESSED IN FETAL LIVER, SIGNAL = 2.6; EXPRESSED IN BRAIN, SIGNAL =   2
cactgtttggtggtctgctgctggtctgatccagtatagctttctgaatcctggcaaaaccattacatctgagaactatgctcagcaaacggacgagatgcaccaaaaactgcaacaactgcagccagcattggtcaacagaaagggcccaattcttctccaggacaacacccaaacacacgtcacacaaccaacacttcaaaagttgagcaaattgggctatgaagttttgcctcatctgccatactcacctgacctctcaccaactgactaccacttctacaagcatctcaacaactttttgtacggaaaacgcttccacaaccagcaggatgcagaaaatgatttccaagagtttgttgaatcctgaagcatggatttttacaccataggaataaagatttctcactggcaaaaatgtgttgattgtaatgtttcctgttttgattaataaagatgtgtttgagcctagttataatgatttaaaatttacagtctgaaaccgcaattacttttgcagcaa

SEQ ID NO: 8021 - DNA, 585 bp, Homo sapiens
  MAP TO AC013771.3; EXPRESSED IN BONE MARROW, SIGNAL = 1.7; EXPRESSED IN ADULT LIVER, SIGNAL = 1.6; EXPRESSED IN HEART, SIGNAL = 1.5; EXPRESSED IN LUNG, SIGNAL = 1.6; EXPRESSED IN PLACENTA, SIGNAL = 1.3; EXPRESSED IN BRAIN, SIGNAL = 1.1; EXPRESSED IN FETAL LIVER, SIGNAL = 1.5
cctattggtttggcatcctgtgaatcttaggttggtgtaaatggaattgaggtttcggaccatgaattttaaatcatgataactaggttccaatacatctttattaatcaaaataggaacccacacatttttgctaatgaaaaataaatttgtttattcctctaacataataatccatgcttcaggattcagcaaactcttggaaagcattttctgcatcctcctggttgtggaagtgtttttcctgcaaaaagttgttgagatgcttaacgaagtggtagttggttggcaaaaggtcagatgaatatagagaatgaggcaaaatttcatagctcaattcgttcaactttcgaagtattgcttgtgtgacatgcagtcaggcattgtggtggagaagaatttggccctttctgttgaccagtgccggctgttggcgttgcagtttttggtgcagctcatccatttgctgagcatacttttcagatgtaatggtatcaccaagattcagaaagctatagcggatccaactggcagcagactgccagtgaccataacttttttttttggtgcaaatttggcttaagg

SEQ ID NO: 8022 - DNA, 541 bp, Homo sapiens
  MAP TO AC013698.3; EXPRESSED IN BONE MARROW, SIGNAL = 4.2; EXPRESSED IN PLACENTA, SIGNAL = 2.1; EXPRESSED IN ADULT LIVER, SIGNAL =   3; EXPRESSED IN HELA, SIGNAL = 4.7; EXPRESSED IN HEART, SIGNAL = 2.6; EXPRESSED IN LUNG, SIGNAL = 2.8; EXPRESSED IN FETAL LIVER, SIGNAL =   3; EXPRESSED IN BRAIN, SIGNAL = 3.9
ccctggcatgcttatactggtccaagcaagcattaggtcatagcctgttcctcttccttatttggaggtgtttttacctttctcagcattccacaagttacttcctccttcctttgttctcctctgcctttgcctcttttagaaagttctaagttgctatccaattgggacaaatacagaatgtgaggtcccgttccagccaatggaaaccggacacagcagtagggtgaacgcgtcaggttataaattaccctgtcccctttgttcgctgtactcttgtagcaaaactgccggcaagtgtactctttctgcagaaagtaaaaatggcctggctgagaaaattaaatttatgttcaagtgctatttctttgcggcaccggggaacaaggatttctaacattcccattctaaaaggcagaaataggccaaaagaaaggagtaacaggcctcaattaagtctttaaaaccctgagaaagaagacattaactcttaaagctagagagtaatctccattccatgtctgaatcctgtgcacactgg

SEQ ID NO: 8023 - DNA, 527 bp, Homo sapiens
  MAP TO AC011841.3; EXPRESSED IN PLACENTA, SIGNAL = 1.1; EXPRESSED IN HEART, SIGNAL = 1.6; EXPRESSED IN BRAIN, SIGNAL = 1.4; EXPRESSED IN FETAL LIVER, SIGNAL = 0.78; EXPRESSED IN ADULT LIVER, SIGNAL = 1.2; EXPRESSED IN BONE MARROW, SIGNAL = 1.1
ttgttcctcacaggggattccagaacactaatgctgtggtctgaatgttcgttcctaacacaggattctggtacactgctatgagggtcagaatgtttgtccctcacattggattccagaacaatgctaccaatgtctgaatgtttgtccctcacatagaattccagatcactgctatgagggtctgaatgtttgtccctcacataggattccagaacactcctgctatggtctgtatatttgtccctcacatatgattccagaacactgctacgagagtctaaacgtttgtccctcacacaggatttcaaaacctttctgctgggttcggagtgttggtccctcacataggtttccagaacaatcctggcatggtctgaatgtttatccctcacatagggttccagaacactgctgctggtttcagtgtgtttgtcgctcatgtaggattccagaacactgctatgagggtctgaatgtttctacctcacataggattccagaacactgctgctggggtctaaatg

SEQ ID NO: 8024 - DNA, 506 bp, Homo sapiens
  MAP TO AC022758.3; EXPRESSED IN LUNG, SIGNAL = 2.6; EXPRESSED IN PLACENTA, SIGNAL = 3.5; EXPRESSED IN HEART, SIGNAL = 2.4; EXPRESSED IN FETAL LIVER, SIGNAL = 2.6; EXPRESSED IN BRAIN, SIGNAL =   2; EXPRESSED IN ADULT LIVER, SIGNAL = 2.7; EXPRESSED IN HELA, SIGNAL = 5.1; EXPRESSED IN BONE MARROW, SIGNAL = 2.1
tggagtgatccaacagcttgcgggtcctgcattgggtttttattacgtcggacgttaaaaaattcccgcctctgtcttagacttccacctttttcctttgtttagtttacccactcctgtcttaagtctctgccttgttcccacctagctcccccaccaggcttgtgggacttgcccttacgactgctgtgcatgtgcaggctggtgctggattcaaatccttcctttggcagcattgctcattactgccactccaggaagatggtatagtggttaaattccacttattaggcctgcctatatcttaggcgtttcttctttgccctccttatcagcaagtagctacattctgacaggttaattccagagtgagtaattactgggcatcttaataggcattccttcctgcataggcatttccctcccctcccctctgttcatattgagcacgcctgtttcctgctggttgatggggtgtgagattccccagacctcccatttctcag

SEQ ID NO: 8025 - DNA, 597 bp, Homo sapiens
  MAP TO AC022714.2; EXPRESSED IN ADULT LIVER, SIGNAL = 1.4; EXPRESSED IN BONE MARROW, SIGNAL = 1.2; EXPRESSED IN HEART, SIGNAL = 1.2; EXPRESSED IN LUNG, SIGNAL = 0.86; EXPRESSED IN PLACENTA, SIGNAL = 1.1; EXPRESSED IN FETAL LIVER, SIGNAL = 1.2; EXPRESSED IN BRAIN, SIGNAL =   1
tttccccagtgctagaatgcattattggcatagacatacttagcagctggcagaacccccagattggctcctgactggtaagatgagggttgttatggtgggaaaggccaaatggaagccattagagctgcctctacctaaaaaactagtaaatccaaaacaatattacatccctggagagactgcagagattagtgcaaccatcaaggacttgaaagatgcagaggtggtgattcctatcacatccctgtttaactctcccatttggcctgtacagaagaaagagggattttggagaatgatggtggactattgtaagcttaaccaagtgttgactccaattgtacctgctataccagatgtggtttcgttgcttgaacaaattaatacatttcctggtacctggtatgcagccattgacttgggaaatacctttttctccattcctgtccataagacccaccagaagcaatatgccttctgctggcaaggtcaataatatacctttactgtcctatctcaggggtatatcaactctccagctttgtgtcataatcttattcagagagatcttgatcgcttttcatttctgcaaga

SEQ ID NO: 8026 - DNA, 567 bp, Homo sapiens
  MAP TO AC013625.3; EXPRESSED IN PLACENTA, SIGNAL = 0.96; EXPRESSED IN HELA, SIGNAL = 2.2; EXPRESSED IN HEART, SIGNAL = 1.5; EXPRESSED IN FETAL LIVER, SIGNAL = 1.7; EXPRESSED IN LUNG, SIGNAL = 1.1; EXPRESSED IN BRAIN, SIGNAL = 1.3; EXPRESSED IN ADULT LIVER, SIGNAL = 1.4; EXPRESSED IN BONE MARROW, SIGNAL = 1.8
ggaaaaacagaaaggcaagcactaaattttggttgttttttttttttttttttaagaattgggtcctggctggtgtggtgtttacaactaattgattacaaccaattatatatttctttgtccattctcttattgattcacttgactagccttaaaaagagagagagagagaagatgaagaggaagaagaagaggaaaaggaagaggaagaggaagaagaaggagaaggagaaggaggagaaggagaagaagaagaagaagaagaagaagaagaagaagaagaagaagaagaagaagaagaagaagaagaattggctcctttatctactattctatataactagttggcatgtttctactttagccaaaaaaagggggggaaggatgtgctgaaaataattttggcttcatcttagtttattattttaacctctgcttaatgcagtcttcaggaaggcaggtttcatgtgggttgtattcaaatttattattacattttagcacagtgcctattgtataatagatgctcactgagtttcagctgaatgcatgaatgagttggccatt

SEQ ID NO: 8027 - DNA, 541 bp, Homo sapiens
  MAP TO AC013550.4; EXPRESSED IN HEART, SIGNAL = 3.5
tctggaggagaggcacattcattttagagtgtacgtcagcccgttttcattcctgtagtgatgttggtggagatgtcagagaacgttgtaacagcctgtgctatgctctgcacacagggcattctcagggctcacatcgagttgggagggaaagagacaacaaatcacacacaaaacagccaaagcttcctgggcacagtggatacttaggcgtgagcagcttaccttgtaaccttctgaggtccaaggggtcaagtgcagccaccgcatcagagaccctggagggtcggctgatgcccgcactgttcactgccctcactcggaatatgtaagaccttccttcaaaaagccctgtgaccgggtatttgcagattttcaccggtgcatcattgcactgcacccaattattcgttcctacttcacatcttcaagttaaaaaaagaaaaacaacagagaatagcaaatgtggcaacctactaaatatacataggtatatgcatatatgcacacactgattataacaggacaatatctcacgcca

SEQ ID NO: 8028 - DNA, 509 bp, Homo sapiens
  MAP TO AL135931.4; EXPRESSED IN PLACENTA, SIGNAL =   2; EXPRESSED IN BRAIN, SIGNAL =   2; EXPRESSED IN BONE MARROW, SIGNAL = 3.2; EXPRESSED IN HELA, SIGNAL = 2.9; EXPRESSED IN ADULT LIVER, SIGNAL = 3.3; EXPRESSED IN FETAL LIVER, SIGNAL = 2.8; EXPRESSED IN HEART, SIGNAL =   2
ctgagcagaatccttgagggtggtgaagcaggaagagtgggtggctctgatgcctggccgggcagtgcttcacgagcttgtaggtgatcgaggtaatggccaatcctctcgggcttgccctccacttggttgaaggccttgccattgtagacgcccaccatgctacccaccgtcttgtctcccatctcgggcaggatgatcatatcctgcaggtgcgcgttcaccacctccagcttctgcataggcagtgcccacttcttgcccttgcgcaggcgcttcagcagcgagtgctgcttctgccacaggccacggtgcagcttcattcgctgctcgcatgacaagtccagcagtgggtcggggtgcacgccacaggaggtgaacttgcagaaggtctgcttcttctgctttgctgctttttctgctccacttctgccatcttgacttttttttaaaacaacatgcctcaaagatctccagtgaaagaaaaacccaaactgcctccttttcag

SEQ ID NO: 8029 - DNA, 545 bp, Homo sapiens
  MAP TO AC008920.4; EXPRESSED IN BRAIN, SIGNAL = 2.9; EXPRESSED IN PLACENTA, SIGNAL = 2.3; EXPRESSED IN FETAL LIVER, SIGNAL = 3.3; EXPRESSED IN ADULT LIVER, SIGNAL = 2.7; EXPRESSED IN BONE MARROW, SIGNAL = 2.6; EXPRESSED IN HELA, SIGNAL = 3.3; EXPRESSED IN HEART, SIGNAL = 2.9; EXPRESSED IN LUNG, SIGNAL =   2
tacacctcctttcccacctgcctccagcttagtagcccatagtcctctttgtccctcacactgagccaggcctgacttagatgatgaaatgcatggcctgtctcttcaccttcttagcaaatgggaggtgctgttggcagtaattaagaaattgagaagctccttgtgaaactgttttcgcgatggtaatagtgaactcagggagcaggtgtggtgcctctttcagtcctcatttcacctgcctgagcaaaaaccatgcagacaaaacacttcctggtggtgactcatgttactccaaagcatctccacccaagcacctgttcagctgtgacatcttacacgcagtgttctgtccatgcgtgctcacctcctgccccctcaggggcagccagtcctccctcaaggtcctatcatcagaacatcttttccccttcccattcttctcggattctgtagtcagcaaggtgcatttcttgtgctctgtgtctaagttatctttctgtgtctcatagttgcccctaggaggagcttcccaaggaggtacc

SEQ ID NO: 8030 - DNA, 520 bp, Homo sapiens
  MAP TO AC008395.3; EXPRESSED IN FETAL LIVER, SIGNAL = 3.4; EXPRESSED IN HEART, SIGNAL = 3.2; EXPRESSED IN BRAIN, SIGNAL = 2.7; EXPRESSED IN PLACENTA, SIGNAL = 2.6; EXPRESSED IN ADULT LIVER, SIGNAL = 2.9; EXPRESSED IN BONE MARROW, SIGNAL = 2.2; EXPRESSED IN HELA, SIGNAL = 3.7; EXPRESSED IN LUNG, SIGNAL = 4.6
tgagctcagcaatgatctggtcaatgtctgcaaataatcctgcacactcttacagtctttgggagaagcccagtgccctgcccatgccaggaatttactaaacagttgataagtgaatgtatgctgtctctgtttacccaccacttctgtggctgtctggatggagtgctggcaggtgaatgcccaacatgtccactctccgtcttcttccttattgaccctttgctcagggtggcaatgggcccaactgaaaaactgtagatgtccttgcagcaaggagtggccatgtcacaaagttctagccaaatagtcacaagcagacgtctgctaaagatttcagggaaggctttggcttcttgatacaggtgctgtctcctttccttagagccctggttctgcctgcccatcacaaggatatcaggctggaggtagagcaaccattttatgaatatgaggctaaggatggtgacctggagcagcagagagagggtaaggtgagcgtcaccttagcctgctgagc

SEQ ID NO: 8031 - DNA, 515 bp, Homo sapiens
  MAP TO AC008649.3; EXPRESSED IN FETAL LIVER, SIGNAL = 2.8; EXPRESSED IN HEART, SIGNAL =   2; EXPRESSED IN BRAIN, SIGNAL = 2.8; EXPRESSED IN PLACENTA, SIGNAL = 5.6; EXPRESSED IN ADULT LIVER, SIGNAL = 1.9; EXPRESSED IN BONE MARROW, SIGNAL = 3.4; EXPRESSED IN HELA, SIGNAL = 3.5; EXPRESSED IN LUNG, SIGNAL =  10
ttgtcactgtctgctgagcctggcacaaggagaaccagtgagggcgacctgagtccgagtcaaaaccattcctccccctgcagaagccgtcgcccccgtggttgggtgggttgcacttcctagatttggactgcgcccaccggatttttccaagggtttgggggagcttgtgggcccagcatcatatcaagagcagttgttgtgatcactgctgagtatgtactggggctctgagtgccccaagcgccctgccaccaacaaaacttctcttcaggatgcagatgttgtgcttcagagcctaaaggtcagaaaccgagcaggaccctcgctgccccacctccagctcaccttctgccccgatggagaccagcttgacgcctttgctggcaataaagtccagcgctttgttcacattgttgattttgtgcactctcatcttcccccgctccggcttaggtaaccgctcccctgagaagtgcacaaagagaaaagagggggcgagacagagagagaga

SEQ ID NO: 8032 - DNA, 582 bp, Homo sapiens
  MAP TO AC009144.4; EXPRESSED IN BRAIN, SIGNAL = 2.8; EXPRESSED IN PLACENTA, SIGNAL = 1.8; EXPRESSED IN FETAL LIVER, SIGNAL = 2.8; EXPRESSED IN ADULT LIVER, SIGNAL = 3.4; EXPRESSED IN BONE MARROW, SIGNAL = 1.7; EXPRESSED IN HELA, SIGNAL = 2.9; EXPRESSED IN HEART, SIGNAL = 2.3
agtctgtcccttctcccctcggatggtgctattttcataggttaattccatctcttttccatccttcctgaatatttcatttcctctgtgtcgttaagggctacctgaaagcagggctgtatctctccccaggcgggggttcccccataataaggctacatcctcagatcagggttccctgggcagggccatgtctccccctcaaccagggcagaaccatgcctctcctccctcctgccctaacccctggctgatgccactccttgcctgcagagcgtttcttgaatccagcggggacccagctcatctcaccgtcagtaagctatttgcccttcggagcaggacctcgctcctgtataggtgagatcctggcccgccaggagctcttcctcatcatggcctggctgctgcagaggttcgacctggaggtgccagatgatgggcagctgccctccctggaaggcatccccaaggtggtctttctgatcgactctttcaaagtgaagatcaaggtgcgccaggcctggagggaagcccaggctgagggtagcacctaaaggctgtaactcacagcccctgtcc

SEQ ID NO: 8033 - DNA, 511 bp, Homo sapiens
  MAP TO AL110505.3; EXPRESSED IN PLACENTA, SIGNAL =   2; EXPRESSED IN HELA, SIGNAL = 2.6; EXPRESSED IN HEART, SIGNAL = 3.2; EXPRESSED IN BRAIN, SIGNAL = 3.1; EXPRESSED IN LUNG, SIGNAL = 3.2; EXPRESSED IN FETAL LIVER, SIGNAL = 2.4; EXPRESSED IN BONE MARROW, SIGNAL = 2.1; EXPRESSED IN ADULT LIVER, SIGNAL = 3.4
agtttagcagtcccaacccctaagtcctgatgtagtccaaccactcatccaaagcttgagcaccttctgtaatatcctagcagaaagttgttccagtctagatttgaaatctcctggctatgcactcaaatttggccctaaaatctctaggcaccatagctgtctctgtccactggtcacctcaggagcttcttaaggctttgcttctcatcctttactttaaaatcaatttcttcttttctttgttttaaaacagggtttctctcttctatgtctgtttctttagggtgcatttgtttatcttctctttcagatcgatgactctttgggacaatttgataaactttctaattatggttcctgttaaggttttgcctctggatgtatttcctttgggggaaatgccagaagggtatgtttgcactctatctagcctctttagacttcaagagctgtcttggttcaggctgctataacaaaataccatagacgaggtggcttaaacagcagc

SEQ ID NO: 8034 - DNA, 543 bp, Homo sapiens
  MAP TO AC011991.2; EXPRESSED IN BRAIN, SIGNAL = 2.1; EXPRESSED IN PLACENTA, SIGNAL = 2.6; EXPRESSED IN HELA, SIGNAL = 6.9; EXPRESSED IN ADULT LIVER, SIGNAL = 2.1; EXPRESSED IN BONE MARROW, SIGNAL = 3.3; EXPRESSED IN FETAL LIVER, SIGNAL = 6.1; EXPRESSED IN LUNG, SIGNAL = 2.1; EXPRESSED IN HEART, SIGNAL = 6.1
gaacagtttggagggctcagaagaagacaggaaaatgtgggaaagtttggaactccagagagacttgttgaatggctttgaccaaaatgctgataatgatatggacaatgaaatccaggctgaggtggtctcagatggagcagaggaacttgttgggaactggagcaaaggtgactcttgttatgttttagcaaagagactggtggcatttttcccctgtcctagagatttatggaactttgaacttgagagagatgatttagggtatctggtagaagaaatttctaagctgcaaagcattcaagaggtgacttgggtgctgttaaagacattcagttttaaaagggaaacagaatataaaagtttggaaaatttgcagcctgacaatgtgatagaaaataaaatcccattttctgaggaaaaattcaagcctgctgaagaaatttgcataagtaacaaggagccgaatgttaatcactaaaacaatggggaaaatgtcttcagggcatgtcagagatctttgcagcagtccctctcatcaca

SEQ ID NO: 8035 - DNA, 563 bp, Homo sapiens
  MAP TO AC020912.3; EXPRESSED IN BRAIN, SIGNAL = 5.6; EXPRESSED IN HELA, SIGNAL = 6.3; EXPRESSED IN HEART, SIGNAL = 5.6; EXPRESSED IN PLACENTA, SIGNAL = 4.4; EXPRESSED IN LUNG, SIGNAL = 4.4; EXPRESSED IN FETAL LIVER, SIGNAL = 5.9; EXPRESSED IN BONE MARROW, SIGNAL = 4.5; EXPRESSED IN ADULT LIVER, SIGNAL = 6.8
ggaggtctacatgcctcagctactctgagatgtgtctccactgaaccctctcttatttctccagaccatcaatgtctctgatctacactccttcaatagaacaaattacaccactggtcccaaactgttgactactgtgcccagtgtcagtccatatgccattgttgtacagaccagaaaaggggctcttcctaaagctttcttctctcaagtattagaaagtgacataccgacatgcaaattcaccaggcacagatataacaggcaccccataagcatgggcaatgtgtgtaggcctgcccaactccaactgcacgtacttgtcctgttctccatgtggtttccaatccttggatgtgtacacagcatacagactgctgacagcatgcagactgctggcaccatgagaacactcaccatcttcccccaacacctcacggtaacaagcagaggtccaaacaaaccacggagtcctgacaagaagctgactgctctgacaatcttcttcctgacacagaagtccatttcgtagtagtgtcatttctgtggggtcttcctgaaga

SEQ ID NO: 8036 - DNA, 599 bp, Homo sapiens
  MAP TO AC025289.1; EXPRESSED IN PLACENTA, SIGNAL = 2.7; EXPRESSED IN BONE MARROW, SIGNAL = 3.3; EXPRESSED IN FETAL LIVER, SIGNAL = 3.9; EXPRESSED IN ADULT LIVER, SIGNAL = 2.1; EXPRESSED IN HEART, SIGNAL = 3.1; EXPRESSED IN BRAIN, SIGNAL = 1.4; EXPRESSED IN LUNG, SIGNAL =  11; EXPRESSED IN HELA, SIGNAL = 4.9
caattgcattcgttctcaggtatgacagacatactttggtcccccataattaatttctacaggactgatttcttagagagtctcacatgaaaacataaaacacagcggcagcagacttaccatgcttcatcatcacagtgagaaaccggacgatgactttggagcacggcctaataagcacctggcgtttgcctctcttttcggcattgttgatactcttgagagcatctgccaggacattcatgcgcaccattgtggctgttcaaggaagacaaaacaggaggttttactggcattgccaacatcaacagacaccaaccattacactgcggaagtatcctttcctttctggccccaccttggcgaagttttctcaagtctaagcaggctgcttctccatttcccaccacccaggaaaattcctatttactacggttgttgaaaacaggttatcgggacgtcagcctgcacattttgaaactcattcattcactaaccactcttcttcgaatcgtgccacacaccaacgtctggagataataaaatgtgggacaaaatccacttgacacaagacaacgtgagaactggcagaaactgcc

SEQ ID NO: 8037 - DNA, 571 bp, Homo sapiens
  MAP TO AC002041.1; EXPRESSED IN ADULT LIVER, SIGNAL = 5.6; EXPRESSED IN FETAL LIVER, SIGNAL =   2; EXPRESSED IN PLACENTA, SIGNAL = 1.7; EXPRESSED IN BONE MARROW, SIGNAL = 1.6; EXPRESSED IN LUNG, SIGNAL = 3.2; EXPRESSED IN HEART, SIGNAL =   2; EXPRESSED IN BRAIN, SIGNAL = 1.8; EXPRESSED IN HELA, SIGNAL = 2.1
actgatttgggcttcccttctcatcaccctcaatattagtgtcccttgtgaatcaggtccaggtgcggctgctccacatggggccgttcttccatttcctcagtgtttgcagaagtcctgtgtgaaatttattgatggagtcagagggggaaaaattgtacacccagtggctcactgagactctcatgcaaagcctctgatttcacctttactggctacagcaatgagcttggtccagccagcttcacgacagggatttgtgtaggtggaaacagtgagtgatcaagtgggagttctcagagttactctccataagcacaaataaattaacagtcccaagtgacaccttttaatgtgcagtctaccttaaagggaccaaactgaaagtcaaggacaaggccttgtaatactgtgagagacacaggagagggaatatctgtgtgagccccaacagaaaaatctctgcaggaagacaggagggagctgcatggtagatgctcctcagaaccaccagggcgccttgaggacaacctgggggcactcagaaccaccagggtgtgcttaggaccat

SEQ ID NO: 8038 - DNA, 551 bp, Homo sapiens
  MAP TO AC012566.3; EXPRESSED IN ADULT LIVER, SIGNAL =   2; EXPRESSED IN FETAL LIVER, SIGNAL =   2; EXPRESSED IN HEART, SIGNAL = 2.2; EXPRESSED IN BRAIN, SIGNAL = 2.5; EXPRESSED IN PLACENTA, SIGNAL = 1.4; EXPRESSED IN HELA, SIGNAL =   2
tctgtggagctgatggactgcttctttttttatagagccaaatcatttttgtaggaatcagctttcaagtgtataaatttcagtttggaaattatttcttgcaatattgctttcagtaattctttttaaaacattaattagctgaataaatccaccaaggaacagagtgtttctgcaaaataatacgataatttgtactgaaaatgtgattgaatactgggaagaaataaaagaaacaaaaagatcacaaagttatagctattcaaaatatgggatgaaaatataccttcttttgtttgatctaatatatctaatttttcatcccactttctttttctatttctttatactctcaatttagacagtgtctcctctgtgtatttattacaaagattccagttgtgactcacaattcagaattcatgctgatagcctacaggaaaaattctccattactgagataaatttcaacattaacaaaaagtaagccttttcctgctattacatttttttttttttgagacagggtctcactgttgtccaagctggaa

SEQ ID NO: 8039 - DNA, 501 bp, Homo sapiens
  MAP TO AC002523.1; EXPRESSED IN BONE MARROW, SIGNAL =   2; EXPRESSED IN LUNG, SIGNAL = 3.5; EXPRESSED IN BRAIN, SIGNAL = 2.4; EXPRESSED IN ADULT LIVER, SIGNAL = 2.4; EXPRESSED IN FETAL LIVER, SIGNAL = 2.4; EXPRESSED IN HELA, SIGNAL = 2.4; EXPRESSED IN HEART, SIGNAL = 2.4; EXPRESSED IN PLACENTA, SIGNAL = 2.7
tgctccctccacaggtaatcaccccatgagataaaaaggagccccagcaggtgacttgcatgcagatgtggattgatttaatttcagatgggattgctcaagagaaaattggcaggcaacccaatggaatgctgttggctctgtgcaggcaattgtccccagagcaacaattccggaaaatgcccaagagggggcaaaacaatgttgctcaacctaatcccactgggacgcttcaactcaaggactatttgcaggcaggtgaagatatggagactttcctgtttgattatggaactgaccaaggtgcctggctctgggggacaccagatgaccagaggccatatgtagagctggcaatccactggtcccccacgaatgtacagtgggtcctagcacaggtagatactggtgcagactgcagtcttgtttatgggaacctgggtaagtttccaggcagagctgcatgtattaacggttatgggggccagtcagtgaaggtaa

SEQ ID NO: 8040 - DNA, 522 bp, Homo sapiens
  MAP TO AL121985.13; EXPRESSED IN BONE MARROW, SIGNAL = 6.1; EXPRESSED IN HELA, SIGNAL = 7.8; EXPRESSED IN LUNG, SIGNAL = 5.9; EXPRESSED IN BRAIN, SIGNAL =   7; EXPRESSED IN PLACENTA, SIGNAL = 5.5; EXPRESSED IN ADULT LIVER, SIGNAL = 6.5; EXPRESSED IN FETAL LIVER, SIGNAL = 7.5; EXPRESSED IN HEART, SIGNAL = 6.4
gaggttccaaaggcttttccaggaggttgttgtgttggactgagtgggtttctcagatctctccaggacccaaagggggtgagtaattggtgacaaggacagggaatcaggcttattttatggttctctgtgtttatagggtcagcagcctctggacccgtgaaagagctggtcggttccgttggtggggccgtgactttccccctgaagtccaaagtaaagcaagttgactctattgtctggaccttcaacacaacccctcttgtcaccatacagccagaagggggcactatcatagtgacccaaaatcgtaatagggagagagtagacttcccagatggaggctactccctgaagctcagcaaactgaagaagaatgactcagggatctactatgtggggatatacagctcatcactccagcagccctccacccaggagtacgtgctgcatgtctacggtgagcaaaatcagttccaatggtggatggctgccttggtgaggtggtgagctccttgacat

SEQ ID NO: 8041 - DNA, 533 bp, Homo sapiens
  MAP TO AC018552.2; EXPRESSED IN PLACENTA, SIGNAL = 2.3; EXPRESSED IN BRAIN, SIGNAL = 1.6; EXPRESSED IN HEART, SIGNAL = 2.1; EXPRESSED IN HELA, SIGNAL = 1.8; EXPRESSED IN BONE MARROW, SIGNAL = 1.9; EXPRESSED IN FETAL LIVER, SIGNAL = 1.8; EXPRESSED IN ADULT LIVER, SIGNAL = 2.9
aatgaccgaggtggatgaagtactctatgattgggaaataaagaattacggaccagctaagggaggcaagaagaaggaccctaaagcccccaaaaggctaccatctggattcttcctgttctgttcagaattctgccccgaggacaaatccacaaaccctggcatctctattggagatgtggcaaaaaggctgagtgagatatggaataacttgagtgacagtgcaaagctgcctgacatcactacggcagcaagctgaagaagtgtgagaagggtgttgctgactcgaagtctgaaggaaagttcgatggtgcaaaagttaaagttgcctggaaaaaggtagacaaggaagaggaggaggaggaggaggaattaaaaaacctgtttatccatctccttgtcaatatcttagagcagaggagtgtcataattcaggggtccccaacccccggtccatggaccagtactcgtctgtggtccattaggagccaggcgtcacaggaggaggtgagcggcaggcgagcaagtattac

SEQ ID NO: 8042 - DNA, 526 bp, Homo sapiens
  MAP TO AL133124.2; EXPRESSED IN BRAIN, SIGNAL = 1.6; EXPRESSED IN PLACENTA, SIGNAL = 1.9; EXPRESSED IN HEART, SIGNAL = 2.2; EXPRESSED IN ADULT LIVER, SIGNAL = 2.2; EXPRESSED IN BONE MARROW, SIGNAL = 7.6; EXPRESSED IN HELA, SIGNAL = 2.1; EXPRESSED IN LUNG, SIGNAL = 2.7; EXPRESSED IN FETAL LIVER, SIGNAL = 3.6
aggtgagagcagaaaccaggctgggagggccagcagcggcgagggggagtccgggaagccctggggctggggaggaatcctctaggatcatgatcgcagctgctcttattgcgcgcgtgctgagtctgcgggtacagtgccaggcactgcacgtgcacctcgccacctgatcagcacaacctctgtctgagagaggtctgatttacggctaaggaaaagaaagctgaaggtagtggaaaaggtccctaaagtatctctggctactcagggagtcacaactcccacccctcctcctctcttactccctccctttccccctcagctgaagctgaagaagatggggacctgcagtgcctgtgtgtgaagaccacctcccaggtccgtcccaggcacatcaccagcctggaggtgatcaaggccggaccccactgccccactgcccaactcatgtgagtcttcgcactgcatcagttagtgctcccgctccgtgcctcctctgcccatccctcccccttctaatgccatt

SEQ ID NO: 8043 - DNA, 580 bp, Homo sapiens
  MAP TO AC022377.1; EXPRESSED IN PLACENTA, SIGNAL =   2; EXPRESSED IN HEART, SIGNAL = 2.7; EXPRESSED IN BRAIN, SIGNAL = 2.3; EXPRESSED IN LUNG, SIGNAL = 1.7; EXPRESSED IN HELA, SIGNAL = 2.9; EXPRESSED IN FETAL LIVER, SIGNAL = 2.9; EXPRESSED IN BONE MARROW, SIGNAL =   2; EXPRESSED IN ADULT LIVER, SIGNAL = 2.5
tgaaacctggaggttatgccgcccatatgtccattttacatgagccagtttgaagcgggctcactgtcacacagaaccaaacgttctaatgcaagtaccttgtaatagtcacaatactgagcgaacatgatcacagttataatatggtagaactgactgtttcgatggaaatgtagatcaaataatactacgtaagatgagggaaggaggggcaaggtttttgagaaaaagagatatagcaaggaaaaacagaagtttcctggaggacaagatgttgaaacagagtcttgaagggtggccagaagcttgttaggcagacagtgcatggaaaggtattgcttgcagatggaacaacatgtgcagaggcttggaggtgaaaagcagcagaaagtcatgagacaacctgccaggggtttgggcttcattatgcgggtaatggcattccaggaggtttctgagtagaggagggacatggtgaggtttgtgattaaatagatcccctcatgggggaaggattagtggggagagattagaggctgggataccagaggagaggttgggatggtgagtctggagggaa

SEQ ID NO: 8044 - DNA, 535 bp, Homo sapiens
  MAP TO AC016372.2; EXPRESSED IN BRAIN, SIGNAL = 5.2; EXPRESSED IN HELA, SIGNAL =   2; EXPRESSED IN FETAL LIVER, SIGNAL = 2.6; EXPRESSED IN LUNG, SIGNAL = 4.3; EXPRESSED IN PLACENTA, SIGNAL = 4.9; EXPRESSED IN HEART, SIGNAL = 7.4; EXPRESSED IN BONE MARROW, SIGNAL = 1.7; EXPRESSED IN ADULT LIVER, SIGNAL = 3.3
gtttgattcactggggatggctattaatatgatctaccacagactactttaagtaaactgtttctatgtggcctagattgagtttgtattttgcagaaactgaattctgctggaatgtgccagttagaatgatcctagtgctgttattatataaacctttttttttgttgttctgtttaattgacagcttttcttagtgacactaaagatcgaggccctccagtgcagtcacagatctggagaagtggtgaaaaggtcccgtttgtgcagacatattccttgagagcatttgagaaaccccctcaggtacagacccaggctcttcgagactttgagaaggtaagtcatgtgagtggataattgttatcccaattagaagcagtactatggaatagtgatgcctgataaaaatatgacccatggattggtccggattatggatggtattatcattatggtgtctctttcaagagcatgtcccaataaacatatgctctgtcagctgtgtgctggggggtgtggttatggacccttg

SEQ ID NO: 8045 - DNA, 560 bp, Homo sapiens
  MAP TO AC005411.1; EXPRESSED IN BRAIN, SIGNAL = 2.6; EXPRESSED IN PLACENTA, SIGNAL = 1.7; EXPRESSED IN BONE MARROW, SIGNAL =   2; EXPRESSED IN LUNG, SIGNAL = 2.1; EXPRESSED IN ADULT LIVER, SIGNAL = 2.4; EXPRESSED IN HELA, SIGNAL = 2.3; EXPRESSED IN FETAL LIVER, SIGNAL = 2.2; EXPRESSED IN HEART, SIGNAL = 2.5
agcacaaaggccgaaatatgaacaaagtgcacgctcctcacctgcctgcctgcggctgccactgagagcaacactgccctcttcagtagcagctgttgctaccccccagctgaacattctacccagattctggggaccaccctgactctgcctaccacagccagtgcctgcactgccagggaactgaggacaagcccccgtggcccagcttcactccctgctcccagtgccagagcatgtaataaagtggcctggggaccacccaggccagtccaccactgtcggcctggcagcatcaacctccctcccactcgccacttcagccctggtggcagcaacccagagtgtcagaagctgcaggcaggggaatctgggcatgtgagcactcctcccaagtgcctgcagttggacacacccaccctgctactaccaccatggctagaatccatctgcatgtactacctgtgggcctggaaattgacccacctagcccaacacagccactgtgcagtgtgcaccactcaagactcggagagttgtcccaccacttaactgccatt

SEQ ID NO: 8046 - DNA, 574 bp, Homo sapiens
  MAP TO AC012664.3; EXPRESSED IN BRAIN, SIGNAL = 2.2; EXPRESSED IN ADULT LIVER, SIGNAL = 2.3; EXPRESSED IN BONE MARROW, SIGNAL =   2; EXPRESSED IN LUNG, SIGNAL = 4.2; EXPRESSED IN PLACENTA, SIGNAL =   2; EXPRESSED IN HEART, SIGNAL = 2.1; EXPRESSED IN HELA, SIGNAL = 2.2; EXPRESSED IN FETAL LIVER, SIGNAL = 2.3
tttcatgccaaacaatcgagcatccattgttaatccaaagttaactggccaatatgggacatgggaggtcaatataaagaatataatataaagaatacaataaatacattctaaaagctacctaccattacagctccattatcctggcccacaaatatccgtctgctgtcatgatggtaagccatagcagagcaaggagctgccagaaagacaaagaccacattaccagcaaagctaagcactttaagttgttcttcaaagtgattaagaactatatgataagaactatataatttaggttcacagaaagagggtaaaaacgttttatacaaattacgtaaattgaaaatgttattaaagttctctctgttgtcttagtttaaaaccttgatttcacaaatcttctcagttgtttctataatgctgggtgaagtgagccagcatgaagcttcatctgactgaaagtactacctgtagtctggcaagccttggggaccagtgcttgtagtgtgtgacctgctgcccaaaagctcaggaggtcatcccgcccctgccacccttcccatcaaatgtc

SEQ ID NO: 8047 - DNA, 563 bp, Homo sapiens
  MAP TO AC011483.2; EXPRESSED IN ADULT LIVER, SIGNAL = 3.2; EXPRESSED IN FETAL LIVER, SIGNAL = 3.3; EXPRESSED IN LUNG, SIGNAL = 2.9; EXPRESSED IN PLACENTA, SIGNAL = 2.3; EXPRESSED IN BRAIN, SIGNAL =   3; EXPRESSED IN BONE MARROW, SIGNAL = 2.7; EXPRESSED IN HELA, SIGNAL = 3.5; EXPRESSED IN HEART, SIGNAL = 3.1
tctcaaggacttctgggtggagggcacaggagcctgaacttacggtttgccccactccactgtcctcccaagtgagtctcccagatacgaggactgtgccagcatcagcttcatctgtaccacatcttgtaacagggactaccagggccctgatgaacaccatggtgtgtgcaggaagagcgggtgaaggacggactcctgtgtggtcagagcccagagggggccatgacgggtggggagaggctgtggactggctcgagaagtgggatgtggttgtgtttgatctccttggccagataaagtgctggatatagcattgaaaacggagtatgaagacagttagaatggagggtcaggttggagttgagttacagatggggtaaaatctgcttcggatgagtttggggattggcaatttaaaggtggtttgggatgcatggctttgggatggaaataggtttgtttttatgttggctgggaaggggtggggattgaattggggatgaagtaggtttagttttggagatagaataatggagctggctattgcatgcgaggatgtg

SEQ ID NO: 8048 - DNA, 520 bp, Homo sapiens
  MAP TO AC021097.3; EXPRESSED IN BRAIN, SIGNAL =   2; EXPRESSED IN PLACENTA, SIGNAL = 1.5; EXPRESSED IN HELA, SIGNAL = 1.7; EXPRESSED IN LUNG, SIGNAL = 2.9; EXPRESSED IN HEART, SIGNAL = 2.8
ctcttggagttgaggatggggaagcctcagggcaagggtccctgcataccttgcagtagaagtagcgactgacggcctcctgggaccagggctggtggtagaactcagcccggcgctcctcttcagggttgccggctacatctgtcatcacctgggagggagcgtggggtgagccctgagccctgaatcccctcacctgcccctggagtacaacgtttactctctttcccgctgtgcttgtcttccactccagtactccctgagtctccctcttcaccttgaggtcccggctctgggagcggagcaggtcttggacatagcctttggggtctctggagaagcttagcatgaagtccctctggatcttgagctggtttatggactcaatcgtctcatggatctgcaggtagaaagatagatgctttccacctggctttggtgatgtgggagacgaggggaaaggaagcgggtgggaaggggagggagagggggtttcttctgtgaaggacaacccctcaga

SEQ ID NO: 8049 - DNA, 588 bp, Homo sapiens
  MAP TO AC011298.2; EXPRESSED IN BRAIN, SIGNAL = 3.3; EXPRESSED IN ADULT LIVER, SIGNAL =   3; EXPRESSED IN HELA, SIGNAL = 3.1; EXPRESSED IN BONE MARROW, SIGNAL = 2.6; EXPRESSED IN LUNG, SIGNAL = 2.9; EXPRESSED IN PLACENTA, SIGNAL = 2.3; EXPRESSED IN HEART, SIGNAL = 2.7; EXPRESSED IN FETAL LIVER, SIGNAL = 2.7
atgacagggttaggcaggtgggcgggttggaatgtgtgtcccagaagtgacggccagggtgggcgagtggcacccttgcagcctccgacctgccccctggctcagcctccaggggcactgggtaggcggcctccccattatgcatttcccctcataggatccagaaacgggagggtacagcctggaggtgagccagcgttgccaagacctcgacactggcagcactgcccagctggtgaaaggtggtctggctgaggctgcgccggcccagacccagagagctgccagttcagagacagcagtgcaggcctggacccgagacctcatgccccagtggtttttgcctgcttcactctaccctctcctctggcctggagaacaaaagctgaaccaaagctttaccccacggcttaggagccagaggccggagccatatctgtgggcagccacgtttcctttagccagtgggattgaaacctgaagcgagacaccctgcttcaaatgcctggatcccgtctggccctgaagacattggagttctgggatttcgcctatgtgccagcagcctctgctccccagtaagctctg

SEQ ID NO: 8050 - DNA, 546 bp, Homo sapiens
  MAP TO AC023000.2; EXPRESSED IN BRAIN, SIGNAL = 1.9; EXPRESSED IN PLACENTA, SIGNAL = 1.8; EXPRESSED IN HELA, SIGNAL = 2.5; EXPRESSED IN BONE MARROW, SIGNAL = 1.6; EXPRESSED IN FETAL LIVER, SIGNAL = 2.1; EXPRESSED IN ADULT LIVER, SIGNAL = 1.7; EXPRESSED IN HEART, SIGNAL =   2
tttctagcaggccacagacctgtaccagtccatggccccaggattggagactcctgatcgaaatcatgagcatagagttgttcataatataatcttttcttattatccttttaatgtccgtgagatcagtagggatggcccctctttcctttcttcctctttccttcctattaatagtgtgtgttttctctctatttttcttggtttgtctcactagtctaggcttatcaattttattgatcttttcaaacaactcattgatcattgattatgacattttggaggacatgaattagatgtttctgtcttctgtcctcatactactacctttgccagggtagagctgggtctgcttccaagcgtagttagccacaatctttgcccagaggcagacagatgctctgaggcgctcaatcaagctgattttggccctaatcctgccctaggagacaggggcagaattaatctaattttcaacagttaaatgatgaagaaacttattttgtccctttcatggaaattacagatgagttggaaaggcagaca

SEQ ID NO: 8051 - DNA, 600 bp, Homo sapiens
  MAP TO AC005212.1; EXPRESSED IN BRAIN, SIGNAL = 3.2; EXPRESSED IN PLACENTA, SIGNAL = 2.5; EXPRESSED IN BONE MARROW, SIGNAL = 1.8; EXPRESSED IN FETAL LIVER, SIGNAL = 1.9; EXPRESSED IN HELA, SIGNAL = 2.4; EXPRESSED IN HEART, SIGNAL = 2.5; EXPRESSED IN LUNG, SIGNAL = 9.9; EXPRESSED IN ADULT LIVER, SIGNAL = 2.3
gactctggagggaggtcagctgcgtgcctagcccagaggctcctggggatgcccttgagggaagggctgtctgcatgcccctgcttctgccttgcagcccatcaccgtgccctattgtatctcttccagaagcggaaggtcctggtgacggtcctggaactcttcctgccattgctgttttctgggatcctcatctggctccgcttgaagattcagtcggaaaatgtgcccaacgccaccatctacccgggccagtccatccaggagctgcctctgttcttcaccttccctccgccaggagacacctgggagcttgcctacatcccttctcacagtgacgctgccaagaccgtcactgagacagtgcgcagggcacttgtgatcaacatgcgaggtgagacatgccggggctctcggtgccaggcctagtggtgcctccacgcagctgggcaggcaggggtcgagcccaggatgtgcgaagcagctgggtgaggagttcaccctgtgcagacttggcctctgcttcttcccgcatcactacttcaacctgtaaaaggcactgctgttccttaaacctctgcctgcctgcgagtaaatagc

SEQ ID NO: 8052 - DNA, 530 bp, Homo sapiens
  MAP TO AC015971.2; EXPRESSED IN BRAIN, SIGNAL =   2; EXPRESSED IN PLACENTA, SIGNAL = 1.5; EXPRESSED IN BONE MARROW, SIGNAL = 1.8; EXPRESSED IN HEART, SIGNAL =   2; EXPRESSED IN LUNG, SIGNAL = 4.3
ctcggctacctgttcgagagccatggcaccaggagctctcgcgtcccacagccgactcctaaagactcttcctccggcccccctgtcgagtgggagtccccggaaatgggggccgggcggtatcgggcaggcggtggggagaagagtgtcctgtcatttaccaacttcactacgccccacacagatccacccgcttatctgccgccgccgtagcccttaccagttctttgggcggcttctcctgggtctttccaaacagccccatgacgaactgaacccgtcttgccccttccggctttcagttccccgcgcccaggcaggtcacgggcagccgcctgggcggggcccgcggaaaaggaggtagtcccaacccccagagtagggagcggcggcactaggggatgttgcgcatgcgccatacgcctgcgcagaatcgagtgagtgggagactagtcaaaaaggctgacgtcatcgcacatgttctggtcatgtctgtgtgggggagaccacggattcggtgcttttcgtaa

SEQ ID NO: 8053 - DNA, 577 bp, Homo sapiens
  MAP TO AC008469.4; EXPRESSED IN BRAIN, SIGNAL = 2.7; EXPRESSED IN PLACENTA, SIGNAL = 2.8; EXPRESSED IN FETAL LIVER, SIGNAL = 3.7; EXPRESSED IN LUNG, SIGNAL = 4.3; EXPRESSED IN ADULT LIVER, SIGNAL = 3.1; EXPRESSED IN BONE MARROW, SIGNAL = 2.9; EXPRESSED IN HELA, SIGNAL = 4.2; EXPRESSED IN HEART, SIGNAL = 3.7
agttgattcttggcacagccatcaggtggcggttggcttagaatgttctgagttctgagccatcttggggaccaagtagaccgtcggtcccttggggtgttcactggtcatgagggctgcctgtatgaacactgcctacttcacagtgatgcgggcggcttagccagggacccgaggctgtgtctcccagggctctcctgatggcgtcctttgcctgccttcaccaccagggagggtggcccagcagcagctccgcccgtgctctcacccacctcctccacacacaccagccctgtgtcctcagcacccaaggctgccagaggtccttcagcagctgccacggctgacagtgactctatgtttcctaggcttcttctaccgccagaattggcggtttctctcgctggattcttgggacctgatccaggcagcacactcggtaaagtcttctttctttgtctgagatgggaattttatttcttttggtttctttctattttctctgaattaagatatgtaattcttaccacggactttacagatgagccacagaatttcttggtgggcagaggtatgt

SEQ ID NO: 8054 - DNA, 593 bp, Homo sapiens
  MAP TO AL049829.3; EXPRESSED IN ADULT LIVER, SIGNAL = 1.9; EXPRESSED IN BONE MARROW, SIGNAL = 1.8; EXPRESSED IN LUNG, SIGNAL = 2.4; EXPRESSED IN PLACENTA, SIGNAL = 1.7; EXPRESSED IN FETAL LIVER, SIGNAL = 1.8; EXPRESSED IN HELA, SIGNAL = 2.2; EXPRESSED IN HEART, SIGNAL =   2; EXPRESSED IN BRAIN, SIGNAL = 2.1
ttctggtgactctgtggcagtggtggcatctgagagggctcctcaggctctaccttcaatcctttcgtctgggtaggcttgctaagagttggaggacctattccaataccaacttgctctggagctggcactggaggaggaggcacctcctctgggggccgtcccgcatgatgagtaaaagagagaagggatttgaaatggagttggtcccgacggtagactactcgggctcgagtctcttctatttcttcagatgaccagctaataccacagcggaggcgctgggccataaaccaagtcttgactttctccatctgcaacccataacgtaggcagagaagggcaatgtctgctaggctgggatagggaaagtagctgaaggttttgagcaggtgttcattgctgtctagctcactggtctgggctgcttgcgtccacacaagctgtagctcctcagagattggagggaggcagatgagccccgctggtgaactactgagaccgctggcctctttattaggaggcatggtgccttctgatttgtgcccttcagagatagctgcaataagaagacaaacagctcaatcactggg

SEQ ID NO: 8055 - DNA, 584 bp, Homo sapiens
  MAP TO AC020557.2; EXPRESSED IN BONE MARROW, SIGNAL = 1.6; EXPRESSED IN FETAL LIVER, SIGNAL = 1.8; EXPRESSED IN HEART, SIGNAL = 2.1; EXPRESSED IN BRAIN, SIGNAL = 1.9; EXPRESSED IN PLACENTA, SIGNAL = 1.6; EXPRESSED IN HELA, SIGNAL = 2.1; EXPRESSED IN ADULT LIVER, SIGNAL = 1.9
ttccagagacgtaaggctggttcaatagttgaaagtcaatcaatgtaatatactatattaatagataaaagaggaaaaaaatcacatgatcatgccaattgatgcagaaaaagcacttgacaaaattctttacccattcatggttaaaacactcagaaaaatcggaatagagaagttccacttgataaacagcatcaagaaatctacagttaataatataattaatagtgaacaactcaatgcttcctccttaatatcaaaaataatgcaaggatgtttgctttcaccactcttattcaacatgatgctggaatttccagccagtgtggtaaagcaagaaaaggaaataaatggcagacagattggaaagggaaaaaaaagcaaaactgtttctattttcaaatgacatgattgtctacctaggaaatcccaatctatccacaaaagcactcctgaaacaataagtgagttcaagcaaggttgcaggatacaagataaacatacataaattttatttctatgctctgtcaatgaacacatggacactggaattaaaaacgtgacaccattcacaactgctcaaa

SEQ ID NO: 8056 - DNA, 562 bp, Homo sapiens
  MAP TO AL133380.3; EXPRESSED IN FETAL LIVER, SIGNAL = 1.7; EXPRESSED IN HEART, SIGNAL =  22; EXPRESSED IN PLACENTA, SIGNAL =   2; EXPRESSED IN BRAIN, SIGNAL = 1.8; EXPRESSED IN HELA, SIGNAL = 1.9; EXPRESSED IN ADULT LIVER, SIGNAL = 1.9; EXPRESSED IN BONE MARROW, SIGNAL = 1.6; EXPRESSED IN LUNG, SIGNAL = 2.7
atgttgatgggggaagtgagcagcctcatcttctgagggaagcccagtgaaatgtccttgatcatgttctgtgcatgagtctacacgtagtgtgaagagtagccacctccttcctattttcctaccattttgtcaacccagagctgcttctttgtttgccaaggagactgagttctacattgatgcagctgaagctcctctgcagggttcccctgtggccctatacaattaactgcatctcttcggagggatgttgacaatttctggaacatctatagtctgatttctgcgaatggtcttcattcttgcagtagatacggcaaaagccacttttgttaatttaaaggctcacaaaccattccgtttggaaccattctagtacctgacctgggatcaaaatcatgcatacaagtgtgaattcctcttcccttgcctgtctctattctgctctcctttctctacaaagctcctcaaagagctgtgagtcagtagcctcacttgctagttctgttgataccccggagcatcatcattcagaacgagttacctggatgcctgcatt

SEQ ID NO: 8057 - DNA, 522 bp, Homo sapiens
  MAP TO AL133246.1; EXPRESSED IN BRAIN, SIGNAL = 4.8; EXPRESSED IN PLACENTA, SIGNAL = 4.3; EXPRESSED IN HEART, SIGNAL = 6.4; EXPRESSED IN BONE MARROW, SIGNAL = 4.1; EXPRESSED IN ADULT LIVER, SIGNAL = 5.3; EXPRESSED IN HELA, SIGNAL = 8.5; EXPRESSED IN LUNG, SIGNAL =   5; EXPRESSED IN FETAL LIVER, SIGNAL = 7.3
tccagttgagtgggagaaggactagtgattgtttgtgatttttgtcattataacaattttttgcagttctgggttttattttttcttctccttttagatacgtttgaaatggtttctgaagatgaagatgggaaattgggatttaaagtaaattaccactacatgtctcaggtgaaaaatgctaatgatgcgaacagtgctgccagagctcgccgccttgcccaggaagctgtgacgctttcaacctcactgcctctgtcttcatcctctagtgtgtttgtacgctgtgatgaggagcgacttgatatcatgaaggtaaaaaataatgataataaagcactctcccttatctccttggctcatctaattactcaaatttttatacaaaactggaaatactatacaaataaattatacaaaacactagaaattttggtgaccatttttagacggcagtgaaaggagcctccccacccctcccccccttttttttttggcgacaggatctcacttttgcccaag

SEQ ID NO: 8058 - DNA, 558 bp, Homo sapiens
  MAP TO AC024006.2; EXPRESSED IN BRAIN, SIGNAL = 3.9; EXPRESSED IN HELA, SIGNAL = 3.5; EXPRESSED IN FETAL LIVER, SIGNAL = 3.3; EXPRESSED IN PLACENTA, SIGNAL = 3.1; EXPRESSED IN LUNG, SIGNAL =   6; EXPRESSED IN HEART, SIGNAL = 2.7; EXPRESSED IN BONE MARROW, SIGNAL =   3; EXPRESSED IN ADULT LIVER, SIGNAL = 3.3
aattacccgacacctccctcagaagcctatgctcaaactccatctcccacagttcctattagtgtgtggagagacactgacttgtatctcctgcccctattttaaattgtatctctttaattccaggttaacataagacctgcacattctatcacaatctaccttcagagcaatggagagaaagataagattaaactttcaaacacagcaagtctgcttatcccattgtaagggttttgatttggaaggactgggatcctgagacatgaacttgagaaacttgggtagatgcactagaaaattttgaaaacctagacttgtttccctcataggatcttcagaagcagcccactcctctgtctctcaagacagcatgcctcccacagcataagtctctgctccccctcatggccagaagatcaacaaaataggattgttcacaacgtaacttgataaataaattgctgtgttacctgaaggaggaatgatactatatcgttaaagatctgtaggagtaagtccacatgcacttgtatgagctgggagagaatggatctg

SEQ ID NO: 8059 - DNA, 546 bp, Homo sapiens
  MAP TO AL136418.1; EXPRESSED IN BRAIN, SIGNAL = 1.6; EXPRESSED IN FETAL LIVER, SIGNAL = 2.3; EXPRESSED IN HELA, SIGNAL = 2.1; EXPRESSED IN ADULT LIVER, SIGNAL = 1.8; EXPRESSED IN BONE MARROW, SIGNAL =   2; EXPRESSED IN HEART, SIGNAL = 1.9; EXPRESSED IN LUNG, SIGNAL = 2.8; EXPRESSED IN PLACENTA, SIGNAL = 8.6
tctcaacactttgcagaggctctccggtagtaacacatgtaagaatgtttttgaatctttgctttttaatcttcagaaaaagtgtttttgtataatgctaatatattaaacatctttcttcccattctctttctaggatcttctgaggtcggagcttccagattcaattgaaagtgcattgcagggtgatgaaagatgtgtgcttgatactatgcgtttggttgaccttctcttggtgctattatttgaaggacgaaaagctttgccaaagtctagtgctggatctacaggcagaatcccaggactccggagattagatagttctggggagcgctcacatcggcagcttatagattgtattcgaagtaaagataccgatgcacttatagatgcaattgacacaggaggtcagaaaatatttttttaaatataaaaagaaagttgtgagataaccatataggcagtttctagttttcggacagtactcttagaaatccagataacaaagtggcaccccttcgatattctcccctatccctgtgcata

SEQ ID NO: 8060 - DNA, 573 bp, Homo sapiens
  MAP TO AC019205.2; EXPRESSED IN BRAIN, SIGNAL = 2.8; EXPRESSED IN HEART, SIGNAL = 4.9; EXPRESSED IN ADULT LIVER, SIGNAL = 3.2; EXPRESSED IN BONE MARROW, SIGNAL = 2.5; EXPRESSED IN FETAL LIVER, SIGNAL = 2.7; EXPRESSED IN HELA, SIGNAL = 5.6; EXPRESSED IN PLACENTA, SIGNAL = 2.7
tccagaaggccaaattgaaccctcgttctgggatttctggctcctactcccgcaggccgcttgggtgactgtccttttttggagaggatatagagacacagctgtggcctctgcacactgctcttcttccaggctcaggaaaggccctcgcccaggatgtcgccactcagaaggccgagacccagcggtcttcaatagaagtccgggaggccgggacgcagcgttcggtggaggtccgggaggccgggacccagcgttcggtggaagtccaggaggtcgggacacagggttctccggtggaggtgcaggaggccgggacccagcagtctctccaggctgccaacaagtcggggacccagcgatcccccgaagctgccagcaaggcagtgacccagcggtttcgcgaggatgcccgggacccagttactagattatgaaggcatctcaggccctggagccagagccagtcaggggttaaagtgaaagcccgtatttccgcccagaagctggggttggggagaggatgtggattttttgttttaccctttctgttgcatggttgcaaacacaaac

SEQ ID NO: 8061 - DNA, 529 bp, Homo sapiens
  MAP TO AC011505.2; EXPRESSED IN PLACENTA, SIGNAL = 2.2; EXPRESSED IN BRAIN, SIGNAL = 2.5; EXPRESSED IN BONE MARROW, SIGNAL = 2.5; EXPRESSED IN HEART, SIGNAL = 2.7; EXPRESSED IN ADULT LIVER, SIGNAL = 2.8; EXPRESSED IN FETAL LIVER, SIGNAL = 3.2; EXPRESSED IN HELA, SIGNAL = 3.2
ttcaatctgtgcccttctcccccaagcccctcgcctgagctcacagcaggctgtcacatatgctggccttgttaggccctagaaatggcttttggatcagtgtttctttcctgcaccttcttaagagagctgaggctcagcagggcccaggcctggccacagggattgtcatgattcttcagaggctattgacaaggccccacctggcaagctggcatccaggacccaggcaggacctgagccctgctgcctcagcagccagcttcctgaggcccctgaacacactttccaaactgaggactgattctcatcatggcctactcctgtctcccagctcctgctcccacagagcttcctgctctagaacaagctttcttagagtctccccgccctgcctcgacccaggctggcctttgagtggaggcagccccacccagagccagagcttcaccacctctgccaactcaagcagcccccgccttgtgctggcaggtatggcgaaaatgggagagacgagttccagttggga

SEQ ID NO: 8062 - DNA, 581 bp, Homo sapiens
  MAP TO AC017024.3; EXPRESSED IN BRAIN, SIGNAL = 3.3; EXPRESSED IN PLACENTA, SIGNAL = 2.2; EXPRESSED IN FETAL LIVER, SIGNAL = 2.9; EXPRESSED IN HELA, SIGNAL = 2.7; EXPRESSED IN ADULT LIVER, SIGNAL = 2.6; EXPRESSED IN BONE MARROW, SIGNAL =   3; EXPRESSED IN HEART, SIGNAL = 2.5; EXPRESSED IN LUNG, SIGNAL = 3.3
gctcctgtctgtatttccagttgaattttcctagtactgagattaaataataataaatatataaaatcttgtttacaacatgataaaatattcacagtactaatttaatattaaaatataaaatcatttttgggaaatacagtcttattttcacttgtaactttttagtgattttgttaaatcttcaatttcatatggaagtatgtacatcaaatggatactatttgcataaaaaattgtgaaatattcattaatgcagtgaaatataattgtaacttatttgtttaaaaaaaaggcataaagcctgtcaaataaaattttatttttgaagtataggtacattctaattatattcatattgtattctaaaatattttaaaataattactttctagaaatacaaaagcaaattccagataactaactcctcagaaatgatggcaaaagctgatatttatcctgtgaatgtcttcagagtcaaaaaaaaggacacatactacctcttaaagtaagagtagggttatttctcctctttagaaaatttagtattaaatgtaacatggaggtggtgatgtcctaga

SEQ ID NO: 8063 - DNA, 529 bp, Homo sapiens
  MAP TO AC008770.3; EXPRESSED IN BRAIN, SIGNAL = 2.4; EXPRESSED IN FETAL LIVER, SIGNAL = 2.7; EXPRESSED IN BONE MARROW, SIGNAL = 2.3; EXPRESSED IN HELA, SIGNAL = 1.9; EXPRESSED IN HEART, SIGNAL = 2.2; EXPRESSED IN LUNG, SIGNAL = 2.3
ttagggtctccatgaccgagatggtcttggcaagtggtgtacatgtgtgggtcttgaacccaggtcaaagtgtcaccggagtaacagttggagaatgtggaactaagctggaggacacccgagtactctaaagcaatgcccgtggtaagaaggggagcttggaagcatcagggtaacaaagggacaagtgtgggctctggttccttccatcttgtaaccttttcacactgatgaggaggaggaaggaaagtaacagaagagatgacagagcaggtttgtttgccagctaaagctaaagtggcaaaggaggaagagtccatccctacccttctgcaccccctccttattttgaagaaaaagagtggcctgacccaccagatctttcttttctggaggacactggacaaaaagtagtttccccaatgagtgttcgagcagcaccttgagcaatggctctcagttctattcaggcaggaattcaccaagctacaagagagggtgatatagaggcttggcagttccctgttag

SEQ ID NO: 8064 - DNA, 597 bp, Homo sapiens
  MAP TO AL121870.9; EXPRESSED IN FETAL LIVER, SIGNAL = 4.1; EXPRESSED IN HELA, SIGNAL = 3.7; EXPRESSED IN BRAIN, SIGNAL = 3.6; EXPRESSED IN PLACENTA, SIGNAL = 3.1; EXPRESSED IN LUNG, SIGNAL = 5.1; EXPRESSED IN HEART, SIGNAL =   4; EXPRESSED IN BONE MARROW, SIGNAL = 2.7; EXPRESSED IN ADULT LIVER, SIGNAL = 3.5
agcagaatcagccaggacactttttgaatgctttactgcttagaatttttttctgctagataacctaaataatctctctcaagttcaaagttccaaagatctttacggcaggggcacaatgccaccaatatctttgctaaagaatagcaagagtgagcttactccagttccctacaagttccttatctccatctgaaaccacctcagcctggacttcattgtccatatcactattagcattttggtcacaacaatttatggttttaggaagttccaaactttccctcatattcttgtcttcttcctagccctccaaagtgtttcagcatcttcccatttcccagttccaaagttacttccacagtttcagatatctttatagcaatgccccactcctaggtaccaatttttgtattagtccattctcgcattgctgtaaagaactacccctgagattgagtaatttataaataaaagaggtttaattggctcacagttccacaggctgtataggaagcatggctgaggaggcctcatggtggatggggaagcaagcacgttttatatgactggagcaggaggaagagagaacagggg

SEQ ID NO: 8065 - DNA, 502 bp, Homo sapiens
  MAP TO AL158148.1; EXPRESSED IN BRAIN, SIGNAL = 7.3; EXPRESSED IN PLACENTA, SIGNAL =   5; EXPRESSED IN ADULT LIVER, SIGNAL = 5.9; EXPRESSED IN BONE MARROW, SIGNAL = 4.6; EXPRESSED IN FETAL LIVER, SIGNAL = 7.5; EXPRESSED IN HELA, SIGNAL = 7.4; EXPRESSED IN HEART, SIGNAL = 6.6; EXPRESSED IN LUNG, SIGNAL =   6
attcaaaaccatggaggcagttgtgagtcctttagaaaggcctcatctctaaggagcaggaagggaggggccgtcttattactgagtcacgtcttattactgagtcacctggaaaagagggtttctgatcccaaggctcagaggatcttaaattcaggcagagtttcgaagcttggtggaagttagatggagtttgaaatggctgagccttcgccaaaccaccaatatctctgaaacaaaacaccagttgtctcactatgaaaaccctgcagacagatggctctccagagctggagttcccccctttgtgctgccactggtccagggccacagcctagtgaggggagcagccaggacatggtcaagcccaactccaacagcaagctcctaagacggtttctcaccctggtccgtttcctctctgccctggacacacgccaagaggtcagtatactaaagtgtgggtctcttcaaaagcacgcatcccttttcactcagcaag

SEQ ID NO: 8066 - DNA, 527 bp, Homo sapiens
  MAP TO AC013707.2; EXPRESSED IN ADULT LIVER, SIGNAL = 2.9; EXPRESSED IN LUNG, SIGNAL = 3.4; EXPRESSED IN HEART, SIGNAL = 3.3; EXPRESSED IN BRAIN, SIGNAL = 2.4; EXPRESSED IN PLACENTA, SIGNAL = 4.1; EXPRESSED IN HELA, SIGNAL =   4; EXPRESSED IN BONE MARROW, SIGNAL = 2.3; EXPRESSED IN FETAL LIVER, SIGNAL = 3.2
tcagggagttacacttgggccatttacagatgtaaacataccttacaagtctgagcttcaaggagtgggggaatccttgatgtctcctaaagggttagatgcttaatcatgattcatgtaacaggtacttatttacagtaaatattgcaattcatgcaattagaatttttcacttggtaatattataatattagcttatatactttcccaccattaaaatgtggatttttaaaggcaagctgtttcttatttactttcttttaaccagtaaacaacaaaatgtacagcccacagtgcatatttattgaattcaccaattaccattatgcattctatctgtcaaataatattactttgaactgtgaaagcacctttaaactgagggaaaataacaggtaatgagctttatcattagtataaaaacaagtgaccgagaatgaataacatttttatctgcagattttctcagggatgataacatctgagggaggtgttcacacctagaaagcaggaggctagagttgcag

SEQ ID NO: 8067 - DNA, 572 bp, Homo sapiens
  MAP TO AC008786.6; EXPRESSED IN HEART, SIGNAL = 9.1; EXPRESSED IN PLACENTA, SIGNAL = 9.5; EXPRESSED IN BRAIN, SIGNAL = 8.8; EXPRESSED IN LUNG, SIGNAL = 8.8; EXPRESSED IN ADULT LIVER, SIGNAL = 7.9; EXPRESSED IN BONE MARROW, SIGNAL = 8.2; EXPRESSED IN FETAL LIVER, SIGNAL = 9.2; EXPRESSED IN HELA, SIGNAL = 9.8
tagccctggtttactcctgctatcttgcataatataattacaacttcaccctttcactcaaaaacatcttggttttgtcaagaattcatatggtcatcctaactcttatatgcctggagttctgtgaggcactgggcctacaagaagagctggtcttcaggcgactcacagttctgaaagcaaaacaagcctaggaactaaatgaacaccatcaagaaaagctaagaaataatacatattcctgagaaaacttgcttagatcttgaacaaatagtagcagttggctgaaggttaaagagaagaaagttgtggggtgaaaacagatcacaattaatcactatattgtttctaactggagtaggcaaaagaaacaacacatgcccaaactaaagaaccatgaaagaaaatgatctctgtgaggtggtgtacacagtgcaagtctcaaagacttgagtattacaagaaaccaagtttgctagaaggaaagtacatagttagtagaaatagattttaatatatacttttaaatatcttttttcattattttacaccctggacctcatctctcccac

SEQ ID NO: 8068 - DNA, 595 bp, Homo sapiens
  MAP TO AC007608.2; EXPRESSED IN BRAIN, SIGNAL = 5.1; EXPRESSED IN PLACENTA, SIGNAL = 3.6; EXPRESSED IN FETAL LIVER, SIGNAL = 4.3; EXPRESSED IN HELA, SIGNAL = 4.3; EXPRESSED IN BONE MARROW, SIGNAL = 3.8; EXPRESSED IN LUNG, SIGNAL = 4.7; EXPRESSED IN ADULT LIVER, SIGNAL = 4.3; EXPRESSED IN HEART, SIGNAL = 2.9
catggaccaagttaccccacaggctgacttcatgaggacaaatcagtcttggtgactaagcacccctttcctgagaactctgtgatgcacaccaggagtgcctcaccctctgggacggtgtgaagatcggcaacctgatttcatcacattcatactggctgacgaaaccccgctcccatgccaggtccagcatgttctccacatggctgtggagcctcctgacaatggctggccggtgactctgcaggtctcgggctgggtggagcgagtgggggtcccagcagccatgcagcttgggggactggctgtcggcctgggcttcttgggcagccgcgatgagcttctgacaggcccaagtacccttattccagacggtgtccagaaggcgcctggccaagtgggagagaggctggcccaggaggtggaagccctcgtagtcctcccaggagaggacctcccaggacagcagccagtccaggacactctcgaagccttccagggaccctgagaccagcagctcgaccagctggctcctctgtgcctgaaaagcctcctgcgagcacatttcacaacctggggaggagaacaaggtcag

SEQ ID NO: 8069 - DNA, 560 bp, Homo sapiens
  MAP TO AC011489.3; EXPRESSED IN BRAIN, SIGNAL = 3.2; EXPRESSED IN PLACENTA, SIGNAL =   3; EXPRESSED IN FETAL LIVER, SIGNAL = 3.8; EXPRESSED IN HELA, SIGNAL = 3.5; EXPRESSED IN ADULT LIVER, SIGNAL = 2.9; EXPRESSED IN BONE MARROW, SIGNAL = 2.5; EXPRESSED IN HEART, SIGNAL = 3.2; EXPRESSED IN LUNG, SIGNAL =   4
gaggaccctagtggggagaggattggggagctgccaaggaaggccccaaggagtttggatggacgcaggcatcggtgatgggacccccaaagaggacttctcttcctgcagctccgggattgtggagggctgcgggaggtggaggtgactgcctgcctggtgtggaaggactggcctcaccgagtccacccccacagcctcgtggggaaagactgcaccgacggcatctgcagggtgcggctccggcctcacgtcagcccccggcacaggtacccaccccctgacctccgacctctcatccttgatcatggagattctaagcgactggaggccacccatgaaactttagagcagagggcagcttgggtaaaccctccccactgcctcttctaggtgggagacaggcctggggacagtggagggcctcacttaggcctggagccttgccacacacatattcacatacattttatccctattttgtagaggaagaaactgaggctcagagagggtaaggagcacagataattgatgacagagctgggatttgactgcagacc

SEQ ID NO: 8070 - DNA, 575 bp, Homo sapiens
  MAP TO AC017016.3; EXPRESSED IN ADULT LIVER, SIGNAL = 3.5; EXPRESSED IN BONE MARROW, SIGNAL = 2.1; EXPRESSED IN HEART, SIGNAL = 3.7; EXPRESSED IN LUNG, SIGNAL = 8.1; EXPRESSED IN PLACENTA, SIGNAL = 2.3; EXPRESSED IN HELA, SIGNAL = 2.7; EXPRESSED IN BRAIN, SIGNAL = 2.5; EXPRESSED IN FETAL LIVER, SIGNAL = 3.1
attcccattccttcagggagaaatagccatccccccaacaaaaaaaaaagaagatgaagaaagagaagaaaagggagaagaaggagaaggaggaggaggaggaggaggagggggaggaggaggaggggaagaagaagaagaagaagaagaagaagaagaagaagaagaagaagaagaagaagaagagaaggagaagaagaggaggaggaagaagaagaagagggggaagaagaggaggaggaggaggaaagaaggaggaggaggcagaggaggaggaagagaggggagggggagggggagaagaagaagaggagaagaagaaagtagtatcaagtcccaagtaagtctaaaccccaacagggaaaactactttaaatcttacagctggagaataatctcctttgactccatttccagcatcctgggctcaccagtgcaggcattgggccctaaaggcttcaggcagccttgccttctcactatgtgatgtcctgtgccaccctgaaactctacagagggtccttacctgtaaaaaggcccttaccagatgccacccctcaaccttgaacttccca

SEQ ID NO: 8071 - DNA, 586 bp, Homo sapiens
  MAP TO AC010198.8; EXPRESSED IN BRAIN, SIGNAL = 1.5; EXPRESSED IN PLACENTA, SIGNAL = 1.9; EXPRESSED IN HELA, SIGNAL = 3.3; EXPRESSED IN FETAL LIVER, SIGNAL = 3.6; EXPRESSED IN HEART, SIGNAL = 2.3; EXPRESSED IN LUNG, SIGNAL = 1.9
ctcttcaaagactttccgccccgtctaataagaaataaatagtaacttctcttaaaagcaaaatttattcaaagacctgtgctaacattcttaaatatctgctagccataataaagaaatcaatgtaatttatgttcttagctcccacaatttagcctaaatatttgccctggcatgcttatactggtccaagcaagcattagatcatagtctgttcctcttccttatttaaaagtgtttttacctttcccagcattccacaagttacttcctccttcttttgttctcctctacctttgcctcttttaaaaagttctaagttgctagccaatcgggacaaatacagaatgtgaggtcccattccagctattggaaactggacacagcagtagggtggacgcgtcaggttataaatgaccctgtctcctttgttcagtgtactctcctggcaaaactgctggcgagtgtaccctttctgcaagaagtaaaaatggccttactaaataaactgatgctcaagtgctatttctttacaagcatttcaaacacgtgtggctttgctcgcagcaccgtttggagtttgatt

SEQ ID NO: 8072 - DNA, 557 bp, Homo sapiens
  MAP TO AC005323.1; EXPRESSED IN BRAIN, SIGNAL =  18; EXPRESSED IN BONE MARROW, SIGNAL =  15; EXPRESSED IN FETAL LIVER, SIGNAL = 8.2; EXPRESSED IN LUNG, SIGNAL =  22; EXPRESSED IN HEART, SIGNAL = 8.7; EXPRESSED IN PLACENTA, SIGNAL =  11; EXPRESSED IN HELA, SIGNAL = 8.7; EXPRESSED IN ADULT LIVER, SIGNAL =  16
actggcaaccacttgtaggggttgacagtgacacagaacaagcctgagtaggtctgcacccaaaacaaaagggaggaacagaattatttgatggggaccttaatcatctactacttttcaaaaactattaactactctcatgagtagaagaccgtgagaaagaactcacgtagatcatccaggctgcgtagcgctctttgaggttgtacagcacagcaggctcgtgtagatgagtcatcatggccatgtcctcgatcttgtcatatttgggagggttcatggggaagacttggtcatctttcactgttacagtctgtccagtcaaacaagagaggccagatcaaaaagtaagtgctaacttaacccaaaatgaggcagagtctaatcagctccaggtgtttttactcacagctccagcttcggtcttagctgtcaccttccccccttccctgctctgcactgttgctttcacaaaggactccttagggtccaccacaaagactgatgtcttggcatcaaaaggcttgttctgggcttcaattcgctccctttcagac

SEQ ID NO: 8073 - DNA, 588 bp, Homo sapiens
  MAP TO AC015755.4; EXPRESSED IN BRAIN, SIGNAL = 3.5; EXPRESSED IN PLACENTA, SIGNAL =   3; EXPRESSED IN ADULT LIVER, SIGNAL = 3.7; EXPRESSED IN BONE MARROW, SIGNAL = 2.9; EXPRESSED IN FETAL LIVER, SIGNAL = 4.3; EXPRESSED IN HELA, SIGNAL = 4.8; EXPRESSED IN HEART, SIGNAL =   4; EXPRESSED IN LUNG, SIGNAL = 2.2
agcattgtaacatgccctccggggccttgggggtggcaggtacccccaactggacggtgctgagggacacgcacagaattcactcctgccagcaccagggcagccagcacctgcactcatttgctagtatgctccctcctgcaaggggttgagtggggcagtctgagtaaatgaggcaccctggtcacgagtcccgtgaaggggtcaagaaaacaccctgcatcattgttataacacagcttaatgcttttggggctggcagatctcttgtgaatattttcataaattctttgaagctctgcccagttactgggagtgttttgtttgtttttgttgttgttgttgttgttattgttgttgtttccctaagtagggcaagaacatccagtaggttcacctaaattctgtatgagaactaatggtactttagatccaagagatttaatcgtacttccattttttacctgctgtggttttgtgggccatcttactggctctgttaaagataacttattttgagccctataatgtaccacatatgtggcctatatctcatgcatgagaaacaccactgcatcctttgttctg

SEQ ID NO: 8074 - DNA, 559 bp, Homo sapiens
  MAP TO AL133243.1; EXPRESSED IN FETAL LIVER, SIGNAL = 3.9; EXPRESSED IN PLACENTA, SIGNAL = 2.4; EXPRESSED IN BRAIN, SIGNAL = 2.4; EXPRESSED IN HEART, SIGNAL = 3.7; EXPRESSED IN ADULT LIVER, SIGNAL =   3; EXPRESSED IN BONE MARROW, SIGNAL = 2.4; EXPRESSED IN HELA, SIGNAL = 4.2
tgggtaccaggaatttgcacgtaattcacattaaattgttcacactttgaggaataagaatgtattggtatatgcaagtctcaaggcaggtgtagatttctaaagtaagattattcattgccctttgtttaaccttctccattgggagctattttctctcttgatcccattgagaaacactagattttgttggaagctgcaaagcaaaaagtaggaaaggtgaccttaatgataatatggttgtggctgaagaaagatttttgctttatttagcatttttccccttatttgacagcaacagctgggatgaacatgtatttgaattagtactacctaaagcttgtatggttggacatgtggacttcaaattcgttttgaactcaaacatcaccaatattccacagatacaagtgacactgctgaaaaataaagctccaggattagggaaagtcaatggtaagaatgtatcaaaatttatctttgaagattttattttgtggttgatttctgaaaactaattttcaccttggctaagtttcgtgtccctttctgtcccttg

SEQ ID NO: 8075 - DNA, 595 bp, Homo sapiens
  MAP TO AC017025.3; EXPRESSED IN BRAIN, SIGNAL = 2.4; EXPRESSED IN PLACENTA, SIGNAL = 1.5; EXPRESSED IN HELA, SIGNAL = 2.3; EXPRESSED IN ADULT LIVER, SIGNAL = 2.2; EXPRESSED IN BONE MARROW, SIGNAL = 1.8; EXPRESSED IN FETAL LIVER, SIGNAL = 1.8; EXPRESSED IN HEART, SIGNAL =   3
tccacacagcaaggcagtagcaaggaatccaccttcaagaacaaagcaaggcagcaggtttagaagaggtatttcaactacagtaagactgtgtagattcctaattttagaaagatagagctttatacatcaagaaatccaatatcaatcaatatcaatagagctggacttcatgaaagcagtttctaagccactttcacttggcctgaagcaaaaaaaggcatctttctacctctcctctgagtttaaagaatgcctgccacgatggcaactctctcaagagtcctttcctccttttaccacctaattattttatgtggctcacttgagtgatacgccaattattgcagaaccaatttggctgcagtgcctttgcaagatcatccagcacctcattttagaatatgggggttcttggcatttatggatttggcctttgcagtcactggccaaactctgtgagagaacatgctgcttttaacatttacctctatgcaggttttcagggacatgtctgaccgaagcatcctcagtcacaacaccataactgaaggcactgcatggtatatctccctgagaggtgaggagaaggcct

SEQ ID NO: 8076 - DNA, 506 bp, Homo sapiens
  MAP TO AL109662.2; EXPRESSED IN BRAIN, SIGNAL =   2; EXPRESSED IN FETAL LIVER, SIGNAL = 2.5; EXPRESSED IN HELA, SIGNAL = 2.2; EXPRESSED IN ADULT LIVER, SIGNAL = 1.9; EXPRESSED IN LUNG, SIGNAL = 1.9; EXPRESSED IN BONE MARROW, SIGNAL = 1.9; EXPRESSED IN HEART, SIGNAL = 2.5; EXPRESSED IN PLACENTA, SIGNAL = 1.6
tgcttttgagatggtccctgagaaaatgtatgtgagcaaaaaatggaaaaacaagattaaattttgatgtacacttacagaaagaacttgaaatggaaaacaaaaacaaaaacctttcacatttattaccaggtagttgtagtgtaggtaattctttacatgattctctaatttctccatgtagttatgtatctgataagcctggaaaatgctgctagaataaaccatcctttagaaagaattaaaaatagacattcaaatactaatgtgaatcttaacacttttgttgtgaagttgttaattccaaaaagtgtaactgagccacaaattttactaagcaaagcatactatattggatgattcctattctcagctattttcatttgccagagctacgaagcttatttgcaaagactagatggcttaaataacagaaatttactttttcacaattctagagactagaagtacaagaacaacgtgttggcagggttggtttcttctga

SEQ ID NO: 8077 - DNA, 587 bp, Homo sapiens
  MAP TO AC007340.3; EXPRESSED IN BRAIN, SIGNAL = 3.4; EXPRESSED IN PLACENTA, SIGNAL = 3.3; EXPRESSED IN ADULT LIVER, SIGNAL =   4; EXPRESSED IN BONE MARROW, SIGNAL = 2.8; EXPRESSED IN FETAL LIVER, SIGNAL = 4.1; EXPRESSED IN HELA, SIGNAL = 4.3; EXPRESSED IN HEART, SIGNAL = 3.3; EXPRESSED IN LUNG, SIGNAL = 2.5
aaaatggaccaatcagcaggatgtgggtggggccagataagggaataaaagcagactgccggagccagcagtggcaaccccctcgggtccccttccacagtgtggaaggtttgttcttttgctctttgcaataaatcttgctgctgctcactctttgggtccacactgcctttatgagctgtaacaccaagaaggtctgcagcttcactcctgaggccatcgagaccacgaacccaccgcgaggaatgaacaactccagatgtgccaccttaagagctgtaacactaactgccaaggtctgcagcttcactcctgaagccagcgagaccatgagcccaccagaaggaagaaactctgcacacgtctgaacatcagaaggaacaaactctggacacaccacctttagaactctaacactcaccgcgagggtctgcggcttcattcctgaagtcggaccccgaacccaccaattttggacacaatactttttgtccacccagcttctctggttatttaggagcttccccacattactgcctgcatcactctaatcctcgtggtcatcatgggagtagccattttggaca

SEQ ID NO: 8078 - DNA, 521 bp, Homo sapiens
  MAP TO AC020763.3; EXPRESSED IN BRAIN, SIGNAL = 4.6; EXPRESSED IN ADULT LIVER, SIGNAL = 4.6; EXPRESSED IN HELA, SIGNAL = 4.8; EXPRESSED IN PLACENTA, SIGNAL = 4.1; EXPRESSED IN LUNG, SIGNAL = 6.4; EXPRESSED IN HEART, SIGNAL = 4.3; EXPRESSED IN FETAL LIVER, SIGNAL = 4.7; EXPRESSED IN BONE MARROW, SIGNAL = 3.6
acagtttccaaatgcatggcgctgctgtgactattaaaatatagatttactgaataatgcttctgatattaccaataaataataataagttccagttgttctctcagggagacagcacttcatttctgtaacgtctaactttttacagtgttcgggttacatctctaatcaaatcagaagaaaggtaaatctaaaaatagaattgcttctgaaattgaacttgctctttaaaatacagataattataaattttttcaatcagcagaggctacaagctgggaaatactgatttctagaactttctgcctgcttatttacagggcagctagctacaccaggagagctggtgtcactgaagacatcatgacccttggcaacagcctgagcctcatagtggggacttcatacaacacctgtttgagaactcctaaatcaaatgagttagggaggccaactgcaaaagtggaactctccaactgcaactaataaagttaaatgcacgggctctggagtcagacaga

SEQ ID NO: 8079 - DNA, 558 bp, Homo sapiens
  MAP TO AL137852.2; EXPRESSED IN BRAIN, SIGNAL = 3.2; EXPRESSED IN ADULT LIVER, SIGNAL = 1.6; EXPRESSED IN PLACENTA, SIGNAL = 4.4; EXPRESSED IN LUNG, SIGNAL = 6.1; EXPRESSED IN HEART, SIGNAL = 2.3; EXPRESSED IN HELA, SIGNAL = 2.8; EXPRESSED IN FETAL LIVER, SIGNAL = 3.7; EXPRESSED IN BONE MARROW, SIGNAL = 3.4
tgctaattacgtgtgcctggtaggtgtcttattgaacaacacagagaatatttccatcatcatggtaagttctgttggacagtgctgctttgcattattatagcaatgtgggtttttctataatgcacccaggtcatttctaatctaatttgaatccatgcagcttaataatcctttacttttaattgaagcagacatctgtttgatgcttttgaaaatcaaacaagatgttaaatagactataaatcttttactctgtataatatttaattttgcatgatgggatatcttaaagcttggaaattctattacagggaatccctggagatagagaaagtcaggctgtggttgacccccctcaagcagctagtactggggctcctcagtcttcagcagtggctgcagctgcagcaactacgacagcaacaactacaacaacaagttctggaggtaaagcggaatcttctggatggggagggaatggccctgaatttttagtgtaaaataatttaacctgaaatacttcagaaatgacgttcattcccagagcagtcgaat

SEQ ID NO: 8080 - DNA, 580 bp, Homo sapiens
  MAP TO AC008394.3; EXPRESSED IN BRAIN, SIGNAL = 2.2; EXPRESSED IN PLACENTA, SIGNAL = 1.9; EXPRESSED IN BONE MARROW, SIGNAL = 1.7; EXPRESSED IN ADULT LIVER, SIGNAL = 1.9; EXPRESSED IN FETAL LIVER, SIGNAL = 3.2; EXPRESSED IN HELA, SIGNAL = 3.3; EXPRESSED IN HEART, SIGNAL = 2.9
atgctcagccaagaagaaagttttaattgactcacagttccacatggctggggaggactcgggaaacttacaatcatggctgaaggtgaaggagaagcaaggcataacttacatggcagcagcagagagagaaagtaatacagggggtaagtaccaaacacttttaaaccaccagatctcctgagaactcactcactatcacaagaacagcatgggggaaaccacccccacgatccaatcacctaccaccaggtccctctctcaatacgtagggattacaattcaagttgagatttgggtgggaacacagagccaaaccatatcaaaaggaaatttttatttctttttctgtgaattgtctattgatatcctttgccaatttgcaaaggatatttttctattggagttttttgtcttttcctcaatttttttttaaatcatcagagctattaactatttttattttttcatttattttcttcctttttctgtcttccttctttccttcctttctctctctctctctctctccctccttccctccctccctccctcagtctcactgtattgcccatgttgg

SEQ ID NO: 8081 - DNA, 572 bp, Homo sapiens
  MAP TO AP001243.1; EXPRESSED IN PLACENTA, SIGNAL = 1.5; EXPRESSED IN BRAIN, SIGNAL =   2; EXPRESSED IN HELA, SIGNAL = 2.4; EXPRESSED IN ADULT LIVER, SIGNAL =   2; EXPRESSED IN BONE MARROW, SIGNAL = 5.3; EXPRESSED IN LUNG, SIGNAL = 5.4; EXPRESSED IN FETAL LIVER, SIGNAL =   2; EXPRESSED IN HEART, SIGNAL =   2
gcactcaaagcactctgctgtgctttgaaaatatgtttttattttgaaattatatattactagggtctgaatcaaattataaaaattgatttagcctgaaataaataacagaagaaaaattattttaaaattgtgcttaaagtttctacataaccttgcacttctctctcattatttcaggatccagtggggatattgtgatgacccagactccactctcctcacctgtcacccttggacagccggcctccatctcctgcaggtctagtcaaagcctcgtacacagtgatggaaacacctacttgagttggcttcagcagaggccaggccagcctccaagactcctaatttataagatttctaaccggttctctggggtcccagacagattcagtggcagtggggcagggacagatttcacactgaaaatcagcagggtggaagctgaggatgtcggggtttattactgcacgcaagctacacaatttcctcacacagtggtacagctctgaacaaaaacctcccgctggagtggcccagctgctcaagtgtgttgtttctctggggagcag

SEQ ID NO: 8082 - DNA, 574 bp, Homo sapiens
  MAP TO AC021881.2; EXPRESSED IN FETAL LIVER, SIGNAL = 5.5; EXPRESSED IN HEART, SIGNAL =  21; EXPRESSED IN LUNG, SIGNAL = 2.5; EXPRESSED IN BRAIN, SIGNAL =   3; EXPRESSED IN ADULT LIVER, SIGNAL = 2.2; EXPRESSED IN BONE MARROW, SIGNAL = 2.1; EXPRESSED IN HELA, SIGNAL = 6.5; EXPRESSED IN PLACENTA, SIGNAL = 2.2
ttgttcagaagtgtgcccagtgccacacaatgcaaaagggaggccagcacaagactgggcctaatctccatagtctctccaggcaggagacaggtgaggccgttggatactcttacacagacaccaataagaacaaaggcatcacctggggaaaggatacactgatgcactatttggagactcccaagaagaacatccctggaacaaaaatgatctttgccagcattaagaagaaggcagaaagggcagacttgatagctaatctcaaaaacgctactcatcagtaataactggccactgccttatttattacaaaacagaaatgtctcatgacttttttatgtgtaccataatttaatagatctcatataccagaattcagatcatcaatgaatgacagaatattttgttgggcagtcctgattttaaaactaagactggcctgtggttagatgaatatgtttgtttttttgaattttaatagcaattccaattcagtaaatgctaacactgtttactccttctaaagatatgattcgatttcatcaacttttcacaaagatggtgaatgcca

SEQ ID NO: 8083 - DNA, 591 bp, Homo sapiens
  MAP TO AC008843.4; EXPRESSED IN FETAL LIVER, SIGNAL = 1.9; EXPRESSED IN HEART, SIGNAL = 1.8; EXPRESSED IN PLACENTA, SIGNAL = 1.9; EXPRESSED IN BRAIN, SIGNAL =   2; EXPRESSED IN BONE MARROW, SIGNAL = 1.5; EXPRESSED IN LUNG, SIGNAL = 1.9; EXPRESSED IN ADULT LIVER, SIGNAL = 2.5; EXPRESSED IN HELA, SIGNAL = 2.7
tgaggggacacaggaagaagcaccagttaggagaagcattacaattagtaccaatcaggaacccagcaggaagcagaagtgtgctcatacgaggatgatctaaggagagactgtttacaatagtgcaggcagggcatagggaaactgtaagggaaggtgcagaatcccagggataggaacagtggagctaccaccatccctagagctgaaggaaggaggggaaaatatagtgactggaattcaaaatgagagagtagtgaagagaagtataatggaaaataagttgtgttttgtccagagaaacagccagcctgaggttcctcatagggaggaaagcagggaatccctaccccaatcttcatctcctcatctctgtaatcctctactgggacccctcccttggccatgaccaaatggagcccattttttgtggtccaagcagtcatccttctggccagagagcagggtagaaagagaaattctggaagaacaagataagatatatcccactctataaaaagagaagctgcccaggatgcaaggcaccgagatttgagtattatcatcttctccctccctttctttccaatc

SEQ ID NO: 8084 - DNA, 595 bp, Homo sapiens
  MAP TO AC008752.3; EXPRESSED IN BRAIN, SIGNAL = 3.2; EXPRESSED IN PLACENTA, SIGNAL = 2.9; EXPRESSED IN FETAL LIVER, SIGNAL = 5.9; EXPRESSED IN ADULT LIVER, SIGNAL = 3.7; EXPRESSED IN BONE MARROW, SIGNAL = 2.7; EXPRESSED IN HELA, SIGNAL = 5.7; EXPRESSED IN HEART, SIGNAL = 4.8
tgaggcatgaggatcacttgagcctgggaggtggaggtttcagttagcccagattgtgccactgcattccagcctggaagatggaacaagactttgtctcaaaaaaaatttaatcattgaaaagtaaaataataattgtcatcaaaataatgtttctgtgttcaaatgggtgaaatctcttaatatgttggaaaatgttttaaatcctttatcccctcatcagcagacaagaagctacagtggatggaaactctgtaagaattgtgaagaggtcttcagggagctgtttttccttaagacacacatgagagctcagaatggagggaacacttttgagggtaattgttatggaaaagacacccttagtgtgcacaaagaagcctctattggacaggaactttctaaatttaatccatgtggaaaagtcttcaccctaactccaggccttgctgaacatcttgaagttctcaatgcaagacaaccgtacaaatgtaaggaatgtggaaaaggctttaagtgttttgcaagccttgataatcacatgggaattcacgctggtgagaaactctgaatttcaggaatgtgggagaaccat

SEQ ID NO: 8085 - DNA, 509 bp, Homo sapiens
  MAP TO AL138827.2; EXPRESSED IN BRAIN, SIGNAL = 7.5; EXPRESSED IN PLACENTA, SIGNAL = 8.4; EXPRESSED IN HELA, SIGNAL =  10; EXPRESSED IN ADULT LIVER, SIGNAL = 8.6; EXPRESSED IN BONE MARROW, SIGNAL = 7.3; EXPRESSED IN HEART, SIGNAL = 9.2; EXPRESSED IN LUNG, SIGNAL = 7.1; EXPRESSED IN FETAL LIVER, SIGNAL =  10
cagaaaaggggatcaagtcggcacttaagcaacagaagcacagatagccagaattcttttgcaagttgtaaacttacacagactttctgtgtgtctgacttctccacctcagaccctaccacagagtttgaaaagttccatgcctccatcaggatcccccccttcgacaatgatctagatcacccaggagaacgtcagcagatctctagcaccagggaacggaaggcagcacgcatcctggggctgattctgggtgcattcattttatcctggctgccatttttcatcaaagagttgattgtgggtctgagcatctacaccgtgtcctcggaagtggccgactttctgacgtggctcggttatgtgaattctctgatcaaccctctgctctatacgagttttaatgaagactttaagctggcttttaaaaagctcattagatgccgagagcatacttagactgtaaaaagctaaaaggcacgactttttccagagcctcatgagtggat

SEQ ID NO: 8086 - DNA, 525 bp, Homo sapiens
  MAP TO AL135931.4; EXPRESSED IN BRAIN, SIGNAL = 3.7; EXPRESSED IN HELA, SIGNAL = 2.8; EXPRESSED IN PLACENTA, SIGNAL = 2.7; EXPRESSED IN LUNG, SIGNAL = 2.6; EXPRESSED IN HEART, SIGNAL = 2.7; EXPRESSED IN FETAL LIVER, SIGNAL = 2.9; EXPRESSED IN BONE MARROW, SIGNAL = 2.7; EXPRESSED IN ADULT LIVER, SIGNAL = 3.5
ggctggagtttgtttatggctcacatgctccccatgcttttctccatctgcctttctatgctgtgtattctctgcaaactcatcaccaccgtgtgttttagtccaccagtctccctgggacaggaattggtattttcctcaaagccgatccttgtctttcatatgtctcctgatgtgaggtcattctgacttttcttcctaccctataggtgtttttattctcaaccttgtgtgccgagacttggggctaaaagactcagtgctggctgggctcaaggcagtgttccccctcctatatgtccggcgaattgagggtgaagtgaatgagatcctgttctgtcagctgcaccctgagcaaaaacttgccacaccagagctcctagaaacagcccaggctttggagcggaccctgaggaagcctgggaggggttgggatgacacgtatgtcttgtcagatatgctcaagacggtgaaaattgtgtgactgcttaggccaagcagccctcctgcctagactgaccttgg

SEQ ID NO: 8087 - DNA, 589 bp, Homo sapiens
  MAP TO AC016026.12; EXPRESSED IN BRAIN, SIGNAL = 3.2; EXPRESSED IN PLACENTA, SIGNAL =   3; EXPRESSED IN ADULT LIVER, SIGNAL = 3.3; EXPRESSED IN BONE MARROW, SIGNAL = 2.9; EXPRESSED IN HELA, SIGNAL = 3.8; EXPRESSED IN HEART, SIGNAL = 2.7; EXPRESSED IN FETAL LIVER, SIGNAL = 3.4
cttcaaaaaggctggctctgagagcacgagcactagaaggtggtggtcacggaaaaagacggcacaggaacgatttctgcatttttataaatgcagtgagaaagaaaggaggggttgagaacacactactagagaagggagaaacaatgaagcaaagctccagagatttccctgacagctaactggtaaaaacacagagtaactttgtgtttggtggcactgctgcgggacagtcggaaggaaggaagaacagccgggccacagcacagcagcagggggccgcaaagcagctccttccaggccttaccgctagaggggagggagtccttaaacatctcgtagaactgagtcaggtacatcaccatggacagcttatcaggctcccccacggaggccatttctttgcctgtcatgatgggagaaatgcccaattccttctcagcaatgtcaaaggccagttggttattcttctccacattttgctcatccaaagaatcaaaatctctgagaaacaggacaaggaaaacatatcaagataggttgacagtccttaaacagaaacgcagtatcctggagtcatcgtcctttc

SEQ ID NO: 8088 - DNA, 600 bp, Homo sapiens
  MAP TO AC023490.4; EXPRESSED IN PLACENTA, SIGNAL = 2.8; EXPRESSED IN BONE MARROW, SIGNAL = 3.1; EXPRESSED IN HELA, SIGNAL = 4.3; EXPRESSED IN ADULT LIVER, SIGNAL = 3.9; EXPRESSED IN BRAIN, SIGNAL = 3.4; EXPRESSED IN LUNG, SIGNAL = 2.3; EXPRESSED IN HEART, SIGNAL = 3.4; EXPRESSED IN FETAL LIVER, SIGNAL = 4.1
ttacatctactgcctccgcctgcagccctggaaggctgtgcatggctgggccccgctggccccgggctgtgcggctccactctttaccttcaggtactcctggatggcctcctcaatgtcccggtccacggaatcgtcactgtctgaatctagcaccaatgggccaaagtctgcagtttcctcctcccccacggggtcaaagtcagcaacaagaccacaggcagccaacgcaggcagctccttgtgcatggtgggcttggcagcaggcctggcgtcgtggcatccctctgccccctctgcgcagtgcgctcatcgctggtgcccctagcagccctgtcgctctgcagcgtgctgatgagcatctgcacccgggtgctcaccgacatgctctccacgcccttgtcagcctccgagaagcacccggggaacctaaagctccctggtgggacagaggccacccatttgcgctggagagcaaccactggaggagcattcatgagaaacattctggcagatggggagcgacgcgcagaggggcgacactttatttctctgcaggcttcacatcctccaaagattggcaagcagtacccgtgaaat

SEQ ID NO: 8089 - DNA, 519 bp, Homo sapiens
  MAP TO AF233390.1; EXPRESSED IN BRAIN, SIGNAL = 4.5; EXPRESSED IN PLACENTA, SIGNAL = 3.2; EXPRESSED IN ADULT LIVER, SIGNAL =   2; EXPRESSED IN BONE MARROW, SIGNAL = 1.6; EXPRESSED IN FETAL LIVER, SIGNAL = 2.6; EXPRESSED IN HELA, SIGNAL =   3; EXPRESSED IN HEART, SIGNAL =   3; EXPRESSED IN LUNG, SIGNAL = 5.4
ggtacttgagcatgctgtgcacgtggttgtcggtggcattgatgttggtgaagatggtgccaatttcaatctcgtgagaagccatgcgtccttccagagactcaaacctctccacagtgcggttctgggcgtagtgggtatggtactgaagatcatgcatgttctcttcgtggtcatccaggaaggacgagatgttatccagctgcagctgcaagcccatgacctggagtaccaggtcgtgcatgctctctgagttctggctgatgcgctgtgaggaggcccccagggtggcctggatgttcttgaccgcctctccagtcttggtggaggtggtgcgcaggccgctgaagagccgtgtgtagttctgccagtcggtgacaatcttctggagggtcagggtctcctcgtctgtcttccgctggatcccgtggatccactcggaagtctgccccacggtgaagttgatctggtgcactgcagccttgacatcgtagcactcctgggtgaggtccttcagag

SEQ ID NO: 8090 - DNA, 600 bp, Homo sapiens
  MAP TO AC023392.2; EXPRESSED IN BONE MARROW, SIGNAL = 3.8; EXPRESSED IN FETAL LIVER, SIGNAL = 4.1; EXPRESSED IN HEART, SIGNAL = 3.4; EXPRESSED IN LUNG, SIGNAL = 4.4; EXPRESSED IN PLACENTA, SIGNAL = 3.1; EXPRESSED IN BRAIN, SIGNAL = 3.1; EXPRESSED IN HELA, SIGNAL = 4.1; EXPRESSED IN ADULT LIVER, SIGNAL = 3.1
ctgatctggcctttcaggagaggtctctgattatttaaaagaaaagcctgcatgtttgtggaaaggaaaaggagagggagataggatatacagtaaggaactcacatttccatcaggagtaaatgagatgctctttgaaatagtgaaaggccctttggtcttaagagcaatataatcctgaattacagaagagcaaggttagagctaacatagcagagaataaaggagatgataagaaaggtaaacgtgtctgaatgagaaggccaagaagatgaaatcaggaatgaaaaagatccaggttgaaaatgttgctttcaactggagtgatgagataacatttcgggaaacaactgtgaaccaaccttggaaaggcaagcaagattgtaatcagaatattaagctggtggggaggaagtgagttccaggccatgcttttctagatactaaatgaagggtctgattacaagcctcacaagttggaaggcaagagaaaactcacagaaacttcagaaaagatttacataggcatggaaatgacctgaagcaaaaacaaaaagaagaagaagaaaaagccaccaatgggcttgcacacacatacac

SEQ ID NO: 8091 - DNA, 540 bp, Homo sapiens
  MAP TO AC010253.2; EXPRESSED IN ADULT LIVER, SIGNAL = 1.8; EXPRESSED IN HEART, SIGNAL =   2; EXPRESSED IN BRAIN, SIGNAL = 1.6; EXPRESSED IN PLACENTA, SIGNAL = 1.3; EXPRESSED IN FETAL LIVER, SIGNAL = 1.9; EXPRESSED IN HELA, SIGNAL = 1.9
ggccttgctttgtgtagagctcagccaacccatgactgttggtgaccacagatggacagagaacccagtcatggaccagcctccttccctccctattacctaattcccaactcccttctggcagcctttgacattcttctggtttggaatccatctgtgggtcctgtttcatccatcaaattccaaattatgttcatctattgccataacaacaagtggacagcatgaggctgccggccttttctaccccaaagtgacagccactgtgcttatcatccgggaacagcctcaccacacaaagccacccatgtttgcagacctcatcatcactgccatggtggtcataacagcagccactcccaccactcactgggaggagctccatgaggctagggcctccaccaggattacaggacctatagaaagacatttggaagtgggtgctgagttacaggcagggttaggtgacttgtgttttgactctattatgaatgtgtcatgtttttgggagtatgaacatgcctggaaagtggagttgag

SEQ ID NO: 8092 - DNA, 519 bp, Homo sapiens
  MAP TO AC008403.3; EXPRESSED IN ADULT LIVER, SIGNAL = 3.2; EXPRESSED IN HELA, SIGNAL = 5.1; EXPRESSED IN HEART, SIGNAL = 5.9; EXPRESSED IN BRAIN, SIGNAL = 3.5; EXPRESSED IN PLACENTA, SIGNAL = 3.5; EXPRESSED IN BONE MARROW, SIGNAL = 3.4; EXPRESSED IN FETAL LIVER, SIGNAL = 5.5; EXPRESSED IN LUNG, SIGNAL = 2.7
ccctcagtccctctctcctctccatttacccgcctgtgtttcccgctctcttccccactatccacatctcgacccacatctccttgtctctgctcggctttacctttgtccccgcccctgccatctccccctctctgcctccctctctgccccataccctggagaaggccagcaggaagtccatgcggtgggtgggccccaggcagtgccgcaggcgccagtacaccaggtgctcccaggcgaagaccagcagggacaggcccatggccaccaggagcatgtagaagacgcccgccatgttgtcgatgtccagcttgctgctcatcacctcgattttgtcattgtggcagatcccagagagccacagccgctccagcatctcgatctcatctagggaggggcggtcaaaagtcacctgctatgagtaccctctgaggacccttgtctgtgatgtgggaatgtaggcccttagccccttcctccctcagaccctggtgtccgggtctttgtccctttctt

SEQ ID NO: 8093 - DNA, 528 bp, Homo sapiens
  MAP TO AC018711.2; EXPRESSED IN ADULT LIVER, SIGNAL = 7.8; EXPRESSED IN FETAL LIVER, SIGNAL =  16; EXPRESSED IN HELA, SIGNAL =  14; EXPRESSED IN PLACENTA, SIGNAL = 6.1; EXPRESSED IN BONE MARROW, SIGNAL =  21; EXPRESSED IN HEART, SIGNAL =  11; EXPRESSED IN LUNG, SIGNAL =  21; EXPRESSED IN BRAIN, SIGNAL = 8.2
tgcatatacgaaaagccacgaagtatctgaaagctaccactttacagaaacagcatgtaccattccaacattacaatggttgcgttggttggtgtgcccaggccaagcagtggggctggacaaggtcagtggcccaaaaagcttgctgaatttttgctacacatgcttaaaaatgcagagagtaatgctgaacttaagggtttagatgtagattctctggtcgttgggcatatcaaagtgaacaaagcacctaagatgcgccgctggacctgcagagctcatggtcggattaacccatacgtgagctctctctgccacattgagatgatccttactgaaaaggaacagattgttcctaaaccagaagaggagggtgcccagaagaaaaagttatcccagaagaaactgaagaaacaaaaacttatgacacaggagtaaattcagctttaaagtaaatacaattaaatatttttttaaaaaaaggaaagaaaagaaagtaaataaaggcataatctgtatgagcagagc

SEQ ID NO: 8094 - DNA, 520 bp, Homo sapiens
  MAP TO AC003676.1; EXPRESSED IN BRAIN, SIGNAL = 2.5; EXPRESSED IN PLACENTA, SIGNAL =   2; EXPRESSED IN HELA, SIGNAL = 2.8; EXPRESSED IN ADULT LIVER, SIGNAL = 2.5; EXPRESSED IN BONE MARROW, SIGNAL = 2.2; EXPRESSED IN LUNG, SIGNAL = 3.5; EXPRESSED IN FETAL LIVER, SIGNAL = 2.7; EXPRESSED IN HEART, SIGNAL = 2.6
tgagacccttgtctcccatccagcatcaatgcatccctcaggcatatgctgaaactccaaggaccttgtgcatcgccagaggggagaaggcacagcacccccaagacaaagaggctgcacattgcatggctgtgtttaatacctaaagaaatgcacaattattgggcagtttcttactcctggaagatctgtgactccagactcaccactaaggtgggagcacagaatactccccagactctagatgctgtggcaccccgtggtcgatggccacattccccgcccagaggatgacttggaggagcccagagagaccctccaaggcaaggcggtggcttatgcaagagaaggcaagatatggtactcttgggaccacttacagacacactcctctcaaatgaaggagcactcgctaaaatgaaactgctcagggatggttggaatagagacatggcagcatacttttgacaaagcaagtatataaaggcttttactaaaaggggccaagtgagtcagtgtt

SEQ ID NO: 8095 - DNA, 568 bp, Homo sapiens
  MAP TO AC005323.1; EXPRESSED IN BRAIN, SIGNAL = 1.7; EXPRESSED IN FETAL LIVER, SIGNAL = 2.4; EXPRESSED IN HELA, SIGNAL = 1.9; EXPRESSED IN BONE MARROW, SIGNAL = 4.6; EXPRESSED IN LUNG, SIGNAL = 1.7; EXPRESSED IN PLACENTA, SIGNAL = 1.6; EXPRESSED IN HEART, SIGNAL =  22; EXPRESSED IN ADULT LIVER, SIGNAL = 2.4
atacttggaggaaccaggggcttggtctgcaacccttctgccagacctaagagatcactagcttcaatttaacatcacattttgtaatacctagagagtattattaacatttgagcattacctccttcagcagtttgagccccagagaagagctgagctagagttttcattgcagacttctggtacagtccaaccacggtctcattcagggggtccttgttcttctccagccagccagtaatgttgtagtccacaacaccagcatagtgaatcagagcgaagtgggcctcggccttgcctttgaccaccttgggcttctggaagttggcagacttgcccaggtgctggtcatacagcttgttcttgaaggaggtgtctgttgccttagggaacatgcactcctcttccaggatggagaagatgcccataggctaaaaagcagaccacaacacaaaattgtacttctatttttttttctgtctatagaattaaaataaaaagcagcgaataatatagttgccgcaaaatatggtttcagaaatgcaaaaccaaccttctcgatgagctc

SEQ ID NO: 8096 - DNA, 588 bp, Homo sapiens
  MAP TO AL049872.3; EXPRESSED IN BRAIN, SIGNAL = 1.3; EXPRESSED IN PLACENTA, SIGNAL = 1.6; EXPRESSED IN HEART, SIGNAL = 2.4; EXPRESSED IN LUNG, SIGNAL = 6.4; EXPRESSED IN ADULT LIVER, SIGNAL = 1.6; EXPRESSED IN HELA, SIGNAL = 1.8; EXPRESSED IN FETAL LIVER, SIGNAL = 1.8
tggttgctttcatccatctggtatccaaagcggcatataagaggcctggagatcgtgggatagtttggagctgagagtggtggggcagctgctgggtacggacctgagtagggggtcgagtaggggttcgagtagggccctcgatacacagggtttgtccggggaatgcataaatacccgccattttggttaacacacatcatgtctcctcggcaggcctcggggatggttcggcattcatcaatatctgaaaggcacagaaagggcgagcattagtggcaccccaactgccttgtgtccggtgcatatttaagcagaactcggtaccaggcgtggaggaagcactcccaaacacctagggtggtcccaactcatcgcggtaaggtaccccaaatgttggctgaagtgtatcaaagtaaccagtgtcactcaaacatcagcctttcaaataccaccatcatgattttgaccatatctacaaaaaccttgctatagtttgaatgtccctccaaaactcatattgaaacttaatccccagtgttgcaatattgagtggtggggcctttaagaggtgattggatcctgagg

SEQ ID NO: 8097 - DNA, 508 bp, Homo sapiens
  MAP TO AC021097.3; EXPRESSED IN BRAIN, SIGNAL = 2.4; EXPRESSED IN ADULT LIVER, SIGNAL = 2.5; EXPRESSED IN BONE MARROW, SIGNAL = 1.5; EXPRESSED IN FETAL LIVER, SIGNAL = 1.7; EXPRESSED IN HEART, SIGNAL = 2.9; EXPRESSED IN LUNG, SIGNAL = 2.1
  unsure 328
aggcgaagagggaggagtagaaacgctgatgtttctgggggcagaacaaggggctcagtgagaggcagcctcagacaggtagcaccggctcctcctcacagggtaggctggtgaggggtggggcatctaccggaaggaacctattagaaacaatgaatgtttgagtgttcactctgcaagttctctcttctgggacatgagtgcatctttgggtactttctatggggggctgcggtttagcgggtgggagtcttggggccaggatgagaagctctatgttcagggccttggaatctgacctgcagagtttcaggagtcaccaggccgncggcctcctcgggaagctgcacaacactgtaggtgttcatcaggacctcgatggtccgagggcacgtgctccagcgctccagcacctgtgggaggcagaggcatgttgggtcctcagtcagtccacacagtgaccagacagctccagaatagttgttgtgggttgaactttgttccccaa

SEQ ID NO: 8098 - DNA, 578 bp, Homo sapiens
  MAP TO AC005728.1; EXPRESSED IN PLACENTA, SIGNAL = 2.4; EXPRESSED IN BRAIN, SIGNAL =   3; EXPRESSED IN BONE MARROW, SIGNAL = 2.8; EXPRESSED IN HEART, SIGNAL = 3.3; EXPRESSED IN FETAL LIVER, SIGNAL = 3.6; EXPRESSED IN HELA, SIGNAL = 3.4; EXPRESSED IN LUNG, SIGNAL = 2.8; EXPRESSED IN ADULT LIVER, SIGNAL = 3.3
ttgagacaggaagacaccccatggctgtgaaggaaaggcaggacacgtgtgtggacattcaaaatatagcaaggaaacccaaaacaacagaaagacaagaggagctggaggaaaaagctgtttggaactatgaatcatcccaaggtaacttattatgtttttatataacaagcaaaatgagctttcagcattgccattcattcattgttttagccattcatgcatttgttcagcaaacatttgtgggttcccattatatgccaggcgctgtgctaggcaggcaggcagcagaacatcagcctactactgcttactatgttcctgccactctagccttccttcaggtcttttgcaaggttgtttcatgcttcaacacagttctctgtgtaaatgtttcctcttccaagaggtcttgcctgatttattcccccatcccaccctggactagattaggcttgtctgctctatattcctacagcatttcctttttaacattctacacatccatcattactttatagtctcagatagatggtaagctccatgtgagcggggactgcctctccagttacgagcac

SEQ ID NO: 8099 - DNA, 599 bp, Homo sapiens
  MAP TO AC008752.3; EXPRESSED IN BRAIN, SIGNAL =   3; EXPRESSED IN PLACENTA, SIGNAL =   2; EXPRESSED IN FETAL LIVER, SIGNAL = 3.1; EXPRESSED IN LUNG, SIGNAL = 5.7; EXPRESSED IN BONE MARROW, SIGNAL = 1.7; EXPRESSED IN HELA, SIGNAL = 1.9; EXPRESSED IN HEART, SIGNAL = 4.1
ttcaccaaccactctcctccccaaccaaataattacctagctcccattttctaagtgctcaccatgtgccacgtattaagttaaacacttaatatgcataagctcatgcagactttagttttgaacagataaccgaggctgggtatgtagatgcttcctcaaaaagtcacacaaaggatacagtcccccagagacacgtggtccttaaaaatcgtgtacctaagaaaaagagacatttcagagataaggctaaggaggctcttcagtctgtaggccaaatgaggtagccaagcctaagcaaagggctgcctgcagcgctcccccaaccaaaaccttccggcctagtccagtccacccagtggctctaccgctgcactcaccacttcttcaggacaatcttgttccaacgggtaccagtttgggctgcaatcagcttcttaaggtccccgatggtatcatccgtgctgggcgcagagcagttaaggcaaatggaagcggtagaacgaggaagaggacattctagggcagaataccatctgccaggaccccatccgccccctctcccgggtttaactaaaaccatccgacaacacagattg

SEQ ID NO: 8100 - DNA, 588 bp, Homo sapiens
  MAP TO AC008860.5; EXPRESSED IN BRAIN, SIGNAL = 7.6; EXPRESSED IN ADULT LIVER, SIGNAL = 3.7; EXPRESSED IN BONE MARROW, SIGNAL = 3.4; EXPRESSED IN FETAL LIVER, SIGNAL = 3.8; EXPRESSED IN LUNG, SIGNAL = 4.5; EXPRESSED IN HEART, SIGNAL = 3.5; EXPRESSED IN PLACENTA, SIGNAL = 4.2; EXPRESSED IN HELA, SIGNAL = 3.5
aacatgaaggtttcccctggcaatggagaagtttctagattgttcctagggaaatagtttacttctatttacaacaaatatggtatcaatgtgttaacatttttaagagtttggacctatttcccatttacaatttcgaattgaagaaatttcccctagattaggctcttttacttaccaatccatctttgtcatagggtgaatcaaagttatccagaaatttcctaaatacttgttcctcactccattccccattctggtactttgggtggtgttttgcattatatacttcacgaaggtcttcgattgttataacaccatctccagtcttgtctaactttctaaaagcttgcatgattacctcttttctggctctggacattggaggctacaaaaatagaagaatacatacagagacatacataagcaaatgagcttttttggtatcctatgtgataaaatatctcattcccctcaacgatgtgaaataatatttgtgtgctattatgtaatagacactacaattgctccaaaaattcctaagtctgttcacagttttctgcttatccccctccccacagtgtacta

SEQ ID NO: 8101 - DNA, 595 bp, Homo sapiens
  MAP TO AC008917.3; EXPRESSED IN BRAIN, SIGNAL = 3.2; EXPRESSED IN PLACENTA, SIGNAL = 3.5; EXPRESSED IN HELA, SIGNAL = 8.5; EXPRESSED IN ADULT LIVER, SIGNAL = 3.8; EXPRESSED IN BONE MARROW, SIGNAL = 3.9; EXPRESSED IN FETAL LIVER, SIGNAL = 5.1; EXPRESSED IN LUNG, SIGNAL = 3.8; EXPRESSED IN HEART, SIGNAL = 3.9
tccccctctgtgagaaacacccaagaatgatcaattaaaaaaaaaataaaattaaaaagaaaacaacaacaacaacaaaaaaaagtcctcccataaggaaagatgatcaattcttatgtatcgttctagggatataaatattcaggaggcttttcagaataaaagttaaatcatttatgtcgcacaaacaaatttactattcggacaaatacgatgacgaggagtttgagtatcgacatgtcatgctgcccaaggacatagccaagctggtccctaaaacccatctgatgtctgaatctgaatggaggaatcttggcgttcagcagagtcagggatgggtccattatatgatccatgaaccagaacctcacatcttgctgttccggcgcccactacccaagaaaccaaagaaatgaagctggcaagctacttttcagcctcaagctttacacagctgtccttacttcctaacatctttctgataacattattatgttgccttcttgtttctcactttgatatttaaaagatgttcaatacactgtttgaatgtgctggtaactgctttgcttcttgagtagagccacctccacca

SEQ ID NO: 8102 - DNA, 582 bp, Homo sapiens
  MAP TO AC007845.12; EXPRESSED IN BONE MARROW, SIGNAL = 3.3; EXPRESSED IN FETAL LIVER, SIGNAL = 4.2; EXPRESSED IN HEART, SIGNAL = 3.7; EXPRESSED IN BRAIN, SIGNAL = 3.9; EXPRESSED IN ADULT LIVER, SIGNAL = 3.8; EXPRESSED IN HELA, SIGNAL = 4.5; EXPRESSED IN LUNG, SIGNAL = 3.9; EXPRESSED IN PLACENTA, SIGNAL = 3.1
gagcaggacagcctgtaacccttgtgctggcatcagaggcaggggccccgctgggcttctcaaccttccagagaaaagggcatgggcggcaggcagggaaggagctgacctcaagggttcttacatttctggctaagctcctcacgtaggtgcgtaggttctggttaataaaattcactgttgtgtgaaagacatcacggagcaaggacggcgtgtgactggccaccttcttggccagcagcagggccagcaccagcatggtcttctccttctccatgtctctagggtaggcctgcagcagctgctccagggcagtggccaggtccctgttccggtcctgcacagaggggcacacagaacctggtttactaatactcttccctctcaaaggaaagacagtccccagtatgaagaagcacttcaaagtacttattaagtatccagggctgctgggcggaaagaatgagaaacagttgagttctgagaggcaatggaaagggaagactgcgatcactccctgcagggggctcggtaagcaaacgcatgtgtggtgagcccatgtgcccactgttagacggtgat

SEQ ID NO: 8103 - DNA, 515 bp, Homo sapiens
  MAP TO AC023153.2; EXPRESSED IN BRAIN, SIGNAL =   5; EXPRESSED IN PLACENTA, SIGNAL = 4.8; EXPRESSED IN HELA, SIGNAL = 7.4; EXPRESSED IN ADULT LIVER, SIGNAL = 5.1; EXPRESSED IN BONE MARROW, SIGNAL = 4.2; EXPRESSED IN FETAL LIVER, SIGNAL =  10; EXPRESSED IN HEART, SIGNAL = 7.4; EXPRESSED IN LUNG, SIGNAL = 3.5
gccatctgcaagagacacacattagaatcaaagacacaaatgaattgaaagtaaaaggatgtaaaaagagatactatgcaaatagtgaccaaaagagagccagattagctatattaataccagccaaaataaactatcatctactttgtggtagatagaatcatggaagagagaaatattcaattcaacagtaatggttggaaattttaatataccatcttcaatgatgagtgagtcaactagacagaaaataagagaaaatcaaatacttgaacaacaatataaaccaacaaagcctcacatatctatagaacattccattcaacagcagcagaatgaatattcttctccagtgcattcttcatatagaccatatgctcggccataaaatatatttcagcaaatttaaaaggcttcaaattacagaaagtatattctctgaacatacggaataaaactaaaagtaaataacagaagcaaattttggaaattcatcaacatggcaatttcaccac

SEQ ID NO: 8104 - DNA, 591 bp, Homo sapiens
  MAP TO AC008873.4; EXPRESSED IN BRAIN, SIGNAL = 3.1; EXPRESSED IN PLACENTA, SIGNAL = 3.3; EXPRESSED IN BONE MARROW, SIGNAL = 2.9; EXPRESSED IN HEART, SIGNAL = 2.7; EXPRESSED IN ADULT LIVER, SIGNAL = 2.4; EXPRESSED IN FETAL LIVER, SIGNAL = 2.9; EXPRESSED IN HELA, SIGNAL = 2.7; EXPRESSED IN LUNG, SIGNAL = 3.2
gtcacaaatacccagggcagccactcacacaggcaagtacttaataagccagccagggtgctcaagtccagctaggcctggcatgctgttccctggacagggttggtattcagtccagcaaacgtatgaggcatgtatggtgtcaaatactgtggaggacacgacaatgtccaagtcatagttcctgccctctgaaaacacatgtgcatccacagaagcctacaggatttgcattcaagtgattaaaatctcacccaagacttgtgcttctcaaagtgtgaatcctgggcctctggcagcctgacagaaagtgactgtcacattcacagaccttgcagacaacgtaggtagatggaaaaatctcacaaaccctaatttatccatatctaaatataagcatattgcatatagtttaaggaataaggaataaaactcaaataattttcttaacttgtacttttgatcttaaagaaaattttgctccctctccctctctctctccctctccccatggtctccctctccccacggtctccctctccctctctttccacggtctccctctgatgccgagccgaagctggactgtac

SEQ ID NO: 8105 - DNA, 534 bp, Homo sapiens
  MAP TO AC015971.2; EXPRESSED IN BRAIN, SIGNAL = 2.5; EXPRESSED IN PLACENTA, SIGNAL =   2; EXPRESSED IN FETAL LIVER, SIGNAL = 2.9; EXPRESSED IN ADULT LIVER, SIGNAL = 2.4; EXPRESSED IN BONE MARROW, SIGNAL = 2.2; EXPRESSED IN HELA, SIGNAL = 2.6; EXPRESSED IN HEART, SIGNAL =   3; EXPRESSED IN LUNG, SIGNAL = 3.2
gggaaagaggaaactgagcctctttttcaacacaacagggaggacggagaacagacggctcctccggcagacgcgacccggcccgctccaaacaacgcttcgggcaggagaaggttctccgggtggtccgcagccgggctggaggggtggggcctacgctgggaaaaggttccgggcgggtcgtaccaacgcgcgcagggggaagaggtttccgaggccaggacggtgtcgctgcctacgcgctcagtggcgaggtggagaaactcttcatccaccctcggctacctgttcgagagccatggcaccaggagctctcgcgtcccacagccgactcctaaagactcttcctccggcccccctgtcgagtgggagtccccggaaatgggggccgggcggtatcgggcaggcggtggggagaagagtgtcctgtcatttaccaacttcactacgccccacacagatccacccgcttatctgccgccgccgtagcccttaccagttctttgggcggcttctcctgggtctttccaaaca

SEQ ID NO: 8106 - DNA, 576 bp, Homo sapiens
  MAP TO AC021036.3; EXPRESSED IN PLACENTA, SIGNAL =   2; EXPRESSED IN ADULT LIVER, SIGNAL = 1.9; EXPRESSED IN FETAL LIVER, SIGNAL = 2.2; EXPRESSED IN HELA, SIGNAL = 2.3; EXPRESSED IN HEART, SIGNAL = 2.4; EXPRESSED IN BRAIN, SIGNAL = 2.5; EXPRESSED IN LUNG, SIGNAL = 4.9; EXPRESSED IN BONE MARROW, SIGNAL = 1.7
tatagcacaacggggaggactacagttagtaataatttaattgtacacttaaaaataactcaaggagtataactggttggtgaaacaaaggataaatgtctgaagggacagatatccaattctccaagatgtgattattacacatggcatgcctgtatcaaaataactccttatccaataatatatacacctactatgtgcccacaaaaattaaaaactaaaaagttatataactggagctgttatttttaaaatgatgagtaaatcaacataatcagaaactactcaaactcccacctcctgtgatacaacgacgagccatctcccaaatgattaggccgaagctgtagatgtcagccatgatgtagggctggaagtggtttttgttcaggctttcgtccagcacttcgggagccatgtagcgtttggtgcccaccctggtattcaagggcacatcaacttcatttgtgtcactgaaacaaaagaaagccaaggtccaagttgagggccaaaaataaaatagtttatcttgtatttttgtcctattttataaaagcttctttttctccttggggc

SEQ ID NO: 8107 - DNA, 545 bp, Homo sapiens
  MAP TO AC008905.3; EXPRESSED IN BRAIN, SIGNAL = 4.1; EXPRESSED IN PLACENTA, SIGNAL = 4.5; EXPRESSED IN BONE MARROW, SIGNAL = 6.1; EXPRESSED IN LUNG, SIGNAL = 5.2; EXPRESSED IN ADULT LIVER, SIGNAL = 3.6; EXPRESSED IN FETAL LIVER, SIGNAL = 6.8; EXPRESSED IN HELA, SIGNAL = 8.1; EXPRESSED IN HEART, SIGNAL = 3.5
gccgaagaagggagaaaaagaacagcaagaaacaattgaacacattcatgaagtacaaaatgaaatggacagacttaatgaacaagccagtgaggagatttgaaagtagaacagaaatataacaaactctgccaaccatttttttcagaagaggtcagaattgatctccaaaatcccagatttttgggtaacaatatttgtcaatcatccagaagtgtctgcactgcctggggaggaggacgaagaggcactgcattatttgaccagagttgaaatgacagactttgatgatattaaatcaggttacagaatagatttttattttgatgaaaatccttactttgaaaataacattctcgccaaagaatttcatctgaatgagagtggtgatccatcttcaaagtccaccgaaatcaaatggaaatatggaaaggatttgatgaaacgttcaagtcaaacgcagaataaagctcacaggaagaggcagcatgaggaaccagagagcttctttacctggtttactgaccattctgatgttggtgctg

SEQ ID NO: 8108 - DNA, 582 bp, Homo sapiens
  MAP TO AL157822.2; EXPRESSED IN BRAIN, SIGNAL = 1.4; EXPRESSED IN FETAL LIVER, SIGNAL =   2; EXPRESSED IN HELA, SIGNAL =   2; EXPRESSED IN HEART, SIGNAL = 2.2
cagcagcagaccatcacatcatttcatgaggaaaaattaatcatttgttccctaattgaagaggactgatgattaacagcagaaagaataaccaacaccatagacatctcagttgcttcagctcacacaattctgactaaaaaattaaacttgagcaaactttccattcaatgagtgccaaaagcattgtgtccagatcaggtgcagaaagaactttcaatggaaatattaaacaagtgggatcaagatcctgaagcattctttcaccttggcagacaaacagatatatgtataccctgaagcatgtctttgaagaattggaacaggtgatgaaatatgactttaccaggatgatcctgaagacaaagcacaatcaacacaaggctaccaagaggtggaagtggtccagtcaaagtagaaatagcctggtcaagggcaaatgtcatgccaagagttttttgggatgcttaagttatttggcttgttgactttctggagggccaatggatgaaaagatctgcttattatgagagtattttgagaaagttagctaaagatttagcagaaaacacccaggaaagc

SEQ ID NO: 8109 - DNA, 530 bp, Homo sapiens
  MAP TO AC020714.2; EXPRESSED IN BRAIN, SIGNAL = 2.8; EXPRESSED IN PLACENTA, SIGNAL = 3.2; EXPRESSED IN ADULT LIVER, SIGNAL = 2.7; EXPRESSED IN BONE MARROW, SIGNAL =  11; EXPRESSED IN FETAL LIVER, SIGNAL =  12; EXPRESSED IN HELA, SIGNAL =  25; EXPRESSED IN HEART, SIGNAL = 6.2; EXPRESSED IN LUNG, SIGNAL = 4.5
ggtctgtcggttgatgtgtgcttcagggccagtgcatattagttgacagcaattagtagctgtggaggaagatgcagagtcagaagatgaagaggaggatgtgaaactcttgaagtatatctggaaagcagtctacccctggaggtggtagcaaggttccaaagaaaaaagtaaaacttgctgctgctgaagatgatgaagatgatgatgatgagtttgatgatgaggaagctgaagaaaaagcaccagtgaagaaatctatacaagatactccagccagaaatgcataaaagtcaaatcagaatggaaaagactcaaaagcatcatcaacaccaagatcaaaaggacaagaatccttcaaaaaaacaggaaaaaactcctaaaacaccaaaaggacctagttctgtaggtcctttgcacttaaagcaaaaatgcaagcaagtataggaaaaggtggttctcttcccaaagtagaagccaagttcattaattatgtgaagaattgcttctggatgattgatcaggaggct

SEQ ID NO: 8110 - DNA, 583 bp, Homo sapiens
  MAP TO AC010369.3; EXPRESSED IN ADULT LIVER, SIGNAL = 3.3; EXPRESSED IN HELA, SIGNAL =  12; EXPRESSED IN PLACENTA, SIGNAL =  22; EXPRESSED IN BRAIN, SIGNAL = 1.3; EXPRESSED IN FETAL LIVER, SIGNAL = 6.9; EXPRESSED IN HEART, SIGNAL = 1.9; EXPRESSED IN LUNG, SIGNAL =  13
gcctccaccatgtccattaggggacccagaagtcctacaaggtgtccacctctggcccccgggccttcagcagccactcctacacaagtgggcccggtgcccacatcagctcctcaagcttctcccaagtgggcagcagctgctttcggggtggcctgggcggcggctgtggtggggccagcggcatgggaggcatcaccgcggtcacagtcaaccagagcctgctgagcccccttgtcctggaggtggaccccgacatccaggctgtgtgcacccaggagaaggagcagatcaagaccctcaacaacaagtttgcctccttcatagacaaggtacggttcctggagcagcagaacaagatgctggagaccaagtggagcctcctgcagcagcagaagacggccgggagcaacatggacaacatgttcaagagctacatcaacaaccttaggcggcagctggagactctgggctaggagaaactgaagctggaggcggagcttggcaacatgtaggggctggtggaggacttcaagaacaagtatgaggatgagatcaataagcgtgcagagatggagaatga

SEQ ID NO: 8111 - DNA, 592 bp, Homo sapiens
  MAP TO AC018897.2; EXPRESSED IN BONE MARROW, SIGNAL = 1.7; EXPRESSED IN HEART, SIGNAL =   2; EXPRESSED IN BRAIN, SIGNAL = 1.9; EXPRESSED IN ADULT LIVER, SIGNAL = 2.4; EXPRESSED IN FETAL LIVER, SIGNAL =   2; EXPRESSED IN HELA, SIGNAL =   2; EXPRESSED IN LUNG, SIGNAL = 1.8; EXPRESSED IN PLACENTA, SIGNAL = 1.9
agcttcttcagaacaggccccctcatgagtattcaatttagattttaaaagagcaaggaggaaagttattgcatgctaattagctttaaattcctcctttacatggtcaattggagatagcagaataatgccaactgaacagaagagctttggtgagatgacagaggctagaatttttagcatccctccctctagcctttctggcccagcagattcctttgctatcactcattctatagcttcagtgtcacagggtcaagctggcctcagtgtgaacaagaaacaatctcactatgtcattcatgaagctgacgttctgtgtgtgacaggtgagttctccctcagtaccatagtatgtttcatatcagtggatgtgttccttctttttgttcctctctgtgttttcataatgtcatgtacttttcttataaaaaatctgtttatgttcttttccttcatgaagactgagcatgctgagggcaaagattgaggttttaaaatttctttatccctagggctaatttatagctcaatacatgattatgacttgagtgaatgaagtaattaaacatgggctgaataatcaaatggc

SEQ ID NO: 8112 - DNA, 500 bp, Homo sapiens
  MAP TO AL121913.4; EXPRESSED IN ADULT LIVER, SIGNAL = 4.8; EXPRESSED IN HELA, SIGNAL = 6.2; EXPRESSED IN PLACENTA, SIGNAL = 3.9; EXPRESSED IN BONE MARROW, SIGNAL = 3.4; EXPRESSED IN FETAL LIVER, SIGNAL = 6.3; EXPRESSED IN HEART, SIGNAL = 5.4; EXPRESSED IN LUNG, SIGNAL = 3.6; EXPRESSED IN BRAIN, SIGNAL = 4.9
gactggaagcagagaccaggcagggggagaaggcagagactagaggcagagacccagaggaggcagagactggagtgatacagctgtgagccaagggacatgggcacacaggcagccatcaggagctgcagaggcaggtgggaccccagtggggcctctggagggagcctggccctgctgacactttaattttggtcctgcaataactgattttgaactttcgtcccctagaactgtgggaggatcaatgctgcttgaagccatcggtttctgggaatttgtcacagcagcccaggaaacacatgcagaaggtttggagattggtctttccgatgactagggtgctttgtgcccatttcaacactctctgccctcagtggcacattcagaccacgttgacttgggcaatggtgagggaaatgcaaaggtgagccaaaaatacctggtctctgtctttggggggacttaaaacaacagcagctcattctgtcgcagtccaa

SEQ ID NO: 8113 - DNA, 521 bp, Homo sapiens
  MAP TO AC005323.1; EXPRESSED IN BRAIN, SIGNAL = 1.6; EXPRESSED IN FETAL LIVER, SIGNAL = 2.3; EXPRESSED IN ADULT LIVER, SIGNAL = 1.9; EXPRESSED IN BONE MARROW, SIGNAL = 5.6; EXPRESSED IN LUNG, SIGNAL = 2.3; EXPRESSED IN PLACENTA, SIGNAL = 1.9; EXPRESSED IN HEART, SIGNAL = 4.1; EXPRESSED IN HELA, SIGNAL = 2.5
atgtattcagggttgcaggcaccccaattgtcctgggatcatctgttggacatatttaccttgaggatggcttgggtgttcctatagttcctcagggcctcagcagccatgcggttggcatggttcagctggatttccatttcattgaggtctccctccatcttcttcttgagcctaatggcatcattcctgctcctgatctcagcatccagtgtgctctgcatggactccacgattctaatgtggtttctcttcatctggtcaatttcctcatctttttcagcaattttcctatcaacctcagacttgacttggttcaactcaagctggatgcgcaggatctttccctcttcatgttcaagagatgccttaatgacagcaagaggtgacattagtagagtaatggaagtgtgtagtattctagagataagaatgatttatcattcatgaaaccttatttataaatagatttctaagtagtagtaagatttaaacaagagtgtcattttcatgcctttgca

SEQ ID NO: 8114 - DNA, 506 bp, Homo sapiens
  MAP TO AC002041.1; EXPRESSED IN BRAIN, SIGNAL = 1.6; EXPRESSED IN PLACENTA, SIGNAL = 2.1; EXPRESSED IN BONE MARROW, SIGNAL = 1.8; EXPRESSED IN HEART, SIGNAL = 2.1; EXPRESSED IN LUNG, SIGNAL = 5.8; EXPRESSED IN FETAL LIVER, SIGNAL = 2.8
cgagctcactgtttggtctgcactaggcccagttagaggactacttccccgactccgagaaccctgaagtggggggcctcatggcggtcctggctgtgattggaggcatcgatggtcgcctgtgcctgggcggccaaattgtgcacgatgagtttggagaaggcactgtgactggcatcaccccgaagggcaaaatcaccgtgcagttctctgacatgcggacgtgtcacatttgcccattgaatcagctgaaaccagtaggtgaacttgtgctcagttactgtatgataagggaaattggctttacactaggacccagcaccaacattagcacttgaaagaacttgattctggtacttcaagtttgccttctaggaagctgtgtgagcttgcgcttctgtggtgagcagggcctgtctcacagggcacctaaagcagtggttcctgtgtttttcagcctcagagacatgaagagggctttagcaacctagaaggtaccgtgcgtc

SEQ ID NO: 8115 - DNA, 583 bp, Homo sapiens
  MAP TO AC020559.2; EXPRESSED IN BRAIN, SIGNAL = 3.6; EXPRESSED IN PLACENTA, SIGNAL = 9.5; EXPRESSED IN HELA, SIGNAL = 7.3; EXPRESSED IN LUNG, SIGNAL = 5.6; EXPRESSED IN ADULT LIVER, SIGNAL = 4.8; EXPRESSED IN BONE MARROW, SIGNAL =   4; EXPRESSED IN FETAL LIVER, SIGNAL = 3.5; EXPRESSED IN HEART, SIGNAL = 3.1
ccttggtttttctttgattcgagactttttattatttttatttttattttttagctgcaccaaaggcatatcctagctttattaaaggtcctgcgccacagagtcaacataaaaacacaaaaagtctcatcggtttaataacaatgaagaaccccaaaaatggaaaacgaagggggcaggggaagagacctgctcatggcactgagcctggccacagggtccgctggtattgctcttgctatgaggtcggggggacagtgattgtcctgagccaccattcacctgggtcaaggaccctcacttcttctggggtgtgctcagcttctgcatgccccggatcttgtccagcaggtcagggatgaaggcctcggtgggtttgtaacagtcaaccagcagctcctcgaccctggcagcctgggcatcctcactctccatgtccaggagttcatccacgtcaatctccagttctgggatctccttttcctggcagtcggggagttgtgtcagctgctccatgatccactcctccaggttgaggcactttgtagctccttgtggtaatacttgatggtgaccttccctt

SEQ ID NO: 8116 - DNA, 594 bp, Homo sapiens
  MAP TO AL137858.1; EXPRESSED IN ADULT LIVER, SIGNAL = 3.7; EXPRESSED IN HELA, SIGNAL = 3.5; EXPRESSED IN HEART, SIGNAL =   3; EXPRESSED IN LUNG, SIGNAL = 2.3; EXPRESSED IN BRAIN, SIGNAL = 2.8; EXPRESSED IN BONE MARROW, SIGNAL = 2.5; EXPRESSED IN PLACENTA, SIGNAL = 2.6; EXPRESSED IN FETAL LIVER, SIGNAL =   4
ttagtaatgggtcccctccctgaaatttaaatacaacagtaaatttcatatcacagtttttctctttctaaaaagaggataaaattattattggcctcttacgattattatgaaatatgatatattaatgcaacttcaatatatgtagattattatcttcaatatcaccgctactgccaaaaacagtccctgctatccattttatcaatataagaaaaataaaacataaacaatattataaagagctttaccttcagtgatgtaatcatgtttgtgtttaccttggtttgagatcctttttgttgagctcatcttagcaaggggaaatttaatgaaagaatattatggactcttacataattggcagccacctgggagacaaatcttgggggatgagcaggaatcaaaggggctctgatgggaagaagactcagacagcagggagctcaacaaatatcctgaagttaattgggcctttcccacgactgctgctgctgctgctgctgagctataataaatactttgaagggtacttgcttgtcctattttggctaggtcaacttcaaaaattctgggagggaatctttgcctgag

SEQ ID NO: 8117 - DNA, 577 bp, Homo sapiens
  MAP TO AC018720.2; EXPRESSED IN PLACENTA, SIGNAL = 1.7; EXPRESSED IN BONE MARROW, SIGNAL = 4.1; EXPRESSED IN FETAL LIVER, SIGNAL =   2; EXPRESSED IN HELA, SIGNAL =   2; EXPRESSED IN ADULT LIVER, SIGNAL = 2.1; EXPRESSED IN HEART, SIGNAL = 1.9; EXPRESSED IN BRAIN, SIGNAL = 2.6; EXPRESSED IN LUNG, SIGNAL = 5.4
ctcaccagcaggtcactgaggaccagctttaaataatcctctgcagcatcataattgaatcccagcaccatggagtttatctccttgacagcctgtgcctttgggctggggagggggcaggaaagccaggtggctgctctgtcccctacatggggctgatgaagacacccagcacccctcaggtccttctccacccctaggttgaaagatctgttctaccgctccagcaacctgcagtacttcaagcggctcattcagatcccccagctgcctgaggtaagcatgcccaaccacacaccctcggcactgcagaggccccaggtactctcttaagggccggcggggcctggcaagcaagcactatttgaggatgtgtctccgtcttcagaacccacccaacttcctgcgagcctcagccctgtcagaacatatcagccctgtggtggtgatccctgcagaggcctcatcccccgacagcgagccagtcctagagaaggatgacctcatggacatggatgcctctcagcaggtgaggaccacttgggagagaaacttggcctttcctctcacctgcaag

SEQ ID NO: 8118 - DNA, 583 bp, Homo sapiens
  MAP TO AC005774.1; EXPRESSED IN PLACENTA, SIGNAL = 3.1; EXPRESSED IN BONE MARROW, SIGNAL = 2.9; EXPRESSED IN FETAL LIVER, SIGNAL = 3.1; EXPRESSED IN HEART, SIGNAL = 2.9; EXPRESSED IN ADULT LIVER, SIGNAL = 3.1; EXPRESSED IN BRAIN, SIGNAL = 2.6; EXPRESSED IN LUNG, SIGNAL = 2.2; EXPRESSED IN HELA, SIGNAL = 2.9
aagaggaagagaggggcaagtaggtcagagcaaggggaaaaaaaacgcaacgtctgagatgaatatctgcgacctgatcctatgggtttcatgctacagcaggttccacctagaggcaagtgggttggctttttaatgcctacataagttttcggcattagctgtgggctttcctgaggagtgagtgatgcaccattgagttaaagtggcttcctctgacatggggcaattttctggagaagggaacagctgtactgttagcaaccaacattcacagcagctcggcatgaatgcatcagacactcactgggatcgacatcgttttttgattctttgaccatttcctgaatgaaggaacaaggctggtggaagaaatggtttgtctgtattatcaaccttcagctcgtctctcatcccttagagcccaatttgcacgtaccttttccctctcctttcctgttttccccccattttccttccaagctttctcatggttggtagataagtgataccaatccaatacatgtttgaccacctcacaccatggagtctgagaaggtgaagaaagcgtgatgatggacct

SEQ ID NO: 8119 - DNA, 596 bp, Homo sapiens
  MAP TO AL138770.1; EXPRESSED IN BONE MARROW, SIGNAL = 5.1; EXPRESSED IN HELA, SIGNAL = 4.6; EXPRESSED IN LUNG, SIGNAL = 4.9; EXPRESSED IN BRAIN, SIGNAL = 5.7; EXPRESSED IN PLACENTA, SIGNAL = 4.4; EXPRESSED IN ADULT LIVER, SIGNAL = 5.5; EXPRESSED IN FETAL LIVER, SIGNAL = 4.5; EXPRESSED IN HEART, SIGNAL = 3.9
ctaaatcccagcacagagccttacccacagtggacatttaatatatagtaattgaaaaagaagaagtataaagatgaccgtcatttcagtttttaaagatgcaatccaagtatatctgtgtaaaatgtgttttcatgctgttacctcactaaattataggctgtacagattatcaaaattagaaaaatggacatcgataaaaaaataaaggaattcaacatgcaagcatgttaagtgcatgctaatatataatgtgcttataaaattttaaaaatatacatgtttaaaatgtgattaatgtagaaatgccattgaaattattttctttgatccttttattggtgctaaacgatggtgcttcttagttgcaataatagctacagacaagaaaggtatgaatatccttacttttgttcacaataattttcagttcaagtttgttaatgtagacttagaaaaaagaagaaatttttaaaaacgttttactatattaataacacctcataaaaggttgttctattgactgcgtaaaatgactttcaaatatttgtagcatcagatcatacctttcctgtagttaccagttgctggcccta

SEQ ID NO: 8120 - DNA, 507 bp, Homo sapiens
  MAP TO AL159141.1; EXPRESSED IN FETAL LIVER, SIGNAL = 1.7; EXPRESSED IN PLACENTA, SIGNAL = 1.4; EXPRESSED IN ADULT LIVER, SIGNAL = 1.7; EXPRESSED IN BONE MARROW, SIGNAL = 1.9; EXPRESSED IN HELA, SIGNAL =   2; EXPRESSED IN HEART, SIGNAL = 2.1
tatcagcagctcgaaaatggactaatacaaacaggtaatctcctgaaatctcaatggattgacaaggaattccatttctcacttacctaaggtccagctggcagctgatgtgtatgggggccgcatgcagcccagcatgggacccagaatgtgtgcagcagacacgccccccgaccccatccttgccacctccttcccccattttccttggcaggatactcacctcacccagggcccttcttgtgtctccccagtattgtacctggaaggctcggctcttgtgtttgaggacatcttcagattgattgcgttctactgtgtcagtaggtgagtagacccggccctgcaggaggttatctggttgtagcaaacatcacatgcaaccctgggtgggtgcaggggacttcacagggaagccccagagggaggggtgtggcccagaggatgcagagagagggcacaggcccctctgggaaccacagaggatgtgttggctctgaggctttc

SEQ ID NO: 8121 - DNA, 550 bp, Homo sapiens
  MAP TO AC022432.2; EXPRESSED IN BRAIN, SIGNAL =   4; EXPRESSED IN FETAL LIVER, SIGNAL = 5.2; EXPRESSED IN PLACENTA, SIGNAL = 3.3; EXPRESSED IN LUNG, SIGNAL = 2.9; EXPRESSED IN HEART, SIGNAL = 4.8; EXPRESSED IN HELA, SIGNAL = 6.7; EXPRESSED IN BONE MARROW, SIGNAL = 3.4; EXPRESSED IN ADULT LIVER, SIGNAL = 3.6
ggcaccaatcacatgcatacaatgtctacgtgtatttctgcattactcaatattaccttacaagacatccaactctaaatcagaggaaaaaatagtacctttagagtgtccactgtgtgaaggtaagtagtactgaatctgtcattaaatcctggcatcctgtctgcactgggtgcatgtattagttagctattgcagcataacaaaccatccaaaacttattagctcataattgaaatggtcagccatttgggctgggctcagtggggccatttctctagtctcagctgagcatttttagacatgtatcatcagctgcttgttgactaagcagctgtgtttctgggagtgagcttctgcttctggagctgtcaacaggggcaactttttttctcctttccatggtatcttattctctgactggccaacgtgggtttttcccatggagatggcagcattctgaaataaaaacagaagcattcaagaccatttgagcctgggccccaaactagcccactgtcatgtccacaggtttctactgccctgagca

SEQ ID NO: 8122 - DNA, 533 bp, Homo sapiens
  MAP TO AC011467.3; EXPRESSED IN BRAIN, SIGNAL = 2.5; EXPRESSED IN BONE MARROW, SIGNAL = 2.4; EXPRESSED IN FETAL LIVER, SIGNAL = 2.5; EXPRESSED IN LUNG, SIGNAL =   2; EXPRESSED IN HEART, SIGNAL = 4.5; EXPRESSED IN PLACENTA, SIGNAL = 5.5; EXPRESSED IN HELA, SIGNAL = 2.6; EXPRESSED IN ADULT LIVER, SIGNAL = 2.5
gctgagctctgagatggaggcgctgcacaggcagttactgctgcagacccagctcatggaccagctgcagcagcaggaagcttagggcaaagcgatggccgagatggcccaccaagagttgcgggggacccaggtgtgggagttgctgagggcgggtcccaagggggacgacctggcagcctctgtgccttcaactctctttccccgccccttaggagcacctggaagctgccagccagagaaccagcagctacaggcccagctgagcctcatggctctccctgaggaaggtacgggagatcactcagaggaagaggagggagcccaggaggaaggggggactgttagcagataggagtgaggagtttagaacagctggtcactatgccgaccgggtttctgcgttaagttcggcatcaaaacggtgacctgggagtagaggggccaccaggttgcctaaggatgggtgaactggcccaagtcagaaatgaagcaggtcagaactcccctgccgggcagtagtggaactgagc

SEQ ID NO: 8123 - DNA, 596 bp, Homo sapiens
  MAP TO AP001208.1; EXPRESSED IN BRAIN, SIGNAL =  22; EXPRESSED IN ADULT LIVER, SIGNAL =  14; EXPRESSED IN BONE MARROW, SIGNAL =  18; EXPRESSED IN PLACENTA, SIGNAL =  16; EXPRESSED IN LUNG, SIGNAL =  29; EXPRESSED IN HEART, SIGNAL =  11; EXPRESSED IN HELA, SIGNAL =  12; EXPRESSED IN FETAL LIVER, SIGNAL =  20
tcttgattccacgttccctccacaaaatgcctggcgaagccacagaaaccgtccctgctatagagcagcagttgctgcagccccaggctgagacagggtctggaacagaatctgacagtgatgagtcagtaccagagcttgaagaacaggattccacccaggtaaccgcacaagtccagttggtggtagcagctgaaattgatgaagaaccagtcagtaaagcaaaacagaggcggagtgaaaagaaggcacggaaggctaggttcaaactgggtcttcaacaggttacaggagttactagagtcaccatccggaaatctaagaatatcctctttgtcatcacaaaaccagatgtctacaagagcccgcttcggatacctacatggtttttggggaagccaagattgaagatttatctcaggaagcacaactagcagctgctgagaaattcaaagttcaaggtgaagctgtctcaaacattcaagaaaacacacagactccaactgtacaagagggcagtgaagacgaagaggtcgatgaaacaggtgtagaaattaaggatatagaattggtcctgtcacaagcaaatgtgtggg

SEQ ID NO: 8124 - DNA, 592 bp, Homo sapiens
  MAP TO AC016372.2; EXPRESSED IN BRAIN, SIGNAL = 1.7; EXPRESSED IN PLACENTA, SIGNAL = 2.6; EXPRESSED IN LUNG, SIGNAL = 2.2; EXPRESSED IN HEART, SIGNAL =  11
agaaagcaggcaccagagaggtgaaatgagcttgtccaaggtcacaggttgttaaggtgaccagagctggacgaaaccccacctctctcgctgactagcacagcgccagctaggaagagcctagaatagcgaccaactggcaggccaaaccgtcccctgcccctgcccctgcctcggagaagcgggcccctgcactcacccgcttgtagatgtcctcccggctggcctcatacttctgttgcatgcgctcctccaggaagtagatgcgcagcttgaggctgaagttctccttcttcaggtcattgaggtgctgggacagagtgcgatatccattagacatgatgggcaacccatggggaggagcgtgcccgattgccccctcaacccaggaacatggtgcagctgcaccgcagcatgaagccagccggctgggacgctgctgaggctgcggaccgagaggctggggctatggcgacatggcccctattgctggagctctctccgggactcgggactgggctcactgctctgggtgctggagcgcagcacactttccttttttacctcagggagatatttgcggaatccctga

SEQ ID NO: 8125 - DNA, 570 bp, Homo sapiens
  MAP TO AL121981.8; EXPRESSED IN BRAIN, SIGNAL = 7.2; EXPRESSED IN HELA, SIGNAL = 7.1; EXPRESSED IN BONE MARROW, SIGNAL = 5.3; EXPRESSED IN HEART, SIGNAL = 6.5; EXPRESSED IN PLACENTA, SIGNAL = 5.3; EXPRESSED IN FETAL LIVER, SIGNAL = 7.3; EXPRESSED IN ADULT LIVER, SIGNAL = 6.9; EXPRESSED IN LUNG, SIGNAL = 7.9
acgcctcctaattgctgttgccccggacgaggagtcttcggtggactcttgcctctgttcttaggccttgaggtcaagtctggtggaaaagtgctctgccatgatgatgtgtagaatgtcggttttatcccaattcaaaagaaacacagcataatagaattttctcaactatgaatttttctcttacatgtttttcttaagctcttaatggatttcttttgaccactggtgagctgcaggcacagcaagtgaactattttgccgaagctccagagacatgaccgtgggcctgcgctacctggactgattggaacagcattgctgctggtcatgctcagaagccacctgctgcctggaaggcagggaagggaggtcagcttgacctgctgcttaattgtgtccagatgtctctatactctgatccacctacagaaaaggacactcaaatgtgaaaagaacatctctacttgactcagaatgtttcttcagagtgacagtgacagtgacagtgaggtgacagtgactgacagggaggcgagcaggctggctgggagcctggcagtcctaagt

SEQ ID NO: 8126 - DNA, 583 bp, Homo sapiens
  MAP TO AC011428.2; EXPRESSED IN PLACENTA, SIGNAL = 1.9; EXPRESSED IN HEART, SIGNAL = 2.3; EXPRESSED IN BRAIN, SIGNAL = 2.4; EXPRESSED IN LUNG, SIGNAL = 3.3; EXPRESSED IN HELA, SIGNAL = 2.3; EXPRESSED IN FETAL LIVER, SIGNAL = 2.3; EXPRESSED IN BONE MARROW, SIGNAL = 1.9; EXPRESSED IN ADULT LIVER, SIGNAL = 2.6
gcctctctgggaagtgacagtcctaaagagagatatacttaggcatattactggcttatggccattgcagcaactggtaaaacttaccaggagcatcttctgtgctaaaatcttcaccttggtctctttggtgttgaactttgcagccttgattccctgcttggctgggttggagcaactgcatacatattttctaaaaaaaagtctaggactgacggtaaaatgtatggggctttctagagagatgtggatttgtggagactgattttcacaagaggatgccaccaggttcttagctctgttggttctgcaaatgataccccaggtctttgccagagaactcacccttaaaccctctcaggcagttctctcctacctaagtgagagaatagggtgaacgtgcccttttcctattcagcaaaaggccctagaatggcagctgtggccctgcctcctgctatatccagcttactcctgtgttagactggggcttgaagctaagccccagctttcactcagctgcacttcatttttattccttgagagataattgaaaccaagcaggagcactgaagccagtttc

SEQ ID NO: 8127 - DNA, 588 bp, Homo sapiens
  MAP TO AC018702.2; EXPRESSED IN BONE MARROW, SIGNAL = 1.6; EXPRESSED IN HEART, SIGNAL = 2.2; EXPRESSED IN PLACENTA, SIGNAL = 1.6; EXPRESSED IN BRAIN, SIGNAL = 1.7; EXPRESSED IN ADULT LIVER, SIGNAL = 1.7; EXPRESSED IN FETAL LIVER, SIGNAL =   2; EXPRESSED IN HELA, SIGNAL = 2.3
tctgggttgaccaagactcctgcatatattcaaaacaggaaattaattttcaagcatgcaccatattttttgttagtgtgtggcaatatacaaagttacataaaaacttttaaaagtataatacacaaaaagctttaagaaggaggcagatcaagaacggccagatagaagcctctaccaactgtcctcaccacaggagcacccaatttgacaactatctgcacaaaaaaagcaccttcatgggaaccaagaatctggtgagtgatcatgatcactgcatctggttttaacttcatatcactgaaagaggcaatgaggatcttaggaaagacagccttgaatttccaacatgacctctgcccaatcccctgccagtgaccatgtggcagggagagagaatatgtactcttgggagaggaagagcacagcaattaaggaacttgcattggaatgcagtgctgccaacacttggtagaactcagctggcactcatggagggagcatttagaccagtgttagtcaaagggcaatcacccatgccagtggtcagaacctgaatttgtcaagccttgccattgtgggctaaag

SEQ ID NO: 8128 - DNA, 542 bp, Homo sapiens
  MAP TO AL132655.5; EXPRESSED IN PLACENTA, SIGNAL = 2.5; EXPRESSED IN FETAL LIVER, SIGNAL = 2.4; EXPRESSED IN BRAIN, SIGNAL = 2.3; EXPRESSED IN BONE MARROW, SIGNAL = 1.9; EXPRESSED IN ADULT LIVER, SIGNAL = 1.7; EXPRESSED IN HELA, SIGNAL = 2.6; EXPRESSED IN HEART, SIGNAL = 2.6
gaggtttctggagttggctgcttaatatgattagacccaaaaatgctaaggactctacttctaatagtatggagaacactgacagtccttggcatgaactgtttagagaattatgcaaaataaatgcatttaacacccctgattgaccgctcctcattgtcaaggagtttagtgactctatacataatacctttgaccatatgtggagaaccaagctggttggttgctcttaagtccagtggacaaagtgatgaaagaaaatgatgaactcagggattctgtctcccagcttcagcagcggatcctgagccttgaatctgcgaagattgccctgagtgagagtcttatttcctatagagaaagagctgaaattgtggaaaaacagacacaagctcttactatgcgagtggctgacccgcaaagaaaagtggatgcacagcctcgccaggtgtctactgttaaagtgagggcattgattggaaaagaacagaaccctgcaacttggaatggggacatgtgggaggaccctgatgaagctgaga

SEQ ID NO: 8129 - DNA, 561 bp, Homo sapiens
  MAP TO AC008585.4; EXPRESSED IN BRAIN, SIGNAL = 6.4; EXPRESSED IN PLACENTA, SIGNAL =  11; EXPRESSED IN BONE MARROW, SIGNAL =  14; EXPRESSED IN HELA, SIGNAL =  28; EXPRESSED IN LUNG, SIGNAL =  26; EXPRESSED IN ADULT LIVER, SIGNAL =   7; EXPRESSED IN FETAL LIVER, SIGNAL =  23; EXPRESSED IN HEART, SIGNAL =  13
tttttggcatgtgcataacagaatgggaatgatagaacatctatataattgagtgttatttagccattacatgataatgtttgaattaggtagaaatgtacgaaaatgtgtaatgcaattatagcatagtaattaatatgtactgtatgactgtaacaatttaaaaatatgtaggtatgttttttgaaaaagttaccctggaattatgggtactttataacatttcttctttagtgttttttctatgtttcttattaatgtagtttttttgtttccaggcttacttcattttatttttcttgtacaacccgatgttgtagccaccgctggagcctgggtcctctgcacggagactctggtgtgggtcttgaggaggtggtcagtgaattcctgatagggagacttggtgaatacagtctccttccagaggtcagggttcagcctgctgtagaccttagagatggcataaaaaatgaccatgacgaagttgcccaggatggcagtgcagcccctggctgaggtgtagcagtcattgatagctgccatcagcagcagcttctt

SEQ ID NO: 8130 - DNA, 524 bp, Homo sapiens
  MAP TO AC000134.14; EXPRESSED IN BRAIN, SIGNAL = 3.6; EXPRESSED IN PLACENTA, SIGNAL = 3.2; EXPRESSED IN ADULT LIVER, SIGNAL = 3.4; EXPRESSED IN FETAL LIVER, SIGNAL = 3.9; EXPRESSED IN BONE MARROW, SIGNAL = 2.8; EXPRESSED IN HELA, SIGNAL = 4.2; EXPRESSED IN LUNG, SIGNAL = 4.8; EXPRESSED IN HEART, SIGNAL = 3.7
tccaaccacacagactcaggggtcccactgccccctctggaagcccagagcctggtgtccagacctcgtggttcatgatcttgccgtaggtttccaccaaggactcagcatagaagggcgtctccccaaagagcagctcataggcgcagactccaagcgaccaccagtcacactgtgggccgtagtggcccttgccctcctccatggcctgcaggatctcaggggagatatagtccggcgtccctactgccactgatgaatccacctgtgggtggtggtggtgaagccatgaggacagctttgggcttggctgggactgctggcccctcgcgatggccctgtcacccctactctgccaggctggcctgctgctgcccacctggggcctgggtctcacccaccttccccggggggcctgatgcctctgcactaggcctggggcctcccattttcctgagagcttggcccgccttgtatcccctgctcccactctggggcggggtccttaccatgccgttggtgtt

SEQ ID NO: 8131 - DNA, 584 bp, Homo sapiens
  MAP TO AC018760.4; EXPRESSED IN BRAIN, SIGNAL = 3.1; EXPRESSED IN PLACENTA, SIGNAL = 2.4; EXPRESSED IN HELA, SIGNAL = 4.3; EXPRESSED IN LUNG, SIGNAL = 3.2; EXPRESSED IN ADULT LIVER, SIGNAL = 2.4; EXPRESSED IN BONE MARROW, SIGNAL = 2.3; EXPRESSED IN FETAL LIVER, SIGNAL =   4; EXPRESSED IN HEART, SIGNAL = 3.7
caagcgttcccttttctctgcatcctcaccagcacccgttattttttgcctttttgttgagactgggatgagatggtatctccttgtggtttctgccaggcaaggtcagagtcccagcactgggaagtgatcgactcgtgggtttgtaaaaaaaaaaaaaaaaaaaagtaccaacaatagtataagtttgaaaaaggaaagtttcttaggaagaatgctgcaaaagcgtgcagcggggcccctcagcaagaggactgagcatgccacagtggatttttccttaggggtatttatggacctaaggcaggagcttagggttgtaaaatgagttttggcgtggcattccggagatggatagaaattttagttacttataaaagttgaaagaggcctggaaccagacgctgactttagatactagggaagtctaattacttttgattttctccagatgtagggagttttgcctccggagggcctgttcgatggtcaccaggtggtcgctgctggcttctaaactcctcagataaggagtttttgtctccgggacccatccagtggtcaccaggtgatttccactctcc

SEQ ID NO: 8132 - DNA, 527 bp, Homo sapiens
  MAP TO AP001206.1; EXPRESSED IN BRAIN, SIGNAL = 4.3; EXPRESSED IN PLACENTA, SIGNAL = 3.7; EXPRESSED IN BONE MARROW, SIGNAL = 3.2; EXPRESSED IN ADULT LIVER, SIGNAL = 4.5; EXPRESSED IN HELA, SIGNAL = 4.9; EXPRESSED IN HEART, SIGNAL = 4.2; EXPRESSED IN LUNG, SIGNAL = 4.6; EXPRESSED IN FETAL LIVER, SIGNAL = 4.4
ttggagactgccaaacttccacggtgagtttcctggggtagattctaagtactggtgtgtccggaattggtgggttcttggtctcactgacttcaagaataaggccgtggaccctcatggtgttacaattcctaaagatggtgtgtctggagtttgtcccttctgatgttcagacgtgttcagagtttggtccttctgctgggttcgtggtctcactgacttcagcagtgaagctgcagaccttcgcggggagtattacagctcttaaggccgccagtctggagtcgttcatttctcccagtggcttcgtggtctcgctggcctcaaaagtgaggctgcagaccttcactgtgagtgttacagctcataaagacagtacagacccaaagagcaagcaacagcaagagctgcaaaagggaaaaacacaaaaccaccactgtgtggtgggacctcaacgggttacaacggctagctgggacagcctgcttttattcccttacctggccccacccacatcctgttgattg

SEQ ID NO: 8133 - DNA, 569 bp, Homo sapiens
  MAP TO AC011444.2; EXPRESSED IN BONE MARROW, SIGNAL = 2.9; EXPRESSED IN LUNG, SIGNAL = 4.9; EXPRESSED IN HEART, SIGNAL = 2.4; EXPRESSED IN BRAIN, SIGNAL = 2.8; EXPRESSED IN PLACENTA, SIGNAL = 2.5; EXPRESSED IN HELA, SIGNAL = 3.1; EXPRESSED IN ADULT LIVER, SIGNAL =   3; EXPRESSED IN FETAL LIVER, SIGNAL = 3.2
tcgtagttccccagaacctgaccatgcctcgccacctccactgccagccccctggtcccagccaccagcatctagcccggatgattccaccactggtgctggcagtctctcagcccagcagccagacggggcctgttaaccctgggagagcggcgtcatgttaagttctacttcatacccctcagctcgaaaccctccatggctcccatctcatctgcagcaaaagccaaagtcacccctaactccatccccgccaagcctaatacctctttgacctcatcgccaagctagatgcctccctcactgcacttccaccctgctggcctctggaagctcattccagcttgcctggaaagctctttgcccaggtatttggagggctggctctccgacttcttcaggccttttctcagatgtcaccaggccacccacttgagaatggggctctcagcctccttccctgctttctctgtctccttagcatttattccttataacacaccataagttatacgtatttattgtattatcactgtcctctgttagaatgtcagctcagtaagggcagg

SEQ ID NO: 8134 - DNA, 585 bp, Homo sapiens
  MAP TO AC016939.8; EXPRESSED IN BRAIN, SIGNAL = 5.5; EXPRESSED IN PLACENTA, SIGNAL = 4.5; EXPRESSED IN HELA, SIGNAL = 6.6; EXPRESSED IN HEART, SIGNAL = 4.7; EXPRESSED IN ADULT LIVER, SIGNAL = 5.7; EXPRESSED IN BONE MARROW, SIGNAL = 4.2; EXPRESSED IN LUNG, SIGNAL = 4.8; EXPRESSED IN FETAL LIVER, SIGNAL = 5.4
tagccctctcacttcctccctcaggttctcgggacaggctaaccaggaggacaggagccccaagaggccccagagcagcactgacgaagacctgtaagtcagcctttgttagaacctccaaggttcggttctcagctgaagtctctcacacactccctctctccccaggcctgtgggtctccatcgcccagctcctgcccacgctcctgactgctgccctgaccagagtcatcatgtctctcgagcagaggagtccgcactgcaagcctgatgaagaccttgaagcccaaggagaggacttgggcctgatgggtgcacaggaacccacaggcgaggaggaggagactacctcctcctctgacagcaaggaggaggaggtgtctgctgctgggtcatcaagtcctccccagagtcctcagggaggcgcttcctcctccatttccgtctactacactttatggagccaattcgatgagggctccagcagtcaagaagaggaagagccaagctcctcggtcgacccagctcagctggagttcatgttccaagaagcactgaaattgaaggtggctgagttggttcatt

SEQ ID NO: 8135 - DNA, 514 bp, Homo sapiens
  MAP TO AC020714.2; EXPRESSED IN BRAIN, SIGNAL = 2.7; EXPRESSED IN PLACENTA, SIGNAL = 1.9; EXPRESSED IN BONE MARROW, SIGNAL = 2.4; EXPRESSED IN FETAL LIVER, SIGNAL = 3.4; EXPRESSED IN HELA, SIGNAL = 3.3; EXPRESSED IN HEART, SIGNAL = 2.9; EXPRESSED IN ADULT LIVER, SIGNAL = 2.8
ccttttgctggtggaaagtcttgcctcaatgttgatggctgctgactgatcagggtggcagttgctgaagattgggtggctgtggcaatttcttaaaatgagacaacagtgaaatttgctgcatcaattgactcctccattcatgagagatttctctgtaggatacgatgctgtttgataccattttatccacagtagaccttctttcaaagtttggagtcctctcaaaaccctgctgatgctttatcaacttagtttatataatgttctaaatctttgttgtcatctcaacagtgttcacaacatctttaccaagagtagactccatctcaagagaccactttctttgctcattcataagaagcaactcctcatccattaaaattttatcatgagattgcagcagttctctcaagtcttccatgcctcacttctaattccagttctcttgctatttcttccacatctgcagtttcttctaccactgaagtcttgaatccctcgaagtcatcca

SEQ ID NO: 8136 - DNA, 560 bp, Homo sapiens
  MAP TO AC020557.2; EXPRESSED IN HELA, SIGNAL = 1.9; EXPRESSED IN BRAIN, SIGNAL = 1.4; EXPRESSED IN FETAL LIVER, SIGNAL = 1.6; EXPRESSED IN HEART, SIGNAL = 1.8
gcagaggttctcaaagtggggtccctgggccagcagcgtcagcgtcacccaggaacttgtcaggagggcaaattcttgtacttcacccccacccacggactcagaaacctaggagtggggccagggaaagccctgccgatgacctgctgcctggtcaaggctgggagccgtgctcctggaagatctagcaagttcggggccaatggatgccaacggtgactgtcccatcaggcgtctcgacggcaagggtggccccgcaccagcccagcagccctggactcacgcaagacacagtagaggccgagctgttcatagccctcacagcagtcagtcacgttcctggactcggggacctccactaccaggtactgtgtccggtaaaccatcttagggcaccgcctccaggggatccagccgccgcaggacacataggacgtgtaggacgtctgcacggcctccaccttctgtacagtgtgggtcacacggtggctgcatagctggtagcccaacagggagaggcctttttctgaaagaggccaagcaagaaggcgactgagaac

SEQ ID NO: 8137 - DNA, 543 bp, Homo sapiens
  MAP TO AL157957.1; EXPRESSED IN BRAIN, SIGNAL = 2.1; EXPRESSED IN BONE MARROW, SIGNAL = 1.9; EXPRESSED IN PLACENTA, SIGNAL = 2.2; EXPRESSED IN LUNG, SIGNAL = 2.5; EXPRESSED IN HEART, SIGNAL = 1.8; EXPRESSED IN HELA, SIGNAL = 2.1; EXPRESSED IN FETAL LIVER, SIGNAL = 2.1; EXPRESSED IN ADULT LIVER, SIGNAL =   3
cttgtgcatttaagggctggagtataatacattctgtaacaatatgtgtatttattaataattatatataatatattctgtaatatagaagaacattggctatgctaatactcaagacaaaggggctgctgtgaatctgtttgagagacgacactgatgtcacagaaaatatacaacatcaaatattttgttgttgatttaaagaatttaaaaagtgattcttacttatgtatctcctttggggtggatccttgctatgaaatatgaagctctcactgtacttttattatctatggggaaattgaggcaatgagaagtcaactcactttgctgagagcacatagctcttgagggtagtgggggatttaaacacaggtagagtctgactccagagcctgctgtacgtgaaacatgacatgttttgcagtaaacttcaggaatgatgaggggaccagtattggccagcacatgagggacagtgacctgtaaagtaaatatggcataaattctccaagatggaagtggaccaggttgagaggatga

SEQ ID NO: 8138 - DNA, 596 bp, Homo sapiens
  MAP TO AC002400.1; EXPRESSED IN BONE MARROW, SIGNAL = 1.5; EXPRESSED IN HEART, SIGNAL = 4.1; EXPRESSED IN LUNG, SIGNAL = 2.4
tgactctttcccatcccttgttcaggcttcagccagggtttctgctccctcactcccatcctcctctttttcccaaaaggaacaagaaaaatcggagaaggtgtccaagagggtcagtgcggtggaggaagtgcgaagccatgtgaaggtgctgcaggagatgctgagcatgtaccgcaggccagggcaggccccgcccgaccaggaggccctgcaggtaatacaggtgtaacacagggggctgcacatgtttactaaagtgggtttgaaatgctttcacctgtttgcacccatgaagccatctcagagtcaagacggtaaacatatctgacacctccccaaatgtcgttgtgctgctttgtcctccctttgtctgtcccttgctccccagtccccaggcagctgctaatttgctttctgttctgattggctgacaactcccagactcttgtataaatggaatgatgcagtacataaccctctatttttgcctggtttctggatctcactcgagatccattcacgttgctgtgtgtagcagtagcttgtttcttattgccgggtactgtcccgtcacctggatgtaccacagcatg

SEQ ID NO: 8139 - DNA, 504 bp, Homo sapiens
  MAP TO AC024496.2; EXPRESSED IN PLACENTA, SIGNAL =  23; EXPRESSED IN BRAIN, SIGNAL = 7.6; EXPRESSED IN BONE MARROW, SIGNAL =  28; EXPRESSED IN LUNG, SIGNAL =  37; EXPRESSED IN ADULT LIVER, SIGNAL =  16; EXPRESSED IN FETAL LIVER, SIGNAL =  23; EXPRESSED IN HELA, SIGNAL =  21; EXPRESSED IN HEART, SIGNAL = 9.5
tggtacttcaactccccaggagtatatgttagttgcctttctttttttgtgcgttagtattttcaaaacacatatatttctaggagttttttaatgttcaggagactttttaataagaactatgaaaaagaactctccaaaccaagaagaaatccctgatttacctgaaaaagaattcagaagtttagttatcaagctaatcagggaggcaccagagaaaggcaaagcccaatgcaaggaaatccaaaaaacaatacaggaagtgaagggagaaatattcaaggaaatagatagcttaaagaaaaaaacaatcaaaacttcaggaaacattggatacacttatagaaatgcaaaatgctccagaaaatctcagcaatagaattgaacaagtagaagaaaggaattcagagcttgaagacgagatcttcaaattaacccaatccaacaaagacaaagaaaaaagaataagaaaatatgaacaaagccgccaagaagtctgtgatt

SEQ ID NO: 8140 - DNA, 585 bp, Homo sapiens
  MAP TO AL121955.4; EXPRESSED IN BRAIN, SIGNAL = 8.7; EXPRESSED IN FETAL LIVER, SIGNAL = 7.8; EXPRESSED IN HELA, SIGNAL = 9.3; EXPRESSED IN PLACENTA, SIGNAL = 8.7; EXPRESSED IN LUNG, SIGNAL =  11; EXPRESSED IN HEART, SIGNAL = 6.8; EXPRESSED IN BONE MARROW, SIGNAL = 8.4; EXPRESSED IN ADULT LIVER, SIGNAL = 3.6
cagtgtcgattggtgcattcacaaaccctgagctagacacagggtgctgattggtgtatttacaatccctgagctaggcataaatgttctccacgtccccacccgactcaggagcccagctggcttcacctagtggatcccgcacagcgctgcaggtggagctgcctgctagtcccgccttgcgcccgcacttctcagcccttgggtggtcgatgggactgggcgctgtggagcagtgggtggcgctcactggggaggcttgggccgcacaggagcccacggagggggtgggaggctcaggcatggcgggctgcgggttccgagccccgctccgcgggaaggcagctaaggcccgccgagatatcgagcgcagcgctggtgggctggcactgctggaggacccagtacactctccgcagctgctggcccgggtgctaagtccttcattgcccggggccggcagggacggccggctgctccgagtgcggggcccgccaagcccacgcccacccggagctccagctggcccgcaagcgccgcgcgcacccccggttccggcgcgcgcctcttcctccacacctccct

SEQ ID NO: 8141 - DNA, 504 bp, Homo sapiens
  MAP TO AC018506.3; EXPRESSED IN BRAIN, SIGNAL = 6.3; EXPRESSED IN PLACENTA, SIGNAL = 6.6; EXPRESSED IN BONE MARROW, SIGNAL = 7.5; EXPRESSED IN HELA, SIGNAL = 6.7; EXPRESSED IN LUNG, SIGNAL = 6.5; EXPRESSED IN ADULT LIVER, SIGNAL =   7; EXPRESSED IN FETAL LIVER, SIGNAL = 7.3; EXPRESSED IN HEART, SIGNAL = 5.2
ccagatcctctgactcccagtccattactcttttatgccacatcaattgccaagtgataaattttctctggaaccccagcttgtcccacccccattcccaaccctctatttatgcatggactttactaacctccctgaatttgttttctacagaattctccctctgaagcacagaatttagatgagaatacaactgagggctgggaaaatcggataagactatggactgaccagtatgaagaagctttcactaatcagtacagtgcagatgtacagaacgcgcttgaacaacacctacattctagcaaggaatttgtgggcaaacctactattttagacactattaataagactgaattggcctgtaataacacagttattggttcccaaatgcaggtaagcaccaaagggttgaggactctctaagtagctgaaattttaagaacccaggaagagggtaatggattggaattactgttccttccaaatgtacaaggccatgga

SEQ ID NO: 8142 - DNA, 580 bp, Homo sapiens
  MAP TO AC010582.6; EXPRESSED IN BRAIN, SIGNAL = 4.9; EXPRESSED IN PLACENTA, SIGNAL = 4.7; EXPRESSED IN BONE MARROW, SIGNAL = 4.7; EXPRESSED IN HELA, SIGNAL =   7; EXPRESSED IN LUNG, SIGNAL = 2.4; EXPRESSED IN ADULT LIVER, SIGNAL = 6.1; EXPRESSED IN FETAL LIVER, SIGNAL =   7; EXPRESSED IN HEART, SIGNAL = 5.9
ttttctgttctctgcctcccagggacgtgtctcaaaccagtgtcactgcccttccatccaaaggcctggagcacctgaaggaactgatagcaagaaacacctggactcttaagaaacttccactttccttgagtttccttcacctcacacgggctgacctttcttacccaagccactgctgtgcttttaagaatcagaagaaaatcagagggtaagtggcagggacccggcataagtgacaaaagaccttggtggaagtggaattcatttcttggttttggggaagatgcttcctggtttgaaaaccaggtggagaggaaattggaagcatccatatgaaacaggaaatccatgggacacagtgaccctgcggacccaaagtgggtgcagctgagaaataaggcaattgctgctggatagcggtagagcagaggaggtgacagatggcacaggagagagaaacacaaccagatctcatagaatcttgtagaggttatgtagatatgatgtccggtttccaggtacaattcagaattagatactgcaacacatattagaccccagacaccacaaccatgag

SEQ ID NO: 8143 - DNA, 585 bp, Homo sapiens
  MAP TO AL138806.5; EXPRESSED IN BRAIN, SIGNAL =  34; EXPRESSED IN PLACENTA, SIGNAL =  12; EXPRESSED IN BONE MARROW, SIGNAL =  16; EXPRESSED IN FETAL LIVER, SIGNAL =  19; EXPRESSED IN LUNG, SIGNAL =  32; EXPRESSED IN ADULT LIVER, SIGNAL =  19; EXPRESSED IN HELA, SIGNAL =  25; EXPRESSED IN HEART, SIGNAL = 6.8
cggaaggaatagtctggtggttaagataaaatggaagtcaaacttatcgaagttgtctgcagtcagcaatgattatcttcttgctggtcttgccattcctggacccagagtactccatggcctccacaatcttcatgccttctttcaccttgccgaagaccacatgcttgccatccaaccactcagtcttggcagtgcagatgaaaaactgggaatcgtttgtgttgggtccagcatttgtcatggacaagatgccaggacctgtatgctttaggatgaagttcttatcatcaaatttctccctgcagatgggcttgccaccagtgccaatttggcgtgtgaagtcaccaccctggcacataaaccctggaataattctgtgaaagcaggaacccttataaccaaatcctttctctccagtgctcagagcatgaaaattttctgccgtctttggaatcttgtttgcaaacagctcaaaggagacacagcccaaggactcggtgttgatagcaatgtcgaaggacacagtggggttgaccatggctgatagtacaggactcctggtggcagcagcgttttaaaagc

SEQ ID NO: 8144 - DNA, 524 bp, Homo sapiens
  MAP TO AC006549.28; EXPRESSED IN PLACENTA, SIGNAL = 2.2; EXPRESSED IN BONE MARROW, SIGNAL = 3.7; EXPRESSED IN FETAL LIVER, SIGNAL = 2.4; EXPRESSED IN HELA, SIGNAL = 2.9; EXPRESSED IN ADULT LIVER, SIGNAL = 2.3; EXPRESSED IN HEART, SIGNAL = 2.8; EXPRESSED IN BRAIN, SIGNAL = 3.7; EXPRESSED IN LUNG, SIGNAL = 4.1
atccacaggtgactgggaagttccgcgggggtgtgaaccctttcacccgaggctgctgtgggaatgtggagcacgtgctgtgtagccccctggcgccccggtgaggcccggcctgggcagggtggaggggggcctctgctgggtgtggggcgggcagccttagaccctcttggtccgtttggctcttgccaggtatggccagccctgcccttgtgtgtttgtggcaggtgggctggctactgacccctgtgccctggtgcaggtacgtggtggagccaccccggctgccgctcgcggtgagtttgaagccgcctttccttaggcctgaactcctggaccgagctgcaccgctcaaggtcaagcttagtgacaacgggctgaaggctggcctgggccgtagcaaggtgggcgcctgggcttagggatgggctggcagtcaggcccttggatggggaaacaggcaggttggtgggggcctagaagaggtggatggggcagacagagccgtagacagattctgggga

SEQ ID NO: 8145 - DNA, 514 bp, Homo sapiens
  MAP TO AL158823.1; EXPRESSED IN ADULT LIVER, SIGNAL = 5.3; EXPRESSED IN LUNG, SIGNAL = 7.3; EXPRESSED IN PLACENTA, SIGNAL = 4.5; EXPRESSED IN BONE MARROW, SIGNAL = 4.9; EXPRESSED IN FETAL LIVER, SIGNAL = 5.1; EXPRESSED IN HEART, SIGNAL = 5.5; EXPRESSED IN BRAIN, SIGNAL = 5.3; EXPRESSED IN HELA, SIGNAL = 5.4
tcttcaagggctgtgtctcccacctgtacctgcttaaagatgcctggagttctctaaatactccaggtgagtgactttctcttcagctgagtggttggaattctctagataatgtctggccactcccaagaatgactgtttgtcttatatacaggttcgagcacaacagcagggatcctacaatagcagagagctgccattccgttctggccatggacccctccccaacatgcagggcagaaggtggggatctgaaaacaggaaatgacaggggctgggtgtgggagtgggggcttcaatgctgcaggaacacaagcaacaaacatctcaagctgtgcaatgctagaaggcagctggaaccaaaacgttgactggaggatgatgcagctttgttgtattttaaaatgttcatccttccattttttttcctttagtttttctgagcacgctggatgcaaaataaaaataaaaataaaaataaaaataaacatgtagccctgaaccatactctcca

SEQ ID NO: 8146 - DNA, 524 bp, Homo sapiens
  MAP TO AL132986.2; EXPRESSED IN BRAIN, SIGNAL = 2.7; EXPRESSED IN PLACENTA, SIGNAL = 3.3; EXPRESSED IN ADULT LIVER, SIGNAL =   2; EXPRESSED IN BONE MARROW, SIGNAL = 5.3; EXPRESSED IN FETAL LIVER, SIGNAL = 2.9; EXPRESSED IN HEART, SIGNAL = 5.7; EXPRESSED IN HELA, SIGNAL = 4.3; EXPRESSED IN LUNG, SIGNAL =  10
agtggttgggaaggagtgtgctattaggagagaccccttccccatgtgggagggctgttgggaggaaagggaggctggccctagcacactccctccccgcctcctcacctcctgcccccaccgccttcccaccctagctgttggagtggatccgccgcacaatcccgtggctggagaaccgggtgcccgagaacaccatgcatgccatgcaacagaagctggaggacttccgggactaccggcgcctgcacaagccgcccaaggtgcaggagaagtgccagctggagatcaacttcaacacgctgcagaccaagctgcggctcagcaaccggcctgccttcatgccctctgagggcaggatggtctcggtgagcactgggggtgagcctgggcccccagactggactgcctccacctctgagctgctcctagttgtggtcaaattcagctttatgggggtgcggatgggcgtgtttgcttctacctacatacactgctccagaagtcacttcccccttccagtt

SEQ ID NO: 8147 - DNA, 528 bp, Homo sapiens
  MAP TO AL135905.2; EXPRESSED IN BRAIN, SIGNAL = 1.6; EXPRESSED IN PLACENTA, SIGNAL = 2.1; EXPRESSED IN BONE MARROW, SIGNAL = 1.8; EXPRESSED IN ADULT LIVER, SIGNAL = 1.9; EXPRESSED IN FETAL LIVER, SIGNAL =  10; EXPRESSED IN LUNG, SIGNAL = 3.4; EXPRESSED IN HEART, SIGNAL = 1.8; EXPRESSED IN HELA, SIGNAL =  16
gatggggtaaacctcagtgcacttcttttctgttggcctcagtattactggattgaagaattgctgcttcttgttaggaggttcatttcacttatcattacttacaacttcatactcaaagcactgagaatttcaagtggagtatattgaagtagacttcagtttctttgcatcatttctgtattcaatttttttaattatttcataaccctattgagtgttttttaactaaattaacatggctcgaatgaaccgcccagctcctgtggaagtcacatacaagaacatgagatttcttattacacacaatccaaccaatgcgaccttaaacaaatttatagaggtaagatttgatatgttttagtagcttaaattgattgcaatataatagtgggacttatagctaacaaaataaaaactactttggaaaaaatgagatgatatacctacaattccagttcccagaaataaatgtcaatgtcttctataggttagaggtatatttgtacattttgagaagggcatgtg

SEQ ID NO: 8148 - DNA, 579 bp, Homo sapiens
  MAP TO AL133262.2; EXPRESSED IN BRAIN, SIGNAL = 1.4; EXPRESSED IN PLACENTA, SIGNAL =   2; EXPRESSED IN ADULT LIVER, SIGNAL = 1.8; EXPRESSED IN BONE MARROW, SIGNAL =   2; EXPRESSED IN HEART, SIGNAL = 1.9; EXPRESSED IN LUNG, SIGNAL = 5.7
caccactcacatggtcaaggaagctcttcaccatgtccaacacccaaccaaaagggctggggagaggcatgtgctccttccctctatgggcatgacccaaacactgcatatatcacttctccccatattccagcagccagaatttcgtcacacggatgcacctggctgcaaagaagcctgggaagtagaatgtctcttctgggcaacacaagctcagctgaaagttctctgacaggggaagaaggaaaaatggatattaggggacaagtcgccacctctgccacagagatcatgtggctgctgcagagaagagaacagaaccaaacgctggtacttaattacaggcctaggagtcagactgttgatgcagccttaagcctctgccctcgggcctcacagggagacagctgttgtctctacaactgagtgtaccacagtgatggaacggcctccagaagcacagaggacagttgaccaactcattcagaggattgagaaggctgttcccaacagacacacatttccactggtcccagacaggtgagtgggaacttggcagggaggagctcaagcaaacag

SEQ ID NO: 8149 - DNA, 557 bp, Homo sapiens
  MAP TO AF233390.1; EXPRESSED IN ADULT LIVER, SIGNAL = 2.6; EXPRESSED IN BONE MARROW, SIGNAL = 2.7; EXPRESSED IN HEART, SIGNAL = 3.6; EXPRESSED IN PLACENTA, SIGNAL = 2.1; EXPRESSED IN FETAL LIVER, SIGNAL = 3.3; EXPRESSED IN LUNG, SIGNAL = 2.7; EXPRESSED IN BRAIN, SIGNAL = 4.6; EXPRESSED IN HELA, SIGNAL = 3.3
cttccattctcccactctgctgctgtaggttaccacttgtattatgttgttcgttggtgtcgttctcatgtttattgatatcagcatcaacatctatagctatacccacatctatagctatacccacatctgtatctgtatctagctatgaaattttattgtggagctattttaatcttccaggaaatttgcaaagaacttcacctagagactgcatttctgtttcaccaattgtcctaatgagattatagcaaagtacccagtcaggttccatgtcacacccagctgtcccatttctctagtctctttcactctggagcaggtccttggggattccttgaatttcaggcccttggcatttttttttaggattacaccccagtctttgtagaagatcctgaaatttagattcttgcactattttctggcgattagacccagattatgcatttctttggcagggaaattacaaaggtgatgccgtgttcttcttaccatgccctacgaggtttcacatgatgtggatttgttccattcctggcggtgttcgttttaat

SEQ ID NO: 8150 - DNA, 568 bp, Homo sapiens
  MAP TO AC008929.3; EXPRESSED IN BONE MARROW, SIGNAL = 3.9; EXPRESSED IN LUNG, SIGNAL = 4.3; EXPRESSED IN PLACENTA, SIGNAL = 4.1; EXPRESSED IN ADULT LIVER, SIGNAL = 4.6; EXPRESSED IN FETAL LIVER, SIGNAL =   5; EXPRESSED IN HELA, SIGNAL =   5; EXPRESSED IN HEART, SIGNAL = 4.6; EXPRESSED IN BRAIN, SIGNAL = 4.2
tattgagcctgtctcccagctggtgctgggatctggtagaaagccaggttttgtctatttggctaagacctgggcaaggctgagcctattgtattcagtgtattacatgcaggcctgggtgtggatgggacaagtagagaggctcttggagtaacactgcaagaatggtgagaggtctaaggttttaccctttacttgttggcaaacaagtgagttggccaatttcttccaggatgctggcagaaaatgtgagattcctggtgccgagataggagagtttattactcaatgcaatagcagtagccagagtatgagcatttgtgctggttctctgagccccaattcctgcagggcaatgtgaaaagtgtcagctgacacctgcacatgcagtggcttgtgtcataagggagaacctacaagcttagggaatataatattttataatggatagtaaagcttgcctgaactttgtcccagaaggagaaataatgtctgtcttccacagtcattatatatatgttgctatacaaatatccttggaaaaaagtccagaatagaggcagctggt

SEQ ID NO: 8151 - DNA, 558 bp, Homo sapiens
  MAP TO AC018720.2; EXPRESSED IN PLACENTA, SIGNAL = 4.7; EXPRESSED IN BRAIN, SIGNAL =   6; EXPRESSED IN HELA, SIGNAL = 9.7; EXPRESSED IN LUNG, SIGNAL = 5.2; EXPRESSED IN HEART, SIGNAL = 7.6; EXPRESSED IN FETAL LIVER, SIGNAL = 7.9; EXPRESSED IN BONE MARROW, SIGNAL = 4.5; EXPRESSED IN ADULT LIVER, SIGNAL = 4.9
ccttatcctaccctccccagtgctagcggagtttcaaggttcagcgccttgatgggttaatcattggtcactaggtaaaatatctcagtggcaggcccaggaaaaggtgaagtgtcctaggacaggaaaaagatgaaggaaacggaaagggaaactgactcgaatcccaccttatcatgcagagtccaaccaatatattttaaatagctgtcggtgaggaaagacgtgctgtagctttgcatccaacacccaatttcctcaatgcagatagcacggatctcaggaaggacatccctagacacagacagataagttgactcttagagccaccctctctccaaactcactttccatcctaccagttaactccctctcatggaagaatttattttcttgaaatgccatgtaccccatgcctttcatttcttcctcccgatgtaaatactatatatatagtaaaatacatgtaaatattttttctcttttttttaagggatggggtctcttgctgtgttgcccaagctggccttgaactcctgggttcaagtcatcttccca

SEQ ID NO: 8152 - DNA, 557 bp, Homo sapiens
  MAP TO AC025289.1; EXPRESSED IN ADULT LIVER, SIGNAL = 1.5; EXPRESSED IN BONE MARROW, SIGNAL =   2; EXPRESSED IN HEART, SIGNAL = 1.9; EXPRESSED IN LUNG, SIGNAL = 1.6
ggagagtaaatgtgtgttcatggtattagtcttaccttagccatagctttcaagagatgtttgacatctccaagctgtcggttatgaccagtgagcacagtctttatattatcaaccagattctgaattgtttcacagaccgtttctatctgctgctctttctctgtctgaattgccctctgagtagacatatcctgggtcaactgtttgtgtgctgacaaaagccattcagagctgccaataggatgttcaagaccagtgtcctaaatagaacaagcatttgtttgacttcgagtatcagctgaaataatgagttctttcttcattaacatcatcaaaagatattagtaactcaagctgacacaaagagaacctccattgctaagtcatgaattaattacctacaagttacttaacaataatctcaataatctatgaaatatagatgaagatttttacttttctgcataatcatgcaggctttaaatgcttaaagtttaagacctgagaaatacattcggaatcacaaagatgactggcaatccaggtccctaaat

SEQ ID NO: 8153 - DNA, 534 bp, Homo sapiens
  MAP TO AC012578.5; EXPRESSED IN BONE MARROW, SIGNAL =   3; EXPRESSED IN HEART, SIGNAL =   3; EXPRESSED IN BRAIN, SIGNAL = 3.8; EXPRESSED IN PLACENTA, SIGNAL =   3; EXPRESSED IN HELA, SIGNAL = 3.2; EXPRESSED IN ADULT LIVER, SIGNAL =   3; EXPRESSED IN FETAL LIVER, SIGNAL = 2.8; EXPRESSED IN LUNG, SIGNAL = 3.4
actcagctgtcactccccaggaggggctgacccctggctggccgaccccaggaccgccagcggcttcgagttgtgcatgtgctcttgcccccaggccaggagcaggctctggggatgccaggctgtgggtggacccttagcttacccctgtggagcctagcacatcgctgggctcaatacatacttgcaggagggctgagtgaccgtccacaaaggccactctgcagtccatggtgacctgcgggctgcagtgcaaggaggctacctcctcactgattctttgtccatgtctcccgcctccccagggaaggttgcccggccccagggccttcccttccgatgctctgaggggcttcccctcgaagctcaccgcggcatccctggggcgttcggggctggatatgggccctgagtgtcctgagggaccatttatcccacgcttggcaatttaaaccagagctgtttacagtacaacagtgttaactaagggacgggaaggtaaagtcagcatccagtgttaaggtgggatgctgg

SEQ ID NO: 8154 - DNA, 572 bp, Homo sapiens
  MAP TO AC007955.4; EXPRESSED IN BRAIN, SIGNAL =   3; EXPRESSED IN PLACENTA, SIGNAL = 2.9; EXPRESSED IN HELA, SIGNAL = 2.9; EXPRESSED IN ADULT LIVER, SIGNAL = 3.2; EXPRESSED IN BONE MARROW, SIGNAL = 2.3; EXPRESSED IN FETAL LIVER, SIGNAL = 2.8; EXPRESSED IN HEART, SIGNAL =   3; EXPRESSED IN LUNG, SIGNAL = 3.8
gggggttctaaaggaagcagaggttttaacaattttacacaccctgattcttcatttctgcctgttttttaaacctcttcaagcttaggcctgaaatcagcttcctgctgggatctgcctccctcaatttgcacaggggtctttgtaatgattgccatgagtagtgatctgggagaatgcctgatgttgttgtgtgcatgagtgtccatgaaggatgaatctaacaataaagatgataatatttatatattattattacttattactctctgtgatttgttctgagtgctttacatatattaaatcatttaattctcacaaaaatgttatgaggtaagtattattattataactattttacagatcatgaaaatgatgcacagagaagttaaataactttccaaaggtcacatagttagtaagcagtagaaccagaatttgatactaggtagtttgctttcagagtcccttctcttaaacatgatgctataaaacattgaagattatgactttctgggaagtagttacacgtttcctgaggctaaaaaaaagctggttccttgactctcccc

SEQ ID NO: 8155 - DNA, 540 bp, Homo sapiens
  MAP TO AL139392.1; EXPRESSED IN PLACENTA, SIGNAL = 1.8; EXPRESSED IN BRAIN, SIGNAL = 1.7; EXPRESSED IN ADULT LIVER, SIGNAL = 2.2; EXPRESSED IN BONE MARROW, SIGNAL = 2.4; EXPRESSED IN FETAL LIVER, SIGNAL = 2.7; EXPRESSED IN LUNG, SIGNAL = 3.6; EXPRESSED IN HEART, SIGNAL = 2.9
tccacctccacccaagtaagcttggcgcccccctccactacagtcactatcccctcagcctgggagcccctcctgagccatctctcctctcagctctgggagcagggactctccttttgccctccctctactgagtgtcccccactggaactctagatcctgtctgatgccaccaagttccctgccagccctactcacttgggcccgaagcacatgcagaggctggcgaggtagccgttggagaaggcaaaggcagccatgaagaagatgaaccaggcatcgtgctcgaagaccacagtcaggtagcggcggggcttaatgttgcacagcagcagcagtggcacaaacaccagccgggccagcaccaggcttggcagccagcggctgtccttcccaggctgtgggcaccaggcagggcctcagcccaggccgccaccccagggcacagccaggcccccaaggatccatctggggcccctcaggatctgaactgaaacctcaaagcctggttctccttagggggttactcttgaaaggggc

SEQ ID NO: 8156 - DNA, 534 bp, Homo sapiens
  MAP TO AC011447.2; EXPRESSED IN ADULT LIVER, SIGNAL =  24; EXPRESSED IN FETAL LIVER, SIGNAL =  18; EXPRESSED IN HEART, SIGNAL =  18; EXPRESSED IN BRAIN, SIGNAL = 9.6; EXPRESSED IN PLACENTA, SIGNAL =  12; EXPRESSED IN BONE MARROW, SIGNAL =  24; EXPRESSED IN HELA, SIGNAL =  19; EXPRESSED IN LUNG, SIGNAL =  58
tcctggaaactttaaaatccctcaaaaactgtttattatacaggtgaattttgatagtcatgatgggcttatcggtaggatttctggtagcaagcacgggcaccaggacctccaaactttttggacttgcagcgacggggatcagctaccagcagggtccggtcatactggatgaggatgtctttgatctccttcttggaagcctcatccacatatttctggtaataggccaccagggctttggaggtggactgacggatagcataaatctgggccacatgagcaccacccttcacacggacacggatgtccacaccagcaaatcgctccttgccaagaagcagaactggctccagcagctcgtattgtagcatgcgcggctcagtcatctccaggggctgcccgttcaccttgatgagaccattgccgcgtctgcagtgcgccacagctgtggctgtcttcttgcgtccgaagacttgcaccgattgcagcgggcccttggacggcatggctgcgagcgtggactagagaacc

SEQ ID NO: 8157 - DNA, 591 bp, Homo sapiens
  MAP TO AC005678.1; EXPRESSED IN BONE MARROW, SIGNAL = 1.9; EXPRESSED IN HEART, SIGNAL = 4.4; EXPRESSED IN LUNG, SIGNAL = 3.3; EXPRESSED IN PLACENTA, SIGNAL = 3.5; EXPRESSED IN FETAL LIVER, SIGNAL = 3.5; EXPRESSED IN HELA, SIGNAL = 3.2; EXPRESSED IN BRAIN, SIGNAL = 2.9; EXPRESSED IN ADULT LIVER, SIGNAL = 2.4
cggtttcttaggccagagtggagtgggacaggaggtgcccagagacgactgtggtggcttgagacatggaagcgctgcagcctttgagcccagtatccagcattgcagccgccgcggcggtctaagagctcaaaccctttcaggcgcgcgcaggaggaggagcggcgggggcggcggaacaagacgaccctcacttaacgtggccgctgtcgccgtgggcatgctgggggcgtcctacgctgccgttcccctttatcggctctattgccagactactggacttggaggatcagcagtttcaggtcatgcctcagaccagattgaaaacatggtgcctgttaaggatcgaatcattaaaattaactttgatgcagatgtgcatgcaagtcttcagtggaactttagacttcagcaaacagaaatatatgtggtgccaggagacactgcactggggttttacagagctaagaatcctgctgacaaaccactaattggaatttctacatacaatgttgttccatttgaagctggacagtatttcaataaaatacagtgcttctgttttgaagaacaaaggcttaatccccaaga

SEQ ID NO: 8158 - DNA, 560 bp, Homo sapiens
  MAP TO AL136226.2; EXPRESSED IN PLACENTA, SIGNAL = 9.4; EXPRESSED IN HEART, SIGNAL =  13; EXPRESSED IN BRAIN, SIGNAL = 8.5; EXPRESSED IN HELA, SIGNAL =  26; EXPRESSED IN LUNG, SIGNAL =  25; EXPRESSED IN FETAL LIVER, SIGNAL =  22; EXPRESSED IN BONE MARROW, SIGNAL =  10; EXPRESSED IN ADULT LIVER, SIGNAL = 2.9
gaagaagcagaggctgttggcctgggctgagaagaaagctgctggcaaaggggatgtccccactaagagaccacctgtccttcgagcaggagttaacaccatcaccaccttggtggagaataagaaagctcagctggtggtgattgcacacaacgtgcatcccactgagctggtgggcttcttgcctgccctgtgttgtaaaatgcgggtcccttactgcattattaaggggaaggcaagactgggacatctagtccacaggaagacctgcaccactgtcaccttcacacaggttaactcggaagacaaaggcgctttggctaaactggtggaagctatcaggaccaattatgatgacagatacgatgagatccactgtcactggggaggcaatgtcctgggtcacaagtctgtggctcatgtcaccaagctcgaaaaggcaaaggctagagaacttgccactaaactgggttaaatgtacactgctgagttttctgtacttaaaaataattaaaataatacaaattttccttcaaaaaacggtggtggagaaatgaagt

SEQ ID NO: 8159 - DNA, 507 bp, Homo sapiens
  MAP TO AC016911.2; EXPRESSED IN PLACENTA, SIGNAL =  17; EXPRESSED IN FETAL LIVER, SIGNAL = 3.5; EXPRESSED IN LUNG, SIGNAL =  64; EXPRESSED IN BRAIN, SIGNAL = 2.9; EXPRESSED IN HEART, SIGNAL = 4.2; EXPRESSED IN HELA, SIGNAL = 2.7; EXPRESSED IN BONE MARROW, SIGNAL = 2.9; EXPRESSED IN ADULT LIVER, SIGNAL = 2.9
taagacccatctctgcccacagcatacacacccatggccccctacctgtcatcacagtaggtgaacttcatgtccatgctgtggcggctcaggaaggtcttgctatccagggggatgtccatgtgggatgggtgctggattggttcacacatgatgatgaggcaggacagcaggggctccttgtagccacacagactattgtgaggagggcagttgttgtagactttcacctggcccgtgcagtgcaagacctgagacaggcgtggaagggtcagacatggagccgagagtgctgggggtgggggtagggccttaggcatcccctgcaccgccgttaccctacacctgggactccaacccaggcctgatgttgccctaccttccaggtggctgacttgaggttgacagtacggcctctgtctggtgaccgtgcacttcatcctcatgaagaagtcccgctctgtggacatgtctttgctttttttcccaaaaccagagcctggatgt

SEQ ID NO: 8160 - DNA, 522 bp, Homo sapiens
  MAP TO AP001208.1; EXPRESSED IN BRAIN, SIGNAL = 4.9; EXPRESSED IN FETAL LIVER, SIGNAL = 4.6; EXPRESSED IN HELA, SIGNAL = 5.4; EXPRESSED IN ADULT LIVER, SIGNAL = 4.3; EXPRESSED IN BONE MARROW, SIGNAL = 3.9; EXPRESSED IN HEART, SIGNAL = 4.8; EXPRESSED IN PLACENTA, SIGNAL = 3.6; EXPRESSED IN LUNG, SIGNAL = 6.6
attgtctttgcaagttggggtttattcatctcctaaaaatattcttggggcatgtataaagctagaaatgcatgtgtaatatgccaagcatgtaagtacaaagacagaatttttgcacataatttcagccattcagttatttccaggttcatagtctcttgtaatatgtaagctttcactggccacactatggaaaacttccatttctttcaatggttgagatatgagattctttgtgaattgtttcttctggctagatgaaaattactaaaatggcattagtaatcactatattagtctgttttctgttgcttataagagaatacctgaaactgggtaatttataaagaaaaaaatttatttcttacacttacagaggctgagaagtccaaggtcgagggcctgcatctggtgatggccttcttactggtggggactctgaagcatcctgaggtaggcagggcatcacatggtaagtgggctgagtgcgtttgtgtactagcccaggctctcttcctcttc

SEQ ID NO: 8161 - DNA, 597 bp, Homo sapiens
  MAP TO AC009330.5; EXPRESSED IN BRAIN, SIGNAL = 3.2; EXPRESSED IN ADULT LIVER, SIGNAL = 1.6; EXPRESSED IN HELA, SIGNAL =   2; EXPRESSED IN BONE MARROW, SIGNAL = 1.9; EXPRESSED IN HEART, SIGNAL = 2.2; EXPRESSED IN LUNG, SIGNAL = 6.5; EXPRESSED IN PLACENTA, SIGNAL = 4.4; EXPRESSED IN FETAL LIVER, SIGNAL = 3.2
ggcagagggcagtagagatggccggcccaaggtctcggtggcgcgaccagctgctgttcatgagcatcatagtcctcgtgattgtggtcatctgcctgatgttatacgctcttctctgggaggctggcaacctcactgacctgcccaacctgagaatcggcttctataacttctgcctgtggaatgaggacaccagcaccctacagtgtcaccagttccctgagctggaagccctgggggtgcctcgggttggcctgggcctggccaggcttggcgtgtacgggtccctggtcctcaccctctttgccccccagcctctcctcctagcccagtgcaacagtgatgagagagtgtggcggctggcagtgggcttcctggctgtgtcctctgtgctgctggcaggcggcctgggcctcttcctctcctatgtgtggaagtgggtcaggctctccctcccggggcctgggtttctagctctgggcagcgcccaggccttactcatcctcttgcttatagccatggctgtgttccctctgagggctgagagggctgagagcaagcttgagagctgctaaaggcttacgtgattgcaagggt

SEQ ID NO: 8162 - DNA, 595 bp, Homo sapiens
  MAP TO AC018801.2; EXPRESSED IN BRAIN, SIGNAL = 2.2; EXPRESSED IN HELA, SIGNAL = 2.2; EXPRESSED IN HEART, SIGNAL = 2.2; EXPRESSED IN LUNG, SIGNAL = 2.6; EXPRESSED IN PLACENTA, SIGNAL = 2.4; EXPRESSED IN FETAL LIVER, SIGNAL = 2.4; EXPRESSED IN BONE MARROW, SIGNAL = 1.7; EXPRESSED IN ADULT LIVER, SIGNAL =   2
cagctttgcagactcaccacccccacaggctgtcctggaggttcctacgcctgcagtgggagctaagaggtcagctgttgccccagagccgaccccagtaacctttgcagcttccctgagggcttcagggacctgcaccctgtttagtgggcacagagaaaatggctcatgtcctggaaatacccagcctggctccattgggctgtaagtagttcctggcaaaattccttattaggtaacaatttggatggtggtggagatgtgtctctcctactttacccaagaggtggtagcggtgtggcctgtgggaattttgagggcagcgggcaaaagtcattccagtcccagggctcagctccagcagcgcccaggggcatctcagaagcagctacatcatcatctgtaccaccccacgccctgtgcttgtttagggctgagatcctattgggaggcatttggggaggaggtgagctgcgctggcagaaggttcagggccggtcactggggattttcctgccactcacatccccttctttcaagtcttctttaactctgcacagatgggagtaacagaagatgctggtttccacctcat

SEQ ID NO: 8163 - DNA, 500 bp, Homo sapiens
  MAP TO AC025488.1; EXPRESSED IN BRAIN, SIGNAL = 1.3; EXPRESSED IN PLACENTA, SIGNAL = 1.9; EXPRESSED IN ADULT LIVER, SIGNAL =  14; EXPRESSED IN BONE MARROW, SIGNAL = 1.5; EXPRESSED IN FETAL LIVER, SIGNAL = 4.2; EXPRESSED IN HELA, SIGNAL = 2.2; EXPRESSED IN HEART, SIGNAL = 2.3
gccttcacttacatctccagcagaagtaggcgttccttcctctgaagtctcaaaaacaattttaattcagttcagtgtgttatctaggaaacaccgtcacattcagattcttccattgtgcatttctcattttattcctatgaataattttgctaaaattcatccaatcctaggtcacccaaaaaccagagcttttataactcatggtggagccaatggcatctatgaggcaatctaccatggaatccctatggtgggcgttccattgtttgcagatcaacctgataacattgcacacatgaaggccaagggagcagctgttagtttggacttccacacaatgtcgagtacagacttactcaatgcactgaagacagtaattaatgatcctttgtgagtataactttttttttactcggtggtctttatagataggttcccttgtgaatagtgagtatgacttttatcctttttataagcgactgatttcgaaagaattt

SEQ ID NO: 8164 - DNA, 527 bp, Homo sapiens
  MAP TO AL138827.2; EXPRESSED IN ADULT LIVER, SIGNAL = 3.2; EXPRESSED IN HELA, SIGNAL = 6.7; EXPRESSED IN HEART, SIGNAL = 4.9; EXPRESSED IN BRAIN, SIGNAL = 2.6; EXPRESSED IN PLACENTA, SIGNAL = 2.5; EXPRESSED IN BONE MARROW, SIGNAL = 2.4; EXPRESSED IN FETAL LIVER, SIGNAL = 6.4; EXPRESSED IN LUNG, SIGNAL = 2.7
caggtttgggtaccctgatgcaatatgtggctctacaagcctcagtatgttaactgaaggcttgttgagcttcacaaaggttccactgaagatccgacaaaggtgaagaagctgcaataatacctttcagaacacctttgtgtgcacaccattggaacttctgatcctgatgacaaatgccagtttggattctgcaggtatatagaggttgccagcttttcttgccattctggccattcgaatctccattctgtccatctgtgtatatttcttgtgaaagtgcttcagtttttcacagataagctttctccttgcctttacaagcaccttttgggcaaacttctttctcaggtgcttgatcttcagctctgcaaaacttctttgctttttcttgagggtttttggcaaagcaggaaccttcttctctttggcacactccttggttccggcaataaaagagggtatcatcaccattttaatatcaaaccacaaagcgttgccattttacaggtgagcaaaccaaggat

SEQ ID NO: 8165 - DNA, 567 bp, Homo sapiens
  MAP TO AC007533.2; EXPRESSED IN BRAIN, SIGNAL = 3.2; EXPRESSED IN FETAL LIVER, SIGNAL = 3.4; EXPRESSED IN HELA, SIGNAL = 3.4; EXPRESSED IN BONE MARROW, SIGNAL = 3.2; EXPRESSED IN LUNG, SIGNAL = 2.1; EXPRESSED IN PLACENTA, SIGNAL = 7.4; EXPRESSED IN HEART, SIGNAL = 2.7; EXPRESSED IN ADULT LIVER, SIGNAL = 3.9
ggcctctgctcaagtttcacttacaacctctgggctggcactgccctctcgacccggcaggctgtgtttggctcgcactaccagtcctaatctcacacccactgtgggcaagccaggcactgcgtgatgaggggtgtataagcaagcaagtgcagggcagctgccccaggcgccaactccatgcaaggctgaggctcaaccgggcatactacaagcagcttctgacttaggcgccagcgtttggacaacgggagcatagtggcatctaaaaacttggagacaccagcaactgcagggccctaaagggggtgttacagtggacaaccagagattgagcaaggtggagaagagttttatttagcaacagaatagctctcagtggacaggggacctgaagtgggcagcccctacccaaaagcagggaatccccacgtgtggctgggtctggggtttttatgggctcagaatgggggagtgcatgtggattggtccatggcggcctcggaaaagcaccattttattgtctaagaggcatcaaggaagttctcactctggtcggggacttta

SEQ ID NO: 8166 - DNA, 587 bp, Homo sapiens
  MAP TO AL133375.3; EXPRESSED IN PLACENTA, SIGNAL = 2.6; EXPRESSED IN BRAIN, SIGNAL = 3.4; EXPRESSED IN FETAL LIVER, SIGNAL = 2.9; EXPRESSED IN HELA, SIGNAL = 3.1; EXPRESSED IN BONE MARROW, SIGNAL = 3.4; EXPRESSED IN HEART, SIGNAL = 3.5; EXPRESSED IN LUNG, SIGNAL =   5; EXPRESSED IN ADULT LIVER, SIGNAL = 3.1
acccttcccattactgaccccaagacctttgtgtctgcttgtctcttaaacgtataccccttctgttgacagaccctgggtgaaaaggccctaggtgagatctctgtgtccgtggaaatggccgagagtctgctgcaggttctcagtagtcgatttgagggcagcactctcaatgacctgctcaactcccagatctacaccaagtatgggctgctgtctaatgaaccaagcagctcgtctacttcacgaaatcactcctgtaccccagatccagaagaggagtccaagtcggaggccagcttctcagaggaagagactgagtccctcaaagcaaaggccgaggcccctaagacagaggccgagcccaccaagacaaggaccgagacccccatggcacagagtgattctcagctgtttaaccagcttctggtgactgaggggatgaccctgcccactgagatgaaggaggcagccagtggtgagtcaggttctgggaggaagcaattggaacaagtcctgggtagtctcagtagaagaaatggatagtcaggatcgaaggaaagccatggaggaaggtgatttttgca

SEQ ID NO: 8167 - DNA, 559 bp, Homo sapiens
  MAP TO AL158047.2; EXPRESSED IN ADULT LIVER, SIGNAL = 5.7; EXPRESSED IN HELA, SIGNAL =  15; EXPRESSED IN HEART, SIGNAL = 7.1; EXPRESSED IN PLACENTA, SIGNAL = 4.3; EXPRESSED IN BONE MARROW, SIGNAL =  15; EXPRESSED IN FETAL LIVER, SIGNAL =  14; EXPRESSED IN LUNG, SIGNAL =  12; EXPRESSED IN BRAIN, SIGNAL = 3.1
aaggccaagacaatgagtgcatggccttcaccaagctgggccgcctgttcacagggacatgaagatcaagtccctggaggagatctgtctcttttccctgcccatcaaggagtctgagatcattgactttttcctgggggcctctctcaaggatgaggttttgaagattatgctggtgcagaagcagatctgtgcaggccagcgcaccaggttcaaggcatttgttgccatcagggactacaatggccacgttggcctgggtgttaagtgctccaaggtggtggcccctgccatctgtggggccatcaacctagccaagctctccattgttcccgtgcacaaaggctactggaggaataagatcggcaagccccacgccatcccttgaaaggtgacaggccgctgtggctctgtgctggtgtgcccaggggcactggcatcgtctttgcccccatgcccaagaagctgctgctgatggctggtatcgatgactactacccctcagccagggactgcacctccgccctgggcaactttgccaaggccacctttgatacca

SEQ ID NO: 8168 - DNA, 505 bp, Homo sapiens
  MAP TO AC024166.1; EXPRESSED IN HEART, SIGNAL = 1.8; EXPRESSED IN LUNG, SIGNAL = 1.8; EXPRESSED IN ADULT LIVER, SIGNAL = 1.9; EXPRESSED IN BRAIN, SIGNAL = 1.9; EXPRESSED IN PLACENTA, SIGNAL = 1.7; EXPRESSED IN FETAL LIVER, SIGNAL =   2; EXPRESSED IN BONE MARROW, SIGNAL = 1.7; EXPRESSED IN HELA, SIGNAL = 1.8
aaaagagagaaaccaggcccccagaatggtggccgaggctcgggtcttggtacgatacttaaggtacctgaggggctgctggacagagcggtagcgatcaatgcacaggatgaagacactgaaaatggacgctgtgctggccacatagtccatggaaagccaaaagaggcagagaggacggcccagtgaccacttggacatgagcaggtagaggatgttcataggcatgacgacggcacccacgatcaagtccgccaccgagaggctgacgatgtacaggttccccacagtgtggagcttccgctcactccgtacggcatacagcaccagcaggttgagccctactgtgaccaagcagatagtgctcaggaccaccaccaggggcatcagctgggggctggccatagtggtcttgttgccctcacacatcttgtcttctaagaggcaggaggaattggggaggctcattggcgcaagagcagccaccagttatggctcactccct

SEQ ID NO: 8169 - DNA, 536 bp, Homo sapiens
  MAP TO AC007954.6; EXPRESSED IN PLACENTA, SIGNAL = 2.8; EXPRESSED IN ADULT LIVER, SIGNAL = 3.1; EXPRESSED IN BRAIN, SIGNAL =   3; EXPRESSED IN LUNG, SIGNAL = 2.8; EXPRESSED IN HEART, SIGNAL = 2.8; EXPRESSED IN HELA, SIGNAL = 3.2; EXPRESSED IN FETAL LIVER, SIGNAL = 3.2; EXPRESSED IN BONE MARROW, SIGNAL = 2.5
caggacagacagaagagccccatcctctcccacctccatacctttccagctcatcccacctctgccaccaaaacactcatcgcggggtcagagggagtgccaaaaaaggtaaaaagaaacgcaagaaagaggctactggggatgaggggacacccagaagccccttcctggaggaaaagccactccttctgcagctggactctaggatactgagacccagccctgccccatcacctctccagtgtggccaaggggacaaggaccaagatgcagggaagcttggggagcctgggctacaacagatacaggccaacagacagacacagatggatgggggctgccgggcggggtcgcctcttactcgccatcccagcctcgactcatggcctgcactacggccccgtagagttggctccaggcagcccgtgtggctggtgtgaaggcagggcccagacacttctccagcatgtagagcagagactcacccactgtctgcagaggcaaggggcaccttgtcacttccaaaggcagaaagg

SEQ ID NO: 8170 - DNA, 555 bp, Homo sapiens
  MAP TO AP001206.1; EXPRESSED IN ADULT LIVER, SIGNAL =   4; EXPRESSED IN BONE MARROW, SIGNAL = 3.4; EXPRESSED IN HEART, SIGNAL = 4.3; EXPRESSED IN PLACENTA, SIGNAL = 3.4; EXPRESSED IN BRAIN, SIGNAL = 3.9; EXPRESSED IN HELA, SIGNAL = 4.7; EXPRESSED IN FETAL LIVER, SIGNAL = 4.3; EXPRESSED IN LUNG, SIGNAL = 3.9
ttcccagaaacatgcctttctaccactgggtcatctgagtctattttcattaaataatgtatgcacaaataatcaacgaacaactggaaatgattatttagtaattacatttcactccaacagaaatagcccattaggacaataagagcattcaggtaatgacagccatttttaactctgaaaatgccagctggggcaaccaataacagctgtgccatccctccaggccccttgaggtcaaatgcaggctccacattcttaaagatcaacacctttttcaccaccataatgaggctaagaaaactcaggcaaacagggtctttatgcaccagaacttcagaacaggctaggggaatagcaagtcattttaaaacaataaaactgactcttttttaaaagatggatttactcgttaatttaatgcatctgctttgcatttcctgcaaacctaatgtcacaagtaataatttggggggctcaattgcaatgggcgattttgctggtattccctgtctctccccaccccacaattcttccagccatactccacctctc

SEQ ID NO: 8171 - DNA, 554 bp, Homo sapiens
  MAP TO AC009399.5; EXPRESSED IN BRAIN, SIGNAL = 2.6; EXPRESSED IN FETAL LIVER, SIGNAL = 5.1; EXPRESSED IN ADULT LIVER, SIGNAL = 3.2; EXPRESSED IN LUNG, SIGNAL = 2.4; EXPRESSED IN PLACENTA, SIGNAL = 3.1; EXPRESSED IN HEART, SIGNAL = 3.6; EXPRESSED IN HELA, SIGNAL = 5.1; EXPRESSED IN BONE MARROW, SIGNAL = 3.1
cagcagctttttgagtgcaggacctaagatgttgacagtgcctttgggggcgagggtgaggcacatcagcacagagccgcagcagccagtcacttgcagtgcagagtgtggagcttgctgatcttgttccattggatccttgctgcatggggatgatggagagcagggtgataaccccacagatgctactgtccgcctccttggagcaattatccagactgatgtagccattgtagtcccttatggtaacaaatgccttgaacctggtccactggccagtgtgggtctgcttttgccacaagtatagtcttcaaaacctcacctgtgagagggtgtccccagaaatgtcgatgatctcagattccttgatgggcagggagaagagagagatctgctccagggacttgattttcatgttcttgtccaggcagcccagcatgcggatggtgacacactccttgtacttggtcttgcttctgtgagctctgtggtgtgggccctgagcacacctgcggtctagaccctcccatagcgctggtgtcatctgccatttg

SEQ ID NO: 8172 - DNA, 504 bp, Homo sapiens
  MAP TO AL133312.2; EXPRESSED IN ADULT LIVER, SIGNAL = 2.5; EXPRESSED IN BONE MARROW, SIGNAL = 2.2; EXPRESSED IN HEART, SIGNAL = 7.4; EXPRESSED IN PLACENTA, SIGNAL = 2.6; EXPRESSED IN BRAIN, SIGNAL = 2.3; EXPRESSED IN HELA, SIGNAL = 3.7; EXPRESSED IN FETAL LIVER, SIGNAL = 3.7
ttgtttgtttttgttttctgctgtctctctttttaaacagaagaactctcctttttaaaaataaacttttatgtggaacaccgaaaaataaaaataataaaagcggacctgttctggatgaagagtatgggtacagggcagaagaacgagaattcagactgtagctgctggaggtggcagaagttgaatcaacagatgcttgctcccaaacaccctctggcttcttctcctcagttcccactgcattgtgccttgcaatctgtgcaaaggctctagaaagagctggggtagaagcctggaaaactagagaacaaagtggctaggtcagcactagggaggagggctgagtcctaggagaatggcccaggactcgttcaagctgtagccccaaagtgtgtgttttgggacaatctcctaccctttgataactgacgctgtggcaatcttctgtggctaatcggggagggtcttatggagggaggagggggaggttgaaggcatatt

SEQ ID NO: 8173 - DNA, 541 bp, Homo sapiens
  MAP TO AC016663.2; EXPRESSED IN BONE MARROW, SIGNAL = 3.4; EXPRESSED IN HELA, SIGNAL = 3.8; EXPRESSED IN HEART, SIGNAL = 2.7; EXPRESSED IN LUNG, SIGNAL = 2.7; EXPRESSED IN PLACENTA, SIGNAL = 8.1; EXPRESSED IN BRAIN, SIGNAL = 2.5; EXPRESSED IN FETAL LIVER, SIGNAL = 3.4; EXPRESSED IN ADULT LIVER, SIGNAL = 1.8
tcgattaggacaaaccccaggcaggaacaatggggagcctctagcccaattgggtgccgcctcgctggatcagaagtgcagcagacaccctgccagatccggaggggtggaagtcagcagcggtgtctgcaacgacagctatcagcagtggtggatggtgaggaaaagctcaattcgaaccggaataaacacagaccagagagtgtgcagttgcaagatttaatagagtgaaaacagagctcccatacagtgggaggggaccctaagggcgttgacattgctggctggaatgcctggggttgtatcccgatcattatccatccccctctgctctcaggtgatagatgattggctatttatttacctcctgttttagccgaattagccttttagtgagctgtctttactagctgattggtcaggtgtgagccaagttgcaagccctgtgtttcaaggtagatgtggtcaccttcccagctaggcttagggattcttagttggcctaggaaatccagctagtcctgtctctcactgccagctg

SEQ ID NO: 8174 - DNA, 567 bp, Homo sapiens
  MAP TO AC019191.2; EXPRESSED IN PLACENTA, SIGNAL = 5.6; EXPRESSED IN HEART, SIGNAL = 3.9; EXPRESSED IN BRAIN, SIGNAL = 5.3; EXPRESSED IN LUNG, SIGNAL = 5.6; EXPRESSED IN HELA, SIGNAL = 6.4; EXPRESSED IN FETAL LIVER, SIGNAL = 4.9; EXPRESSED IN BONE MARROW, SIGNAL = 4.6; EXPRESSED IN ADULT LIVER, SIGNAL = 3.6
cctttgtatctcgctcagggattgtaaacacgccaatcagcaccctgacaaaacaggccactgggctctaccaatcagcaggatgtggatggggccagataagagaataaaagcaggctgcccgagccagcattggcaactcgctccggtcctcttccacactgtggaagcttagttttttcgctctttgcaataaatcttgctactgctcactctttgggtccacgctgcttttgtgagctgtaacactcaccgtgaagaagatctgcagcttcactcctgagcccagcgagaccacgagcccaccgggagaaacgaacaactccagacgcactgccttaagagctgtaacactcaccgccaaggtctgcagcttcactcctgagccagcgagaccacgaagcgccactagaaggaagaaactccaaacacatctgaacatcaaaagggacagactccagacgcgccaccttaagagctgtaacattcaccgcgagggtccacggcttcattcttgaagtcagtgagaccaagaacccaccaattccggacacagcagtttctcag

SEQ ID NO: 8175 - DNA, 505 bp, Homo sapiens
  MAP TO AL133163.2; EXPRESSED IN BONE MARROW, SIGNAL =  11; EXPRESSED IN HEART, SIGNAL = 3.7; EXPRESSED IN PLACENTA, SIGNAL = 2.9; EXPRESSED IN FETAL LIVER, SIGNAL = 4.1; EXPRESSED IN HELA, SIGNAL = 5.5; EXPRESSED IN LUNG, SIGNAL =  14; EXPRESSED IN BRAIN, SIGNAL = 2.2; EXPRESSED IN ADULT LIVER, SIGNAL = 2.9
agatgaagagcaaggccctcaggtatataagtgtgatcctgcaggttactactgtgggtttaaagccactgcagcgggagttaaacaaactgagtcaaccagcttccttgaaaaaaaagtgaagaagaaatttgattggacatttgaacagacagtggaagtaagtcaaccaaaaggagctgactttttttatgctatatagaacagtgaggatctttgtataatttctatacaaagctattcctgaattacatcccaggattcaagttgtcaacttaataatgaaattgatatcatacagctgacataggaaaatttgagttgcttttattcacttaattccttatttcgtaatgtatttgaggtggctttcaacaaaacgcatataataggaaaatataaataaaaataggaaccagctgggcatggtggcacacacctgtagtcccagctacttgagaggctgaagctggaggactgcttgagtctaggtgttcgaggccag

SEQ ID NO: 8176 - DNA, 554 bp, Homo sapiens
  MAP TO AL132641.2; EXPRESSED IN PLACENTA, SIGNAL = 2.3; EXPRESSED IN HELA, SIGNAL =   2; EXPRESSED IN LUNG, SIGNAL =   5; EXPRESSED IN FETAL LIVER, SIGNAL = 3.9; EXPRESSED IN HEART, SIGNAL = 2.1; EXPRESSED IN BRAIN, SIGNAL = 1.8
gcaaaggcaggctatgctacagtatcttccacatctgtcattgaggtaaccgctctgcccccctccactacctctcagcaagccaaactagttgccttaactcaagccctcactcttgcaaaaggactatgtatcaatatttatagtgactctaaatatgcctttcatattctgcaccaccatgctgttatacaggctgaaagaggtttcctcactacgcaagggtcctccatcattaatgcctctttaataaaagctctgctcaaggctactttacttccaaaggaagctggagtcattcactgcaaaggccatcaaaaggcgtcagatcccattgctctagacaacgcttatgctgataaggtggctagacaagcaggtagctttccaacttctgtccctcacagccagtttttctccttcacatcagtcactcccacctacccccccgcccccccgctgaaacttctacctatcaatctcttcccacacaaggcaaatggttcttagaccaaggaaaatatctccttccagcctcacaggcccattctatt

SEQ ID NO: 8177 - DNA, 539 bp, Homo sapiens
  MAP TO AL133124.2; EXPRESSED IN BRAIN, SIGNAL = 5.2; EXPRESSED IN ADULT LIVER, SIGNAL = 4.5; EXPRESSED IN HELA, SIGNAL = 7.3; EXPRESSED IN BONE MARROW, SIGNAL = 4.1; EXPRESSED IN HEART, SIGNAL = 5.9; EXPRESSED IN PLACENTA, SIGNAL = 4.5; EXPRESSED IN LUNG, SIGNAL = 3.5; EXPRESSED IN FETAL LIVER, SIGNAL = 6.4
attgaaagtcctgggcaatgcaggaagataggaacaaagatattaaaaagtaacaattgggaaagaaaaaaataaaaggtagaactcaaaagattatataaagataattgattaactttaaacaattttgctgggtatgaaaacaatttataaaaacaaattgcttctctgtataccaggaacaattagaaaaggcagcttaaagcatactatataaactagcatcatcatttaaatcaacaagaaataaatctaacaaagctgtgtaagaaatgtgtgaagaatattattatactttattaaatccccaagattggagatcatcctataaaaaccctagaagacaacttaggcaataccatcttggacgtaggagtgggcaaagatttcatgacaaagataacaaaagcaatctcaacgaaagcaaatgttgacaaacgatatctaattaaacttaagagcttctgtgcagcaagagaaactatcaacagagtagacagagggtggagggtgggaggagggagaggagcagaaaaggt

SEQ ID NO: 8178 - DNA, 550 bp, Homo sapiens
  MAP TO AC008865.3; EXPRESSED IN BRAIN, SIGNAL = 4.3; EXPRESSED IN PLACENTA, SIGNAL = 2.9; EXPRESSED IN FETAL LIVER, SIGNAL = 4.9; EXPRESSED IN HELA, SIGNAL = 5.4; EXPRESSED IN ADULT LIVER, SIGNAL = 3.7; EXPRESSED IN BONE MARROW, SIGNAL =   3; EXPRESSED IN HEART, SIGNAL = 4.2; EXPRESSED IN LUNG, SIGNAL = 2.2
ttaatctggcctctgccatcactgagggtacccggggcttggccttgctagtgatagccacacagggccgtaaggctcagctgatcatcactgggtgaggaagtgtcagggtcactgcagatctgagtcagggctaagctcaatatttctttcttttctttgtaaaaccgtagttcttgtcctgctttcctggcttcctccaactgcctcagggccattcgtagctcttgagagacaattcctggtgagtcccgctccttcatgatccagtccagggccatgtggctgcgcatcttttcatctagagaatactgagaatagtaggagatgacttcctgggggccaagaaacaaagtccagggtgtcaataaaaagcaacaaaggcacccgtccacatgcctccccctgcttcccacatccattagggttttatcaacaaccccatctctctcatgttcaaaaactgaaaccaaaacccactggtttacttctataaaggaaatgaaaggctaagttggcctagcaaagcacaccactccaggttgagtca

SEQ ID NO: 8179 - DNA, 572 bp, Homo sapiens
  MAP TO AC008567.3; EXPRESSED IN PLACENTA, SIGNAL =  13; EXPRESSED IN BONE MARROW, SIGNAL =  26; EXPRESSED IN HELA, SIGNAL =  21; EXPRESSED IN LUNG, SIGNAL =  17; EXPRESSED IN HEART, SIGNAL =  28; EXPRESSED IN BRAIN, SIGNAL =  18; EXPRESSED IN FETAL LIVER, SIGNAL =  29; EXPRESSED IN ADULT LIVER, SIGNAL = 8.9
aatgcacctcccgatatttggaatgactatttaaaaaaagaacaatgtataatcaaagtcctcagccacattgtagaacgtttgggattcttcgctccaactaactgctgtcaccttcaccattccaggttttaaatcttaagccaaaaaaaaaaaaaaaaaaaaccaatcttattttctgcataaattaggtttttgtcaagaaaggttataatgtaagtcaccgtccgcctagaagtatttgtggtagggtggacaatactgaggccggactcctcgtattcctgcttgctgatccacatctgctggaagggggacagcgagaccaagatggagccactgatccatacagaatatttgtgctcaggaggagcaatgatgttgatcttcttcatgctgggagccatggtggtgatctcctcctccatcctgtcagcaataccagcgtacatggtggtgtcactggacagcactgggttggcatccaggtctttgcagatgtcaatgtcacatttcatgatggagttgagggtagtttcatggatgccacaggattccatgtccaggaagga

SEQ ID NO: 8180 - DNA, 592 bp, Homo sapiens
  MAP TO AL133454.2; EXPRESSED IN HELA, SIGNAL = 5.3; EXPRESSED IN LUNG, SIGNAL =   2; EXPRESSED IN BONE MARROW, SIGNAL = 3.3; EXPRESSED IN FETAL LIVER, SIGNAL = 5.2; EXPRESSED IN ADULT LIVER, SIGNAL = 3.5; EXPRESSED IN HEART, SIGNAL = 4.5; EXPRESSED IN BRAIN, SIGNAL = 3.2; EXPRESSED IN PLACENTA, SIGNAL = 2.9
agaaacttcccccatgtttgggagatctttaataatggtgctagactgaattacgtaagagatccagtgattttatacctcaggtttcagatccctgtgcaccactccaacatcatgcatgtggcttacagctgaaacaagcttcctcatgatgtagctggcttccgtctcactgaagtgcttctttttcttaatgcgctcaaacagttctcctccattcagaagttccatcactagaaacgtgtgaagctagaaaagagaaagaataacgtggagggccttcctgaagcacagaagtctattaacatataaaacatttattgactatctaccaccaatacgtttaaataatcccctgttaaaataatcaatggcaatcctcatatcttagagaaaagggctgaaagataatgtagctgttttataattctattttggtaatggaaaatttcaagtactgcagtgaaatctttatactgtatatcctttttcccttctgtgatgaattctttcatttgcagtgttttgttttaagagatgaagtctctaaaaagaaatctgcccttgaattcctgggctcaagggattctct

SEQ ID NO: 8181 - DNA, 585 bp, Homo sapiens
  MAP TO AL049836.2; EXPRESSED IN BRAIN, SIGNAL =   2; EXPRESSED IN PLACENTA, SIGNAL = 1.8; EXPRESSED IN FETAL LIVER, SIGNAL = 2.1; EXPRESSED IN ADULT LIVER, SIGNAL = 2.1; EXPRESSED IN HELA, SIGNAL = 2.3; EXPRESSED IN BONE MARROW, SIGNAL = 1.7; EXPRESSED IN HEART, SIGNAL = 1.9; EXPRESSED IN LUNG, SIGNAL = 1.9
gaaagcccctcttggagaacccctgagggagctgcaaggtgagcaccccaacctctgccttcagccctgccaggtagtggggccagaacaatcgccggcccaggcagaagtgagggggcgaggacggtgcctgcgtctagtgctgccacgactccctcttcccctctgtccactaccggggtgacagcgaggtcatggaaggcagatgtggggagccaagaatcccaacagcatcgggtccccttgaggatgacagggaccaacttttctttgccatttccagtcttcagttggccttggacagagcccaagatctcatgaggaaggagcagagaggccttttggtgttgctgcaaacatcatggggcccagaaaaagacgtcactgagatcctgggacggcagcactggaagggcctaggacatcacaaccccaccctgctccatcttgacctcagtttccccatcactggaaccaaacatgagctcaggctcatgtccccgcaagtccccagtcacccaccgtaactgagtgggatggagacggaggggttcgttttggggggcaccttgagaggccagacat

SEQ ID NO: 8182 - DNA, 585 bp, Homo sapiens
  MAP TO AC008444.3; EXPRESSED IN BRAIN, SIGNAL = 2.6; EXPRESSED IN HELA, SIGNAL = 3.2; EXPRESSED IN HEART, SIGNAL = 2.5; EXPRESSED IN ADULT LIVER, SIGNAL = 2.4; EXPRESSED IN FETAL LIVER, SIGNAL = 2.6; EXPRESSED IN PLACENTA, SIGNAL = 2.1; EXPRESSED IN LUNG, SIGNAL = 3.6; EXPRESSED IN BONE MARROW, SIGNAL = 2.5
atccatggcttaacaccagctaacagaacagatgagtgagtggtcagcaacacctcaaaagagctgacccatgtggttgcagctggtcatcaccctggtgtaatttctaggtcttggacatggtctgcattttcagagagtggagaggcacttctatagggaactggagcctgttggaaaaaaactctgagagactagttggtatatttccttattgttttacataggatctagcttctgtttcagaagagaaacaatcctcaagtgacagggagtctggtgaaatggtcctcacacatttcaaaggggataagagccaacccacttatgagggctactcagatcctcagcagggcaaaaagcaagcttttttcccagataaaatttgtcttttggcaatgggggtctccttggccaaaagtaggtccagttagtcagatgggggacttaggactctatttttagtttggcccctttttgtcaatgcatgccagaggcagcatccatgtccaaacttttattttgtcctatattgttgctggggtggtgtggctatgtgccctgggtccatcctgtccctcagtg

SEQ ID NO: 8183 - DNA, 586 bp, Homo sapiens
  MAP TO AC010305.3; EXPRESSED IN BRAIN, SIGNAL =  16; EXPRESSED IN ADULT LIVER, SIGNAL =  15; EXPRESSED IN HELA, SIGNAL =  25; EXPRESSED IN HEART, SIGNAL =  14; EXPRESSED IN PLACENTA, SIGNAL =  20; EXPRESSED IN LUNG, SIGNAL =  26; EXPRESSED IN FETAL LIVER, SIGNAL =  36; EXPRESSED IN BONE MARROW, SIGNAL =  32
acgtcaaaagatccagggtgcctctctctgttggtgatcacaccaattcttcacaggttagcaccttcagtcaccatacacaggttaccagtgtaacttgatgaaatcaagtaatcttgccagtctccaaatcaatacgaatggtatcattcaccttgatgaggggatcagggtagcagatggtgtgagcatcatgagtcaccacatgagggattccttttgtgcccacaaagatttttctcactttgcacaacttgtacttggcttcctcaggtgtaatacaatgtaaagcaaagtgacccttggtgtcatagatcagacaaaaattctctcccatcttgtcaatgctgatgacatccatgaatccagcagggtaggttttgtcagttcggaccttgccatcgatcttaatgaactgctgcatgcaactcttcttcatctcctgtcaggacatacttaagtctgttccttaggaaagtgatgagggggagacactctctcaacttgtggggactggtggatggacgaagagcaaacacactggtcaatttatccagcatccaatgctttggagctgctacctgct

SEQ ID NO: 8184 - DNA, 573 bp, Homo sapiens
  MAP TO AC021881.2; EXPRESSED IN PLACENTA, SIGNAL = 2.4; EXPRESSED IN HELA, SIGNAL = 2.7; EXPRESSED IN BRAIN, SIGNAL = 2.2; EXPRESSED IN LUNG, SIGNAL = 2.7; EXPRESSED IN HEART, SIGNAL = 2.1; EXPRESSED IN FETAL LIVER, SIGNAL = 2.3; EXPRESSED IN BONE MARROW, SIGNAL = 1.8; EXPRESSED IN ADULT LIVER, SIGNAL =   2
agaagcatgcatgtccactggtgagggcagggaacgctgacaggaggaaataggaatgtgtgtgaatatctaatcagtttccacagagttgctttccttgagctatatcgtggcgttgtttcttcagtttactttaaagacaggtattaaaacactgctgtataaaattcactattttgcgtttcacaggacagttgttgaaataagaaaagctgtgcttctccaaagtagcagcatgttgtctccttatagacaaggtgttctttttgttttcacagtcaagacttcagaggcaaatgcctgatccacatttaagaactatgtaaaaccttgtatgagccgcatattaagtttcccatcagtcattcctattctatctgtactttgcatgccctcctgttttctattttaatatatttaaaagcactttttaagcctacttcaaatttcttgtaggattaggagggataaaatacgaactacaaagaataaagaagctcggtcatttattcaacaaacactggctatctaccatactgtaagtaacattctaggcacctggggtacagtaga

SEQ ID NO: 8185 - DNA, 565 bp, Homo sapiens
  MAP TO AC023074.2; EXPRESSED IN PLACENTA, SIGNAL = 1.7; EXPRESSED IN BONE MARROW, SIGNAL = 2.2; EXPRESSED IN LUNG, SIGNAL = 1.8; EXPRESSED IN BRAIN, SIGNAL =   2; EXPRESSED IN HEART, SIGNAL = 2.5; EXPRESSED IN HELA, SIGNAL = 2.4; EXPRESSED IN FETAL LIVER, SIGNAL =   2; EXPRESSED IN ADULT LIVER, SIGNAL = 2.4
tgaatcctcagacctgtcccagcactttgtggaaagctgtacccccactcactttccaccactgcctcttgtgaaaagaccttgtgctatcctgcaaaatcctttgtcttctcacatgcaattcttgcaatatctacttgaattaaagaacttgacagaatcaggtaatcttaaaagagacttaacccactttgaaaaagactcttccacagtctctgattctgtttttcaattgctggatggcctgatcactttttaccgtaatcccaaacttcctttttcaagattttggacagaagctgttggtactttagctagtctgatcagtgactataacttatctagtcatattcttaaaaagtgttccaagaagttggaagaatttgagaaaaccctactacatgctattttaggaaacaatcatataaatcaggtgagtaataaatccctcttttattcctaaaatgctagtaattttagtgaacatctctttgggtaatgtctgttgttgtcccttagccttgtggctcaaggaatcccttattgggtctttttctgcagctgt

SEQ ID NO: 8186 - DNA, 558 bp, Homo sapiens
  MAP TO AC016313.5; EXPRESSED IN HELA, SIGNAL = 2.2; EXPRESSED IN HEART, SIGNAL = 2.2; EXPRESSED IN BRAIN, SIGNAL = 2.5; EXPRESSED IN PLACENTA, SIGNAL = 1.9; EXPRESSED IN ADULT LIVER, SIGNAL = 2.3; EXPRESSED IN BONE MARROW, SIGNAL = 1.6; EXPRESSED IN FETAL LIVER, SIGNAL = 2.2; EXPRESSED IN LUNG, SIGNAL = 1.9
ccagtcctccaaatcctcacaatttagtaggagaaataggagatacacataaatagttagaataaaaggtacacaggtcaagtgaccaagcctgattcatttttatattcctcacaggaacacagtgctaggtgttcaaatgattataaaggaatgtgggaagatgttttttccctatgttatccgtgctattgacctcctgagttctcagatgacctctataaggcagagctctcctgacaatgcacatatgggcacatctgtggatcccataaatggtaaagcgtagggaaagtgctaccaggattcacaaaaagaaaggcttagattcaaatggaggagagagtgatgatgataaacaaaaatttccaagagtggcatttaagataatctttgagaagcataaatgggagaaacattacatgtaacaatattttacaaaacatttataaatatacattcttatttaaaccttatgacaatcatttaattggatttttcttttttgcaaatatggacattaggacttagagaaattcagtgacttgtccaaggcct

SEQ ID NO: 8187 - DNA, 534 bp, Homo sapiens
  MAP TO AC022035.2; EXPRESSED IN BRAIN, SIGNAL = 1.6; EXPRESSED IN PLACENTA, SIGNAL =   2; EXPRESSED IN FETAL LIVER, SIGNAL = 2.3; EXPRESSED IN HELA, SIGNAL = 2.2; EXPRESSED IN ADULT LIVER, SIGNAL = 1.6; EXPRESSED IN BONE MARROW, SIGNAL = 4.9; EXPRESSED IN LUNG, SIGNAL = 1.7; EXPRESSED IN HEART, SIGNAL = 1.8
aggtgttggaagcagagaccatatgaacttttctaaaaccttaaagaagagcatctccacatttaatgaaagatttgatcagatgactatagtggctcctctgcatacacctttgagggaccatgtgaatatttcactaagaggtaagaaatctcttgttaaagaaatcatgatttccttaagtttcttttgcttttaaatctccactagttgatgcaatacaagaaaaacaaaacacctagttgtgtattccacatagtatcagtcagctactgctgcctaacaaacatttcaaaattccagtggcatacaaaaattagcatttatttcttatgtatccatgtgtcagttgatctagactaaatacttaatttcttttaagacatgggcttagaaataacaaggtgcaacttaccttattccactggataagacaagtttattgaattggggaagtgtactctgcttccatgacgccaaggcaaggttgtggatgcatcctcctacctcagaggggggagaattgtggctaat

SEQ ID NO: 8188 - DNA, 582 bp, Homo sapiens
  MAP TO AC022274.3; EXPRESSED IN BRAIN, SIGNAL = 2.2; EXPRESSED IN PLACENTA, SIGNAL = 2.3; EXPRESSED IN HELA, SIGNAL = 4.1; EXPRESSED IN ADULT LIVER, SIGNAL = 2.1; EXPRESSED IN BONE MARROW, SIGNAL = 1.5; EXPRESSED IN FETAL LIVER, SIGNAL = 3.9; EXPRESSED IN LUNG, SIGNAL = 2.5; EXPRESSED IN HEART, SIGNAL = 3.9
aactgggtagcgtgcagaagttgcaacagtttggaagactcagaagaagacaggaagatgtgggaaagtttggtacttcctagagatttgttaaatgcttttgaccaaaatgctgataggaatatggacaatgaagtccaggttgaggtggtctcagatggagatgaggaacttcttgggaactggagcaaaagccactcttgctatgctttagcaaagagactggtggcattgtgcccctgccatagagatatgtggaactttgaaactgagagagattatttagagtatctggcagaagaaatttctaagcagcaaagcattcaagaggtgacttggcttttcctgaaagtatatagttatatgcactcacaaagagatgatttgaaattggaacttatgttcaaaaggaaagcagagcataaaagtttggaaaacttgaagcctgattatgtggtagaaaagaaaaacccattttctgggagaaattcaaacctgctgcagaaatttgcataagtaaggaggagtcaaatgttaatagccaatacaatgggaaaaatgtctccagggcatgtgatatga

SEQ ID NO: 8189 - DNA, 531 bp, Homo sapiens
  MAP TO AL121820.2; EXPRESSED IN BRAIN, SIGNAL = 1.7; EXPRESSED IN ADULT LIVER, SIGNAL =   2; EXPRESSED IN HELA, SIGNAL = 7.9; EXPRESSED IN LUNG, SIGNAL = 2.6; EXPRESSED IN HEART, SIGNAL = 4.6; EXPRESSED IN PLACENTA, SIGNAL = 1.7; EXPRESSED IN FETAL LIVER, SIGNAL = 6.5; EXPRESSED IN BONE MARROW, SIGNAL = 2.3
catctgtgatgtcgtgagggtggcgccatcaacactacagcccacagactaggcagtcctcacgatctctttaatgattccagagagttctctggctaaagatcagtgctgcatctgttgggcaatgttgatgatctcaccacaaatgatatttccactgtacttaatgtttttctgcttgtttctgtctcttggtggttcctcaagggctttcatgatcactgcagaggcagaagatgccacttgaatctggcctgtgtgttctgcaccgtcagtttcactgggatcctctggcccttccagtcacttgtcttggtgatgtcctcattggccttttttggagacagacccagggggctgatcttaggaaccagagcagatgtagtactgacttccccactcgtgcacctcaggtatacgactttgatcttgttggggttgaacttgggtgacatggcagaggtggtgggtttcctggcctgccattcacaacgtcattcacatgcccttccaggctcatctcctagcacc

SEQ ID NO: 8190 - DNA, 551 bp, Homo sapiens
  MAP TO AL121769.2; EXPRESSED IN BRAIN, SIGNAL =  13; EXPRESSED IN FETAL LIVER, SIGNAL = 5.5; EXPRESSED IN ADULT LIVER, SIGNAL = 2.6; EXPRESSED IN PLACENTA, SIGNAL = 3.3; EXPRESSED IN LUNG, SIGNAL =  11; EXPRESSED IN HEART, SIGNAL = 3.2; EXPRESSED IN HELA, SIGNAL =   6; EXPRESSED IN BONE MARROW, SIGNAL =   8
gtgttcccttagcaaggctgaaaatttcagtctctggtatttggaatttaggctgcagtccttgtttttggatggaccactggtgggtggcacagtccatgcttttaaccagatttgaacagaagaatggccacttggcccaggtagaagtagatgaagtgtttggtttcatgtgtcacgtaactactgaagttcctccccacgatgcagtgtcaggtgggattgtacttcttgtcacattccttcttgatatgagccacagtgttcctctctttgttgtatttctccagcgcctgaggagcgcactccaccgagttctgctgcgtctcttccgacatgtccgcatttttgatcacggccttttggtcgcacatggttacccatggagaagggggctggctgactgcaacggtctcctggggaggtgctaagcatcgcccggctggagctgccatcgctatggaagccgtggcgcctctaagaagaaagcttttaatgtttgacagaaagttttaaaggtcacaaagcaatcatattttcccctttgcgaa

SEQ ID NO: 8191 - DNA, 566 bp, Homo sapiens
  MAP TO AL122127.3; EXPRESSED IN BRAIN, SIGNAL = 2.1; EXPRESSED IN PLACENTA, SIGNAL = 1.7; EXPRESSED IN FETAL LIVER, SIGNAL = 3.6; EXPRESSED IN ADULT LIVER, SIGNAL = 3.1; EXPRESSED IN BONE MARROW, SIGNAL =  40; EXPRESSED IN HELA, SIGNAL = 2.7; EXPRESSED IN HEART, SIGNAL = 2.9; EXPRESSED IN LUNG, SIGNAL =  30
aagatgcaacatctcaccccgttgacacggttagtttgcatgcacacacagagcggccagccgccccgagcctgtgggcaggccagcagggtcagtagcaggtgccagctgtgtcggacatgaccagggacacgttgtacagggtgggtttaccggtggacttgtccacggtcctctcggtgaccctgttgggcagggcctcatgggccaccacgcaggtgtaggtctcccccgtgttccattcctcttcggacacggtcaggatgctgtgggcgaagtaccggcctggggcctggggctcaggcattggggcgctggtcacatacttctccggggacaagggctgccccctctgcatccactgcacgaagacgtccgcgggagagaagcccgtcaccaggcacgtgatggtggccgactcccgcaggttcagctgctcccgggctggtggcagcaagtagacatcgggcctgtgcagggccacccctgtgaacagagatggtggtgagggcggggcagtggggggaccagcctgtgggctggggttgagtccccttttccccagt

SEQ ID NO: 8192 - DNA, 568 bp, Homo sapiens
  MAP TO AL049781.4; EXPRESSED IN ADULT LIVER, SIGNAL = 4.4; EXPRESSED IN HEART, SIGNAL = 5.6; EXPRESSED IN BRAIN, SIGNAL = 4.6; EXPRESSED IN PLACENTA, SIGNAL = 3.8; EXPRESSED IN BONE MARROW, SIGNAL = 3.5; EXPRESSED IN FETAL LIVER, SIGNAL = 5.8; EXPRESSED IN HELA, SIGNAL = 5.9; EXPRESSED IN LUNG, SIGNAL = 1.8
aagtgtggaggaatgggatgcagctaaattctttagcatattggacttctgtaggaggcctccattctaaaagggacatcagagctcttcttgtcctattgttggtagctgagtgtatcactacaatttgaaattatgatggaagaaggtgtttcatgttttagggaactctgccctataaacactcatagattggtttctctctatgttgcagtccctctgtcgtgaaatcaagcaacgacgtcgaggagttgcctccattctgcgactatgccagcatcttttggatgaccgggagacttgcaatctgaatgcagaccaccagcccatgcagctgatcattgtaaatcttgaaagaaggtgggaagccattgtcatgcaagccgtccagtggcaaacacgtctacaaaagaagatgggaaaggaatctgtgagtgatgctttttttaagcataattgtctgtcattttctcagacaaaaaataattctttcaggcttggaaacggtgttcatcttataaatggttttactaactaacttaaagtggttttgccatcttacaagtgg

SEQ ID NO: 8193 - DNA, 522 bp, Homo sapiens
  MAP TO AC023392.2; EXPRESSED IN BONE MARROW, SIGNAL = 4.2; EXPRESSED IN LUNG, SIGNAL = 3.1; EXPRESSED IN BRAIN, SIGNAL = 3.6; EXPRESSED IN PLACENTA, SIGNAL =   3; EXPRESSED IN ADULT LIVER, SIGNAL = 3.1; EXPRESSED IN FETAL LIVER, SIGNAL = 6.9; EXPRESSED IN HELA, SIGNAL = 6.9; EXPRESSED IN HEART, SIGNAL = 6.8
aggctgtgcaggaagcatagctacttctgtttctaaggaggcctcaggaaacttacagtcatggaggaagacaaagctggagtgggacatttcacatggctggagctggaggaagagagagaagtgggaggtgctacacactttcaaaacaaccagatctgctggtaagtcacttacacactatcaagagaatagcactgaggggatagtgctaaaccattaatgagaaaccacccccagtctcctcccaccaggcctcacctccaacactgagaattacaattgaacatgagatttcacagagacccaaactatatcaggaagttttttctccacctctattttatgatagagtgtgtgtaagcttggtaatatttataatttatatagtggtagattttattgctgaggccatgtaggcctggaattttcattgtggaaaagattttaatgacaaatttaattttttaaaagaatgtagccctattcatagtttttatttctgcctgaggccaatttagt

SEQ ID NO: 8194 - DNA, 509 bp, Homo sapiens
  MAP TO AL049873.2; EXPRESSED IN FETAL LIVER, SIGNAL =  16; EXPRESSED IN HEART, SIGNAL =  14; EXPRESSED IN BRAIN, SIGNAL =  12; EXPRESSED IN PLACENTA, SIGNAL = 9.5; EXPRESSED IN ADULT LIVER, SIGNAL = 4.4; EXPRESSED IN BONE MARROW, SIGNAL =   8; EXPRESSED IN HELA, SIGNAL =  16; EXPRESSED IN LUNG, SIGNAL =  64
tctcactgggcatagggaacacattgcctttagggaggtataagagaacctcagggtggtggtagtgtacatttgaaaaagccccgcctttccaacttggacgcggcagaatggttcccgcaaagaagggtggcgagaagaaaacgggccgttgccatcaacgaagtggtaacccgagaatataccatcaacattcacaagcgcatccatggagtgggcttcaagaaacgtgcaccttgggcactcaaagagattcggaaatttgccatgaaggagatgggaactccagatgtgcgcattgacaccaggctcaacaaagctgtctgggccaaaggaataaggaatgtcctataccgaatccatgtgaggctgtccagaaaacgtaatgaggatgaagattcaccaaataagctatatactttggttacctatgtaactgttaccactttcaaaaatctacagacagtcaatgtggatgagaactaatccctgatcgtcagatacatcaa

SEQ ID NO: 8195 - DNA, 503 bp, Homo sapiens
  MAP TO AC018651.4; EXPRESSED IN BRAIN, SIGNAL =   2; EXPRESSED IN PLACENTA, SIGNAL = 1.4; EXPRESSED IN HELA, SIGNAL = 1.6; EXPRESSED IN LUNG, SIGNAL = 8.7; EXPRESSED IN ADULT LIVER, SIGNAL = 2.6; EXPRESSED IN FETAL LIVER, SIGNAL = 1.8; EXPRESSED IN HEART, SIGNAL = 2.2
agcattcaaacagtgcctgcaggggtggagaagggcggtcaattcaaaatatccataccacagaacagacaaaaacactcattataagcaatgtgtaaataactcataatgaggtttcaggggaggtagaattcattatctcccatagtcagggattccgggacggcattctgaagatggctctttaggtgagttttcatgttggagacaggggaggagaccaggaagtggaaacactaggaggagtggagatgatgaaacaaatgagggccatagaacatgaagttatggattaggacacaaatgccagttgatagaactccttttccctctgtgcaaacattaatattcctttggaatgatttgcttatgatgtttagatcagattggtggggaacattagaaacatgagaaaaggtagaaaatgtgcaatgaatcagactttcatataagaccactagctagcaactaagaattttgacagaacagggcagatacctcga

SEQ ID NO: 8196 - DNA, 571 bp, Homo sapiens
  MAP TO AC018836.2; EXPRESSED IN PLACENTA, SIGNAL = 1.8; EXPRESSED IN ADULT LIVER, SIGNAL = 1.7; EXPRESSED IN FETAL LIVER, SIGNAL = 2.2; EXPRESSED IN HELA, SIGNAL = 2.2; EXPRESSED IN LUNG, SIGNAL = 2.3; EXPRESSED IN HEART, SIGNAL =   2; EXPRESSED IN BRAIN, SIGNAL = 2.5
taggcaaattttctgcgtccattttacaggtacagagagaccaagcaacttgctcaagctcactcaggcaggctggctgtcactactacactccagaagcctggctggctcccgccccccaccccagggaccccttcccttcccttccatggctggatgttctcccagctgagtttccaagtccagggacactaacagtgagtggctgggtaggcaaatcgggggtaggggtggaggtgaaggcacgcccacctgtccacgtagcatatggaggttgctgccggtctgggtgggttcctccatggcctccagccatcccttcgggggctgtgtttgccgcagcagcacgatgtaagcagtgaagacgtcagccttgacgttctcctcgcgttctttgaagcggcggatgagcacaggtgccagggtgcagtggaaatcgggcagcaggtcaggccgcgagctgatcaaggctgcgatgcacttggcagctgcccggcgcaccttccagctcatgtcatcgtcatcgctgtactcgtcttcactctctggggcaggaacaagacacacgtgg

SEQ ID NO: 8197 - DNA, 507 bp, Homo sapiens
  MAP TO AC004808.1; EXPRESSED IN BRAIN, SIGNAL = 3.1; EXPRESSED IN PLACENTA, SIGNAL = 2.6; EXPRESSED IN LUNG, SIGNAL = 1.9; EXPRESSED IN HEART, SIGNAL = 4.1; EXPRESSED IN HELA, SIGNAL = 4.3; EXPRESSED IN FETAL LIVER, SIGNAL = 3.6; EXPRESSED IN BONE MARROW, SIGNAL = 2.3; EXPRESSED IN ADULT LIVER, SIGNAL = 3.3
ggcaagctaccaaacctctgggcgtcagtttcttcatctgtaacaagatgaagctcatatagctaaggtccttcctacttctagtattgatgattctgtatgagggctatcaaggggtcaagcagagaagccagcgggccgctggggcagaaggtgacagatgagcattattggagctgctgcccctgtgattcacagaacaaaggctgggtggttctgaggggaggtaatacaatcccaatgttattgaatgctcagattctaaaaaaactgtgatgcttgtaactgacatattccttaaaaatataaataattttttatagggttgatatggtaaagagagataagtggaatcatattataaatacaaaggctgactttgaaaagtatgtctttggtggattcctttatgaagctgagaaaatggttgtaaagggaatgattatttccaatttatctgttacataaatttggaactatatgaactgtgttttcttggagcgaggt

SEQ ID NO: 8198 - DNA, 570 bp, Homo sapiens
  MAP TO AL132796.2; EXPRESSED IN BRAIN, SIGNAL = 3.3; EXPRESSED IN PLACENTA, SIGNAL =   2; EXPRESSED IN ADULT LIVER, SIGNAL = 2.9; EXPRESSED IN BONE MARROW, SIGNAL = 2.2; EXPRESSED IN FETAL LIVER, SIGNAL = 3.2; EXPRESSED IN HELA, SIGNAL = 3.4; EXPRESSED IN HEART, SIGNAL = 2.7; EXPRESSED IN LUNG, SIGNAL = 3.5
ttgctaagccaaccatcctctctccccagtaatgctacatcatattttgttctattatcttcacaaaacgtacctccaatggaagctaccttttcttgtgcttactgaatttttgaccctgtgtctctatcagaatattgtattcactagacccccagcacctaggaacagtcttggcatatagtaatctctccatatatggtcaatgaatgattgaacaaatgaatgaatctactagcataagcttagctgttggtagaataaaatgagactgcagcaaacttcattgaaaatgatgacttcttggacctgccattgtgttacgattctattccctcatccaagatgaagaaggataagaaaggaaaggagggaaggagagagaataagagtgagaataaaaaggcattgttcatgatcctgttcggggtgcctctcatgcctgacaaataatgaattagagagagatcagaacatccaagaccaaaacagtcattaactgccactccccccagaccccctcccagaacatgccggctgccagaagccggcccagacagtccagttagg

SEQ ID NO: 8199 - DNA, 569 bp, Homo sapiens
  MAP TO AC011989.3; EXPRESSED IN BRAIN, SIGNAL = 7.3; EXPRESSED IN PLACENTA, SIGNAL = 4.5; EXPRESSED IN HELA, SIGNAL = 6.5; EXPRESSED IN FETAL LIVER, SIGNAL = 5.5; EXPRESSED IN HEART, SIGNAL = 5.2; EXPRESSED IN LUNG, SIGNAL = 4.2; EXPRESSED IN ADULT LIVER, SIGNAL = 5.4; EXPRESSED IN BONE MARROW, SIGNAL = 4.4
actcttcatttgcacctggctttctctattttcattttattcattcaaatactcaatttctatttactgaaaaccttcattgtgctaactgatcaagatacatgacgaacagggcagtacaagaacttctcctggaagtctcctcatattttagtgagagaggtaaaaataaaacaagcaaagatataatgtatctttctcccctgccactttggtggagactgtggtagattctaagaaagaggcagagtaacttcatgacttgatcaaaacggaacttggctgggaatgcttaccttagaacaatggtcactgagaaggtgacattgtaagctgacactggaaggataaaaacgacacaagcctgaaagagcctagagaggtgggttccaggcagaacgcacaggagggtaaaagtcagaagcaggaaagagtgtgctgtgttttcataactaagagtagctgctgatggctggatcttagaaaaggggaacatggcatgagtgaggtcagagaggttggtagggaccaggtcatacagaaatttctgggccaacatgaagcattta

SEQ ID NO: 8200 - DNA, 549 bp, Homo sapiens
  MAP TO AC003692.1; EXPRESSED IN BRAIN, SIGNAL = 2.2; EXPRESSED IN ADULT LIVER, SIGNAL = 2.9; EXPRESSED IN BONE MARROW, SIGNAL = 2.5; EXPRESSED IN LUNG, SIGNAL = 1.9; EXPRESSED IN PLACENTA, SIGNAL = 1.9; EXPRESSED IN HEART, SIGNAL =   3; EXPRESSED IN HELA, SIGNAL = 2.2; EXPRESSED IN FETAL LIVER, SIGNAL = 2.1
caggcttttaacaaagcacctaaaatctttttaatgccataatcttttgacaaaatgccacctgatgatattccagcttctgagcctccagttgatcatgctgacgttgtagctcttctttttgtttctgaagctcatctgccttcttcttaagttcattttcttgtaaagcaataatattttcatattcttttagttcttcctctgtgaagaactgttgctcatctaatgtctaaaagaaaaaaaatgaggaaagaataatctcaaaactacaacaataaagtctgatttagctttaaaattctatggttagcaaagtataaaagagtatctataggattacgcctttggaggtaagaaggaaggggaaataagtaatatatatttatgtactcatttgaacaaaaggaaaaacaggaagaaaaactcaagagattctcttctgggattgacaactaaaggcaaagagtgagaactgggtagaagaggcaaagagaacgtgggaagagaaataaaatttgtcattccccccaaccctcactgaaacat

SEQ ID NO: 8201 - DNA, 580 bp, Homo sapiens
  MAP TO AC011683.3; EXPRESSED IN BONE MARROW, SIGNAL = 2.2; EXPRESSED IN FETAL LIVER, SIGNAL = 3.5; EXPRESSED IN HEART, SIGNAL = 3.4; EXPRESSED IN PLACENTA, SIGNAL = 2.4; EXPRESSED IN BRAIN, SIGNAL = 2.6; EXPRESSED IN HELA, SIGNAL = 3.3; EXPRESSED IN ADULT LIVER, SIGNAL = 2.5; EXPRESSED IN LUNG, SIGNAL = 2.4
aatcttagggaaggcatgggaaggcctcaaacaaatatttgctgtccatcagtcatctgcagcaacatgatgattgtagacttaaagtcctacaacccaaaaagctattttatgagacaggacctgatggcttctatgctggtcaattattttggtgctattagccaatttcttgttttgatgtgctcttctctctattttagtggctagaaatctacagattctatttcccagactcccttaaaaattagtttctgtttcagttctgccaatgaaaggcactgttgggagattgaagaaaagagagacagaagagtgactttcttcatcttcccagtttccagtgtcatcttcagcagcaggggagcaggattagcattaatgacaggagacacaatgccagaggcctgggagggcaggtcctagtgctaacagcaggaacttgtaacagcagtgacctcaagagctgggaaagatctgcttctcttttgctccttcaactctggagtccacagttactaagcatctggtaaaactactttcccctcttgtttctctaactcctctccccaacattcct

SEQ ID NO: 8202 - DNA, 501 bp, Homo sapiens
  MAP TO AL049872.3; EXPRESSED IN BRAIN, SIGNAL =   2; EXPRESSED IN ADULT LIVER, SIGNAL = 2.1; EXPRESSED IN HELA, SIGNAL = 1.9; EXPRESSED IN HEART, SIGNAL = 2.8; EXPRESSED IN PLACENTA, SIGNAL = 2.7; EXPRESSED IN LUNG, SIGNAL =   5; EXPRESSED IN FETAL LIVER, SIGNAL = 2.1; EXPRESSED IN BONE MARROW, SIGNAL = 1.6
agggttttagggtcagccacaggtgcggttcgactctgctcttccctgagtcgttccaattcttcttgcagatgattattttcctctttcatggatccaagacttcggtctttttcctctatggtctgtcttaaaatttcattttttcttaaggcctgagaatatttatccaattcctcctgcagctttgaacttctttctttaagcttttcaataaaaatttctttcttgtttataagttgtgtcaactgcttctgctcttctaaactagatgacaaaacgtccttagtttctttatggtcagtatccatttgttcaatattctttttgagttctgctatttccatgtctttcttttgattgagtttaattaaatgctcatgttccagctgtaaggcagaggtattcaaattacgtgcatttgacagttcttcaatggttttctcatacttgtttgcttcttccaacagcctctttttagcccaacacaattctgcctct

SEQ ID NO: 8203 - DNA, 505 bp, Homo sapiens
  MAP TO AL122021.3; EXPRESSED IN ADULT LIVER, SIGNAL = 2.2; EXPRESSED IN FETAL LIVER, SIGNAL = 4.7; EXPRESSED IN BRAIN, SIGNAL = 2.4; EXPRESSED IN PLACENTA, SIGNAL = 1.9; EXPRESSED IN BONE MARROW, SIGNAL = 2.9; EXPRESSED IN HELA, SIGNAL = 4.9; EXPRESSED IN HEART, SIGNAL = 3.9
aatgcacctagtcacccgagagctctgatggaaaggtgcaaggagataaatgttgttttcatgcttgctaataccacatccattcttcagcccatggatggagtaattttgactttgaactcttattatttaagaaatacatttcataaggctgtagctgccatacataatgattcctctgatgagtctgagcaaagtgatttgaacatcttctggaaaggagtcatcattgtagatgccattaagaacatttgtgatgaattggaagaggtcaaaataccaacattaacaagagtttggaagaagttgattccaaggctcatggatgactttgagagcttcaagacttcactagaggatgccactgctgatgtgttggaattagaagtagagtgtgaagatgtgactgaaatgctgcatctcatgataaaacttgaatgaattaggagcttcttcttatggatgaacaaagaaagtgatttcttgagatggaatctgctcctgc

SEQ ID NO: 8204 - DNA, 600 bp, Homo sapiens
  MAP TO AL122010.2; EXPRESSED IN ADULT LIVER, SIGNAL = 2.5; EXPRESSED IN HEART, SIGNAL = 2.4; EXPRESSED IN BRAIN, SIGNAL = 2.4; EXPRESSED IN PLACENTA, SIGNAL = 1.8; EXPRESSED IN BONE MARROW, SIGNAL = 2.2; EXPRESSED IN HELA, SIGNAL =   3; EXPRESSED IN LUNG, SIGNAL = 2.8; EXPRESSED IN FETAL LIVER, SIGNAL = 2.9
agcagtttgagtggcatgtgaggacagagacagatcatagctggtgggtgagtgagtgggaggtgaggaagtagagacagtaagtgcagacatcagtttcaggaggcgcagttgtgaaagccaggagagaggtaaggaggtagctgcagggaacgtgggatcaaggaagggttttgcttttgtttttggatgggaaagatctgagcatgcttaaatgctgagagatgcaggagagaagtaggtgttaaagatgcagaagaaagcaaggaggtgggagagaaagaggatcctatgcacgggtggggaatttagagaattaacagtgggcccacccatttgtgctgcgggaaaggagagagggaggttgtggatgagcgttggtctgtaggtttggtggcagtcgagaggagagcattcttctcagatagcttctactttctttaagaaataggatgtaaataagatggaatgtgctagaaagtttgaggagaatggagaaattgaggaaactgccaccatgtacaacagcagagagaccaaagcagaattcgtcaggtggcaccgagcgcccaggttaggtgggagagcaagaatttgcag

SEQ ID NO: 8205 - DNA, 580 bp, Homo sapiens
  MAP TO AC002401.1; EXPRESSED IN BONE MARROW, SIGNAL = 2.3; EXPRESSED IN FETAL LIVER, SIGNAL = 2.5; EXPRESSED IN LUNG, SIGNAL = 3.5; EXPRESSED IN BRAIN, SIGNAL = 2.6; EXPRESSED IN PLACENTA, SIGNAL = 2.2; EXPRESSED IN ADULT LIVER, SIGNAL = 1.8; EXPRESSED IN HELA, SIGNAL = 2.3; EXPRESSED IN HEART, SIGNAL = 1.8
ccctttctgtcttgaccctgggctccagaactataagggcctttgttttgctcagagctggggtctcaggggactgggtgaggcctcatctcagggctatcatggggaggcatggggtgggtaactcagcctgcctcctcggcctcctcatgccagttctgcacttgtcctcctgccggcctctctgaccagctgcctccctccccaggtgttcagcacttactccaacgaggattacgatcgtcgcaacgaggatgtggatcccatggcagcctctgctgagtacgagctggagaagcgtgtggagaggttggagctgttccctgtggagctggagaagggtgagaggccaggaggccacgtcacttgcgcacagctggggttgacccgggtctcatctctggcaccagctcctgccctgtgccctcaggggctcccacagacttgctgggcctctccctctgactcaggcccttggtgaccttccccgctcctcccttgtcagcacccagagcaaacagggcctccaacccaggccaagccacacccccaccaccccggtcatggaaccacatttgca

SEQ ID NO: 8206 - DNA, 555 bp, Homo sapiens
  MAP TO AC009680.5; EXPRESSED IN FETAL LIVER, SIGNAL = 5.8; EXPRESSED IN HEART, SIGNAL = 5.5; EXPRESSED IN BRAIN, SIGNAL = 5.2; EXPRESSED IN PLACENTA, SIGNAL = 5.9; EXPRESSED IN LUNG, SIGNAL = 7.3; EXPRESSED IN ADULT LIVER, SIGNAL =   6; EXPRESSED IN BONE MARROW, SIGNAL = 4.6; EXPRESSED IN HELA, SIGNAL = 6.2
catggataatgggaaatggctatagtatcctaaaattttactcaaggaatcctaatgaaatagcatgcagcattgcctgaagttgacaacaaccacatttttcaaaacaaaggcatgacttattctaattcgatttacttacattcaagtttacatccacacggtctttaatttttagtgtaatgaggataactttcagtgtaatcacgtacatgttctataagacatgtatacaaattttttcagttaattaggcctcctttcagaaaataaatttgatttacatgaagtaaatgtttgctttaaatattatatcccactcagtgatataggcagagaaaacatttaactgtcttttaagccaatttaacaaaacaatttaagttgctcaactgttttctgtgatcagaaatattgaatacttaattaagtgaaccaaaaagaataattttataattatttaacatttatttgccaagtaatattaacacctttaagtcttgatttaaagtcttgagacaaaaaggtttcttaagggcaggctgttagcatatc

SEQ ID NO: 8207 - DNA, 545 bp, Homo sapiens
  MAP TO AL050303.2; EXPRESSED IN ADULT LIVER, SIGNAL =   5; EXPRESSED IN BONE MARROW, SIGNAL = 4.6; EXPRESSED IN HEART, SIGNAL = 5.4; EXPRESSED IN BRAIN, SIGNAL = 6.4; EXPRESSED IN PLACENTA, SIGNAL = 4.2; EXPRESSED IN HELA, SIGNAL = 5.8; EXPRESSED IN FETAL LIVER, SIGNAL = 5.9; EXPRESSED IN LUNG, SIGNAL = 7.5
cttcctttccccttacccagagcgggttgtgcgggctctgggctctgtgccggcgctgggctctgtgcagccgccgagatggggctgagcagcggatttcctccctgctgcagctggaggacgattacctgcactagccgctgaggcggcatctggccctgggttactgcagctggtgacgcgggcagggtcagggttggttgcaggtggcagctgctgctaaacccattgcgagcctcagggtcaccaagttcaccgtcctttcatcatagtatctgatctttggcccgcgcccagagtgcggactggcctgcgctggggactgcatagcttctgggggccggtcagcgccagtttcacgtcctcctgcagctgcgtggcctaaggtcttaggcgccgcggcgctatctggccctgctgtcgacgctgctggtggtggggacagggtcaagggttgccactgctgctcccgtgcgccatcggcaggtggcagttgcagatgagcccacaattgaggctgttggggctgctcccaggttgttaga

SEQ ID NO: 8208 - DNA, 554 bp, Homo sapiens
  MAP TO AC007227.3; EXPRESSED IN BRAIN, SIGNAL =   2; EXPRESSED IN PLACENTA, SIGNAL = 1.9; EXPRESSED IN ADULT LIVER, SIGNAL = 1.7; EXPRESSED IN BONE MARROW, SIGNAL = 2.1; EXPRESSED IN FETAL LIVER, SIGNAL = 2.3; EXPRESSED IN HELA, SIGNAL = 2.8; EXPRESSED IN LUNG, SIGNAL = 2.9; EXPRESSED IN HEART, SIGNAL = 2.3
tctctcgcctctcctgtctccgccgtcgccgccacccacccaaagttggtgatgacagtgacctgagtgaaggctttgaatcggactcaagccatgactcagcccgggccagtgagggctcagacagtggctctgacaagagtcttgaaggtgggggaacggcctttgatgctgaaacagactcggaaatgaatagccaggagtcccgatcagacttggaagatatggaggaagaggaggggacacggtcaccaaccctggagccccctcggggcagatcagaggctcccgattccctcaatggcccactgggccccagtgaggctagcattgccagcaatctacaagccatgtccacccagatgttccagactaagcgctgcttccgactggcccccacctttagcaacctgctcctccagcccaccaccaaccctcatacctcggccagccacaggccttgcgtcaatggggatgtagacaagccttcagagccaggtatttggaccacttcatcatcctgttctggtccgcacctccatgccatagacact

SEQ ID NO: 8209 - DNA, 564 bp, Homo sapiens
  MAP TO AL121819.1; EXPRESSED IN BRAIN, SIGNAL = 1.4; EXPRESSED IN PLACENTA, SIGNAL =   2; EXPRESSED IN BONE MARROW, SIGNAL = 1.8; EXPRESSED IN FETAL LIVER, SIGNAL = 2.9; EXPRESSED IN HELA, SIGNAL = 2.7; EXPRESSED IN HEART, SIGNAL =   2; EXPRESSED IN ADULT LIVER, SIGNAL = 2.2
ccatgttatagcccaaagccatgttttgtggccctgcagagcacagtaaaaatttctgaattatttgccaatgttccaaaatcaggagagttcacatgaacttccacatttccaccctcccttttattttaaaagcagaactgtcaacactaatcctgttttccttagggtaacttatccctttaaaaaccaatacactggatctgggcacgatggcttgtggctgtaatcccgtttactttgggaggctgaggcgagaggattgcttgagcccaggagttcaagaccagcctgggcaacatagagtgacctcatctccaagaaacaacaacaaaaaacactatacatcaagtaaaaacaaagcaaaaagtaacaaccctctccttttcaccttgatccccatccacctgcttcactgataactcacctctctggcctttatgggtttggctgtgggaatctgcaccagaaggcctagaccctggaagggaatcatgtcagctgccttggaggcaacaccttcatgagagtaagtacctgtgaggggaaaataaagttcaaggg

SEQ ID NO: 8210 - DNA, 507 bp, Homo sapiens
  MAP TO AL157951.1; EXPRESSED IN FETAL LIVER, SIGNAL = 2.4; EXPRESSED IN HEART, SIGNAL =   2; EXPRESSED IN LUNG, SIGNAL =   7; EXPRESSED IN PLACENTA, SIGNAL = 1.7; EXPRESSED IN BRAIN, SIGNAL = 2.1; EXPRESSED IN HELA, SIGNAL = 2.7
aagcagggatttttgtttgcttgtatccccagtgtctagaacagagcctggcacatagaacttagtaatcatttgttgactgatttcctccatgtctctctgcagctccagaaacgcttcatcctgaatctgccaaccttcagtgttcgaatcattgacaaaaatggcatccatgacctggataacatttccttccccaaacagggctcctaacatcatgtcctccctcccacttgccagggaacttttttttgatgggctcctttatttttttctactcttttcaggcgcactcttgataaatggttaattcagaataaaggtgactatggatataattgagccctctggtccaggtctcagtttacctaatattacctcagaaaggatatggagggaagatgatctttttgccaggtctgacttttcttcctgctccgccctccattaacgctcagtaccctttagcagctgacggccccacgttctactccatgcttggcttcc

SEQ ID NO: 8211 - DNA, 560 bp, Homo sapiens
  MAP TO AC013533.3; EXPRESSED IN BRAIN, SIGNAL = 1.3; EXPRESSED IN PLACENTA, SIGNAL = 1.8; EXPRESSED IN BONE MARROW, SIGNAL = 2.4; EXPRESSED IN HELA, SIGNAL = 1.9; EXPRESSED IN HEART, SIGNAL =   2; EXPRESSED IN FETAL LIVER, SIGNAL = 1.9
gctgagcgggttactctgacttcactcttcacacgacaaatgatcatagcatactatttgccaccttgtctcagagacaaatgtcatgaaataagtcactcgtcattatttgagttcaagtactttttcttaaaacatggcttttaaacagaaatgcatttttccttaactactggtcatgatattccattccccccacgtgtgtgtgtgtgtgtgtgtgtgtgtgtgtgtgtgtacatgtgtgtgtctgttgcggcttacctgcaacactggttctgagcaagtgaaaaacttgcaaatgtgttgtggaagagaatggcaatgcttatccccagcagggaacgttcccgagtttccatctctgcctgtgattatgtgcagggcagtcatgcggaagagggattgggtgtattctgcgtgggcagaaccatgaccaggagagaggggaagccaagaggagagattgcagatggataaagaagtttctcacagtcgaggaataagaagcacacgggcaggcttccccagagaggccggtgccccaacctagaggacacgaa

SEQ ID NO: 8212 - DNA, 600 bp, Homo sapiens
  MAP TO AL117667.2; EXPRESSED IN BRAIN, SIGNAL = 5.6; EXPRESSED IN PLACENTA, SIGNAL = 3.7; EXPRESSED IN HELA, SIGNAL = 3.7; EXPRESSED IN ADULT LIVER, SIGNAL = 5.1; EXPRESSED IN BONE MARROW, SIGNAL = 4.1; EXPRESSED IN FETAL LIVER, SIGNAL = 3.6; EXPRESSED IN HEART, SIGNAL =   3; EXPRESSED IN LUNG, SIGNAL = 2.2
tcatgatgtctcctttttcatctctgattttatttatttgggtattctctcttttcttctttggctaaagatttggcaattttgtttatctttcttagaaaaacaacttttcattttgttgatcttttgtactgttttttgtttgtcttaatttcatttattgctgctctgatctttatttctgttcttctactaatttgggcttgattttctctagcttttctagttctttatcatgtgtcattaggttgtttatttgtagtttttctacttttttgatgtaggtgcttattggtataaactttcctcttagtactgttttgcctatcccataggttttggtgttttgtgtttccatattcatttgcttcaagacattattaatttgcttcttaatgtcttcagtgacccactggtctttcaggagcatattgtttaatttccgtatgtttgtatcatttccaaagttttttttattgatttctagttttatgctgttgtgggttagataagatacatatgatttcagtttttttaaagacttgttttgtggcctaacatatcgtctgtccttgagaatgattcgtgtgctgaggagaa

SEQ ID NO: 8213 - DNA, 586 bp, Homo sapiens
  MAP TO AL133380.3; EXPRESSED IN PLACENTA, SIGNAL =  40; EXPRESSED IN BONE MARROW, SIGNAL =  40; EXPRESSED IN FETAL LIVER, SIGNAL =  45; EXPRESSED IN HELA, SIGNAL =  50; EXPRESSED IN LUNG, SIGNAL =  50; EXPRESSED IN HEART, SIGNAL = 1.6e+02; EXPRESSED IN BRAIN, SIGNAL =  80; EXPRESSED IN ADULT LIVER, SIGNAL =  80
gaagagccaaaactttcccctgatggattagaacacagaaaaccaaaacaaataaaattgcctagtcaggcctacattgatctacctcttgggaaagatgctcagagagagaatcctgcagaagctgaaagctgggaggaggcagcctctgcgaatgctgccacagtctccattgagatgactcctacgaatagtctgagtagatccccccagagaaagaaaacggagtcagctctgtatgggtgcaccgtccttctggcatcggtggctctgggactggacctcagagagcttcataaagcacaggctgctgaagaaccgttgcccaaggaagagaagaagaaacgagagggaatcttccagcgggcttccaagtcccgcagaagcgccagtcctcccacaagcctgccatccacctgtggggaggccagcagcccaccctccctgccactgtcaagtgccctgggcatcctctccacaccttctttctccacaaagtgcctgctgcagatggacagtgaagatccactggtggacagtgcacctgtcacttgtgactctgagatgctcactccggatttttgtc

SEQ ID NO: 8214 - DNA, 504 bp, Homo sapiens
  MAP TO AC012578.5; EXPRESSED IN ADULT LIVER, SIGNAL = 2.8; EXPRESSED IN FETAL LIVER, SIGNAL = 2.8; EXPRESSED IN BRAIN, SIGNAL = 1.6; EXPRESSED IN PLACENTA, SIGNAL = 2.1; EXPRESSED IN HEART, SIGNAL = 2.7; EXPRESSED IN BONE MARROW, SIGNAL = 2.2; EXPRESSED IN HELA, SIGNAL =   3
ctccagacaggcatttcctcaaggcctcacgagtctcccctccagacaggcatttcctcaaggactccggagtctccccttctgctttgactctgggccgtcctcagtggctgttccagcccaggccattctcctccgcatcgaactgtccaacatcaaagcccttggagctaaatctgccttcagaattccactcagactttttagttctttccaacagatgacaggggaggaaatgaaacaccttcaagatctttcagaagaaaccccagccgtcaatgacacgcaggttttatgcttcctgcccacatataggtctccgaaatgcccctggaacactcagctcctggcaacaggctgctcagcaccaccattccaggaagcgaaggtcaacatgacagtaaaatataagaagtatgaagtataaataccaattaccaattagcgcagccatcaacttctgattctaggaggtagatgaaaccccaaaatagcccaagacac

SEQ ID NO: 8215 - DNA, 528 bp, Homo sapiens; identical to SEQ ID NO: 7091
  MAP TO AC020904.3; EXPRESSED IN FETAL LIVER, SIGNAL =  12; EXPRESSED IN HEART, SIGNAL = 7.1; EXPRESSED IN BRAIN, SIGNAL = 7.8; EXPRESSED IN PLACENTA, SIGNAL = 7.7; EXPRESSED IN BONE MARROW, SIGNAL =  13; EXPRESSED IN ADULT LIVER, SIGNAL =  14; EXPRESSED IN HELA, SIGNAL =  16; EXPRESSED IN LUNG, SIGNAL =  10

SEQ ID NO: 8216 - DNA, 589 bp, Homo sapiens
  MAP TO AL135792.3; EXPRESSED IN BRAIN, SIGNAL = 3.2; EXPRESSED IN HELA, SIGNAL = 3.5; EXPRESSED IN ADULT LIVER, SIGNAL = 3.3; EXPRESSED IN PLACENTA, SIGNAL = 2.6; EXPRESSED IN LUNG, SIGNAL = 3.5; EXPRESSED IN HEART, SIGNAL = 3.3; EXPRESSED IN FETAL LIVER, SIGNAL = 3.2; EXPRESSED IN BONE MARROW, SIGNAL = 2.6
ggaatggagaggaaagagggaaaggaagggatggagtggtggagcagctattactttgcaacagtaccctatagttttcaatgggttttccctagacaggtgagtctgatgaactgaaaccaggtcatgtgcccaagacctcactaccagaagggctgagaaagtgggtactgccctttccacttctcctctcctccaagactcttggggtggagaattccccaaatataaaaaggagttttagatagtgggtctccaataaaagaaaacatcttcctccaactcagctcattgcagagtatagctttcccaaagaagctggcaaaaatcctccacccaggcccaggtgacatttttcacctctctagctccccagatcctagaagcagggccatctcccaccaagcacctaccacatttccatcctgctcctccacatgccattacaggcaaaactttgaggcagaaaaacacgctgaaaatcagcctgcaaatggaaccctttcatgttgcccgtgatcggcagctaggaaggtgagatcagatatggaagtgtttgatgaggttaagcccatttccaaccctttat

SEQ ID NO: 8217 - DNA, 562 bp, Homo sapiens
  MAP TO AC002040.1; EXPRESSED IN BRAIN, SIGNAL = 5.3; EXPRESSED IN LUNG, SIGNAL = 7.7; EXPRESSED IN PLACENTA, SIGNAL = 4.8; EXPRESSED IN HEART, SIGNAL = 5.9; EXPRESSED IN HELA, SIGNAL = 6.9; EXPRESSED IN FETAL LIVER, SIGNAL = 6.4; EXPRESSED IN BONE MARROW, SIGNAL = 5.8; EXPRESSED IN ADULT LIVER, SIGNAL = 5.6
tggactacttccatctgggcatgtgagaggaaaaaaaaaagccgattatttatttaatttatcatattattgggtcaatacccaactccatttggcactaattgtgtcactctcccgaattctaggaagagggcgggacgagtagaaagaggagagagaagagaataaggccagaaggaagagtagaaaggcttttccctccctttgtcacctactgaatctgaatcccaagtcccaagaaagctttccttgactcagtgaccaggccaacccccgctccaaccacactatcaaatgcctctttctttcctgcaccctgatctacagcatcgatcacaattgccacgtcacactgttctttggcccttgtgtctcctgcaggtgtgctttcaatgggctcaggttctaggtttgttgtacaaagcctgccagggcagggggaacaggacgtgattccttggcccctttgtcccattaccaccaggaaacagttatctgcagccagactccatgctctgttcctgtggacaaaacatggaactgcagttccagcaaacgctat

SEQ ID NO: 8218 - DNA, 561 bp, Homo sapiens
  MAP TO AL109925.11; EXPRESSED IN PLACENTA, SIGNAL = 2.4; EXPRESSED IN BRAIN, SIGNAL = 2.2; EXPRESSED IN HELA, SIGNAL = 2.9; EXPRESSED IN FETAL LIVER, SIGNAL = 3.7; EXPRESSED IN HEART, SIGNAL = 2.7; EXPRESSED IN LUNG, SIGNAL = 2.5
tatactttctgccccgctccactacctctcagcaagctgaactcactgccttaactcgagacctcgctctcgcaaaaggactacgcgtcaatatttatactgactgtaaatatgccttccatatcttgcaccaccatgctgttatatgggcagaaagaaatttcctcactatgcaagggtcctccatcattaatgcctctttaacaaaaactcttctcaaagccgctttacttccaaaggaagctggagtcattcactgcaaaggccatcaaaaggcatcagatcccatcgctcaagacaatgcttatgctgataaggtagctaaaaaagcagccatcaaaaggcatcagatcccattgctcaggacaatgcttatgctgataagatagctaaaaaaagcagctagtgttccaatttctatccctcatggcagttttcttccttctcatctggctactcccacctactccctcactgaaacttccacctatctcttcccacacaaggcaagtggttcttggaccaaagaaaatacctccttccagtctcacaagcccattc

SEQ ID NO: 8219 - DNA, 581 bp, Homo sapiens
  MAP TO AL139105.2; EXPRESSED IN BRAIN, SIGNAL = 1.3; EXPRESSED IN HELA, SIGNAL = 1.9; EXPRESSED IN FETAL LIVER, SIGNAL = 2.5; EXPRESSED IN HEART, SIGNAL = 2.3
tccagggaaaatgacatcaagacatattgtagccaaactgtcaaaaatcaaaacaagagattattgaaagcagcagcagcagcagcaacaacaacaacaacaacaacaacaacaacaacaacaacaacaacagaaacaaaaaacaactaagatcctaacataccagagaatgttcataagacaatggatttctcaacagaaactaggccaagaaggagtggaatgatatattcaatgtgcagaaagaaaaagaaaagcttctagccaaaaataatttactcatcaaagctttccttcagaagtgaaggcaaaaagaaactttcatagagaagcaaatgctaaaggagctcatcaccactagacctaccttacaagaaatgttgaggtgagtcttcaagctgacacaaaaggagataattaacattatgaagacatataaaatgacaacataagactcaattgtgtgttgcctataagagactcactgcaatatagctattatgtacccataataactgaaaattttttaaaagtaaaaataaaaacatgttgtaaaagatacccacttccacattgacgat

SEQ ID NO: 8220 - DNA, 544 bp, Homo sapiens
  MAP TO AC009565.7; EXPRESSED IN BRAIN, SIGNAL = 1.3; EXPRESSED IN FETAL LIVER, SIGNAL = 2.2; EXPRESSED IN HELA, SIGNAL =   2; EXPRESSED IN HEART, SIGNAL = 1.9
agccattcatgagggatctgcccttgtgacccaaacacctcccactaggccccaccttcaacattgggaatcaaatttcaacatgagatttggaggggacaaatatccaaactatatcaaggatacttctgagcagttttgcttcatgtggccttcagtgaggtaaagggatggctggaaggtttaaatgaccttactcacatgctggcagttggtgcttgctgtcagctggatctcagtgggggctgtaggctgagtctcagttttccatgtggtccaccccacatgtctgcttgtgcttccccacagcatggtgactgggtttccaagagaagcagtgttagcagtaaagctggagactgtgcaaaccttttaaggcctagccttataagttatacaatatcacttccaaaacagttcctagttcaaaatatattacaggagcagcccatgtttaaggagagaggaaatagattccactgttgatgggagaatgaccatattgtaaaagaacatgtcaaatgggagacattgctgtgaccct

SEQ ID NO: 8221 - DNA, 588 bp, Homo sapiens
  MAP TO AL079303.2; EXPRESSED IN BRAIN, SIGNAL = 6.1; EXPRESSED IN PLACENTA, SIGNAL = 4.4; EXPRESSED IN HELA, SIGNAL = 6.3; EXPRESSED IN HEART, SIGNAL = 5.8; EXPRESSED IN ADULT LIVER, SIGNAL = 5.3; EXPRESSED IN BONE MARROW, SIGNAL = 4.8; EXPRESSED IN FETAL LIVER, SIGNAL = 4.9; EXPRESSED IN LUNG, SIGNAL = 6.3
aatccagtcaccctcttgaacttactgagtaaaagtatatgaactgttccttcttgtctttcaggagtactgcgaatacatttcacacacatgagtaatgtatgtgaaaaaaaaccttatgttgcttggaaagtaagtctttaagtttaggttatcattattatggaaggacaaagccttatttggtgatgtcagtggtgcgggggaggggagcaatgcctgtcagagtcgctatgatcaggacttttgtctgagagaagacagtagtcagattgagttcttttgcccctggacattctgctggatctccctgttcctcttcagatactgaactagcaagtagtacataaacctctacagttatgtggttaagtaaatggaaatcagggtagtggaagtaataatttttgttaagaaccagaatagagaattttaacagaggagactaagggggaaaatgaagttggcattccaaaaaattatgttatatgagaatcatatataaagaaatatggtatattggtttactctgttcatgaaatgggaatgatttagggagaaaagttttccctcctctcctctttcctc

SEQ ID NO: 8222 - DNA, 577 bp, Homo sapiens
  MAP TO AC013359.4; EXPRESSED IN ADULT LIVER, SIGNAL = 1.9; EXPRESSED IN FETAL LIVER, SIGNAL = 4.3; EXPRESSED IN PLACENTA, SIGNAL = 2.7; EXPRESSED IN BONE MARROW, SIGNAL = 1.6; EXPRESSED IN HELA, SIGNAL = 2.7; EXPRESSED IN LUNG, SIGNAL = 1.7; EXPRESSED IN BRAIN, SIGNAL = 1.9; EXPRESSED IN HEART, SIGNAL = 2.7
agttcaacccaaacccacacagctagcccactgcaaatgcctttcaaagtgagatcaccctgaacatactgacatttacatacaagataaagcaccatattaattatgcataaataccatatataatattataagacaaaacataattaacctatctaatacaaatacaccttccagtaaattcctaaaaaataaaattttccacctggttgctttcttttctcccatttgatatcctagagcctgctttttgatttagcctaccctcttccacatgtattataaacatgcaataggaaaaatcctgtgtctatgcaccatctaaatctcaaagtcaagtgtttaatatacaattcaaggagacttaccaacatcatcatcattgccatcatcataatactggtggctaacagtcactggattctttccatgtgccaagcactgtgttaattgctttgtatacgctattgtcaatcagttaataattgttagtctcacagtgccaggaggttagttaccagaacctcaaagagtttctattatgaaacgtgtatcatggttgctaggcaaatggaaa

SEQ ID NO: 8223 - DNA, 589 bp, Homo sapiens
  MAP TO AC004551.1; EXPRESSED IN ADULT LIVER, SIGNAL = 4.5; EXPRESSED IN HEART, SIGNAL = 3.7; EXPRESSED IN LUNG, SIGNAL =   4; EXPRESSED IN BRAIN, SIGNAL = 6.6; EXPRESSED IN PLACENTA, SIGNAL = 3.2; EXPRESSED IN BONE MARROW, SIGNAL = 3.5; EXPRESSED IN FETAL LIVER, SIGNAL =   5; EXPRESSED IN HELA, SIGNAL = 4.4
cctcaagaggacagagccacagagctttgcctgtgggcaagtgacacaccagtttgactgcctgagactccagacccacattcttgccagttgtaggcatttgtttcactgtgaccttgggcaggttccttgccctctctgggtctcagtgtacaacgatcttggtgaaactgtctggttctccttttccaaggctccaggactccttcagggcccacctgtagccccaaggcattgacttacagcttgacgaatgggtctgagtagccattagcgtccatggcagccaggtgcacgcagcgtatgatgcccacaatgaggcctccctgctgtgtgctgtacatgagggagaccaggatcttgccacgctcctcgatgtcaccaacacgctccacctgctgcattgggggaaaaggcagtgtgggccttggaggggagggggccaggaaatgtgaatggcgagcattagggaagaacctatgaagggcaggcgaagcttggccagctctagggagccagtaccagggacagcagatggcttagcctccaaagaggagccaaaggtgaaagttgaggaccagtctcaggc

SEQ ID NO: 8224 - DNA, 600 bp, Homo sapiens
  MAP TO AC011465.4; EXPRESSED IN ADULT LIVER, SIGNAL = 1.9; EXPRESSED IN BRAIN, SIGNAL =   2; EXPRESSED IN BONE MARROW, SIGNAL = 2.1; EXPRESSED IN FETAL LIVER, SIGNAL =   2; EXPRESSED IN HELA, SIGNAL = 1.9; EXPRESSED IN HEART, SIGNAL = 1.9; EXPRESSED IN LUNG, SIGNAL = 2.9; EXPRESSED IN PLACENTA, SIGNAL = 1.5
tatccacatttcccctccagaaatcaggaagccaggctgggaccgggtgcgtgttccccctgcgggtcccctgccatcacccgggaaggtattaatagatgggagttggcaggtttttggcttcaaagcggggaacgtgaccaggggtcttccagaggagctgacccaagcagcttctgaggctcgatcctgcctgtggcctgcaggtgatgaccagtggctgggagacggtggacatgacgcttcggcggaacgggctcgggcagctgggcttccacgtgaagtacgacggcacggtggccgaggttgaggactatgggttcgcctggcaggccggcctccggcagggcagccgactagtggagatctgcaaggtggccgtggtcacactgacccacgaccagatgatcgacctgctgcgcacctctgtcactgtgaaggtggtcatcatcccgccttttgaggacggcactccccggaggtaagggcctccacctttcagccaggtggtgggtggcagctcccagatcgctggcatgaggcctccctggcactgtcacttgaggtcccaatagaggggggataggcaggcccttctag

SEQ ID NO: 8225 - DNA, 526 bp, Homo sapiens
  MAP TO AC010352.4; EXPRESSED IN FETAL LIVER, SIGNAL = 6.2; EXPRESSED IN HEART, SIGNAL = 6.1; EXPRESSED IN BRAIN, SIGNAL = 5.2; EXPRESSED IN PLACENTA, SIGNAL = 3.9; EXPRESSED IN BONE MARROW, SIGNAL = 3.6; EXPRESSED IN LUNG, SIGNAL =   4; EXPRESSED IN ADULT LIVER, SIGNAL = 3.8; EXPRESSED IN HELA, SIGNAL = 6.3
taataggatcatgggggtggtttctgatagtttagcaccatcccactggtgctgtttcgtgatagagttctcgagaaatctggttgtttaaaactgtgtagcacctcctccttagctcttttcctccttctctagccatataagatgcggatccttcctctttgccttctgccatgattgtaggtttcctgaggcctccccagccatgcttcctgtttagcctgcagaactgtaagtcaattaaacctcttttctttataaattacctcaggtagttttttatagcaatgtgagaatggactaatacagctgatcattatataatgaaaatagatcaatacagcaagaagatataacaattataaatatatatgcatccaacactggaacacccagatatataaaccaaatattattagacctcaagggagtaatacattccaatataataatcgttgcagacttcaacatcccactcatcattgaacagatcatctagatagaaaaccaacaaagaaacatcaga

SEQ ID NO: 8226 - DNA, 534 bp, Homo sapiens
  MAP TO AL138828.4; EXPRESSED IN HELA, SIGNAL = 2.8; EXPRESSED IN BONE MARROW, SIGNAL = 1.5; EXPRESSED IN FETAL LIVER, SIGNAL = 2.8; EXPRESSED IN HEART, SIGNAL = 2.4; EXPRESSED IN ADULT LIVER, SIGNAL = 1.5; EXPRESSED IN LUNG, SIGNAL = 1.7; EXPRESSED IN BRAIN, SIGNAL = 1.8; EXPRESSED IN PLACENTA, SIGNAL = 2.2
acctatccacccaacagcactgttgccaaccagcaatgccatcacaacaacaaaacaaaacagagtggaataggaagaaggggataccagaataatctacacaatttgagtttacccaatattttccacacagtcctttcctttttgcctgtgatttcatgtgactatcacctcatttaatgcttcaaagggtaaaggtctggctgataggcttaaacaatgccatgatgattcattgtgtttgatttagccaaaatgattatgagcctatttgtgaaaatacaccaatcaatctcccaatttgtttttttaacagcttgccagcttcctcacgcctctggacatcatgcttggactgctggctgcagcagcacacgatgtggaccacccaggggtgaaccagccatttttgataaaaactaaccaccatcttgcaaacctatatcaggtaagggagcccaacctggagccagccacagtatggtcaatcgccttaggcccggtgctcaagcctgaatcttgcccatggagaaa

SEQ ID NO: 8227 - DNA, 599 bp, Homo sapiens
  MAP TO AL049829.3; EXPRESSED IN BONE MARROW, SIGNAL = 1.7; EXPRESSED IN HEART, SIGNAL =  60
tgatgcagagctgctcaaagctgttgaactgcagggggcatgaggggtgggagcagtcagaaagtgggtgtgagtggccattggggctgtgcccgtgcactgtgccgagcccagcagggtatggctgtcccctccatgtcagggcagtggaggagggcttcccctgaagacagggacaatgactgcctctgtcaccacacagtccccactgccttcccatgtctggtccacagctggctctcagcaaatggctgttgaatgtaggagcaagcgagtgattgttctcccactcccaggggtcccaactcacgtcgaagatctcgaagccagcgatgtccaggactcctatgaagtactggcgtggctgcttggtctccagggtggcgttgatgcgcgtcaccatccagttgaacatcttctcatacactgccttggccagagccccgatggagtagtacacctgctgcacgctctgccccttggtgacatactcgttgcccactttcacccgagggtggcacagccccttgagcaggtcagctgagttcagccccatgaggtaggccgacttgtcagcatctggttgagagggaaaggat

SEQ ID NO: 8228 - DNA, 535 bp, Homo sapiens
  MAP TO AC018499.2; EXPRESSED IN PLACENTA, SIGNAL = 3.2; EXPRESSED IN ADULT LIVER, SIGNAL = 3.1; EXPRESSED IN BONE MARROW, SIGNAL = 3.2; EXPRESSED IN LUNG, SIGNAL = 3.1; EXPRESSED IN HEART, SIGNAL = 3.8; EXPRESSED IN BRAIN, SIGNAL = 4.1; EXPRESSED IN HELA, SIGNAL = 4.1; EXPRESSED IN FETAL LIVER, SIGNAL = 4.3
cagagaggctgggagaactggcccagggtcacatagctaagaagtggcaggagcaggatctgaacccaggactggctaacccaggagcctctccctcctgcccctgccctgtcctcccatctttgtttgtccaggcctccatattacagttttatatatgaagggaggcatcccttagggtactgaggccttgacctcatgtcaccagtctttccaatattctctcctttccataagctggtcccaaaggcagagcgagatggagcccatgctgatgctgcccccggggaccacttgcttgtctggctggctctggcacatctccttgcaggaaagcacccgcctcttagagaagcccagtcaatctgacagattcagaacctgccatccacactgtggggcatggggaagctttggcatctggcaggccttaaaggagccacaggatgctgggagggtgagaattagttgactcacccactcttgttttacacatggggaaatggaggcccagagaagggagacaactcatccg

SEQ ID NO: 8229 - DNA, 599 bp, Homo sapiens
  MAP TO AC004552.1; EXPRESSED IN BRAIN, SIGNAL =  13; EXPRESSED IN BONE MARROW, SIGNAL = 9.9; EXPRESSED IN FETAL LIVER, SIGNAL = 9.5; EXPRESSED IN LUNG, SIGNAL = 8.5; EXPRESSED IN PLACENTA, SIGNAL =  11; EXPRESSED IN HEART, SIGNAL = 8.3; EXPRESSED IN HELA, SIGNAL = 9.3; EXPRESSED IN ADULT LIVER, SIGNAL = 6.9
agatactcacctagggcgggaaaaactctgcaggaaaaactttatgacatttatgttgaagaatgtggaaaagagcctgaggatcctcaggaattgagaagcaatgtaaacttgttagaaaagcttgttaggagagagtccttgccatgtttactggtcaatctatacccaggcaatcaggggtattctgtgatgctccagagagaagatgggtcctttgcagagaccattcggctgccttatgaagaaagggcattgctggactacttggatgcagaagaattaccccctgctttgggtgatgtcctggataaagcttcggttaacatttttcatagtgggtgtgtcatagtagaagttcgtgactacaggcagtccagtaatatgcaacctcctggttaccaaagcaggcatattcttctacgtccaacgatgcagactttagcccatgatgtgaagatgatgacaagagatggccagaaatggagccaggaagacaagcttcagcttgagagccagctgatcttagcgacagctgaaccactgtgtcttgatccttctgtagcagttgcctgcactgcaaacaggctgctgtacaa

SEQ ID NO: 8230 - DNA, 579 bp, Homo sapiens
  MAP TO AL049776.3; EXPRESSED IN BRAIN, SIGNAL = 1.4; EXPRESSED IN BONE MARROW, SIGNAL = 2.7; EXPRESSED IN LUNG, SIGNAL = 2.3; EXPRESSED IN HEART, SIGNAL = 1.8
tggtcaagcagatgatgagcgtgttcgtgaatattatcttcttcaccttcagaggtgaactgatatcagcttagaagagattgagagcattgaccaggaaataaagatcctgagagaaagagactcttcaagagaggcatcaacttctaattcatctcgccaggagaggcctccagtgaaacccttcattctcactcggaacatggcccaagtcaaagtatttggagctggttatccaagtctggcaactatgacggtgagtgactggtataagcaacattggaaatatggagcattaccagatcagggaatagccaaggcaacaccagaggaattcagaaaagcagctcagcaacaggaaggtcaagaagaaaaggaggaagaggatgatgaacaaacactctacagagttcgggagtgggatgactggaagggcatccatcctagggactatggcagccaacagagcatgggctgatcttcccacaaatgagaggactgaagggtgcacacctcccacgccaaggaaaaccatgcagtcctcatctccctgggcttccgcttcagctgtgtacaacg

SEQ ID NO: 8231 - DNA, 577 bp, Homo sapiens
  MAP TO AC002126.1; EXPRESSED IN BRAIN, SIGNAL = 5.9; EXPRESSED IN ADULT LIVER, SIGNAL = 5.1; EXPRESSED IN LUNG, SIGNAL = 5.6; EXPRESSED IN PLACENTA, SIGNAL = 4.5; EXPRESSED IN HEART, SIGNAL = 5.6; EXPRESSED IN HELA, SIGNAL =   7; EXPRESSED IN FETAL LIVER, SIGNAL = 6.4; EXPRESSED IN BONE MARROW, SIGNAL =   5
ttgtgagcctgtctgtctcggtcactgctatgtccccagtgcccagcccagggccaggcacacagcagagcgcaggacctcggtattaagtgactgaactcaggttatagatgccacaggacaagaggaggtcaccagacaccaggacaaaaggaaagagacagttttctaataagcgagaagcagcggttcccagcgcagctgagagacggtccttgcagctgggagtggcagtgggggcgggcggtcccaggagctacctgtggccctgggcactggcattcatatggtcccggatgctgatggcctgtttgagcagaccctccacgctgcggaagtagacgctgctgtccaccaggttcttcacggcgctgaaacgggaggacaggcctggtcagcgctccggacctgcaggtaactgtcccacaccccagcacttgaggtcaccaccagggctcggtgggtacctcagtgattctgcgggcttcccgaaggactcacagtgggcttacattttagatttccctgctatgactagatgacatctgtgcaacacagcacattctctgccactgaa

SEQ ID NO: 8232 - DNA, 567 bp, Homo sapiens
  MAP TO AC008395.3; EXPRESSED IN HEART, SIGNAL = 1.8; EXPRESSED IN LUNG, SIGNAL = 3.8; EXPRESSED IN PLACENTA, SIGNAL = 1.8; EXPRESSED IN BRAIN, SIGNAL =   2; EXPRESSED IN ADULT LIVER, SIGNAL = 1.8; EXPRESSED IN BONE MARROW, SIGNAL = 1.9
gctcctcctcagaccagatgaatgagaacctgcattttatcacgacccccaggtggttctcagctacattcagtgattgtgaatgcccctgaattcagagagtgtccctgaaggcacatcaggcagctaagaaaaaaaagtctccacacctaggcctcaggccctttacacaggaagaggggaaaggggaaggcaggcacgggcacgttgtaaacagtgcccacctgattctaatagggttcgtgcagccagggttaagaaaagaagaagctgccctggaggaagcagtcttctctccctggcaagcaagagcagtcccttttgtggaggcaccacacaggcccccaacgctggcgacaaacatcctgacaattctcagcttcctggcatcaaataacctgcttttccccagcaaaggggctgcttttggcacctgaagcctggctgactgccagacgccaagctcctgggcaagaaccgggctggtgtggagaaacagaagtcgaatgcaagtgtcttaactgttgacaagaaactagaggaaagagaaagccatctcacctcgag

SEQ ID NO: 8233 - DNA, 527 bp, Homo sapiens
  MAP TO AL139289.4; EXPRESSED IN HEART, SIGNAL =   2; EXPRESSED IN BRAIN, SIGNAL = 2.4; EXPRESSED IN ADULT LIVER, SIGNAL = 2.1; EXPRESSED IN BONE MARROW, SIGNAL = 4.4; EXPRESSED IN FETAL LIVER, SIGNAL = 3.7; EXPRESSED IN HELA, SIGNAL = 3.6; EXPRESSED IN LUNG, SIGNAL = 2.2; EXPRESSED IN PLACENTA, SIGNAL =   2
ttcagcccaaccctactcaccttgacagccccttgatgctgggtgaatgtctgcagaggaacccagccaccctctccaggagcactaggccacacattgaccaagttatcattaccaccactggccaaatgtcgtccatctggggcccagcgcagcccacacacttcctggctgtggccactcagtgtggccacatggtgttctgctacccgaacatcatggtggtggatgtggccagaacgtgaaccactggaggaggaaagaagggaatcaggttctgtggcagcaccaaatgcaagcaagccagagctggttcagttcaggggtgtacagtcaaggggagggtgggcaaatatcagactaccatagaccaacaaaaaccactgacctggacaggatatagctgttccagcttagggagcccactcgggcagagtgactggtcatatttcgaagccgtttctgctgctgcacatcccatagctagagagagaagcccactaggatcagagattgggacttggcat

SEQ ID NO: 8234 - DNA, 583 bp, Homo sapiens
  MAP TO AL138876.3; EXPRESSED IN BRAIN, SIGNAL = 2.7; EXPRESSED IN BONE MARROW, SIGNAL = 2.1; EXPRESSED IN LUNG, SIGNAL = 2.5; EXPRESSED IN PLACENTA, SIGNAL = 2.6; EXPRESSED IN HEART, SIGNAL = 2.7; EXPRESSED IN HELA, SIGNAL = 2.9; EXPRESSED IN FETAL LIVER, SIGNAL = 2.5; EXPRESSED IN ADULT LIVER, SIGNAL = 2.6
aggagtccatggctggtatggccatatgataaatggcaggaagagaaaggtttgtgtagcttcatgaccaaagcagtcccagatctcagtagactgggtcaagaggctcaaacctcattctatccatgactttgcgcaagcatcacagatgttagtaagagaataaattcgaacagccctggtggtaggccctgcttccttatcatccctactgcgcccggagcacaggacgaacttgcgttacctcttctccttaatcagaagcttagagatgaactccttggcctcctccgagatgtcctgaaattcttcatcctctaagtcccacctgcaggccaggatgttgttcagcgtctcagcatcattgtcacccaggaaaggcgacaaaccgctaagtctggaggacacggggtccagagtgagtattttttaaacagcctcaacccctttccatacagattgcttttctggttgtgccatttaaaggtgagagaaggaaaataacctaatcctgaagcataattttataacatattattgtaatcaagaaaatgcttgccgcccccacccaactcctaactga

SEQ ID NO: 8235 - DNA, 534 bp, Homo sapiens
  MAP TO AC004547.1; EXPRESSED IN BRAIN, SIGNAL = 7.6; EXPRESSED IN PLACENTA, SIGNAL =  15; EXPRESSED IN BONE MARROW, SIGNAL =   7; EXPRESSED IN FETAL LIVER, SIGNAL = 8.9; EXPRESSED IN HELA, SIGNAL = 8.7; EXPRESSED IN HEART, SIGNAL = 7.5; EXPRESSED IN ADULT LIVER, SIGNAL = 5.5; EXPRESSED IN LUNG, SIGNAL = 5.9
cttccttatcagcagcccagcataccattcccaccccatttcacagcaacctcagacctctcccgcctggacctacaactgccccagcctgcaagcgggaaaggaggctcctgcgctcgctggtgctccccctccgcaggtctttgtccaataaacctgtgttaccgtcgagccgccctccttgtctttttttctccatcttaacagtaacatggaagttataccacacaacacagcacacacacacacacagagtgaaaaggtaaaacgttacaatttttaaaatcagaaacaggaaaggtatataattaagcaggatgcaacatctgggagaagaaaaatgccatatatcaatgaactgtgtacacttgggcaatgtaacattagtgggccagcttcaggaccttactatggtgaaaatctgctacaaatttccactctctttgaagtcacatggatgtgaatcgtgtgtgctttcaacgtactagctgtgaatgaacttaggctagagggtgaaaatatcggagccccaat

SEQ ID NO: 8236 - DNA, 518 bp, Homo sapiens
  MAP TO AC000003.1; EXPRESSED IN BRAIN, SIGNAL = 5.3; EXPRESSED IN PLACENTA, SIGNAL = 3.7; EXPRESSED IN ADULT LIVER, SIGNAL = 4.5; EXPRESSED IN BONE MARROW, SIGNAL = 3.6; EXPRESSED IN HELA, SIGNAL = 4.9; EXPRESSED IN HEART, SIGNAL = 4.3; EXPRESSED IN LUNG, SIGNAL = 4.7; EXPRESSED IN FETAL LIVER, SIGNAL = 4.4
atgaatgaaaacacaggggctggctggttttggggccttaggagtttcagaagcatcatctcctgggtgggtaccaccggtgtgcacagataaaagtgtgctcccgggagatgcaggtcacactgtacgaggaggagtgagtcgtgtcctccctctgtttacatctcgttgatgatggtgctgatgctattttgggccttggtgtgtgccgtttgagtgtggaagttgtatggctggccttcggattgtgcctcagtgcctttgttggaggcgaggcacgtgtttttggaggttccaggtagcctgggcccactaccttccaaagtcccccatgagaactggtctcagtggtttctgagatgactgtgggagggggtgcattccatgctggggtactggtggcacccaggcatcttctgagcttgtgagacttttttgggaggcttggggctggggaagcccaagggagaggttgacggggtacagggaagcatgcttggtggtctgaggttgcatct

SEQ ID NO: 8237 - DNA, 541 bp, Homo sapiens
  MAP TO AL109658.5; EXPRESSED IN BRAIN, SIGNAL = 2.2; EXPRESSED IN PLACENTA, SIGNAL = 2.5; EXPRESSED IN FETAL LIVER, SIGNAL =   3; EXPRESSED IN ADULT LIVER, SIGNAL = 2.6; EXPRESSED IN BONE MARROW, SIGNAL = 2.3; EXPRESSED IN HEART, SIGNAL = 2.4; EXPRESSED IN LUNG, SIGNAL =   4; EXPRESSED IN HELA, SIGNAL = 3.4
atgcctaacaaactgcctggaatagctccatattcttattttaagtatttagtcttggctctcctgactgaatgcagcccaagctcacagacctggcctgcgttctgtgtcctggtggcacgtatggtgctggtactcaagagcactcttggatttgctttacttgcatgatttttaagaaccagaaggacaagcatgaggccttcatatttagaccttcttccctatatggtaacaagaatatgaggggtaatcccagaatggtaaactttactttaagcacctttagttactaatcagtaagaaaaatgtgaaaatgtgctccagttaaaagcacaagaccatgaaagaagccaaagctatgactgactgcatgcagaggctgttgacgtcatcttcgcctgggtctcctcctgaactgaaatccttggaaagggagcaaaagggtttacaaaacaagacggtgcagagagtctcaagtctgtctactccacagcagcctgctctttcctgttgcttttcaaggaatcagcagagggag

SEQ ID NO: 8238 - DNA, 542 bp, Homo sapiens
  MAP TO AL136102.10; EXPRESSED IN BRAIN, SIGNAL = 2.3; EXPRESSED IN LUNG, SIGNAL = 2.2; EXPRESSED IN ADULT LIVER, SIGNAL = 4.3; EXPRESSED IN HEART, SIGNAL = 3.4
catgattttccccaaaggtgacagcacagagacaattcttctctctctgctcagtcagacatacactggcctggggtcctctggtcattttccttgcttctcttaaggccctgttccaaacatgcaaatcacggatccttccatggttaatctctcctgggcagaggttgagggaaggtagaggtcaccggcacatagttcatttgcaaatatatgctgatgacatctatcttccctcaaccaatgcaccctcaggttgggccctggctatctaacactgcaaaaagccttcacctgcctagagtgattccggaaacaccaagaagcatgccctccctgtttccccaaatccttcccacaccatcgctgctgcctggaatgccagcattagggagtctcgttttgaatttccagatgaagaaaatcatcctggagaaaagcaacactttaaacctcacattaaagcttcttcaatgagaatatgagaatccgttttccacgagcaattgttgataagagaaaggtagaatttgtggcacggt

SEQ ID NO: 8239 - DNA, 526 bp, Homo sapiens
  MAP TO AC012568.3; EXPRESSED IN FETAL LIVER, SIGNAL = 4.9; EXPRESSED IN PLACENTA, SIGNAL = 4.2; EXPRESSED IN BRAIN, SIGNAL = 3.1; EXPRESSED IN HEART, SIGNAL = 4.3; EXPRESSED IN ADULT LIVER, SIGNAL = 3.2; EXPRESSED IN BONE MARROW, SIGNAL = 3.5; EXPRESSED IN HELA, SIGNAL = 4.3; EXPRESSED IN LUNG, SIGNAL = 2.7
tgccccagtaattcctcaacaaataatgatactcaacaaataatgcaatctgatataaaatcattttttgtaaggtcaaggtgtgtctggaattggttccttccagtgggttcttggtctcattgacttcaagaatgaagccgtgaaccctcgttgtgagtgtccggagtttcttccttctggtgggttcgtggtctcgctgacttcaggagtgaagctgcagaccttcgccgtgagtgttacagctcttaaaggtggtgtgtccggagttgtttgttcctcccagtgggttcttggtcttgctgacttcaggaatgaagctgcagaccctcacggtgagtgttacaactcataaaggtagtacggacccaaagagtgagcagcagcaagatttattgtaaagagcaaaagaacaaagcttccacagcgtggaaggggacccgaacgggttgctgctgctggcttgggtggccagcttttattcccttatttggccccgcccacatcctgctgattggtccatttt

SEQ ID NO: 8240 - DNA, 506 bp, Homo sapiens
  MAP TO AL136169.6; EXPRESSED IN BRAIN, SIGNAL =   4; EXPRESSED IN BONE MARROW, SIGNAL = 1.6; EXPRESSED IN ADULT LIVER, SIGNAL = 1.6; EXPRESSED IN LUNG, SIGNAL = 5.8; EXPRESSED IN PLACENTA, SIGNAL = 3.3; EXPRESSED IN HEART, SIGNAL = 3.5; EXPRESSED IN HELA, SIGNAL = 2.9; EXPRESSED IN FETAL LIVER, SIGNAL = 2.2
agctgataaaggccctcctggccttgccgatccggcctgcgacgcgtcgctggaggaacccgattccctttcccgagacgtttgacggcgataccgaccgactcccggagttcatcgtgcagacgggctcctacatgttcgtggacgagaacacgttctccagcgacgccctgaaggtgacgttcctcatcacccgcctcacagggcccgccctgcagtgggtgatcccctacatcaagaaggagagccccctcctcaatgattaccggggctttctggccgagatgaagcgagtctttggatgggaggaggacgaggacttctaggccgggagaccctcgggcctgggggcgggtgctctggggagggtccgctgtgttactggccgccgccagggtcgccaccggcgccctccctccgcgcctccctccccctcgagccgccgcgatgtcccctgcgctcctgttccctcccgcgtagtgcttgcctttgttccaggaatagcg

SEQ ID NO: 8241 - DNA, 599 bp, Homo sapiens
  MAP TO AC013827.4; EXPRESSED IN FETAL LIVER, SIGNAL =  78; EXPRESSED IN HEART, SIGNAL =  25; EXPRESSED IN PLACENTA, SIGNAL =  77; EXPRESSED IN BRAIN, SIGNAL =  59; EXPRESSED IN BONE MARROW, SIGNAL =  70; EXPRESSED IN ADULT LIVER, SIGNAL =  73; EXPRESSED IN HELA, SIGNAL =  63; EXPRESSED IN LUNG, SIGNAL = 2.2e+02
taacaagccctttcacctgcttctctaggatatctacaaaaattggtggtattggtactgtttctgttggctgagtagagactggtgttctcaaaccctgtatggtgctccagtcaatgttacaactgaagtaaagtctgttgaaatacaccatgaagctttgagtgaagctcttcctggggacaatgtgggcttcaatgtcaagaacgtgtctgtcaaggatgttcgtcatggcaacaatgctggtgacagcaaaaacgacccaccaatggaagcagctggcttcactgctcaggtgattatcctgaaccatccaggccaaataagtgctggctatgcccttgtactggattgtcacacggctcacactgcatgcaagtttgctgagctgaaggaaaagattgatcgctgttctggtaaaaagctggaagacggccctaaattcttgaagtctggtgatgctgccatcatttatatggttcctggcaagcccatgtgtgtagagagcttctcagactatccacctctgggtcactttgctgttggtcatatgagacagacagttgccatgggtatcatcaaagcagaggacaggaagg

SEQ ID NO: 8242 - DNA, 580 bp, Homo sapiens
  MAP TO AL121595.3; EXPRESSED IN HEART, SIGNAL = 2.5
aggaaagcatgaaggcacacaagtgataccattccaggcatgcccaccacccatccttttcttcatcctctatttaggagctgtatgagaccttaacacagggtgcagtaggccacgtgcctgacggaaatccaaggagggagagctggactcctcgtctcagctccgaagctgtctctgtgctctgggatctcctgaggcagtctccccagccagcacaggccctgctggagctcctgcttgaggaggatgacggtactggcctctgtcactggcctctgcagaatgcactggtggacctcattcgaaaggcattgcgggctttgcagggccctgattcggtgccccctggggtagtcgatgccatctatggagccctgcggactctgcgttgccccgcagaaccacttggggttgagttgcatctcctgtgtgaggaattactagaggcctgcaggaccgaggggagtcccctgcgggaggagcggctgctcagctgcctgctgcacaaggccagccggggcctgctgtccctgtatggccatacctatgcagagaaggtcacagaaaagccaccgag

SEQ ID NO: 8243 - DNA, 522 bp, Homo sapiens
  MAP TO AL138734.2; EXPRESSED IN PLACENTA, SIGNAL = 6.8; EXPRESSED IN BRAIN, SIGNAL = 4.5; EXPRESSED IN BONE MARROW, SIGNAL =   8; EXPRESSED IN LUNG, SIGNAL =  22; EXPRESSED IN ADULT LIVER, SIGNAL = 7.9; EXPRESSED IN FETAL LIVER, SIGNAL = 7.3; EXPRESSED IN HELA, SIGNAL = 6.6; EXPRESSED IN HEART, SIGNAL = 3.1
gttgacaaacgtccctgatgggttctcttcccctgcctgggtaccagtacctcattaatcctgatgagaaaatggcttgtttttctcctcctgctataaccaccacgacttcttatttcctgcagcatcctatggctctactttgagacgggtacctgggtgtatcctgtgtttgccaaactcagcctcttgggtctagcagctttcttctctctcagctacgtcttcatcgccagcatctacctacttggagagaagctcaaccactggaaatggggtcagtgtatttctttcttagctacagatgcgcttcttccgtgtctgcctctccccttcacctggaaacagaaagaaaaactagccgcaaacagaagcaatgatgcttactgtctttgtccaaagtactcagacaggtcctgccaagaggtcctgccaaggcaagaggacagcgttgggggtggggcactcttttaaaggaccccatcaaaggatctcccctcctcccccaaacaatgtgtcatt

SEQ ID NO: 8244 - DNA, 598 bp, Homo sapiens
  MAP TO AL133415.12; EXPRESSED IN ADULT LIVER, SIGNAL = 3.9; EXPRESSED IN FETAL LIVER, SIGNAL = 4.7; EXPRESSED IN HEART, SIGNAL = 6.2; EXPRESSED IN BRAIN, SIGNAL = 5.6; EXPRESSED IN PLACENTA, SIGNAL = 7.9; EXPRESSED IN BONE MARROW, SIGNAL = 7.7; EXPRESSED IN LUNG, SIGNAL =  19; EXPRESSED IN HELA, SIGNAL = 5.8
gcatccaagtctgagttccctacctgctctcctcgccttccagcagcttcctgtaggtggcaatctcaatgtcaagggccatcttaacattgagcaggtcttggtattcacgaaggtgacgagccatttcctccttcatattctgaatctcatcctgcaggcggccaatagtgtcttggtagttagcagcttcaacggcaaagttctcttccatttcacgcatctggcgttccagggactcattctgcagggggtgagaaagatgtctggtgttatttctcagaaaaacccagctgttcccagaaccatttacagaccttctgcaataatttccattagcggcaaatggcgaccactctaattttaggtggagaatgcgagtaccaagtccttcatattagaagcaatgatataggcaagctaaaaccttcaagagttccatgaagtcccttttgagtctgtcttgataactcattttctttgcattatgatatacatttttactcactcaacattttgttcaggtatcatcatgagcctagtcagcagaatgggtcattattttccctcttttactgcagggttggtactcacggtt

SEQ ID NO: 8245 - DNA, 548 bp, Homo sapiens
  MAP TO AL121997.7; EXPRESSED IN PLACENTA, SIGNAL = 1.8; EXPRESSED IN BONE MARROW, SIGNAL = 2.5; EXPRESSED IN LUNG, SIGNAL = 3.2; EXPRESSED IN ADULT LIVER, SIGNAL = 1.7; EXPRESSED IN FETAL LIVER, SIGNAL = 8.1; EXPRESSED IN HELA, SIGNAL =  12; EXPRESSED IN HEART, SIGNAL = 2.7
taagcaacttgcagttcgggctgtattttacaacattaggaatgatgaatttaaagatgttcacattacactggaccaaattaagatggctttctccctcttgcgatgtgcctcagccgtgatagtgaccagcttggagtttacagttacagtatagtctttgccagagacaatctttggtgttctaaggaaaaggctgccatggtggagatccatcatctcgcccttcaatttgtcttccatgacatcaacaagagcaagttcgcctgccaagtccttcattaagataccgatggcacaggccatgccaagagcaccaaccccaacaactgtaatcttattctggaggatctgttcttcctttagaagactgtgaataagctgatccttgagcgtatacttgagagtatattggacttggaaacaaaaggaatcgagaatgcacgtccggcgggtgttggggcacgcggcagtgagatccagactcgtcggcagcggctccagcaccttcgctacctttaaatacagtcagtcaaggaaaagcagga

SEQ ID NO: 8246 - DNA, 502 bp, Homo sapiens
  MAP TO AC008651.4; EXPRESSED IN ADULT LIVER, SIGNAL = 3.2; EXPRESSED IN FETAL LIVER, SIGNAL =  14; EXPRESSED IN HEART, SIGNAL =  23; EXPRESSED IN BRAIN, SIGNAL =  11; EXPRESSED IN BONE MARROW, SIGNAL = 2.8; EXPRESSED IN HELA, SIGNAL =  26; EXPRESSED IN LUNG, SIGNAL =  42; EXPRESSED IN PLACENTA, SIGNAL =  35
gtctcctgttccctgtgctcctctggacagcagcctctctggggcagccgcagaaggggtaggctagaaggggctgtcacggctgttcacttggtcagtacatcagacgactcagacactagctttccatcgtgggtctcgatcttcacaatcacagccctggtggagctggtgcagctgaaggaactggagcccgcaccagagccaaagctggagtccaggctgtagctgaggccagggcttatgaggcccccataggccgagctcagaccacctgaatagccgctggtggtcttcgtatggatactcatgttctgcatcccagactccagctggctctcctcatcctccagcagcttcctttaagtggtgatcttgatgtccaaggccagcttgaagttcatcagctcctggtactcccgcagctgccgtgccatgtcctgcttggcccgcccacctccagcttggacagcttggtgttggcatccttaactgccagctc

SEQ ID NO: 8247 - DNA, 565 bp, Homo sapiens
  MAP TO AC010251.3; EXPRESSED IN BRAIN, SIGNAL = 3.8; EXPRESSED IN PLACENTA, SIGNAL = 3.6; EXPRESSED IN ADULT LIVER, SIGNAL = 2.9; EXPRESSED IN FETAL LIVER, SIGNAL =  12; EXPRESSED IN HELA, SIGNAL = 4.9; EXPRESSED IN HEART, SIGNAL = 6.2; EXPRESSED IN BONE MARROW, SIGNAL = 2.6; EXPRESSED IN LUNG, SIGNAL = 2.7
gtaacaatgagcaatgggggtaacttcaactgccaaggaacagcacagaggacaaacaaatcatttaactatccaccacatgcccaactgcagctccctttggacaaaggacattggtatagtggagattaggaaagctgccaaaggtcccatggaaagtggaaggtaaaacctagctatgagcctacaaagtcctcagactcactcatgcagctttgcctttttccttcaaggccctacagaccatgcttatgcttaacttatgaaactagaagcatatacttgaattttgcaaaattctattttttatatgccactatcccatatttcttaccatcttcattttcatcaaacactggtggttttcttgaagtgttcgctcccatggttgaatctgcccagacctggatcctcgatttatactatccgggcagaaacacccatcttcgctcaaaacatgtcccgaagccttagttggatatctaggataggaaaagaaatagtaccctaataatatgctatactctaggcaccctgagtatagactgtggcggaaacataaacc

SEQ ID NO: 8248 - DNA, 571 bp, Homo sapiens
  MAP TO AC013533.3; EXPRESSED IN BRAIN, SIGNAL = 9.5; EXPRESSED IN PLACENTA, SIGNAL = 8.1; EXPRESSED IN HEART, SIGNAL = 7.1; EXPRESSED IN ADULT LIVER, SIGNAL =   7; EXPRESSED IN BONE MARROW, SIGNAL = 6.9; EXPRESSED IN HELA, SIGNAL =  10; EXPRESSED IN LUNG, SIGNAL = 4.4; EXPRESSED IN FETAL LIVER, SIGNAL = 6.3
tgcagttactccagtgtgggtcaccatctatatgtcagctccctaggcatctcattaagtactcacagttggtcccaagtgctttgttggtgctcctcctatgtataagctgacttagtccttgtggcacctgttatgggtcaggacaggtggcacccatctcacaggtgctgccagagaggcgttgagcagtaggcagtttgcacccaggaacccgggcagtctgtttttttctgtttggccttctctcataccagcttgttggattcagctctttcttccacctgaaggccttgaacatctaacacacacacacacacacacacacacacacacacaccctctagctttgaattctcaccatgtttctattctatcaactacttgtagaatgttctgtattgatatgcagagagcctgtcaaactgtttttttctccctccccactgcctacacctgacacagggacttctgcgtcccttaggtttgttttttttttctttctaaatgattaaaagcatgaagctgccatgttctgctgtgcttacccggtctgctcccaggcttgtag

SEQ ID NO: 8249 - DNA, 501 bp, Homo sapiens
  MAP TO AL158848.1; EXPRESSED IN PLACENTA, SIGNAL = 2.8; EXPRESSED IN BONE MARROW, SIGNAL = 3.7; EXPRESSED IN BRAIN, SIGNAL = 3.6; EXPRESSED IN LUNG, SIGNAL = 5.7; EXPRESSED IN HEART, SIGNAL = 3.3; EXPRESSED IN HELA, SIGNAL = 4.5; EXPRESSED IN FETAL LIVER, SIGNAL = 4.4; EXPRESSED IN ADULT LIVER, SIGNAL = 3.7
atccccatagcacctcttcctaaacaggacattctgaataagagggactaaaatgtcttgaatacacaaatcacttacttgtattgcaactcgagcagcagggatgatttcctcaaccctaatagaagacctatcagacacggacaactgtcggtaggatgacttttctggggtaccacataaggacatctgtctgcttgtctgccggctgacatttcggaatgggcgggaagaaagtgcttctataccatctttggtgaggtcttcatctaataacgtgggcattgtttgtccgacaagtaaaaatcttaaaaagaaacagctagacttattctgagtccattcatactatttaaaaacatgatttgcgaagaaaaagtcaagtattgcctggtaagactaatgcaatatatttacataccttgcaagctgtagacagatggaataaacaccctgccttgtttcatagtctacttctgatgggatggagtctctctgcat

SEQ ID NO: 8250 - DNA, 562 bp, Homo sapiens
  MAP TO AL096814.26; EXPRESSED IN BRAIN, SIGNAL = 6.5; EXPRESSED IN PLACENTA, SIGNAL = 5.7; EXPRESSED IN HELA, SIGNAL = 8.6; EXPRESSED IN ADULT LIVER, SIGNAL = 5.8; EXPRESSED IN BONE MARROW, SIGNAL = 4.9; EXPRESSED IN FETAL LIVER, SIGNAL = 7.2; EXPRESSED IN LUNG, SIGNAL = 9.7; EXPRESSED IN HEART, SIGNAL = 6.8
tttacctacccacagccacccattcagatgccagggaaaggaaggacaaactttaactgctgctgagaagagagacctccctttatcattgtcaataggtgggcatggcacagctgtcttagcccgaatataggtcactcctcctgcagtgagcagcccttccccttggggacctgaggtcacaggggtgagggtgaagggtcgggggcttccgtttggctcaggcctaggagcgccacaagaccaagttggcaggaggcacatcaaagcgcttgcgggtgtggtcagtgtcccggcggtacaggtagccacaggtaggcttctgcaaagtgtagaaggggttcagggagttggagtactgggaggtgtagaaattgaacctgagcttgtccggattctgccccttagagtccacaacgaccggcacataggctgctgccagagactgctcgaggtcctgcttccacgcccggggccgggacgagtgtggagccttcacccccttgcatgacggtgtctttggcccatgactgggtacagagggtttctgtgagtcctggga

SEQ ID NO: 8251 - DNA, 527 bp, Homo sapiens
  MAP TO AC012683.3; EXPRESSED IN BRAIN, SIGNAL =   3; EXPRESSED IN PLACENTA, SIGNAL = 2.5; EXPRESSED IN ADULT LIVER, SIGNAL = 2.3; EXPRESSED IN BONE MARROW, SIGNAL = 2.1; EXPRESSED IN FETAL LIVER, SIGNAL = 3.5; EXPRESSED IN HELA, SIGNAL = 4.2; EXPRESSED IN HEART, SIGNAL = 3.1; EXPRESSED IN LUNG, SIGNAL = 2.8
acagcaactggctggaaaagaaagggaaaagaatcatggatttgattttgattcctttattgcaggaactattcaacttagttcccaacatgagcctactgatgttgttgataaattaaatgacttgaatagctcagtgtcccaactagaattgaaaagcttgatatcaaagtcagtaagccaagaaaaacaggaaaaaggaatggcaaatctggctcagttagaaaccttgtaccaatcttcttgggacagccagtgtgtgagtggtggggaggactgttttctcatcaatcagttttgtgacgtaaggaaggatgaacaagttgagaaagaaaacacttacactcgttacttggacaagttctttagcaggaaagaagatactgaaatgctagaaactgagccagtagaggaagaagagcttggggagagaggaaatgaggaaaggtttctgaacaacagtggggagttcctctttaacaagtttcagtcgcgtccatgtgaagagaccaccaaacaggctttgt

SEQ ID NO: 8252 - DNA, 550 bp, Homo sapiens
  MAP TO AC011462.3; EXPRESSED IN BRAIN, SIGNAL =   2; EXPRESSED IN ADULT LIVER, SIGNAL = 1.7; EXPRESSED IN BONE MARROW, SIGNAL = 2.4; EXPRESSED IN FETAL LIVER, SIGNAL = 1.6; EXPRESSED IN HEART, SIGNAL = 2.9; EXPRESSED IN LUNG, SIGNAL = 4.6
atacaacgccacaaaggaggcccgacggcgggctgtggcagagaaccagcccttcctcatcgaggccatgacctacaggtgcctgccgctccccccgtcagcacccccacagcactgacagccaccgtagcatcttcctcatatcgatcactgtctccaaaacatggccttatcacctgatgttgcatctcccccttgcctttattccgtttccactcctccttccctagttcatcccccatcctccctcctgacccccactccagggagcccacactgacctggggccccttgcccctgtgcaggatcgggcaccacagcaccagtgacgacagttcagcgtaccgctcggtggatgaggtcaattactgggataaacaggaccaccccatctcccggctgcggcactatctgctgagccaaggctggtgggatgaggagcaggagaaggcctggaggaagcagtcccgcaggaaggtgagggtgccccgcccgggagggtgtgctgggggctgctgcggcctgcagagcttgggaaggatttgtggaa

SEQ ID NO: 8253 - DNA, 590 bp, Homo sapiens
  MAP TO AC008481.4; EXPRESSED IN PLACENTA, SIGNAL = 5.8; EXPRESSED IN BRAIN, SIGNAL = 3.6; EXPRESSED IN FETAL LIVER, SIGNAL =  11; EXPRESSED IN HEART, SIGNAL = 7.8; EXPRESSED IN ADULT LIVER, SIGNAL =  11; EXPRESSED IN BONE MARROW, SIGNAL =  17; EXPRESSED IN HELA, SIGNAL =  12; EXPRESSED IN LUNG, SIGNAL =  12
cgttcctgagtttacgtggggcacacctgggtgagggccctacccctagaagaaggtgttgggccttttggtggtgaagcgtggcttgtgctgatggcgcaggacctggtggggcagcgggaacttgatcttggagtcttggaactgcttgacggccagccggtgggacttgctggctgctatctcctccatcttcatgatctggatggaatgggtccaggtggggtaccgggcgcccatgtctcggtagcactgggtgacagcgcccgtggtggtcaggtcccaatattcctggtacatgttgtgggtgctgctctgggagtttgtagcgcagccagatgccgaagttcttcacccgcaggcggtacttctcgaatgcctgcccacagttgacagtctccccgaagacttcttcatcttctttagctgagatacaaagtaccagaagtgggacttggcaacgacatgatcaggtgcaaagattcgcatgtggtagaggggtggtgtgtggcatttgggagtgagcaggcagcaacccaccaccttgtactcttgtagtgtgcccgaggccttcatggcatcctctccat

SEQ ID NO: 8254 - DNA, 566 bp, Homo sapiens
  MAP TO AC011989.3; EXPRESSED IN BRAIN, SIGNAL = 1.3; EXPRESSED IN PLACENTA, SIGNAL = 1.5; EXPRESSED IN HELA, SIGNAL = 2.9; EXPRESSED IN FETAL LIVER, SIGNAL = 3.3; EXPRESSED IN HEART, SIGNAL = 2.6; EXPRESSED IN ADULT LIVER, SIGNAL = 2.2
ccgataaattttcgctggactcaagcagttcttttatacttatgtagttatggttttgattacaattacaaccttaaggagtggatatttgctcttttatgcctaacactatttcatagtagcagctcaataaattcatattgattatgatattggcaaataattggtattctgtgatttctccatgactatttctattaatgttgaattcttaatccaatattgtggccagctacattgatttgaaatagtaaattaagggttaggcaatatggctgtctttatcttcattcagatttttctgtacttacctcacatagctgatgcttctgagagctaagagttgcaatatcaatatatttggaatatgattttttaaatttttttctatactcattaaaaatgtccagttgatacttgaagcttcttgctgtagctgaaaagaaataatgtaagtaggaattatgaggggaaagtaatagtctctagtagtagttttcagagatgaagttcttgcaaaatttaccagactaacaatataggagacaagggtttgggcattattc

SEQ ID NO: 8255 - DNA, 592 bp, Homo sapiens
  MAP TO AL158800.1; EXPRESSED IN ADULT LIVER, SIGNAL = 3.9; EXPRESSED IN HEART, SIGNAL = 3.3; EXPRESSED IN PLACENTA, SIGNAL = 2.9; EXPRESSED IN BONE MARROW, SIGNAL =   3; EXPRESSED IN FETAL LIVER, SIGNAL =   4; EXPRESSED IN HELA, SIGNAL = 4.1; EXPRESSED IN LUNG, SIGNAL = 2.6; EXPRESSED IN BRAIN, SIGNAL = 3.5
tctaactgggtgaccttggctggtctatttgctgagcctgacttcatttcctcatatagatgtggatatggatatgggcatgggaaaagataaagatataggaataaaaataagtatggatgcagatctacgtatagatataggtataggtatgcgtgtgaatatagatatggaaaaaagatatagatatggaaatctggacatagctatagaaacagaaaagagataaagatagatatggaaaagctatagacatggaaatagatacagatatattatagatgaggtgggatttgtggtaatgatatttacctggcctacttcacaggctcaatggcaaacagatgaaagaatgcttgctattgttttttcgtaaattgaaagtgtgaaaaatatcaacatcacctccacttgaagagtgcttagtgctttttcaaagaatttagcaatttgaatgctatgtgagtaagagagcttggggaggaagtgtcataactggagtttgctcctgcattcatccttctacagttattcacagcctctcattgagtgcttagtaggtagagaagagagtttgcttttctcagcctgc

SEQ ID NO: 8256 - DNA, 539 bp, Homo sapiens
  MAP TO AC023009.3; EXPRESSED IN BRAIN, SIGNAL = 2.2; EXPRESSED IN PLACENTA, SIGNAL = 3.3; EXPRESSED IN BONE MARROW, SIGNAL = 2.1; EXPRESSED IN HEART, SIGNAL = 3.2; EXPRESSED IN ADULT LIVER, SIGNAL = 4.2; EXPRESSED IN HELA, SIGNAL = 2.1; EXPRESSED IN LUNG, SIGNAL = 3.8; EXPRESSED IN FETAL LIVER, SIGNAL = 2.1
accaaatgaacttccccctcctgctgtcaaagagcagtcagtggccaccgctattgacctgagctctaattaggctggttttataatgaggaaaagagtgcgattctaattagtaaatttccatctctttctcaataggtatcctccagtcaaagcaatcagctatcctcatcacactggttccattgccaaaaaaataactgtatcataaaactctagtaaaagtgatgatggttaagacaacaagagagcagaacgaggttttatttggtgctaatgacctgcattctctctcttaggtccgtggcactcaggtagttggttctgacatgactgtgacagttgagtttaccaatcctttaaaagaaaccctgcgaaatgtctgggtacacctggatggtcctggagtaacaagaccaatgaagaagatgttccggtaaaccttgggttggggagaccgggcaggcagtgcagggctgtgggaagctttctctgtgtgtgtcttttccaaacatagatctgctccccagtgaaaatgt

SEQ ID NO: 8257 - DNA, 564 bp, Homo sapiens
  MAP TO AC016537.2; EXPRESSED IN BRAIN, SIGNAL =  11; EXPRESSED IN PLACENTA, SIGNAL = 6.7; EXPRESSED IN BONE MARROW, SIGNAL = 3.8; EXPRESSED IN LUNG, SIGNAL = 3.6; EXPRESSED IN ADULT LIVER, SIGNAL = 5.7; EXPRESSED IN FETAL LIVER, SIGNAL = 6.6; EXPRESSED IN HELA, SIGNAL = 5.8; EXPRESSED IN HEART, SIGNAL =   4
tgatgtgtagggaagggagggggcatgaataatccctgaggagtagtagaatagcagatggaacactgcgaagttatttccttgaggatagatttccacgatggaaagaaaatgagaggttctaagaggcgggctagtggcttgtactatagcatagcctgcctttgctggtgtgtggtgattaggcctggtggaacggccatcaataaatcaagcgtgatcagggtgaggaatgggaaagaaggaaatatggggaaatggggtgaatgtcaggtggatcagagagatgcagtcatgggggtcaggtgtggtatcaggaataaagtgggaggccggattgaagtccgggccaggaacaatggcaactgtgggagactcaacaaagagtgagtacagctgaaggagccggggagcagaaaatatatgtgtcaggtgtgaggaagaaaatagattttggaagttacgagaactgtagagagtgagttgagcatagtttgtgattttaagggcctctaaaagtattagggcggcggcggccgctgcacacagacttgagggctaggc

SEQ ID NO: 8258 - DNA, 573 bp, Homo sapiens
  MAP TO AC010620.3; EXPRESSED IN FETAL LIVER, SIGNAL = 9.8; EXPRESSED IN HELA, SIGNAL =  22; EXPRESSED IN LUNG, SIGNAL = 3.7; EXPRESSED IN PLACENTA, SIGNAL =   4; EXPRESSED IN BRAIN, SIGNAL = 1.8; EXPRESSED IN HEART, SIGNAL = 7.1; EXPRESSED IN ADULT LIVER, SIGNAL = 3.4; EXPRESSED IN BONE MARROW, SIGNAL = 6.9
tggcctgcaacacatttaagtattttttttgtaaattttttgtatatggttcaaggaaatgatgtaactttattttatcagtgttgatattcagtttttttttaacataaattcaagattttattgtcttcataataaaggatgacactttagaactggatcacttggccctttctcttatctactcccagttcaaaatgcttgcatcttttaatagccagcattctctaagatctgcatttgggctcaatgcactcaagacttagcacaatcttctttgtagttttagcctttttctggaaaatcggcttagtttgcccatcatagccattctgcttcctgtcataatgctgctttccctgggcatacagagaatccttgcccttcttgtactgtgtcactttgtggggttggtgcttgccacacttcttacagaaagtccagtgggttttagggacattcgccatgtttgtgtgagtgctgtcagcatggaaagcgatagtaagtttttaacattattttttgagaagactgatcatcttttctctattgtgtgcttatggcaactttgca

SEQ ID NO: 8259 - DNA, 528 bp, Homo sapiens
  MAP TO AC016939.8; EXPRESSED IN HELA, SIGNAL =   3; EXPRESSED IN HEART, SIGNAL = 2.9; EXPRESSED IN BRAIN, SIGNAL = 3.1; EXPRESSED IN ADULT LIVER, SIGNAL = 3.7; EXPRESSED IN BONE MARROW, SIGNAL = 2.3; EXPRESSED IN FETAL LIVER, SIGNAL =   3; EXPRESSED IN LUNG, SIGNAL = 3.2; EXPRESSED IN PLACENTA, SIGNAL = 2.2
accctattggacagtgctggctagatatattggttcccaaagtaagattacttccacctggaaaaaaacaatttaatgggactctttccattaaatttcaagctattgctcccatctgcgcactttgagcttctcatgctataggaccagcaagcataaaaaggagttgccatgcttgcagggatattggctctgatcatcaggaggaggtagggctgcccttatacaatgggaacagagaggaatgtttggctctcgagtgaccccttgaatgtgtcttcgtagtcccctgccagatttctatagtatagggacaattgtaagtgccacagcctgagaaggtcgtggaggaccaggagcccagaaccttccgggatgagggtttgcactactctattgggtaagtaatagagaacagcaaagattctggttgaaaccgacagtactctagaatggatagtagacaaggaacagaattatcatcagttgtggcttagaggccagctgccacagagggcctatcgtttg

SEQ ID NO: 8260 - DNA, 513 bp, Homo sapiens
  MAP TO AL132987.2; EXPRESSED IN PLACENTA, SIGNAL = 2.5; EXPRESSED IN FETAL LIVER, SIGNAL = 3.6; EXPRESSED IN LUNG, SIGNAL = 2.1; EXPRESSED IN ADULT LIVER, SIGNAL = 2.7; EXPRESSED IN HEART, SIGNAL = 2.9; EXPRESSED IN BRAIN, SIGNAL = 2.2; EXPRESSED IN HELA, SIGNAL = 3.6; EXPRESSED IN BONE MARROW, SIGNAL = 2.4
actccagccaattgtccaagggcatcagtattcccaaagcccagtcaccctgggtggaaggggacagtgacctgaagcaagtcattggctctctcctcggcctctgctttctcccctggagcacccaggacagggcctgtgccatcagcccttccctccaagtagccatgggtccagggagatgtggcaggggtggggagaaagagtattgtctccattggatagatgcggtggctgatgtctttaggctgaaagcccagtggagctgtggggttgcagggtgctgtggcaggttttccttctatctatgcccccattcccatgcccgatatccaagaacccctccccatccctgctgtcacactgcctgaacacaaccgcctgagaactgacctgcccaggaggtgagactcacaagtgttcgctgtcctgtgagcactcctggagagcgcagtttcctgccaggatgataaacggctgctctccagtcctggcccagacctgtcacttctc

SEQ ID NO: 8261 - DNA, 541 bp, Homo sapiens
  MAP TO AC009181.5; EXPRESSED IN BRAIN, SIGNAL =   2; EXPRESSED IN PLACENTA, SIGNAL = 2.1; EXPRESSED IN BONE MARROW, SIGNAL = 2.2; EXPRESSED IN LUNG, SIGNAL = 2.7; EXPRESSED IN ADULT LIVER, SIGNAL = 1.7; EXPRESSED IN FETAL LIVER, SIGNAL = 3.3; EXPRESSED IN HELA, SIGNAL = 3.6; EXPRESSED IN HEART, SIGNAL = 3.6
gaaatatggctctgttccgcccggctcaccggcggtcagagtttaaggttctctctcttgttccctgaacgttgctgttatcctgttcttttttcaaggtgcccagatttcatattgttcaaacacacacgctctacagtttgtacagttaacgcaatcatcacagggttctgaggcgacatacatcctcctcggcttacgagatgacaggattaagagattaaagtaaagacaggcataggaaatcacaagggtattgattggggaattgataagtgttcatggaatcttcacaatttatgtttagagattgcagtaaagacaggcataagaaattataaaagtattaatttgggaactaataaatgtccatgaaatcttcacaatccacgttcttctgccatggcttcagctggtccctccgttcggggtgcctgacttcccgcaacatatacacctaggagtgaaatcacagggtcatatgataactgtttaacttttgagaaacctccagactcttttccaaagcagctacaccacc

SEQ ID NO: 8262 - DNA, 581 bp, Homo sapiens
  MAP TO AC007115.1; EXPRESSED IN PLACENTA, SIGNAL =  12; EXPRESSED IN BONE MARROW, SIGNAL = 1.5; EXPRESSED IN LUNG, SIGNAL =  19; EXPRESSED IN ADULT LIVER, SIGNAL = 2.2; EXPRESSED IN FETAL LIVER, SIGNAL = 1.5; EXPRESSED IN HEART, SIGNAL = 4.6
aaaagacgctgttagatgcactaaaaatagctataaaataacaaaatgcacattttctaatgaatttaatgttgcaaattgaatgtctttttcttgaaagtatatatttttttaattaataaatgtttcatctttatttaggattcaaaccatttgccaaaaatgagtctaagtgcatttactctcttcctggcattgattggtggtaccagtggccagtactatgattatgattttcccctatcaatttatgggcaatcatcaccaaactgtgcaccagaatgtaactgccctgaaagctacccaagtgccatgtactgtgatgagctgaaattgaaaagtgtaccaatggtgcctcctggaatcaagtatctttaccttaggaataaccagattgaccatattgatgaaaaggcctttgagaatgtaactgatctgcagtggctcattctagatcacaaccttctagaaaactccaagataaaagggagagttttctctaaattgaaacaactgaagaagctgcatataaaccacaacaacctgacagagtctgtgggcccacttcccaaatctctgga

SEQ ID NO: 8263 - DNA, 509 bp, Homo sapiens
  MAP TO AP001251.1; EXPRESSED IN BRAIN, SIGNAL = 6.5; EXPRESSED IN HELA, SIGNAL = 9.7; EXPRESSED IN ADULT LIVER, SIGNAL = 4.8; EXPRESSED IN BONE MARROW, SIGNAL = 5.5; EXPRESSED IN FETAL LIVER, SIGNAL =  12; EXPRESSED IN HEART, SIGNAL = 9.3; EXPRESSED IN LUNG, SIGNAL = 3.4; EXPRESSED IN PLACENTA, SIGNAL = 7.9
aggtgttgggtaaatgcagcagttccaaatgggagaaattggccaaaacaaaagggttacttatgaaaatttctgcagctgccttgaatttctccccagaatatggatttttcttttctatcacatattcaggctgcatattttccaaactcttatgctctgcttctcctataaaactaaatgcctttaacagtacccgagatacctcttgaatgctttgctgcttagaaatttcttctgccagatactctaaatcatctttctcaagttcaaagttcaacaaatctctagagcagggacaaaatgccaccagtctctttgctaaaacataacaagagtcacctttactccagtttccaagaagttcttcatctccatctgagtccgcctcagcctggaccttactgtccatatcgctatcagcatttttggcagaaccactcaacaagtctctaggaagttccaaattttcccatattttcctgtcatcttctgagccctccaaactg

SEQ ID NO: 8264 - DNA, 566 bp, Homo sapiens
  MAP TO AC018836.2; EXPRESSED IN ADULT LIVER, SIGNAL = 7.4; EXPRESSED IN HELA, SIGNAL =  11; EXPRESSED IN HEART, SIGNAL =  11; EXPRESSED IN PLACENTA, SIGNAL = 6.6; EXPRESSED IN BONE MARROW, SIGNAL =  10; EXPRESSED IN FETAL LIVER, SIGNAL =  11; EXPRESSED IN LUNG, SIGNAL =  29; EXPRESSED IN BRAIN, SIGNAL = 6.7
agagttcctgccagaagtgctcacacagatgcaaacttctgatcactgaaaactagaggtgggacccaactcacttgttgcacatcagcagcacttccagctccttgacgttgtggaccaggaacttccggaagccactgggcagcatgtgctttgtttttttgttgcttccataaccaatgttgggcatcaagatctggcccttgaatcttctacgaaccctgttgtcaatgcctctgggtttccgccagttacgctgaaggaaataatacacaggtgggttagcgtctgtgcagagtgcgaactcttccttttggggagggaaaaaaaggaccaaatgaaaaggaagtatgccacacagtagttgcctttggtaacaggacttcactatttccttacttttttggtgggaaaaaccaggagctcgtggctttagccactagggatgaaggcacccccaccattgccactcccaagcaatggaggaggcaccaatgggatgcgaggggactgtgtagatactgagatggcaagcacagctgcagacactgctctcagcacctgag

SEQ ID NO: 8265 - DNA, 586 bp, Homo sapiens
  MAP TO AC010311.5; EXPRESSED IN PLACENTA, SIGNAL = 9.7; EXPRESSED IN BRAIN, SIGNAL = 9.6; EXPRESSED IN HEART, SIGNAL =  19; EXPRESSED IN ADULT LIVER, SIGNAL = 9.9; EXPRESSED IN BONE MARROW, SIGNAL = 9.2; EXPRESSED IN HELA, SIGNAL =  22; EXPRESSED IN FETAL LIVER, SIGNAL =  21; EXPRESSED IN LUNG, SIGNAL = 8.2
tggcattagattgttgggtgagtaacatgtgaccctatgggatgtaacttcccaggcctcatctgcacggcactcagtgtgacggtcttgtaagggtaactgccttctgctgttttgtcttgaaagcccttatcagaatgtgacggagttcgacgggcaggatgcgtgtggttccaacagttggacggtggtagacattgacccacccctgaggtccaacgaccccaaatcacagaaccacccagggtggctgatgcggggtctcaagccctggacccagtatgccatctttgtgaagaccctggtcaccttttcggatgaacgccggacctatggggccaagagtgacatcatttatgtccagacagatgccaccagtgagtgtgtcttgggaatgtgaattcgtatgtgaatcagacctcttgcttttaataggctgatgcagtgaggttgtataaaatgctccttgatatggttattggctttttttttttttttagacagggtcttactttgtcacccaggctagagtgcaatgcagtggggtgatcatggctcactgcagcctcaaactcctgggctcaag

SEQ ID NO: 8266 - DNA, 591 bp, Homo sapiens
  MAP TO AC008553.3; EXPRESSED IN PLACENTA, SIGNAL =   2; EXPRESSED IN BRAIN, SIGNAL = 2.2; EXPRESSED IN BONE MARROW, SIGNAL = 2.1; EXPRESSED IN ADULT LIVER, SIGNAL = 2.2; EXPRESSED IN HELA, SIGNAL = 3.1; EXPRESSED IN HEART, SIGNAL = 3.2; EXPRESSED IN FETAL LIVER, SIGNAL =   3
ctagtccaagaccaccagggcagtatctctacaagttggcaagaaccacagtgttactgaagttggggccctcctaaagcagatacagcttaggtcacaacaccaaagtcctttcaaatatctggaaagccttcccatgaaggatgagtactataagcccagactgtgaagactgtaataaatacctaatccttcagtgcccagacattgaagaacatctactagcatcagtaccatccaggaaacatgacttcataaaatgaaccaagtaaggcaccagggaccaatcctggagaagcagatatatgtgacctttcagacagaccttcaggtagctgtgttggggaaactcaaagaaattcaagttaacacagagaagaaattcagaattctattggatacatttaacaaagagattgaaacagttaagcagaagttctacagttgaaaaatgcaactgacatactgaagaatgaatttgaggcttttaatagcataattgattaagtagaaaaaggaattagtgagcctgaagacaggctgtttgtaaatgcacaagatttagaaaatagcctcaaaagggcaaatcta

SEQ ID NO: 8267 - DNA, 535 bp, Homo sapiens
  MAP TO AC011431.2; EXPRESSED IN BRAIN, SIGNAL = 1.9; EXPRESSED IN PLACENTA, SIGNAL = 1.9; EXPRESSED IN ADULT LIVER, SIGNAL = 1.8; EXPRESSED IN BONE MARROW, SIGNAL = 1.7; EXPRESSED IN FETAL LIVER, SIGNAL = 2.2; EXPRESSED IN LUNG, SIGNAL = 2.2; EXPRESSED IN HELA, SIGNAL = 2.1; EXPRESSED IN HEART, SIGNAL =   2
tcaggtgactccttccatcccaaaccttccctctggtacaggaggtctgagacaaccttccggaacattttgagaacgggctagtattcatcttgaaagctgcaatgactcggatccaaagtgctgacctccgggtcactttttaacttgccctgaattagtttcttgccttcctttcaatcctctcaacaaacccagcctcctacttcatcagcacccagtgggtctcaaacctgtgcatgggaaaatgccatccacagaccagggctggcccgggcaccttctacaggaccatccgaggagctcagcagagcgacatcatggaaaacctgacttgttctctcaggaccttgatactttggactgatgtgcaatgatccacggggaaatgacaccatcactatgactgtgatagagacttcctcgatactctcaggtttctagctactctgtctccatgcccttccttagggaacactttaatcagttccctttagaggaatttcactcccttgggggtgaatcttgagcaaaa

SEQ ID NO: 8268 - DNA, 569 bp, Homo sapiens
  MAP TO AC010361.3; EXPRESSED IN BRAIN, SIGNAL = 2.2; EXPRESSED IN PLACENTA, SIGNAL = 1.9; EXPRESSED IN HEART, SIGNAL = 4.2; EXPRESSED IN BONE MARROW, SIGNAL = 1.8; EXPRESSED IN ADULT LIVER, SIGNAL =   2; EXPRESSED IN HELA, SIGNAL = 4.1; EXPRESSED IN FETAL LIVER, SIGNAL = 3.7
agtgggaagaaactcactcccatgaagtaaccactgttaacaatttaacactttctagtgtaaccttctagaaatcatctatgcatttaaaaataaatattcatatgcaaatatcttactttttatcttcaacttttattttaagttcaggggtacatgtgcaggatgtggaggtttcttatgtaggtaaatatgtgccatggtggtttgctgcatggatcatcccatcacctaggtattaaacccagcattaattagctattcttcctgatgctcttcctccctctaccctcaacccccgacaggctcagtgtatgttgtttcccctgggaacgaatgagaacaaatgtgaccataggttctcattgtacagctcccacctatgagaacatgtggtgtttgtttttctgttcctgcattagtttgctgaggataacagcttccagatccacccatgtccctgcaaaggacatgatcttgttcctttttatggccacgtagtattccatgttgtatatgtaccacattttctttatccagtctattattgatgggcattttggtgattc

SEQ ID NO: 8269 - DNA, 515 bp, Homo sapiens
  MAP TO AC024127.1; EXPRESSED IN BONE MARROW, SIGNAL = 4.8; EXPRESSED IN LUNG, SIGNAL = 4.2; EXPRESSED IN PLACENTA, SIGNAL = 4.8; EXPRESSED IN BRAIN, SIGNAL = 7.1; EXPRESSED IN ADULT LIVER, SIGNAL = 5.4; EXPRESSED IN FETAL LIVER, SIGNAL = 6.9; EXPRESSED IN HELA, SIGNAL = 6.8; EXPRESSED IN HEART, SIGNAL = 5.2
actgacacctggctaatgggaccttgtgcttggggacgcatagggggtacagggcttgccgcggtgtcactgggcatgtgcttggaaggacttggacgagtgctcatggggctgcttgtgtttgctgtggtcgctacagtctgagcacgtgtggccaatgtggccagggttgctgttcttggcaacgcgctgctctttggcacttgtgcgagggctgtgctgagagatggatgcccagtggcggtagtggacggggtccgccctgtggaagtggacgtgggcgcggggagtgcaagtgtcatgggagtgctggaggccgcagtcatactggaggctgtagtcgtgggagcaatggaggccacagttgtactggaggctgcagtcgtgggagcactggaggccacagtcatactggaggccgcagtcgtaatggaggccgcagtcgtactggaggccacagccgtgggagcaatggaggtcacaccatcagctgcacctcctgaagttgctggttc

SEQ ID NO: 8270 - DNA, 529 bp, Homo sapiens
  MAP TO AL133233.2; EXPRESSED IN ADULT LIVER, SIGNAL = 2.5; EXPRESSED IN HEART, SIGNAL = 2.8; EXPRESSED IN BRAIN, SIGNAL = 2.3; EXPRESSED IN PLACENTA, SIGNAL = 2.6; EXPRESSED IN BONE MARROW, SIGNAL = 1.8; EXPRESSED IN FETAL LIVER, SIGNAL = 2.5; EXPRESSED IN HELA, SIGNAL = 2.7
tcagacaaaggtggaaaggctgatggcaacatcggtcagggagggaatgttgccaccactggggatggggaagctgttccttctggcaaaaaaaggttcatagagtttacaaactcagtgtccccagctgcaagaggatcctgccacatgtgcccattccaacttgcagagtaccattcttttccaatcaatgccctcactttaacaatagacacctggtgaggctgtgcatgtaccttttgttgcaagtcagccactcgcatgataagagtttgtgtctgtttttccacaatttcagctctttctctataggagataagactcccactcagggcaatcttcgcagatttgaggctcagtatctgcttctgaagccaggagacagaatctctgagttcatcattttctttcatcactctgtccgctgaacttaggagcaaccaaccggcttcatatcgttccttggttctccacatatggtcaaaagtattatgtacagaggcactaaactcattgcctctcacaagca

SEQ ID NO: 8271 - DNA, 585 bp, Homo sapiens
  MAP TO AC002060.3; EXPRESSED IN BRAIN, SIGNAL = 1.4; EXPRESSED IN BONE MARROW, SIGNAL = 1.5e+02; EXPRESSED IN HEART, SIGNAL = 1.8; EXPRESSED IN LUNG, SIGNAL =  86; EXPRESSED IN ADULT LIVER, SIGNAL = 3.7; EXPRESSED IN FETAL LIVER, SIGNAL = 1.9
ccgagagatctcaggacaggtggtcaggtgtctaaggtaaaacagctccccgtgcagatcaggacatagtggaaaacaccctgacccctctgcctggcatagaccttcagacacagagcccctgaacaagggcaccccaacacctcatcatatactgaggtcaggggctccccaggtggacaccaggactctgaccccctgcccctcatccaccccgcaggtcagcccaaggctgccccctcggtcactctgttcccgccctcctctgaggagcttcaagccaacaaggccacactggtgtgtctcataagtgacttctacccgggagccgtgacagtggcctggaaggcagatagcagccccgtcaaggcgggagtggagaccaccacaccctccaaacaaagcaacaacaagtacgcggccagcagctacctgagcctgacgcctgagcagtggaagtcccacaaaagctacagctgccaggtcacgcatgaagggagcaccgtggagaagacagtggcccctacagaatgttcataggttctcaaccctcaccccccaccacgggagactagagctgcagga

SEQ ID NO: 8272 - DNA, 539 bp, Homo sapiens
  MAP TO AC000134.14; EXPRESSED IN BRAIN, SIGNAL = 1.6; EXPRESSED IN PLACENTA, SIGNAL = 1.6; EXPRESSED IN HELA, SIGNAL = 1.8; EXPRESSED IN BONE MARROW, SIGNAL = 3.3; EXPRESSED IN LUNG, SIGNAL = 3.6; EXPRESSED IN ADULT LIVER, SIGNAL = 1.8; EXPRESSED IN FETAL LIVER, SIGNAL =   2; EXPRESSED IN HEART, SIGNAL = 2.1
gaaactgtcaacccctggtgcccagctccccacctccctgccccctgctcctcaccgtgagcaggctcagcaggtcggggttggcctgtactggtggccgcaggctggtcaccatggccagctcctccaggatgctaaagagctgcttcatcttggccccgttgagccgggtccgggctgggtccagccagtcaggcagtgccagctgcagggccaccaggtccttgaggtgcacacccaggatcgggaagcggaagcccacacaggctgccagccgacgccggtagttgccatagttgcctgtcgccgtcactagttccgtgagaccctcccagagctggggacaaaggacagaggagtcatacccccacaactatcctccctacctcagccctggaaatgtaggagggggtgaggaggagtcagggtcagggacaggtgaaagagtaaaaacctcccttactgtcccccacgactggctctctcagcccctggggattgaattcattgccatgaattcaaggcaatactcactgcca

SEQ ID NO: 8273 - DNA, 564 bp, Homo sapiens
  MAP TO AL133475.14; EXPRESSED IN PLACENTA, SIGNAL =  14; EXPRESSED IN BONE MARROW, SIGNAL =  50; EXPRESSED IN HELA, SIGNAL =  41; EXPRESSED IN LUNG, SIGNAL =  25; EXPRESSED IN ADULT LIVER, SIGNAL =  27; EXPRESSED IN BRAIN, SIGNAL =  53; EXPRESSED IN HEART, SIGNAL =  49; EXPRESSED IN FETAL LIVER, SIGNAL =  39
tcagggatgaccttcctcacagccttggcagcccagtagtggcagggatgatgttctggagagccctgtggctgtcacgccacagtttcctggaggggccattcacagtcttctgggtggcagtgatggcgtggactgtggtcatgagtccttccacgataccaaagttgtcagtgatgactttggccaggggcgctaggcagttggtggttcaggtggcattgctgatgatcttgaggctgttgtcatacttctcatggttcacacccatcgtgaacatggggggatcagcagagggggcagagatgatgacccttttggctccccactgcaagtgagccccagcattctccatggtggtgaagatgccagtggactccatgacatactcagtgccagcatcaccccacttgattttggagggatctggctcctggaagatagtgatgggatttccattgatgacaagcttcccgttctcagccttgacggtgccatggaatttaccatgggtgggatcatactggaacatgtagaccatgtagctgaggtcaatgaatgggt

SEQ ID NO: 8274 - DNA, 588 bp, Homo sapiens
  MAP TO AC008786.6; EXPRESSED IN HELA, SIGNAL = 1.8; EXPRESSED IN HEART, SIGNAL = 1.8; EXPRESSED IN FETAL LIVER, SIGNAL = 1.7
tttgcttgttgtgcttgtttgatttttgctcattactgattatttgcttttgctaaattattttttagcttcatttaaatggagccctttgttaactaaaattttatttgactctctatgtttagggaaagtgcaaacaacaagaacacaaatatcatagtttatttagtccagtttctctacctcagaactattgacattttgggctggataattcagcactgtgagggctgtcctatgcattgtaggatatttaacaatatccctgatccctaccaactagatgccagtaacacccctccccaagttgtgacaatcaaaaatatctctaagcattgtcaatatctcttgggggccaaaatagtccctaattgagaacagctaatctagattgtataatttaaaatgttaataattaatgattatttatatagagaggcataaaataaaactagtatagctttacaaaagcaaagtcaaaataattctatgggttattttctgtcatttgtatacattcaacctcatttctagaattggaccgttatcatgaataatcacatgattacccctgaagtttgtgccata

SEQ ID NO: 8275 - DNA, 580 bp, Homo sapiens
  MAP TO AC022211.2; EXPRESSED IN ADULT LIVER, SIGNAL = 1.5; EXPRESSED IN HELA, SIGNAL = 2.6; EXPRESSED IN HEART, SIGNAL = 2.3; EXPRESSED IN BRAIN, SIGNAL = 3.5; EXPRESSED IN PLACENTA, SIGNAL = 2.8; EXPRESSED IN BONE MARROW, SIGNAL = 3.4; EXPRESSED IN LUNG, SIGNAL = 3.9; EXPRESSED IN FETAL LIVER, SIGNAL = 3.4
attgcatgtaggcttttccgtatctgacagctatctaatactgttactgcaggatttttccgctttcacattgatttcagcagctgaaaacagcagtatgccgttttagcatacagtatgagaaacctgttgatttttgaagcaactagggctgctgctgctttataaaacgtgttcgttgatcacatttcccaaattatacttttatttttcttttaacaggaaggagtcaagactgagaacaacgatcatattaatttgaaggtggcggggcaggatggttctgtggtgcagtttaagattaagaggcatacaccacttagtaaactaatgaaagcctattgtgaacgacaggtgaggaattcatatgtgtacttccactgaataaaactatttttaaaaatcttattttcatgggaacaaaaactagactagcacattacagtgactttttgatgggatgaatatgcacttggcacgtcagttttgtcgtgcacttggtatattgatagctcgtgaaaacccttaggatgatttggttagtattatatgtggttccagtcctgtgccagaaatccat

SEQ ID NO: 8276 - DNA, 528 bp, Homo sapiens
  MAP TO AL159191.1; EXPRESSED IN BRAIN, SIGNAL = 2.5; EXPRESSED IN PLACENTA, SIGNAL = 1.8; EXPRESSED IN FETAL LIVER, SIGNAL = 1.9; EXPRESSED IN ADULT LIVER, SIGNAL = 1.9; EXPRESSED IN HELA, SIGNAL = 1.8; EXPRESSED IN HEART, SIGNAL = 1.8
tcccatttttatgatgccaacaaaactacttcaatatgggaaatttaatcttttctttcaaaggacatatggccaatgtgcatgtgcacaggatgggaaattacctgaaacagcttctcagaactctggggcagggctgcgggagaataagtgggatccatttctgtgaactcttctgcaaagttactcacatctaattcatctcgaatgactggcttaaatggtgcaggcacttttttggcggctaaatcatcccaatttattttctaaaacaaagaaagttggtacaaagtagaaatcaatagtcaaaatgtactttctaagaataacaaagataaattaggattttgactggtagggagagaggataaaaataagagaacatatttcaaatcaataataaaaaacatattttctccaaacaagatcacagcagtttatagctccaaccaatgctgtgcctcaaagatgagactatcgctgttgaatctcagagtgtcctctggggggcaccaagacaccctagtt

SEQ ID NO: 8277 - DNA, 553 bp, Homo sapiens
  MAP TO AL132773.14; EXPRESSED IN FETAL LIVER, SIGNAL = 2.3; EXPRESSED IN HEART, SIGNAL = 2.3; EXPRESSED IN BRAIN, SIGNAL = 1.9; EXPRESSED IN PLACENTA, SIGNAL = 2.4; EXPRESSED IN ADULT LIVER, SIGNAL = 2.5; EXPRESSED IN BONE MARROW, SIGNAL = 2.3; EXPRESSED IN HELA, SIGNAL = 2.4; EXPRESSED IN LUNG, SIGNAL = 2.2
atggccaagcagatctgaagaagaaccaaatggaacttctagaaatgaaaaatatacttgttgaaattttttaaataaataaactcaatttacatgttaaatagcatatcagacataagagaatttacgaagtggaagatgaatctgaaaaaagtacgcagaatgcagctcagagagacaaggagatagaaagtacaatagatactaagaatatggaggatagaatgagaagatccaactcatatatatttccagaatcccagaacaaaggagaggcaatattcagaaatgatagctttccagaactgatggaaaacatgaatatacagattccagaagcaaaacatattgtaagcatgattaaagaaagaaagggaaggcaggaaggaaagaaaacaagttggatttctcataatgaaattgtataactccaaagacaaagagaacatcttaaaatcagccagagaaaaagtatcacatacaacatggagaaactgaacgttagtgcactgttgatggaagtataaagtgatggagccactgtggaaaacag

SEQ ID NO: 8278 - DNA, 512 bp, Homo sapiens
  MAP TO AC008372.6; EXPRESSED IN ADULT LIVER, SIGNAL = 3.4; EXPRESSED IN FETAL LIVER, SIGNAL = 3.5; EXPRESSED IN HELA, SIGNAL = 3.2; EXPRESSED IN PLACENTA, SIGNAL = 4.5; EXPRESSED IN BONE MARROW, SIGNAL = 3.1; EXPRESSED IN HEART, SIGNAL = 2.8; EXPRESSED IN LUNG, SIGNAL = 3.6; EXPRESSED IN BRAIN, SIGNAL = 3.8
caagcttatgggagagcaggagcctactatgtttccctcctggaattcagaggagggatgggccccaggggagcagtttcccttactctaggggagaaccaggcaggaaggtagggaatgtcccttggtatatgctgtgggccaaatgactggggtgcttgttggatttcaggtgctcgttctggctgtgaagcagctgttcccagagtttgagtttatgtggcttgtggatgaagccaagaagaacctgcctttggagctggatttcctcaatgaagggaggaatgctgagaaggtgtcccagatgctcaggcattttgacttcttgaaggtaggtgggacgatgcaatgcagggtatggtggtctggtggaagagtgtagcggtatgtgggtccctgccttgagcatccctttcaggacataattgggacatcttcttcctgagtcctcttactgaggatgaatgacatcactggtgatgtgcattaaatcacttgaaggcaatttgcaa

SEQ ID NO: 8279 - DNA, 597 bp, Homo sapiens
  MAP TO AC002400.1; EXPRESSED IN PLACENTA, SIGNAL = 2.3; EXPRESSED IN HELA, SIGNAL = 3.4; EXPRESSED IN BRAIN, SIGNAL = 2.9; EXPRESSED IN LUNG, SIGNAL = 5.4; EXPRESSED IN FETAL LIVER, SIGNAL =   3; EXPRESSED IN BONE MARROW, SIGNAL =   3; EXPRESSED IN ADULT LIVER, SIGNAL = 2.8; EXPRESSED IN HEART, SIGNAL =  20
tcttctagcttgcgaaagggagggctcatgggacctgatatgtcattcttccaacttcaccctttccctgggggagagacggtttgggtgggttggggtgttgacagcagggcagccccttgatttcttccgcagactgcacctccagcggctggtgagcaatgagagccagaggcgccagctggtggggaagctgcaggtccttgtggaggaggcctttggttgccagctgcaaaacagggatgtcctcaacccagtctacgtggagaggatcctcctgctgagacaggtgtggtgtcaggattctgggaagctgagggaggggttactgggtgcctcaattcctcctgccttccagagccctgtccctagtgcattcaatgactgcctccttccccagggtcacatttgccgcctgcaggacttggtgtccccagtatactcttacctgtggactcgccctgcagtaggtcgagcacagctggacgccatctcggagaaggtggatgtgattgccaagcgtgtgctggggtgagtacccgcaggctgagctcagggttccacaccctccttccctctctctgtcccatggctctc

SEQ ID NO: 8280 - DNA, 573 bp, Homo sapiens
  MAP TO AL121595.3; EXPRESSED IN BRAIN, SIGNAL = 2.4; EXPRESSED IN ADULT LIVER, SIGNAL = 2.4; EXPRESSED IN HELA, SIGNAL = 2.5; EXPRESSED IN PLACENTA, SIGNAL = 2.9; EXPRESSED IN LUNG, SIGNAL =   2; EXPRESSED IN HEART, SIGNAL = 2.2; EXPRESSED IN FETAL LIVER, SIGNAL = 2.4; EXPRESSED IN BONE MARROW, SIGNAL = 1.8
ttctcttctcttgccctcccacttctttcctctctttttatctttatctcttcctttctctcctatttgaaatctgcatcttaaagactgccaccagctgctctcacaggcaattgctttgctaagtaggccacaaggatcctagtgagcaatggagtattcacagttttctaattaaaagatgccacctagtggttacagttcccttcatcctgattgtaccaggaaacatgaaagttaagcagtattaacaaattccaggtcttctgtggtgccagcttggtctaacggcagcatcagatacaatgaacccatttcctttcacatctacaaccaagctgtcagaagtaactgatgttgatagtctacgaagctttgtagtcaggtgtatattgactttatttattgccctaaagtagacaaatttgttacttcaattctggtagaattaaaggtataggcattgcctgactcagcaggagcatagaggtagcttctgctcttcctgaactcctcagcagagatgtattcaaggtggctaactagagagattggacactcaccctctccaga

SEQ ID NO: 8281 - DNA, 514 bp, Homo sapiens
  MAP TO AC008753.5; EXPRESSED IN FETAL LIVER, SIGNAL = 1.9; EXPRESSED IN HELA, SIGNAL = 1.8; EXPRESSED IN BRAIN, SIGNAL = 1.8; EXPRESSED IN PLACENTA, SIGNAL = 1.5; EXPRESSED IN HEART, SIGNAL = 2.8
ggcactgctggagctaaatcacagcacaatatataccccaaggatactgccttcctctgaccctttttccattaacttcagtgataatatcactacccaccacagcaagaggtaaacggtcctttatctttttaacacgtttcttttcttcttcatcatctgtttctggaaattcatatattttaattttatgttcttggatttctttcattatctgttttgtaaactgttgacattcctctggtgtgagtgtgtctgctttggcagtaagtgggatgatattcactttttcatgcaaatgtttcataaactcaacatccagtggtttaagtctcaacaaaaggcaatgtcaagtagttacaaacatgcactacccaatcctgcctgaaggtgggagtcttcagttatgtaatggtcctgttatcaggcatctgacgtctgctcactcgcgattctgcatttaggtagtcctcaaatttactatcaatgtaatcgataacaggctgccagcaat

SEQ ID NO: 8282 - DNA, 594 bp, Homo sapiens
  MAP TO AC008481.4; EXPRESSED IN PLACENTA, SIGNAL = 3.9; EXPRESSED IN HELA, SIGNAL = 3.8; EXPRESSED IN BRAIN, SIGNAL = 3.5; EXPRESSED IN LUNG, SIGNAL =   9; EXPRESSED IN HEART, SIGNAL = 2.5; EXPRESSED IN FETAL LIVER, SIGNAL = 3.8; EXPRESSED IN BONE MARROW, SIGNAL = 6.1; EXPRESSED IN ADULT LIVER, SIGNAL = 4.4
catgtgggtccatcttcctcagggcccgccgcctccccttgctggggcaggccgacgagactccacctccccgcccacctctgcgcccatccagctagagctcgtcatggtcgtcttcggtgggtgcttcaggcggtggctccgggcaggcggctggcgtcatcagctccatgaggtactcgcagcgactgggctctgtggtgctggtcaccatggtctctttcccgcacaggaggcgcacctggggatgggcagacgggtgctcgagagggttcggctgggccaggcctgggtctccccgccccagctcccctgccttgcaggcactcacggtggtggagcggttggggccctgccagcagcccgtgccttgctcatacttcatggcactgaacttgtcgtggtcggggccaatccatgagccccaggtgctgtgagagacacagggtgctgagggctgggccggtgtcggggcaccaggaggaggcagagggaaggggccagcccaagccactcacccaaggctggtgggagagcccccgagtttgggtttctgcgagacaagcttgaaggggcagaggcggtagacgtatc

SEQ ID NO: 8283 - DNA, 578 bp, Homo sapiens
  MAP TO AL049829.3; EXPRESSED IN BONE MARROW, SIGNAL = 1.7; EXPRESSED IN HEART, SIGNAL =  69
aacacaaagtggagaacggcaggtgctacagaagcccagctggactgtggtgaggtgagccaggaggtggcttgactcatgggctcccctgtgcctgcctatggagtcatgtgctttgaagcagcaggaccctggccctttgtgtcttcagaagtcccctggcccagtgcaggggctgcctgcttaccagtatcggcagttgcgtaggaggagaagagagtggccatgagcttgagggaggacttctggtacagggccacaacagtctcgttgagaggatccttgtttttttccagccagcccaggatgttgtagtccacagtgccggcgtagtggatcagggagaagtgggcttcctgcttccccttgatgttgcgtggcttctggaaattgttggacttgcccaggtggttgtcgtacagcttggccttgaaggtcatgtcagtggccttggggaacatgcactcctcctccaggatggacatgatgcccatgggctgagggcagggtgaagaggcaaagagagaatcactgagcacactcccaggcttccacagtcccataccctgacaggaaaa

SEQ ID NO: 8284 - DNA, 549 bp, Homo sapiens
  MAP TO AL133244.1; EXPRESSED IN BRAIN, SIGNAL = 1.8; EXPRESSED IN PLACENTA, SIGNAL = 2.4; EXPRESSED IN FETAL LIVER, SIGNAL =   5; EXPRESSED IN HELA, SIGNAL = 5.3; EXPRESSED IN ADULT LIVER, SIGNAL = 1.5; EXPRESSED IN HEART, SIGNAL = 4.7
cagtttggagggctcagaagacaggaaaatgtgggaaagtttggaacttcctagagacttgttgaatggctttgaccaaaatgctaatagtgatagagacaataaagtccaggctgaggtggtctcagatagagatgaggaacttgttgggagctggagcaaaggtgattcttgttacacttaaaaaagagactggtggcattttgcttttgccctagagatctgtggaactttgagcttgagagagatgatttggggtatctggtggaagaaacttctaagtggcaaactgttcaagaggaggcagaatataaaagtttggaaaatttgcagcctgatgatgaagtagaaaagaaaaaccaattttctggggagaaactcaagcctgctgcagaaatttgtgtaagtaacaaggagcccaagacagtgggcttaatcaccaagacagttaatcaccaagttaatcaccaagacagtggggaaaatgtctccaggacatgtcagagactttcatggcagctcctcccatcacaggtctggagggaaaaa

SEQ ID NO: 8285 - DNA, 599 bp, Homo sapiens
  MAP TO AL133286.5; EXPRESSED IN FETAL LIVER, SIGNAL = 6.2; EXPRESSED IN HEART, SIGNAL = 4.8; EXPRESSED IN PLACENTA, SIGNAL = 4.1; EXPRESSED IN BRAIN, SIGNAL = 3.3; EXPRESSED IN BONE MARROW, SIGNAL = 4.2; EXPRESSED IN ADULT LIVER, SIGNAL = 3.9; EXPRESSED IN HELA, SIGNAL = 4.8; EXPRESSED IN LUNG, SIGNAL = 4.9
ggattttagaggcaggtcccagcagatgctgtctggatgtgcccttgtgcccaagccgcttccagggttatggtttaggatgtggcacacaaggaggaccctagatctgacttcacacactgcaggagcagtcccatggacggtggggagagtggcctcagggaggcaaacttgcagagtcctggctgcgttctctctcagacaggtcgcatggtctcccggggcctcggttatttcaactatgaaattgagataataatacttacctacctaatgcagggttatgcacccgatgcccatgtaaggtgcatttattagctttatgtctgggtggaggtggtttgctcttagactttccaaattaggttcagtctgcagagctttggaaatatgaggatttcagggcccgtctcgcagagactcagattccgcagctctgagttgctaccataggaaatacattgaaaaacactccccacctgagtctactgggctgctgggtttggcaaccactaggttaatgcacactgctgtggaaaacaagaatggccaagggcttgggttcaaatatgagacaaggcagtttggagatgctgtca

SEQ ID NO: 8286 - DNA, 539 bp, Homo sapiens
  MAP TO AC008929.3; EXPRESSED IN ADULT LIVER, SIGNAL =   3; EXPRESSED IN FETAL LIVER, SIGNAL = 3.5; EXPRESSED IN HEART, SIGNAL = 3.4; EXPRESSED IN BRAIN, SIGNAL = 2.7; EXPRESSED IN PLACENTA, SIGNAL = 3.5; EXPRESSED IN HELA, SIGNAL = 3.8; EXPRESSED IN BONE MARROW, SIGNAL = 3.3; EXPRESSED IN LUNG, SIGNAL = 4.3
aatggcacaaacacctgacctttatgagcaggaaaatatctcttgtttttgggtaaagagatggcaagaaacctccttaaagttttgtcactagccagtctcggagttttcctactttctgcattgtgtcaagagctgttttatgaccttctctctgctcgctagcaattagaggaacacaggttttgcacacttagacttactaatattcatatctgcaggtcaatttgagtgacagcatttctggtcagtagaaatactgactgtgattcaagaaaagaaatgactagatttaagactatactttcagggatcatttctatagctcattactagagaagttcccctgaacgtgtagaacactggcaaccatgaggaggacatgcagtgttctgtcctgagtgtgaagctgggtcttggtgttgctttgctgcaagtaccatttgccactgatgattgtttttgtctccctctgggacagtaagggaaaggacacagtctgagtgattattattgaaagcgggaaagaaacagagaga

SEQ ID NO: 8287 - DNA, 571 bp, Homo sapiens
  MAP TO Z97197.2; EXPRESSED IN BRAIN, SIGNAL = 1.6; EXPRESSED IN PLACENTA, SIGNAL = 2.4; EXPRESSED IN BONE MARROW, SIGNAL =   6; EXPRESSED IN HEART, SIGNAL = 3.5; EXPRESSED IN LUNG, SIGNAL = 5.7; EXPRESSED IN FETAL LIVER, SIGNAL = 3.5; EXPRESSED IN HELA, SIGNAL = 2.2
gggagcttggctcttaggtctgcatttgccacattgctttcggaaagcaggagatatcctttctgttgacttagagtttgctgcaacagggtgtgctggagtatctgtctgccttcgatgaagaaaccacggaagtttgttctctggacactccttctagacctcttgctctccctctggtagaagaggaggaagcagtgtctgaaccagagcctgaggggttgccagaggcctgtgatgacttggagttagcagatgacaatcttaaagaggggaccatttgcactgagtccagccagcaggaacccatcaccaagtcaggcttcacacgcctcagcagctctccttgttactacttttaccaaggtgagggtgccggaagagagggctgggttgccgcagaggtgtttcagaggtgacccggtgctctaagcagaggagcgccactagatcctgtggcttgggtggcttgagcccttgggcatggggaggggtggggagcctcctggggactggccaagactggtgtgtgatagagccccttgtcctcagcggaagatggacagcatat

SEQ ID NO: 8288 - DNA, 569 bp, Homo sapiens
  MAP TO AC007955.4; EXPRESSED IN BRAIN, SIGNAL = 2.7; EXPRESSED IN ADULT LIVER, SIGNAL = 3.5; EXPRESSED IN HELA, SIGNAL = 2.5; EXPRESSED IN PLACENTA, SIGNAL = 2.3; EXPRESSED IN LUNG, SIGNAL = 2.8; EXPRESSED IN HEART, SIGNAL = 2.7; EXPRESSED IN FETAL LIVER, SIGNAL = 2.9; EXPRESSED IN BONE MARROW, SIGNAL = 4.7
taatgaagctggggtcttggtctgttagcttttaatatctttaaaactgggctgggcatcaagtgtcttttctggaataggccaaggaagacaagtccagtttggttttcaagacttcagtgagctctgtggccagcagctcatggagggacacgctgtcatgggagtacatgcagtttttcccagtcccatcataattcttgggcccactggatggagaagataaccagatttgcttgtttggtgcctgcctgttgatcaaataggttcctagatctccacccagtttaatagttaagacaccactcccaaaggaaacatcatagtcctcaaatgcatatggctcatctgcaaggtcttcaaaaatttctgctaaggagtccagcgtttcctccgctagtcagtttcttcttaaaaatacttgggggagggtaagggagacattcacaagctgatgagggtcctcctgggagggttctggagcatctggatgtcccaaattatgatgaatggtgaaggaaatagtgatgtgtactctcaggagcaaaccggggcacatgttaactttc

SEQ ID NO: 8289 - DNA, 524 bp, Homo sapiens
  MAP TO AC002039.1; EXPRESSED IN BRAIN, SIGNAL = 8.3; EXPRESSED IN PLACENTA, SIGNAL = 6.4; EXPRESSED IN HELA, SIGNAL = 6.8; EXPRESSED IN BONE MARROW, SIGNAL = 2.4; EXPRESSED IN FETAL LIVER, SIGNAL = 4.1; EXPRESSED IN LUNG, SIGNAL =  19; EXPRESSED IN HEART, SIGNAL = 5.7
gcctcctctttgtacccctctctctcacactttctctcttttctagctcattcctttgctgctgcagttgacaagccggctacagggagtcggcgcgctcggccaggcagcctctgacaatagcggcccagaagatgcaaagagacaagccaagaaacagaagacaaggcggacgtgaggaggaaggggacagttgcagtctcacttgggacaggccacagccaggggtccggccactacccgcccgtgggataaaagccaaaagcatgcgtcagctaacttcagcctgtgctgctgggcccgcaccccatgtcccttgtcactgtggcatcctgcacccatcctcacccctccgtagagcccctcgtgcaatgcaatgaatggaccctcctgtcactctgctgaacagaatttattttctgagtcaaatataatttattattatttttgtcaaagaagtatttaagctgtgctgtggtgtgagaatgtcattcttgatcttcagccttcgtttgcaagaagag

SEQ ID NO: 8290 - DNA, 531 bp, Homo sapiens
  MAP TO AL157996.1; EXPRESSED IN FETAL LIVER, SIGNAL = 5.8; EXPRESSED IN LUNG, SIGNAL = 5.4; EXPRESSED IN BRAIN, SIGNAL = 4.5; EXPRESSED IN ADULT LIVER, SIGNAL = 4.5; EXPRESSED IN BONE MARROW, SIGNAL = 5.3; EXPRESSED IN HELA, SIGNAL = 5.8; EXPRESSED IN HEART, SIGNAL = 6.6; EXPRESSED IN PLACENTA, SIGNAL = 4.8
tctccactttaggcaccaccagtaaggccccaagagcgcctggctcacccactgccacggacctcctttggtcccctcccaggtcacttttgctggggcgccagactgaagtgccttggggcctccttggccccagcggagcggtttccttggtcttggcagggcctcagtaggccaggtaaaccagcaacagagggtgagggtttttgaatgtctaaatcactggacacagtctgaggaaatcatcctcatttcttagatacacgtaaaagaagacaaactaaacaatgttggctttctctcagtctttcttcctccactgacacgatggaggccgtacctgtaatggcgggtgtcccggatgggccggtctgggctcagcttgtcactctccagctggttgaaggcgtgctgtctgtaggggtcctctccagccttcagctgcttggccgacaggtaggccttctcatcaaagcctttcgagggagttcctgtcacctgagatgaaggtcagcatcagagaggaccaca

SEQ ID NO: 8291 - DNA, 501 bp, Homo sapiens
  MAP TO AC009565.7; EXPRESSED IN BRAIN, SIGNAL =   2; EXPRESSED IN PLACENTA, SIGNAL = 2.2; EXPRESSED IN BONE MARROW, SIGNAL = 1.8; EXPRESSED IN FETAL LIVER, SIGNAL = 2.3; EXPRESSED IN ADULT LIVER, SIGNAL = 2.1; EXPRESSED IN HELA, SIGNAL = 2.5; EXPRESSED IN HEART, SIGNAL = 2.2
aactgtaaggacaggcaggcattgatccctttccttcccattatgtgagtcataaactacacccctataacaaacgttaacaaaagaaaagcataacaaatgtatttagccatagttttacatgacacaagggccttcagaatgacataaatatacatggaagactctctgactttcatgcttaggttcaatgaagcagaaacagccgtataggaatgtgattggccaaaaagggtatgatggcagatgctgggtggggagaactcacaaggcctgtctgtgcagattcttcctctctgtgcagcattccttccttccaggcatggaacaggattgtctttggaatgggagtcttgggacctacagtcaaacaagatagattagagaatttctttatgcccagttcctacacagaaaggtttgggaatgttagagtaataattttaggcttttgactggctttggggaaaaggggttctggttcttatgacttggggaaga

SEQ ID NO: 8292 - DNA, 506 bp, Homo sapiens
  MAP TO AL136038.1; EXPRESSED IN BRAIN, SIGNAL =   4; EXPRESSED IN FETAL LIVER, SIGNAL = 4.9; EXPRESSED IN HELA, SIGNAL =   5; EXPRESSED IN BONE MARROW, SIGNAL = 3.9; EXPRESSED IN HEART, SIGNAL = 4.2; EXPRESSED IN LUNG, SIGNAL = 3.3; EXPRESSED IN PLACENTA, SIGNAL =   4; EXPRESSED IN ADULT LIVER, SIGNAL = 4.9
cccagccctatctcttctccaacagtctgccacctgctgttgttggctgcacctctaaggccctagatctgctcatggagagcaacaccatcgtccagtctatggctgccaggacccagtggttctgtagtaagatggaagctgctggattcactgtctcaggagccagtcaccccatccgtcctgtgatgctgggtgatgcccagctgaccttgcatggcggatgacatgctgaagagaggcatctttgttattgggttcagctaccctgtggtctccaagggcaaggcccagatccggatacagatctcagcattgcacaatgaggaagacattgactaccacgtggaggccttcgtggaagtggggcggctgtacagggcactgccctgagctctgagtagggacaagcagagccaaggtccacctactgccataaggtcaaaggaggttttcgatcagcccagaccagaggctctgagccctgaaccagagtcccagagctg

SEQ ID NO: 8293 - DNA, 551 bp, Homo sapiens
  MAP TO AC007338.2; EXPRESSED IN ADULT LIVER, SIGNAL =   3; EXPRESSED IN FETAL LIVER, SIGNAL = 2.8; EXPRESSED IN HEART, SIGNAL = 2.8; EXPRESSED IN PLACENTA, SIGNAL = 2.4; EXPRESSED IN BONE MARROW, SIGNAL = 2.6; EXPRESSED IN LUNG, SIGNAL = 2.5; EXPRESSED IN BRAIN, SIGNAL = 3.6; EXPRESSED IN HELA, SIGNAL = 2.7
tagggcactagggacagtggcactttggatttgcagtgagtggtagaaataaggttttgaaattaagtcaaggaacataatgctgcagggtgtacctccataatttttaagaaaatgtatttcttttgtgctttatttataggtatttcagagagatgggaatgatttgcacatgacatataaaataggacttgttgaagctctatgtggatttcagttcacatttaagcaccttgatggacgtcagattgtggtgaaatacccccctggcaaagtaattgaaccaggtaaatcttgattttgtccgattctggttttcaagtatttttgaaaaaaattacaatttgtaatttttttatactgcataactctaaaaaaaattgaacacctcttttgggtaaaattattaatcatttcctcttaaataatagggtgtgttcgtgtagttcgaggtgaagggatgccgcagtatcgtaatccctttgaaaaaggtgatctttacataaagtttgatgtgcagtttcctgaaaacaactggatcaacccagaca

SEQ ID NO: 8294 - DNA, 548 bp, Homo sapiens
  MAP TO AC023084.2; EXPRESSED IN BONE MARROW, SIGNAL = 3.1; EXPRESSED IN LUNG, SIGNAL = 3.3; EXPRESSED IN PLACENTA, SIGNAL = 2.5; EXPRESSED IN ADULT LIVER, SIGNAL = 2.2; EXPRESSED IN FETAL LIVER, SIGNAL = 3.2; EXPRESSED IN HELA, SIGNAL = 3.5; EXPRESSED IN HEART, SIGNAL = 3.9; EXPRESSED IN BRAIN, SIGNAL = 2.8
tcttccattctcctcccaagtctcaactttattagattttttaaaatattgtctaggttcccaacaataacattctttatggtagccataaaaatcatgatgtcaggggcatctggcatttcattcctcaactacatgactatttgtacagtggactggccaatcattaggcttatttcagtagagaagacaaagaataggaaagaaaacatcccaaactcactccttccccaggtcttgtttgaatgggtgaaagggaagaagtgggtgagcagcacatggatataagattaaataaagtcttctgatgccaccaaatctcaggaaagatgtcaaccaaatatgactgaaggaagtggttggaggaaaaaaatcacactgcttttttatgtttgtcccttctacaagaaattcctactgtttttaatatcaatttttataaatcgattcatttggacccaatattagccactatttccttttatcacagatttttaatccaatattcttgtattgtgattcacctctcagttggctggattttggtt

SEQ ID NO: 8295 - DNA, 589 bp, Homo sapiens
  MAP TO AL157817.3; EXPRESSED IN BRAIN, SIGNAL = 8.9; EXPRESSED IN PLACENTA, SIGNAL = 7.7; EXPRESSED IN BONE MARROW, SIGNAL = 7.8; EXPRESSED IN ADULT LIVER, SIGNAL = 8.5; EXPRESSED IN HELA, SIGNAL =  11; EXPRESSED IN LUNG, SIGNAL = 7.7; EXPRESSED IN FETAL LIVER, SIGNAL = 8.3; EXPRESSED IN HEART, SIGNAL = 8.7
gaatgtggtgtgctcagtggccagaggggcagtggggcctgagtctgtgtctctgagtttgtgtgtttcgagaacaagagcagagggcattcagatgtagaattcctccatgtcgttatccccggggccagccgaccctgggggtggtggcatgtctccatcagtctgcttgactttgggggtatcgcatgggagctgtggggaggagtctgtgagggtggaggtgctgggagctgggggagcagcacgagctgtcgctgaggagctggaagaccttttggtgaagaaagggagggaagcccaggaggcctctgtggtcaccctgctgacagtgggcagtggtccctccctggaatccttgtgagctgcccagtggctgctgcatctttcggaggggaggggtgtctccactgtgctgcagaacctactgggtgcagaatatgcagagaccacagacaggtccgatgaggacagccgcaggcctgtgtccacgtctgtctcctgggccccctctaggtcatcgatggagaggaggtggccatgcctccactctgatgccctgtgccctggggcacctgtgtttgaaaac

SEQ ID NO: 8296 - DNA, 547 bp, Homo sapiens
  MAP TO AC002477.1; EXPRESSED IN BRAIN, SIGNAL = 2.8; EXPRESSED IN HELA, SIGNAL = 2.9; EXPRESSED IN BONE MARROW, SIGNAL =   2; EXPRESSED IN LUNG, SIGNAL = 3.7; EXPRESSED IN PLACENTA, SIGNAL = 2.8; EXPRESSED IN FETAL LIVER, SIGNAL = 2.7; EXPRESSED IN ADULT LIVER, SIGNAL = 2.2; EXPRESSED IN HEART, SIGNAL = 2.6
tggtcaatccaaaataacccaaagaacttgctaaagttatatcaataagcagctttttattgaaggactgaaagaattaaatagaaggcacagtagcactgtaaagctttctcagaacataataatctttttctatgtatgtgtggaacccagactttcttttttgttgttaaaaatgtcttctggacaatcagaaaatctttatttgtcatccttccctttggtctttctgtaaaccatttctcgaaaactggccagaatcttgttctctctctttcgtctctcttcttggttaaaggatgcaagggctctcttctcatcagcactgtagatctggttctcttttcgcagtcgcacagcctccattcggcgatgcctggagagaattttatttttggcttaatttctcagtaattattttcatagtacatcatcattaatcctttcttacccagagtggtctatttaacagctgacaaaaattgaaatgggttaaatttccaaaagatcatttattaatattttagctgcctgacacgtccttttt

SEQ ID NO: 8297 - DNA, 588 bp, Homo sapiens
  MAP TO AL117692.1; EXPRESSED IN BRAIN, SIGNAL = 3.6; EXPRESSED IN FETAL LIVER, SIGNAL = 7.7; EXPRESSED IN HELA, SIGNAL = 9.1; EXPRESSED IN BONE MARROW, SIGNAL = 2.8; EXPRESSED IN HEART, SIGNAL = 8.1; EXPRESSED IN PLACENTA, SIGNAL = 3.4; EXPRESSED IN LUNG, SIGNAL = 1.9; EXPRESSED IN ADULT LIVER, SIGNAL = 3.4
gttctctctttgcctgccaccatccatgtaagatgtgactccctcttccttgccttccgccatgattgtgaggctttcccagccacatggaactgtgagtccaattaaacctctttcttttgtaaattgtacagtctcaggtatgtctttatcagcagcatgaaaatggactaatatagtaaattggtaacagtagagtggggcactgctgaaaagttacctgaaaatgtggaagcaactttggaactgggtaataggcagaggttggtaccgtttggagagctcagaagcagacaggaaaatgtgggaaagtttggaacttcctagagagatgttgaatggctttgacaaaaatgctgatagtgatatgaacaataaggtccaggccgagatggtctcagatggagatgaagaactggttgggaattggagcaaaggtgactcttgttatgttttagcaaagagactggcagcattttgtccctgccctagagatttgtggaactttgaactcgagagagatgacttagcgtatctgatggaagaaatttctaaacagcaaaggattcaaaaggtgacttgggtgct

SEQ ID NO: 8298 - DNA, 541 bp, Homo sapiens
  MAP TO AC002401.1; EXPRESSED IN BRAIN, SIGNAL = 2.2; EXPRESSED IN PLACENTA, SIGNAL = 1.6; EXPRESSED IN FETAL LIVER, SIGNAL = 1.9; EXPRESSED IN ADULT LIVER, SIGNAL = 1.7; EXPRESSED IN BONE MARROW, SIGNAL = 1.8; EXPRESSED IN HELA, SIGNAL = 2.3; EXPRESSED IN LUNG, SIGNAL = 2.1; EXPRESSED IN HEART, SIGNAL = 1.8
ctcgataagaagactcgccgaaagttcctggacctggggtgagtggaggcggggctagatcgcagggcttggagctgctggggtaaggggtagcacagtgggcagccctgccccacttcctgctgcctccccacagggtcaccctgcgccgagcatccacgggcaagagccggaaggagaaaggcagcaaccgactgtccatgggcagcaggtgagaggtgcccatggcggcccacccacagctcccgcccctggctccccatgtgctctggtcctcccctctgtacccacacccatgctggacactctctctgcagggagtcagtggaggggtccggcaggtcagggggctccccgttcctgcctttttcctggttcacggacagcggcaagggctcagcatcctcgggtagcaccacctcccccacctgctcccctaaacacgagggcttcagccctaagaagtcagcttcccaggtaagtccatgcctttcttgtccccaaactggcccccagtctcaggtgacatgagggcgtactt

SEQ ID NO: 8299 - DNA, 553 bp, Homo sapiens
  MAP TO AC000059.1; EXPRESSED IN PLACENTA, SIGNAL = 1.8; EXPRESSED IN BRAIN, SIGNAL =   2; EXPRESSED IN ADULT LIVER, SIGNAL =   2; EXPRESSED IN BONE MARROW, SIGNAL = 1.7; EXPRESSED IN FETAL LIVER, SIGNAL = 2.2; EXPRESSED IN HELA, SIGNAL = 2.3; EXPRESSED IN HEART, SIGNAL = 2.2
atgtgcctttcaccttctgccatgattgtgaggcctccccagccacgtggaactgtaagtccattaaacctttttcttttgtaaattgcccagtctagggtatatcttcatcagcagtgtgaaaatgaactaataaaaatggtttttagtatatttacagagttgtgccaaacatcaacaaaatccattttgatgatctcaacaaaatccactttgatgatctcaaagagagccacagctgtcaatcccccaccccaccccatcatctcctccccaccactacttccacctcggccctaagcaaccattaatctactttctgtctctatagatttacctattttggacatttcatataaacagaatcatacaatatgtggtcctttgtgactagcttctttcacttaacataatgttatcaaagttcactcatgttgcagcatctatcagtacttcatttctgtctattaatgaataacatttcattatatagatatgctgcactttatccattcatcagatgatggacattgggattgttcccacattttgg

SEQ ID NO: 8300 - DNA, 552 bp, Homo sapiens
  MAP TO AC023344.2; EXPRESSED IN PLACENTA, SIGNAL = 2.6; EXPRESSED IN HEART, SIGNAL = 3.2; EXPRESSED IN ADULT LIVER, SIGNAL = 3.2; EXPRESSED IN BRAIN, SIGNAL = 3.6; EXPRESSED IN LUNG, SIGNAL = 3.7; EXPRESSED IN HELA, SIGNAL = 3.9; EXPRESSED IN FETAL LIVER, SIGNAL = 3.8; EXPRESSED IN BONE MARROW, SIGNAL = 2.8
tttcctcaccctattccagccgtatatattatcaaatgtgtctaaactgattttaaaggttcttttttaaaaatgtttttatattcttataatttgaaaatttttatgtttttctgtttaattggtaattgttaatagtgcttgcttatagaacaccatctaattattaacacttcattttaactaaatctttgtgtgaatgttttcttacaggttctgtatgttcctgatcctgaatatgtctccagtgttgagagctctccatctctaagccccgtaagtcctctgtcaccaacatcatctgaggctgaatttgataagaccactgtaagtatctctgctttgcaaagatggcgatgaagaaatctcactttgtctacattgactgtcttgttttttacattccattttgactatggttagaatgaaatatttcctttttattttgttgcttaagtttgtaaatcccagctttaaaaataagacattcttatgaaaccatatagcttaaattgacttacctttgtaggtggtggttgtgggccaaaaata

SEQ ID NO: 8301 - DNA, 573 bp, Homo sapiens
  MAP TO AC017004.2; EXPRESSED IN BONE MARROW, SIGNAL = 3.2; EXPRESSED IN LUNG, SIGNAL = 2.7; EXPRESSED IN BRAIN, SIGNAL = 4.5; EXPRESSED IN PLACENTA, SIGNAL = 3.2; EXPRESSED IN ADULT LIVER, SIGNAL = 1.6; EXPRESSED IN FETAL LIVER, SIGNAL =   4; EXPRESSED IN HELA, SIGNAL = 6.2; EXPRESSED IN HEART, SIGNAL = 3.1
accccaagcatcactgagtctttctaatcttccttttctacagacccatctgacctctctcctcctccccaggctgctccttgccaggcggagctaggtcccaattcttcctcagcctctgctcctccaccctataatccttttatcacctcccctcctcacacctggtccggcttacagtttcgttcggtgactagccctcccccacctgcccagcaatttactcttaaaaaggtgcctggagctaaaggcatagtcaaggttaatgctcctttttctttatcccaaatcagatagcgtttaggctctttttcatcaactataaaaatccagcccagttcatggcttgttcagcagcaaccctgagacgctttacagccttagaccctaaaaagtcaaaaggccatcttattctcaaaatacattttattacccaatttgctcctgacattaaataaaactccaaaaattaaattccagccctcaaaccccacaacaggatttaattaaccttgccttcaaggtgtacaataatagaaaaaagttgtaattccttgcctccactgtgagaca

SEQ ID NO: 8302 - DNA, 546 bp, Homo sapiens
  MAP TO AC004413.1; EXPRESSED IN BRAIN, SIGNAL = 2.4; EXPRESSED IN PLACENTA, SIGNAL = 2.3; EXPRESSED IN HELA, SIGNAL = 2.8; EXPRESSED IN ADULT LIVER, SIGNAL = 2.3; EXPRESSED IN BONE MARROW, SIGNAL = 1.5; EXPRESSED IN FETAL LIVER, SIGNAL = 2.5; EXPRESSED IN HEART, SIGNAL = 2.6
tgcatcaattctgcctaccctatggacaatataccttttgctcctttcaaaacatggagactctttcactattgaccactgaggacaatctgcatcattctgcataactgtcaaagtaactgttttgttgatgctggtgagtctactgatgtctatgacaaagttgtcagtgttaaagcccaagatattgttgcctgagctaagggcaatgacgcccatgaacagcacatttagcacctcactttccatgtcatcagtagtggcattaccacctcactcattattgtctttgcccaggcatcaccactaatgtggctatttcatagctaatatgctcactacaatgctgctgctcctactgtcagcattatgacaccgtgatgtcatcaatacttttcaaaaaacatttttagagtttatgaaaatctaaagctctatcaaatttcgttattttgaacaaatcatctcttgctttttgaccactaaggacattttaaacatttttctataacttcagtacacttttcagtttgcacacatcccatg

SEQ ID NO: 8303 - DNA, 591 bp, Homo sapiens
  MAP TO AC011442.2; EXPRESSED IN BRAIN, SIGNAL = 5.7; EXPRESSED IN HELA, SIGNAL = 6.6; EXPRESSED IN PLACENTA, SIGNAL = 4.8; EXPRESSED IN LUNG, SIGNAL = 7.2; EXPRESSED IN HEART, SIGNAL = 5.4; EXPRESSED IN FETAL LIVER, SIGNAL = 6.1; EXPRESSED IN BONE MARROW, SIGNAL = 4.6; EXPRESSED IN ADULT LIVER, SIGNAL = 5.4
gtccagtacttctgcccagcccctataaattgggaattcccacaaccccctcctcgatttgattgatttgtaaagcagcgcccagaactaaggcaggcacttcacttcccattaatggttattataacggatacgactcggggtcaaccagatggaagcaatacagacgcttcaatggcccctccgtacatgccaccctctaagcacttggtctttcggtaaccagccccatcctgggctatctaggagccccatcctaaatcacccataagcataaactcagctgtgatcaaaaggggctcattatgaattttaaagacacacctatcactcctatgacatgtggcgcaaagaccaaatatatccatatcatacctcagagggcaagtgggtgcggccacaggtggggcatagggagaagtcacaggccttgagggccacagtaaaggggttccaggagcaccagtgcagtggggagctgctagaatgttccaggcacgggagtggcacgtctgataatgactttaatttctctggacatgctgatggaatggatgtgcagtgagggcaagagatgaggcaagggtgaac

SEQ ID NO: 8304 - DNA, 545 bp, Homo sapiens
  MAP TO AC005774.1; EXPRESSED IN BONE MARROW, SIGNAL = 2.2; EXPRESSED IN FETAL LIVER, SIGNAL = 2.3; EXPRESSED IN LUNG, SIGNAL = 2.5; EXPRESSED IN PLACENTA, SIGNAL = 1.9; EXPRESSED IN BRAIN, SIGNAL = 2.4; EXPRESSED IN HELA, SIGNAL = 2.6; EXPRESSED IN ADULT LIVER, SIGNAL = 2.5; EXPRESSED IN HEART, SIGNAL = 2.7
tgaatcagactgcagcatcctcaatcaacagtgcagtgcctttgcacatattacttgagacatctgaacctcacttactcatctgttaaaaagggaaaataggtaagtgcctacctcaagaaagggtttcgtaagataatgcttgcaaagggatgggtggcatcatgcttaacactgtagctctaacgaggtcaccatgtttgagacccggtgcccacctgcagctgggtgacttttcccattatgaacaccagcatcatttttcagactcttatcagagccactcgtcaatttctgcctcacattaaaggtctgtgtgcatgtgactcgttgcaccttaaaagctacaccctgtggcttaactaacattctattctcagttcctgacacactgcttgttacctagaagatggacaataactgggtgaatagggttcatattttagagggaagggtgggcatgagaaggcgtcagaaggagattgagtcattgctttaccaactccaggtagaattcaataatgggtcgggaggagtctgaggtt

SEQ ID NO: 8305 - DNA, 599 bp, Homo sapiens
  MAP TO AL132801.1; EXPRESSED IN ADULT LIVER, SIGNAL = 2.9; EXPRESSED IN BONE MARROW, SIGNAL = 8.6; EXPRESSED IN LUNG, SIGNAL = 8.5; EXPRESSED IN PLACENTA, SIGNAL = 7.6; EXPRESSED IN FETAL LIVER, SIGNAL =  16; EXPRESSED IN HEART, SIGNAL =  14; EXPRESSED IN BRAIN, SIGNAL = 7.1; EXPRESSED IN HELA, SIGNAL =  19
cagcagtttgttgtcatttgcatgttgtacttcatgtatggttttcccaagtcattaaatgtacatacttctgcaactttttattttttattttttctggtgaaaagatatacatatatttagaattagccagctggactcagtttagatgaccccaattttgttggcaacatccaaagcatcataatcaggagctagttgaacgtatgcctccttctctccatcaggccgaatcagggtgttgaccgggccacatcaatgtcatagagcttcttcacagcctgtttgatctggtgcctgttggctttaacatctacaatgaacacaagtgtcttgttgtcctcgctcttcttcatggcagactcagtggtcagcggcaacttgatgataatatggtggtcaagcttgtttctcctggcggcgctcttctgaggatatttgggctgcccctggagtcgcagtgttttgggccgctggaaggtgggtgatgtgtggatcttttttttttccggctgtggacgcctttcaactctgctttcttggccttcacagcctttgctttggcttcggcttgaggaggggcagagcattcttctttg

SEQ ID NO: 8306 - DNA, 539 bp, Homo sapiens
  MAP TO AL121761.5; EXPRESSED IN PLACENTA, SIGNAL = 2.1; EXPRESSED IN FETAL LIVER, SIGNAL = 2.1; EXPRESSED IN HEART, SIGNAL = 1.8; EXPRESSED IN BRAIN, SIGNAL = 2.1; EXPRESSED IN LUNG, SIGNAL = 2.5; EXPRESSED IN HELA, SIGNAL = 1.8; EXPRESSED IN BONE MARROW, SIGNAL = 2.1; EXPRESSED IN ADULT LIVER, SIGNAL = 1.7
agccctctgacccttaaagcatttcccaatgagccattttaacagaacctctctgcaaatgagcatttctaaggggacacaattcccctgccctccatctggaggaggaaatgtgaaatcttgttttccctgcggagctgcttccgctcagtcaccaccaagctctgcaactcatggctctgcccccagcctctgtccctcttccacctcctgctgcctccttcccagcaagaattccatgttttcacgtataacctgtacgtgaaaaaaacaaaaacgtgtttttcctctgctctcacaacaatcaccaacacagaagccttctgtgaccaaatgtgtggggtttttccccacacaccaagtagtggacaccagctgggcatcctccagctcaattcccacagggtgagggctgagtctcacaagactgcccccaccccccccccccaccttcccactagggccgcaagtcccggcctccggatctgctgacagacccggcatcaagtgggggttcccacagccccttcttcgagttc

SEQ ID NO: 8307 - DNA, 582 bp, Homo sapiens
  MAP TO AC002045.1; EXPRESSED IN ADULT LIVER, SIGNAL =  66; EXPRESSED IN PLACENTA, SIGNAL =  51; EXPRESSED IN BONE MARROW, SIGNAL =  90; EXPRESSED IN FETAL LIVER, SIGNAL =  56; EXPRESSED IN HELA, SIGNAL =  19; EXPRESSED IN LUNG, SIGNAL = 1.2e+02; EXPRESSED IN HEART, SIGNAL =  25; EXPRESSED IN BRAIN, SIGNAL = 1.4e+02
ccctcaggcaatcataccagatattgaaacaaagcaataacataaggactgcagtattcattttatttttatattatttatttattcttccttagtttcttgagattatcatccgctgagggtggaaggggagtgagcagacacacttgggaggtgtcttgagattatcatccgctgagggtggagctgagggtggaaggggagtgagcagacactcgggaggtgtcttgagattatcatccgctgagggtggaaggggatagagcagacactccgcaggtgtcttgagattatcatccgctgagggtagagctgagggtggaaggggagtgagcagacactcgggaggtgtcttgaggctcagggagttatcaattatagaatgttgttgagttggaggaggtggctggtggcccatcctgttttttaaagtttcagctgtgaggtagggccagtagggcaatcctgaagaatgacgatgctccgctgccgccattctgacctgtagggccaaaggagggaatgttttcacacatattcatttgatggacaaaattaccgccaccaacacagtctgcacct

SEQ ID NO: 8308 - DNA, 578 bp, Homo sapiens
  MAP TO AC011464.2; EXPRESSED IN BRAIN, SIGNAL = 3.1; EXPRESSED IN PLACENTA, SIGNAL = 3.9; EXPRESSED IN BONE MARROW, SIGNAL = 2.6; EXPRESSED IN HELA, SIGNAL = 4.3; EXPRESSED IN ADULT LIVER, SIGNAL = 3.3; EXPRESSED IN LUNG, SIGNAL = 2.2; EXPRESSED IN FETAL LIVER, SIGNAL =   4; EXPRESSED IN HEART, SIGNAL = 3.8
aagtatcaggcacccacaggacaaggtgggacacagtgtctactcactgcagagtggggaccagggcaggattgggagaagagagccagggtaaggggaagaaacaatattgacagaataattctgaaagattctccccgcggctgaaaacttgggaggataaacttggggggatgaataactcctcccttctaggcccagtcccaaggtgcaaggctacttgccccagcagcatgcgccagaagatagcagaagcaggaagagagatggccggaagacatgtaccctggcggaagacacgtaccctggccggaagacatctaccctggccggaagacattaccctggccggaagacacctaccctggcaggaagacatgtaccctggcggaagacacgtaccctggccggaagacatctaccctggccggaagacattaccctggccggaagacacctaccctggccggaagacatctaccctggcggaagacatctaccctggccggaagacagctaccttggccggaagacactgccctggccggaagacacgtaccctggctggaagacatcta

SEQ ID NO: 8309 - DNA, 500 bp, Homo sapiens
  MAP TO AC006530.4; EXPRESSED IN BRAIN, SIGNAL = 3.5; EXPRESSED IN PLACENTA, SIGNAL = 3.6; EXPRESSED IN BONE MARROW, SIGNAL = 3.6; EXPRESSED IN HELA, SIGNAL = 3.6; EXPRESSED IN ADULT LIVER, SIGNAL = 3.5; EXPRESSED IN FETAL LIVER, SIGNAL = 3.8; EXPRESSED IN HEART, SIGNAL = 3.3; EXPRESSED IN LUNG, SIGNAL = 3.1
gatctctcgtcctctgcctggacgctttgggggccaccccactgaggggtgaggagggcacctacctgcctggtccaggagcaggttcccggggtggaggtcccggcacagcaccccctgctcgtgcagcgcctccagcgctaccagcatctctgccgcccactgcttcacctgctcctctctcacactccaggtggccctgccacagccccggccggccccatctgctgacaggcagctctgatccatgcctcggccacagccccctagcaccgggccggccccctcaggaacccaagtgagcccccgagggggcccagcgtctgagttctggccagccctcctagcttgaaggtgcaggtggccacctggggcctttggaaggtccgaggagccagaggtgctggtcctggctgtgggttcaccttcagcctccctctggggtctggtggatggggcctccccagctaggagaaggttcggagaagtcctaggaggct

SEQ ID NO: 8310 - DNA, 548 bp, Homo sapiens
  MAP TO AC002994.2; EXPRESSED IN HEART, SIGNAL = 3.2; EXPRESSED IN BRAIN, SIGNAL = 3.4; EXPRESSED IN HELA, SIGNAL =   3; EXPRESSED IN PLACENTA, SIGNAL = 2.4; EXPRESSED IN LUNG, SIGNAL =   4; EXPRESSED IN FETAL LIVER, SIGNAL = 2.9; EXPRESSED IN BONE MARROW, SIGNAL = 2.2; EXPRESSED IN ADULT LIVER, SIGNAL = 2.5
aacactcaccaagcaacagcaggatatacttttttttctttttcaatttcacatggaatattcaccacactaaccatattctgggccattaacaactctcaataaatttaaaagatttcaaataagtttgtgctttgactataatggaattctattagaaattattttaaaagatacttttataattcccaaatgaaacaccttactgaaaatgtattctacaaaataatggctgaagaatttccaaatttagcaaaagacatatacattcatattcaagaaacagcgaccgtcaaacaggataaaccaaagatccatgaagacatcatagtcaaacttctgaaaactaaagaaaaaaagaatgaaatgtgtaagaaattacacttactctataagaaaagcaattcaagtgagaacagatttcttatcagaggttacggaggctataagaaagtggaacaatatttttcaagtactgaaagaaaagaactgttgattcagaattctatatccaggacaatattattcaggaaagaaggacagcagaa

SEQ ID NO: 8311 - DNA, 600 bp, Homo sapiens
  MAP TO AC020714.2; EXPRESSED IN BRAIN, SIGNAL = 2.8; EXPRESSED IN PLACENTA, SIGNAL =   2; EXPRESSED IN HELA, SIGNAL = 2.9; EXPRESSED IN ADULT LIVER, SIGNAL = 2.4; EXPRESSED IN BONE MARROW, SIGNAL = 2.4; EXPRESSED IN HEART, SIGNAL = 2.9; EXPRESSED IN FETAL LIVER, SIGNAL = 2.7; EXPRESSED IN LUNG, SIGNAL = 3.3
ggcctgctcattgctttaacaattaaatgtgaatgctttctccagttgccccaactattacctgataccagctttcacacattcaagttacctgcttatttttaaaagcaagtaatttaaaaactctacacactgtatccttctccaacaaccagagagaagcctgaaactaagggtcatttaatgttgcaaaccagaccaggcaaaaaagatttagttccttagtcatcttgctttttctcataaggttagacaaaaggcattttatcttctccttctaattatatttcattactacaataaagtgacttataatgaggaagttaaaaacaatttttgatactttgtaaaaattctcacctagccctaaacccacaaattcatcaggagcctgatcttttgttccagtaagagatccttctctgcctcgcactgttccagaaatgtatcgaggtttcactccagttcctataagctgtgccagctccaactgactgatgcacttcagaatcttaattacaaaaaggaaaaaaatgttaaattccatgttaaaaatatcttcaaaaagatttaaatatatgcagccaggacttaaacaca

SEQ ID NO: 8312 - DNA, 503 bp, Homo sapiens
  MAP TO AC019205.2; EXPRESSED IN BRAIN, SIGNAL = 2.5; EXPRESSED IN HELA, SIGNAL = 2.1; EXPRESSED IN BONE MARROW, SIGNAL = 2.5; EXPRESSED IN HEART, SIGNAL = 2.4; EXPRESSED IN PLACENTA, SIGNAL = 2.2; EXPRESSED IN LUNG, SIGNAL = 2.9; EXPRESSED IN FETAL LIVER, SIGNAL =   2; EXPRESSED IN ADULT LIVER, SIGNAL = 1.9
ccgcctttcaccatagtctcacccctgggtctccaagaccgacggccggcattctggggcccccattcccaaaggggtcttgggaaggcccagatgccaagggcacccctggtgacgcccaaggtgctggcagcgagcaagagaggagaaagaggagagggctggaggagaggcgcgaagcggcccccgcgagcctgtgttccgcgtacccagtctctgggcctctcacctcgctcctggcgctggcggtgccactcagccatggactggagcatccacttggtccggagcttgtacaaataggagccgtaaaccacgacctcggtgaggtctgaagactccagagccttcagctcgagcatggccttgctcacctgctcgatgtaagggattcgagatccgtccgggcctgttggggaaaagagatgagatccccgggccggctgagactcccgagccggggcagcccgccagtactgggcacactcaccgaaaatggcttt

SEQ ID NO: 8313 - DNA, 511 bp, Homo sapiens
  MAP TO AL121985.13; EXPRESSED IN ADULT LIVER, SIGNAL = 3.1; EXPRESSED IN HEART, SIGNAL = 3.1; EXPRESSED IN LUNG, SIGNAL = 3.4; EXPRESSED IN BRAIN, SIGNAL = 2.9; EXPRESSED IN PLACENTA, SIGNAL = 2.8; EXPRESSED IN BONE MARROW, SIGNAL = 2.8; EXPRESSED IN FETAL LIVER, SIGNAL =   3; EXPRESSED IN HELA, SIGNAL = 3.9
ttagtgtggactggggaagccgccattattaccataaagcctcaactgcaggcaaaagcgctgaactgaaacatttttctccagggtcataaggtaccatccctcatcctccttcctgctttcccgtatccccagggtgagattctccagataaaacttgtagcgatctcctagataacgtggagggcctgcttcggatggatcaagagacactattttgttctcgacactgttctccagtgattttgccattgtgacgacaatgtggatgcttttgttcatgctcttatttatcctttcatatgtcaggggcagcagcactttgcttcccaactgccggagaatctttgggcagttcatcatgcgcccacctgtgggagggaggagaagagagtcccttattattaaggcctttagacaacatcgtgtcagcagatcaggaaggacagactggaggctctccctcttcctctttggctatccctggggttgccaagtccttcgtggtcta

SEQ ID NO: 8314 - DNA, 509 bp, Homo sapiens
  MAP TO AC009242.2; EXPRESSED IN BRAIN, SIGNAL = 3.3; EXPRESSED IN PLACENTA, SIGNAL = 2.4; EXPRESSED IN HELA, SIGNAL = 2.3; EXPRESSED IN ADULT LIVER, SIGNAL = 1.9; EXPRESSED IN BONE MARROW, SIGNAL =   3; EXPRESSED IN FETAL LIVER, SIGNAL = 2.5; EXPRESSED IN LUNG, SIGNAL = 5.6; EXPRESSED IN HEART, SIGNAL = 1.9
ctgcaggctctaacctgacccctcttttctccagcccctgaggcccttattgctggcacctcctggtctccccagctcccccagggcagacttgcacctctctcccagggcctgacatggccacaggcctcatgtgcacaggaacccagaccacgtggggcatgcagttggcaccctgcctgtttcttttgcctggctcaggagagaagccacacgtgggctctgtgcacaggaggtgcctaagaccacaacgtgatggctcagtaagaacttggtggtgcagcagggagggaggggacatgactcaagcccctgagtggcctccggtgtgtcactgacctggaacctcacgggttaccctgccggtgtctgctggggcctgctgctcctgaaggaagacagcggctgggatcagggcagctggcttcctgccacgggtcagcaccatcacctgaagcccccaggaaggaaatgttcccacccttggctctcgtctgaacagccctctc

SEQ ID NO: 8315 - DNA, 599 bp, Homo sapiens
  MAP TO AC012558.6; EXPRESSED IN FETAL LIVER, SIGNAL = 1.7; EXPRESSED IN HEART, SIGNAL =   2; EXPRESSED IN PLACENTA, SIGNAL = 1.8; EXPRESSED IN BRAIN, SIGNAL = 1.8; EXPRESSED IN HELA, SIGNAL = 1.9; EXPRESSED IN ADULT LIVER, SIGNAL = 1.9
tctccatttgctgtttgtgctgactgtctttctccttttaggttcaagctcattttgggggttccacttagtaataagaacagaggacctgcattcccatccctcagtcatagctggagtgtcttctactactgtcctcctcacacctgccagcaccttgattttctcctagcttgcctcctgcagaatagagtcacctatggactctccagtggattcatggataccctcccccagtcacctccgccagtactcagccttctcccaccagcctatcactgcttctgcagtcatgtcctccattgcaaccagcacgtctgcacggttgaactcttagctactttgaactttgatgtcactggcatggacatcactcccccttctcaagctttcttcctgagttctccttcaggctccagagagaacatcttcccattttccatggagctccctggttctgagaacatgtcacccaggagcagcattacctcagcctgttcccaccagtttgtctgcacagttggtcagtggcccaaatgcaactttcaaagttattgtggcccaagagccactgtttagcccacatttgagccccttct

SEQ ID NO: 8316 - DNA, 505 bp, Homo sapiens
  MAP TO AL121694.3; EXPRESSED IN BRAIN, SIGNAL =  14; EXPRESSED IN HELA, SIGNAL = 1.9; EXPRESSED IN BONE MARROW, SIGNAL = 1.5; EXPRESSED IN LUNG, SIGNAL = 2.1; EXPRESSED IN PLACENTA, SIGNAL = 1.6; EXPRESSED IN HEART, SIGNAL = 1.8; EXPRESSED IN FETAL LIVER, SIGNAL = 2.2; EXPRESSED IN ADULT LIVER, SIGNAL = 1.8
catcgtgtttgggagtttcctgctgctgctcttctccctgacccagttcagcgtggtgagcgtcgtggcctacctggccctggccgcactctcagccaccatcagtttccgcatctacaagtctgttttacaagcagtgcagaaaaccgacgaaggccaccctttcaagtgagtgcctcagctgaggagccctcacccactgaccaggggcttttaccctcacctgtatttcagctcacagatgcacttgagtcatgtttctctgagacccaacagacctcttagagtctcccctaacaccctgtctttgaatatctaacatttctggtgaatttctgaaacaaactcgattattcttattccaatacttattgctttgttgagttttcatatgtatttactattaacagtaatcataatccaacaattacttaatcctctcagcaatatcagaaaggcacagcaggcatttttgtccctatttacaggtgggaacactgaggtt

SEQ ID NO: 8317 - DNA, 551 bp, Homo sapiens
  MAP TO AC020596.2; EXPRESSED IN BRAIN, SIGNAL = 3.3; EXPRESSED IN PLACENTA, SIGNAL = 2.6; EXPRESSED IN FETAL LIVER, SIGNAL = 3.6; EXPRESSED IN HELA, SIGNAL =   4; EXPRESSED IN ADULT LIVER, SIGNAL = 2.9; EXPRESSED IN BONE MARROW, SIGNAL = 2.8; EXPRESSED IN HEART, SIGNAL = 3.4
tgcaaaccatctgctcaatccagatgcaacagcacatgcctcttatatccaaagctttttaccagaaacacagatctaatcctctcataaaatctccaacagaggtattcagacacatttgtatcacaaataaaaacaatgccaaaatcatcattaactgagaccttttaaatatcagtcaagacttttaccagtgagtacacattgataaaacaatattagaacagcattagagaaaaacagggttggatttctattagccttattcagctattcctcaagtaaaatcaggctgaaaacatctcactccttaaatagcaagaacattttagtcaagtcatcctagttttaaaaagacataagatattcctttaatattatatatttcaagtaatatgcatttcttaaaagactaaaagcaaatattcttaccttgaaattgtgaatcttttcatattttggaatttgctcgttttctttcagagttgctcttctaacaagtgatgtcaactgcgaataagcaaagagtttcagaggttgccagattgtca

SEQ ID NO: 8318 - DNA, 541 bp, Homo sapiens
  MAP TO AL135747.2; EXPRESSED IN PLACENTA, SIGNAL = 3.1; EXPRESSED IN BRAIN, SIGNAL = 3.4; EXPRESSED IN FETAL LIVER, SIGNAL = 4.3; EXPRESSED IN HELA, SIGNAL = 5.4; EXPRESSED IN BONE MARROW, SIGNAL = 2.4; EXPRESSED IN LUNG, SIGNAL = 2.5; EXPRESSED IN HEART, SIGNAL = 2.9; EXPRESSED IN ADULT LIVER, SIGNAL = 2.9
tattgaaaggccaggagcacaggggagagcactcaccttctttgctaacacccaggcagcccttcagctcaggcagtgaaatgaccttgtctttgttcaggtcacagtagtcggtgaaacgccgggcacatttcttgggcttggctttcttcttcacgtagcgcttgaagggcttcatctcccgcttgttaatgtcgttgctgctattgctgtccagctggctgaaataccagtgcactacccgctcctccagggtgtggctggggtctggctctgagaacctgggccatggacaaacacccccaccgcagagaacaccaatcaggatcttgcaggaaccatcagccctggtatgactgcccccagaaagtcaggtagaaacggctcctccaagccaaagtccacccacagcggctcagcctgtggcaacgttaagccatcctctccgactcaaatcctaagattggaccattcttttctcaggactccccaggtgggtaatccttattacacaaacatgactcaccctctaccaaagcca

SEQ ID NO: 8319 - DNA, 566 bp, Homo sapiens
  MAP TO AC016910.2; EXPRESSED IN BRAIN, SIGNAL =   2; EXPRESSED IN PLACENTA, SIGNAL = 2.4; EXPRESSED IN BONE MARROW, SIGNAL = 1.8; EXPRESSED IN ADULT LIVER, SIGNAL = 1.8; EXPRESSED IN HELA, SIGNAL = 2.5; EXPRESSED IN LUNG, SIGNAL = 4.1; EXPRESSED IN FETAL LIVER, SIGNAL = 2.2; EXPRESSED IN HEART, SIGNAL = 2.2
ctccccaaccagcagtagaccatgaaaaaaattgatactgtaggaagtgaaaccacttttcctaacacatgccctaaggtaacacaagttatattttgtgtgtttatttccagggagcatgataaagatccagaaagcttttttaaggtattaatgcatcttaaagacttaggactcaatttccacgtgtctgtacttggagaaaccttcacagatgtcccaggtacctctgttgaattttctaatgtgtatttttatagatgacataagctctacaacgtaagtattaatttccatgtttccctttgttagaataatcaagatgagcactgttaaccaaaagattatacgatggcattaaagtctgattcaattaaaaaaatacttaagtaagcattctttgatttaagttgagaacgtgaagtcatctctttgatcaaatatagtttatacagtgcatcttgatgtaaataaaatatattgctttaggcatcttaacacttaaggaaagtgggaatttgtaattggatatacaacctctcacctctggggtcactggtttgaat

SEQ ID NO: 8320 - DNA, 523 bp, Homo sapiens
  MAP TO AP001340.1; EXPRESSED IN BRAIN, SIGNAL =  15; EXPRESSED IN HELA, SIGNAL =  35; EXPRESSED IN ADULT LIVER, SIGNAL =  13; EXPRESSED IN FETAL LIVER, SIGNAL =  28; EXPRESSED IN LUNG, SIGNAL = 1.4e+02; EXPRESSED IN BONE MARROW, SIGNAL =  18; EXPRESSED IN HEART, SIGNAL =  24; EXPRESSED IN PLACENTA, SIGNAL =  24
tggggtgaaatggagaagacgtgggacatagctttaaaaatgggagaagcgctttttcccaagcggctgccgaagatggcggaggtgcaggtcctggtgctcgatggtcgaggccatctcctggtccgcctggcggccatcgtggctaaacaggtactgctgggccggaaagtggtggtcgtacgctgcgaaggcatcaacatttctggcaatttctacagaaacaagttgaagtacctgggtttcctccgcaagcggatgaacacccacctttcccgaggtccctaccacttccgggccccccagccgcatcttctggcggaccgtgcgaggtatgccgccccacaagaccaagcgaggccaggcttctctggaccgcctcaaggtgtttgaccgcatcccaccgccctacgacaagaaaaagcggatggtgttcctgctccctcaaggttgtgcgtctgaagcctacaagaaagtttgcctatctggggcgcctggctcacgaggttggctggaagtacca

SEQ ID NO: 8321 - DNA, 598 bp, Homo sapiens
  MAP TO AC023344.2; EXPRESSED IN PLACENTA, SIGNAL = 8.1; EXPRESSED IN HELA, SIGNAL = 8.7; EXPRESSED IN FETAL LIVER, SIGNAL = 3.6; EXPRESSED IN HEART, SIGNAL = 4.1; EXPRESSED IN BONE MARROW, SIGNAL = 3.7; EXPRESSED IN LUNG, SIGNAL =  75
gcagctggttatccgagaagttccgaggattctccttggatttcttagggaaccagttgggatccccagagaagagcccatcatcccaggctactgcaacccacccagattcctcagcgtccgctgcacacaggccatgttctttccttcccagaggtccacagtttggaagatgtcagtggtgttaatgccatagcgctcagctgcttgcaggaactgagagatcttctccatctgcttgaaggccatggtggaggcctggatcttctttactgggacctgcccctatgggtacagtgcattaatgagctcacataacaccgtgccatccttgagccagttctggaagttctcgcgtccaggctgggacccgcccacatcctttcggcactgtgtggtgatccactggatcaggatctgctccagatctgcatcatactgtttctcaatcttctgctgcacctcctgctcaggccataatgcaggtcccctgttggccattccaatgggtggcggtggctgcggggagcgttcaaacgggctggagagcggcacactcactcaaggcaatggctgcagctgccgagcttcttcttac

SEQ ID NO: 8322 - DNA, 526 bp, Homo sapiens
  MAP TO AL136527.7; EXPRESSED IN BRAIN, SIGNAL = 4.1; EXPRESSED IN PLACENTA, SIGNAL = 2.6; EXPRESSED IN HELA, SIGNAL = 2.6; EXPRESSED IN ADULT LIVER, SIGNAL =  12; EXPRESSED IN FETAL LIVER, SIGNAL = 3.8; EXPRESSED IN LUNG, SIGNAL = 3.1; EXPRESSED IN BONE MARROW, SIGNAL = 2.1; EXPRESSED IN HEART, SIGNAL = 5.2
cagtccacagcctgtcttttcaacttttatgtgttgtttattattgaataaagcttttgcatttttattagtcagatttatcagttttttaaaaaattatatacacgtttattttcattataaatttacttaaatcactttggactcagcatgtccttagtttttacctgttcatcaaactgttctggtgtgagatagccaagttcaataacagtttcctttaaggttgatccatttttgtgtgctgtcttagcaatctttgctgccttgtcatacgctatacgaggattgagagctgtcaccaacatttgagactcattcatcagcttgttgatcctttctgtattggcctggattcccaccacgcagttttctgtaaaggaaactgaagcatccgccagcagcctggctgagtgtaacacatttttaatcatcattggcttgaaaacattcaactcaaaatgtccactgctgcctccaactgttacagcaacatgattccccatgacttgggctacaaccatgg

SEQ ID NO: 8323 - DNA, 540 bp, Homo sapiens
  MAP TO AC019055.2; EXPRESSED IN ADULT LIVER, SIGNAL = 2.3; EXPRESSED IN FETAL LIVER, SIGNAL = 2.5; EXPRESSED IN HEART, SIGNAL = 2.2; EXPRESSED IN LUNG, SIGNAL = 1.8; EXPRESSED IN BRAIN, SIGNAL = 2.1; EXPRESSED IN PLACENTA, SIGNAL = 2.1; EXPRESSED IN BONE MARROW, SIGNAL = 2.6; EXPRESSED IN HELA, SIGNAL = 2.6
cgctgtggtgattactgtggtagtagttacagtagctgaagtagtagctgtagctgtgctagtagttgttgttacagtggtacttggtagcagtagttgataatgtagttgatgttgtagttgcagtagtggttgttgtagtagttgtagtaattatggtagttgttgtagtactagttgcggcagtagttgtagttactgtaatcaaagctagcagcatatcagcagcagcagtattgaaatcattacaatgacagtacaatgactgtcttttgtggactgcctccgtgcctggtgggagacagagtagcatgatgcttagcaatgcaaactccagagctggactgggctcagatcccagctcctttacaaaataagttgtatgacccgaggcaaatcactcaggccctcagcctcagctttcttgggtttaggtagggctaagcatactgcctacctcatgcatttctcatgaagatgaaatgaggaaatccatataaaacatttacgatagcaccagggacacagtcaactccccat

SEQ ID NO: 8324 - DNA, 519 bp, Homo sapiens
  MAP TO AC005201.1; EXPRESSED IN BRAIN, SIGNAL = 4.1; EXPRESSED IN PLACENTA, SIGNAL = 3.6; EXPRESSED IN BONE MARROW, SIGNAL =   3; EXPRESSED IN HELA, SIGNAL = 3.4; EXPRESSED IN HEART, SIGNAL = 2.9; EXPRESSED IN ADULT LIVER, SIGNAL =   3; EXPRESSED IN LUNG, SIGNAL = 2.1; EXPRESSED IN FETAL LIVER, SIGNAL = 3.4
ccacctactcaagcctcagcaatggcggatgcccctccccccaccaagctcaagcatcccaagttgacctcagactgctgtgctggcagcgagaatttcaaggcagtggatcttagcttgctgggctccatggaggtgagacccaccaagcccaaccacttggcttcctggcttcagccccctttccaggggagtgaatggttctgtctcgctggcattccaggtgccactggggtatggaaaaaaaaaagtcctgcagctaactcagtgtctcctgaatggctgcccagttttgtgcttgaaacccagggccctggtggtataggcacgtggtctgggggttgtgaagaccgtgggaaaagtgcagtatctgggccagagtacactgttcctcaggctcagcccctcacagcttcccttgggtaggggagataattccctgaccccttgcgtttcctgggtgaggcgatgccccaactgcttccgctcgccctccgtgggctgcacccactgtccacc

SEQ ID NO: 8325 - DNA, 597 bp, Homo sapiens
  MAP TO AL109658.5; EXPRESSED IN BONE MARROW, SIGNAL = 2.8; EXPRESSED IN FETAL LIVER, SIGNAL = 4.2; EXPRESSED IN LUNG, SIGNAL =   6; EXPRESSED IN PLACENTA, SIGNAL = 3.1; EXPRESSED IN ADULT LIVER, SIGNAL = 3.3; EXPRESSED IN HEART, SIGNAL = 3.5; EXPRESSED IN BRAIN, SIGNAL =   4; EXPRESSED IN HELA, SIGNAL =   4
tccaaggctcagtaacccacccaaggtcagaaccacggagtggcagggcctgtgagccacaaaggagactgaaaaccagaaagagcttctctctggtctgttattttaagaaaaacatgcccagaggggccacctggaagcaaggctgtgtggcaccctcaccttcctaattaaacaacaacttcccaggagcaacgacagcaacaacagcctggcccagcagatgaactcgaatcaatccaagcccttcccctatacgggtcagtttgggcactactttacctgctgtgaagtctactgggatcttccaggaaagtcccacctcattagtaaaaagaaaaacaaagactcgggaagaaagttcctgccctccctgttgaatgctgtgtgaggataagatgtctggagcatggcagtcaccctgtgactatcagaaggccaggcgtaccacaaggtggtcattccagtgctctgaatcagccccaaaccacttccctcaagactcatgttctgaggtgattaaaagtgtgctttgaaggtaaatctaggatgacagtcaacagatcagtgattgccaggagtcaggggtagagggag

SEQ ID NO: 8326 - DNA, 582 bp, Homo sapiens
  MAP TO AL049829.3; EXPRESSED IN HEART, SIGNAL = 1.5e+02; EXPRESSED IN BONE MARROW, SIGNAL = 7.6; EXPRESSED IN LUNG, SIGNAL = 5.2; EXPRESSED IN PLACENTA, SIGNAL = 4.9; EXPRESSED IN BRAIN, SIGNAL = 7.3; EXPRESSED IN HELA, SIGNAL = 6.9; EXPRESSED IN ADULT LIVER, SIGNAL = 5.6; EXPRESSED IN FETAL LIVER, SIGNAL =   7
aaggaggaggtgagaggagccctgtgagggcggggcagtggggccagagaagaaacttccacatctactcctggtgtctggcgtccgccgcacctggtaggtgagctccttgatgcgccgctcgctcttcctcatgcccttcaccgactctgcgttgcgcttctgctcggcctccagctcaccctccagctcccgcacccgcgcttccagcttctgcagctgcttcttgcctcccttgagggcgatctgctcggcctcgtccagccggtgctgcaggtccttaatggtctgctccatgttcttcttcatgcgctccaggtgggcgctggtgtcctgctccttcttcagctcctctgccatcatggcggcctgtgtgcaggagagaggtggcaaggaacatgggccaggggccggggccttttgccccccaaggatctcctttctcccatcaggccctcaaatccacagaactgcagagttggcttggtgttacagcacagtggcctggcctggacccaaggccttgtttctgtctttaggggaggcggaaggtgggcggtcacttacatccgtgatggcctt

SEQ ID NO: 8327 - DNA, 554 bp, Homo sapiens
  MAP TO AL117258.2; EXPRESSED IN BRAIN, SIGNAL = 1.7; EXPRESSED IN BONE MARROW, SIGNAL = 2.1; EXPRESSED IN FETAL LIVER, SIGNAL = 2.4; EXPRESSED IN HELA, SIGNAL = 2.9; EXPRESSED IN LUNG, SIGNAL = 3.8; EXPRESSED IN PLACENTA, SIGNAL = 2.3; EXPRESSED IN HEART, SIGNAL =   2; EXPRESSED IN ADULT LIVER, SIGNAL =   2
tggtcagtgagttcggtcagctggttggaataccagttccagagctttaggcgacacatttgaattgagttatcattgtagagagtcatggctccatcagctatggttatcttctttggtctgaatgcctatcagtccttaccagctgtagcagccactgcttggtaaaactttgccacgaagtctggctcactgaactccagctgtctgacaaattcattgcgctcctgctcagcccagcctcgaaaccactgatcccaaagatgtagctggcactcaaagatagaaggtggtcggtctgccccagacacactaagctgctccagactatccagcagtggttgtaatttttctggcactgccttagctaccaggtcctctaggaaacgttcacgctggggacctgaccaattggcaaaccagtgaagaatacacttcatctcctgggaggtgatgtaagacatcagaggaggggaagggttagtattgtgtggtactgagggtaagagagatgggaaggatagtggcattgaagaggatgactccagtggcat

SEQ ID NO: 8328 - DNA, 582 bp, Homo sapiens
  MAP TO AL158148.1; EXPRESSED IN BRAIN, SIGNAL = 2.9; EXPRESSED IN BONE MARROW, SIGNAL = 2.5; EXPRESSED IN HEART, SIGNAL = 3.1; EXPRESSED IN LUNG, SIGNAL = 3.1; EXPRESSED IN PLACENTA, SIGNAL = 2.8; EXPRESSED IN HELA, SIGNAL =   3; EXPRESSED IN FETAL LIVER, SIGNAL =   3; EXPRESSED IN ADULT LIVER, SIGNAL = 3.5
ggaagctgatccaaggtcacacagggggcacatggtggggaaggaagcgggccaggctggccctccccgatactcagacccgctcttctccaccaagcccttgtcagttctgcagtgcccagttcttggggaggagctggacaggctgatggagcaactgctctcacccagttggcttctggcacacagagagctgagttcaaggctgaagaaagggcctgggcttctgaacaaagacccgaaggcctggagtgagagcagtggaggctctacccactcccgaccccaaagtcctgccagtcttgggattttaggaaaaatgacatgggacctacaggtagaaggctgatcctaactctgtcactgaccctggggagggctcccaccttactgagtctcagcttgcttgtcaggaaaatggggataataaaccttgcttttgttactttcaaggtttttggagagacaaaagtgataggagaagggacacagaagcccctggtcacccaggagacccagttgtctggggtcttctcttgaggcctggggcaagaggggtgggggcacagttttctctcctgc

SEQ ID NO: 8329 - DNA, 523 bp, Homo sapiens
  MAP TO AC011375.3; EXPRESSED IN PLACENTA, SIGNAL = 1.4; EXPRESSED IN BRAIN, SIGNAL = 1.7; EXPRESSED IN ADULT LIVER, SIGNAL = 1.6; EXPRESSED IN HELA, SIGNAL = 2.7; EXPRESSED IN LUNG, SIGNAL = 2.6; EXPRESSED IN FETAL LIVER, SIGNAL = 2.4; EXPRESSED IN HEART, SIGNAL = 2.2
gggtttctaaatgccttccacattttctatcaaaatatgaaaagaatgttaaaatcagtggataaattcctaatttaaaacttacttagtttcttcaattcctccattccttttttatgagggggctcctgaataattttgtcaacatctgccctgccaatcagatcatcaggtcggtcccacatagaaagacgagtggtgggattataaaagaagacccgctcatcaccagtccaaacgacacacctaagaattgatgcaaaatatcattctcttatgttacagaacatattttacagctaggacttctttcagcctgttacaagtagggagatgagggtactgaagaacgacatgttcttattaccaatagttatttacagagaaccaaacatggtttttacaagataactgaatgactcaagcaaaaataacagatcaacatattaactgagaaaaccaagaaatgcaaagcaatttgtgatcagagattaaaatgcttaggaatttggtttggcacact

SEQ ID NO: 8330 - DNA, 598 bp, Homo sapiens
  MAP TO AC008381.5; EXPRESSED IN BRAIN, SIGNAL = 6.9; EXPRESSED IN PLACENTA, SIGNAL =   5; EXPRESSED IN HELA, SIGNAL = 7.2; EXPRESSED IN ADULT LIVER, SIGNAL = 6.4; EXPRESSED IN FETAL LIVER, SIGNAL = 7.1; EXPRESSED IN HEART, SIGNAL = 6.3; EXPRESSED IN BONE MARROW, SIGNAL = 4.9; EXPRESSED IN LUNG, SIGNAL =   7
tcccctactgcactttttgccaagcaagaagagtgtcttgttcacccccaaatcctgagcacatgacactgtccgcctatagtaggcacactgttgaatgaatagctgaatgagggtgaagctgtccagtagggaggttgggtggatacgtgggcctactccagacctcgacagaaaaatctgcagacagttatgaatgtggagttgtccacctataggagtcagcacccagtatatgctggttaaatcgaatgtacccaagtttcttcctgcagatgccaggccgtgagggctggtgtttctcatggcatctgccttttccccagcatctcctcctctccctacaaagccatgccttctccttataatctgccagcactggacatgatctaaaggcaaaatctgccttgggacaacaaatgatttgttatgtctcttgctcctccctagagaggcaacactgggtgataaaaagagcgtagatattaaagttgggcagatttgggctggaatctggctctgctcccaccagctaagtcttcgggtcagtgtatatacaactctgagcctcaggtgagcctccccctccttaagaatg

SEQ ID NO: 8331 - DNA, 517 bp, Homo sapiens
  MAP TO AC018801.2; EXPRESSED IN BRAIN, SIGNAL = 8.1; EXPRESSED IN PLACENTA, SIGNAL = 5.8; EXPRESSED IN HELA, SIGNAL = 7.7; EXPRESSED IN ADULT LIVER, SIGNAL = 7.5; EXPRESSED IN FETAL LIVER, SIGNAL =   8; EXPRESSED IN HEART, SIGNAL = 6.7; EXPRESSED IN BONE MARROW, SIGNAL = 5.9; EXPRESSED IN LUNG, SIGNAL = 3.7
cgtgttgtgggcttttatccttaacgtttaatttttacaatcttgtgtaaaaatttatccatgataataacataacttctttaaggttggagtggctggcaagagcagagccttaatttgactttagctctggctggtctggaagcttttacttttttgttaatcccacttcctcactctgtcattcagcattatcatgatcgtgaacaaaattgtactgagaaagtttgtataagtgatatgaacggtattgtattgaacatccattaaagggttgctacactttatactgtacattctgcgctatacattgtgcttcccagtgatgagcactgtgctgtatacttgcatcagtgttctcatttggttttcctaaaaacctgtgaaatgaggcacatttttgttcattaaacttttaaattgtttgagaccagcctgggcaacatccaaaaccccatctcgaccaaaaatacataaactagccaggtgtggtggtgcacgcccagctactaggaag

SEQ ID NO: 8332 - DNA, 553 bp, Homo sapiens
  MAP TO AC023344.2; EXPRESSED IN ADULT LIVER, SIGNAL = 1.9; EXPRESSED IN FETAL LIVER, SIGNAL = 2.7; EXPRESSED IN HEART, SIGNAL = 2.3; EXPRESSED IN BRAIN, SIGNAL = 2.4; EXPRESSED IN PLACENTA, SIGNAL = 1.6; EXPRESSED IN BONE MARROW, SIGNAL = 1.5; EXPRESSED IN HELA, SIGNAL = 1.9
cagggcatcatttccttgtctcattataagttagtaacaatatatagattaaatgtttacaatatagggaattgtaaataaatatatcagtttttttccccttcggtcttccacagcagtattattgtctttgtggagttgactaatgataatttaaaaatcctgtaatggatttctactaaaataaggtcatagtggcatataccaaataaaatcaaatacagaaatacaaatgagtttggatttattgaatactcattttcttaacaagtctttgattaagcctactactatctttttttttttaatgcttctaatagcttacattgtggtggtggtggtcatggtgttaggagtaatagtgataggagaatgcattcaattagagggagcattacattttttaaaatggagatgggagaaggcacttgacacatgggaaagtgtaagttatttgatatttttaaagtacattgttttcattttgggtggagaatgcataacaagctaagccccttatcataaacagttatgtgtgtgcaatgccaagaaa

SEQ ID NO: 8333 - DNA, 598 bp, Homo sapiens
  MAP TO AC022845.2; EXPRESSED IN FETAL LIVER, SIGNAL = 2.2; EXPRESSED IN HEART, SIGNAL = 2.2; EXPRESSED IN BRAIN, SIGNAL = 2.3; EXPRESSED IN ADULT LIVER, SIGNAL = 2.4; EXPRESSED IN BONE MARROW, SIGNAL = 1.9; EXPRESSED IN HELA, SIGNAL = 2.2; EXPRESSED IN LUNG, SIGNAL =   3; EXPRESSED IN PLACENTA, SIGNAL = 2.1
ccaggactctgtggaagctcatccttcactgcagagaatctcacatgctttaatggctccagggagtttggggaagagttgtcttctaaagaatgctccttctcagaaattctctcatggatggttaggccaggtgacacaattttgcttttgggttcaaagttgtgattataacgaagggtttctgagtctgtgctactggaactggagttgcgcttgaggatccctctcggagcccctctcgctttcagggagtctgtcctttgtctaggaaaagactggttatcatctttgtttaaatcagttgatttgtagatcatcttcctggctttggggattggagccttgatttgggacccatttgaaaggcctggcaaagtctgctttgatttctctaacttttggattgaagtatctgcgacagttgacttttcttttgactctgacaattcatctgaaaattaaaacacagtaggtgatatatcatatagagagtaatatataatttaaaatacctgtcataaacttaacctacacttagtgaaactattaaaatattaaagacagtaaagtatgtggcacaactacaggcctaatg

SEQ ID NO: 8334 - DNA, 587 bp, Homo sapiens
  MAP TO AC023890.3; EXPRESSED IN ADULT LIVER, SIGNAL = 4.2; EXPRESSED IN BONE MARROW, SIGNAL = 3.2; EXPRESSED IN FETAL LIVER, SIGNAL = 3.9; EXPRESSED IN BRAIN, SIGNAL = 3.8; EXPRESSED IN PLACENTA, SIGNAL = 3.6; EXPRESSED IN HELA, SIGNAL = 4.3; EXPRESSED IN HEART, SIGNAL = 3.5; EXPRESSED IN LUNG, SIGNAL = 5.2
tacctcagtaaagcccggtgatggggaaaacagggaatcagctctaattctcacaatgtgttagcagtgatgccttccatttttttcaaatgcggaaattgagactcagaagttaagtaagctgcccttgtagtacatggaagaaatgtggagagacttttggcaaaggatccaaaaatctgagccttatttccttctctgttcctctctctaggataccatcagaacggagtcatcagaaaccagtatgtgccatatccccatgctcctggaagccagaggtccaatcagaaaagcctgtacacctccatggcccgcccgcccttgcctcggcagcagtctaccagttcagaccgagtgtcacagacgccagagagcctggatttcctcaaggtcccggaccagggagctgcagggtaagattctcacatcctctggatgaagccggcaagctccatctccatcattcaaaacaagggttcagagattcctgtgggctgtcaatacacaggattctaaggtttagttttccacctcagtgctatatgccaggacccaaggctgtggggctgtggctggttatttgt

SEQ ID NO: 8335 - DNA, 556 bp, Homo sapiens
  MAP TO AC002124.1; EXPRESSED IN BRAIN, SIGNAL = 1.5; EXPRESSED IN HELA, SIGNAL = 2.4; EXPRESSED IN HEART, SIGNAL = 2.1; EXPRESSED IN ADULT LIVER, SIGNAL = 1.4; EXPRESSED IN FETAL LIVER, SIGNAL =   2
aaccaggcagtcaccttgaggaagcagaggaagagcttcagggggaccaggcgatgcaggaagacagagcgccctctagtggcaacagcactaggagcgacagcagtgcttgtgtggatgacacactgggacaagttggggctgtgaaggtcaaggaggaaccagtggacagtgatgaagatgctcagatccaggaaatggaatctggggagcaggctgcttttatgcaacaggtaataggcaaagatttagctccaggatttgtaattaaagtcattatctgaacatgaaatgcattgcaggtttggtaaatggatatgatttcctatcagtttatatttctctatgatttgagttcagtgtttaaggattctacctaatgcagatatatgtatatatctatatagaggtctttctatatactgatctctatatagatatcaatgtttcattgaaaatccactggtaaggaaatacctgttatactaaaattatgatacataatatctgagcagttaataggctttaaatttatcccaaagcctgctacaccaat

SEQ ID NO: 8336 - DNA, 571 bp, Homo sapiens
  MAP TO AC017067.2; EXPRESSED IN BRAIN, SIGNAL = 3.5; EXPRESSED IN BONE MARROW, SIGNAL = 3.6; EXPRESSED IN FETAL LIVER, SIGNAL = 3.5; EXPRESSED IN LUNG, SIGNAL = 8.7; EXPRESSED IN ADULT LIVER, SIGNAL = 2.6; EXPRESSED IN HEART, SIGNAL = 4.9; EXPRESSED IN PLACENTA, SIGNAL = 5.7; EXPRESSED IN HELA, SIGNAL = 4.6
ctcctcatcactgggacaggtactggtgaactcatccctactgtatgcattagttagttaggtatctccagatgacagtcatttcttttggaatatcaaagttgcgatttttttggccacaaccttgacaatatgcagctttgacagcagattgcaatcagctaatgtcatttcattgctgtccagaaatttacgtttagaaaacttaacgtcctccatactattttcatcaatttcatcagggagaggagaattcagatattcatccagtttctgcagggttttcaggagacccctctccagtgcttcattagcctctggccttgaattcttgatatatgcagagaatttggcaaagatgtccattccagcagtatttgattctgggtgttttggtgaaggctttaagtacgtgggagggcttaagacttcttcaagaaattcctcaatcttatttacatctgttttgacttcactgttgaaagttatgttcccctctctttaatttggagacactccaccacagacttttcactttagaggtagcttgccatctctcaggagccctcac

SEQ ID NO: 8337 - DNA, 530 bp, Homo sapiens
  MAP TO AC018497.4; EXPRESSED IN ADULT LIVER, SIGNAL = 3.2; EXPRESSED IN BONE MARROW, SIGNAL = 2.9; EXPRESSED IN LUNG, SIGNAL = 2.6; EXPRESSED IN PLACENTA, SIGNAL = 3.1; EXPRESSED IN FETAL LIVER, SIGNAL = 3.7; EXPRESSED IN HELA, SIGNAL = 3.9; EXPRESSED IN HEART, SIGNAL = 3.5; EXPRESSED IN BRAIN, SIGNAL = 3.1
ggttattttagagtgcacttcttccagttatataaaaaaaagttagttgtaaaacagccacaggcagctccctcaggagaaattccagaagaaggcattgctgtcttagggggtgacagctccatgcctgttattgtccccgaagaccttccagtaggacaagatgtggaagtggaagacagtgatattaatgatcctgactccctgtaggtctaggttaatatgtgtgtttatgttctacttttaaataaagtttaaaaagtaaataaatagcattttaaatagaaaaaagctcatggtataaggatataaagaatgaaaatatttttgtacagctgtacaaatgtgtttgttttaagctaagtgttattacaaaagggtaaaaatttaaaaaattaagtttatatagtaaaatagttaaagtaagctaagatttttatttaattttaattattttgagacagagtcttgctttgtcacccatgatagagtgcagaggcatggtcacggcccactgcagcctctacttc

SEQ ID NO: 8338 - DNA, 535 bp, Homo sapiens
  MAP TO AC011497.3; EXPRESSED IN FETAL LIVER, SIGNAL = 4.1; EXPRESSED IN HEART, SIGNAL = 2.7; EXPRESSED IN LUNG, SIGNAL = 8.1; EXPRESSED IN PLACENTA, SIGNAL = 2.2; EXPRESSED IN BRAIN, SIGNAL = 1.8; EXPRESSED IN HELA, SIGNAL = 1.7
tgcccaaaccaaagaaaaacagatgtttcatgtgcagaaagaaagttggtcttacaggtttgactgccgatgtggaaatttgttttgtggacttcaccgttaactctgacaagcacaactgtccgtatgattacaaagcagaagctgcagcaaaaatcagaaaagagaatccagttgttgtggctgaaaaaattcagagaatataaattacttcttgtgaagagactgaaactttgtttttattttaatacatcataggaaaacattaaagagcagatgcatggccatttttaaaaaaaaataaataaataaaaataaaataaaataaaataaacttccactcttgctctgggaaaaaatcattgaggaatatactttaaatgggtgagtggtatggcatataaattatatctcaataaagcttttttttttttaagaaaaaaaagaacactgaagcctggataaagactgtaccagctggacagagtttagattcagttgtaatatcccataagcccattaagacccatagcca

SEQ ID NO: 8339 - DNA, 522 bp, Homo sapiens
  MAP TO AC018801.2; EXPRESSED IN ADULT LIVER, SIGNAL =  15; EXPRESSED IN HEART, SIGNAL =  12; EXPRESSED IN BRAIN, SIGNAL =  12; EXPRESSED IN PLACENTA, SIGNAL =  12; EXPRESSED IN BONE MARROW, SIGNAL =  13; EXPRESSED IN LUNG, SIGNAL = 8.6; EXPRESSED IN FETAL LIVER, SIGNAL =  14; EXPRESSED IN HELA, SIGNAL =  15
cgggttctgcttttcttctgcctttcaatccttatacatgtgtctccactggcagaatttaacctggaaacatttagagtaagttctctggaaaatagagtgctaggctgtctccctataggtacagaagagaatgtagaagggggtggcaatcatgccgagttgacaactgacaagctggcacatgctcctgttggggcctatgggtagaaaggagaggacaatgaggtccctggcctcatgcaggtttcagactccagggagacctgtaagttctgtgagggaaacaagcaaagggctgtgactgagagtaactgaggacatagtgtccaggaaaggcctctcagaggactgaaacatgacaaggagccgcagctatgtgaagggcagagactgtggagttgtgactatccaggtagagaggtgtccagggcagtgagcgccacagcagctcttttgagcttgatttattttaggaaatgatggaaggtcaatgtgaatggcagttggtggagtgtagca

SEQ ID NO: 8340 - DNA, 532 bp, Homo sapiens
  MAP TO AC023392.2; EXPRESSED IN ADULT LIVER, SIGNAL = 2.3; EXPRESSED IN FETAL LIVER, SIGNAL =   5; EXPRESSED IN LUNG, SIGNAL = 1.8; EXPRESSED IN BRAIN, SIGNAL =   2; EXPRESSED IN PLACENTA, SIGNAL = 2.9; EXPRESSED IN HEART, SIGNAL = 5.3; EXPRESSED IN BONE MARROW, SIGNAL = 3.1; EXPRESSED IN HELA, SIGNAL = 5.3
ggagaaagtcaagcctgctgcagaaatttgaaaaagtaatgaagagccaaatgttaaccatcaagacaatggggaaaatgtctccagggcatgttagagaccttcatggcagactctcccatcacagtcacagaggcctaggatggaaaaatgatttcctgggcagggtccggggcctccctgccgtatgcagcctcaggatttggtgccctgcatccaagccacttcagccatggctaaaagggaccaaggtacagctcaggccattgcttcagagggttcaagcccaaagccttggcagcttccatgtggtggtggtcctgcaggttcacagaagactagagttgcagtttgggaacctccacctagatttcagaagatgtatagaaacacctggatttccaggcagaagtctgatgcaggggtgaagccttcatggagagcctctgctagggcagtgtggaagggaaatgtagggcccccacgcagattccacactgaggtactgcccagtggagctgtgagaagaggg

SEQ ID NO: 8341 - DNA, 592 bp, Homo sapiens
  MAP TO AC013359.4; EXPRESSED IN BRAIN, SIGNAL = 3.7; EXPRESSED IN HELA, SIGNAL =   2; EXPRESSED IN LUNG, SIGNAL =  12; EXPRESSED IN HEART, SIGNAL = 2.4; EXPRESSED IN PLACENTA, SIGNAL = 2.7
tggctgtcacaaaggttctgatagtaacattttatattccctgtactatctcttcagtgctaccttcgtttctaccaaggtcttctttgcaattttcattagttgactttgttattgcttctcccatgtcctttagagagcggagagagagagagctgcatgaagcatataagaacgctcggtcccaggaggaggcagaggggatccttcaacagtacattgagaggttcaccatcagtgaggctgttctcgaacgcttggagatgccaaaaattctggaaagaagccattcaacagagccaaatttatcctccttcctgaatgaccccaatcccatgaaatacctgcggcaacagtcactgcctccacccaaattcactgccactgttgaaaccaccattgctcgtgccagtgttctggataccagcatgtcagcaggcagtgggtctccaagcaaaactgtcactcccaaagcagtgcctatgctgacacccaagccttactcccagcccaaaaattctcaagatgttctgaagacctttaaggtaggacaagttccttaagagtagaaccaaagctgaactccagggag

SEQ ID NO: 8342 - DNA, 515 bp, Homo sapiens
  MAP TO AC023153.2; EXPRESSED IN BRAIN, SIGNAL = 1.7; EXPRESSED IN HELA, SIGNAL = 1.8; EXPRESSED IN HEART, SIGNAL = 1.7
cgattgcaattcaagtgcttagtgaaatagtgggttttggcaaaactatatgtacaaaataattaacaaatataatatatctgaatagccaactgagtcagatcctcaccataaagtcacactagaggattttatataaatgatcatacttccatctaggatgattttcaaaaagtgggtaacacatcggtgacaaacactacagtaaggtctccagtcaaggctgaacaaagtggggcaaagtctcccaaactccattttcataaaaatgtcaacagaaaagaagcatcagtgataaatctgggttcatatcctattacaggaggaaaacaaccagttttacatcttgtacaaacactttcaatcaccttttatggccatgtagctgccgcatttggcaattaaaaaattataacatgtagatttcaataacaatccataagtgctggagtcgagattgtttgtggtgccatatttcattcagagctgagtagaggaaggtggctgtggtttaa

SEQ ID NO: 8343 - DNA, 538 bp, Homo sapiens
  MAP TO AC011126.3; EXPRESSED IN HEART, SIGNAL = 4.2; EXPRESSED IN LUNG, SIGNAL = 1.7; EXPRESSED IN PLACENTA, SIGNAL = 1.9; EXPRESSED IN BRAIN, SIGNAL = 2.4; EXPRESSED IN BONE MARROW, SIGNAL = 1.9; EXPRESSED IN ADULT LIVER, SIGNAL = 2.2; EXPRESSED IN FETAL LIVER, SIGNAL = 4.5; EXPRESSED IN HELA, SIGNAL = 4.3
actgctgaagtttgggatggctgtggcaatttcttaaaataggacaacaataaagtatgctgcagcaattgactcttcctttcacacacataaaaaatttctctgtagcatgtgatgctgtttggtagcattttacccacagtagaacttctttgaaattggggtcaaccttctcaaaccccgttgctgctttatcagctacgtttatgcacaatttaaaatcctttgttgtcatttcaacaatgttcacagcatctgcaccaggagtagacttcatcttaagaaatcacattctttgctcatccataagaagcaactcctcatcttttcaaggtttatcatgagattgcagcaattcagtcacatcttcaggctccatttctaattctagtttgctttctattaatatttctaccacatctgtagttacttcctctagtgacaacatcttgaacccctcaaagttatcaatgagagttggaactccttccaaactcctgtttatgtagctcttctgaccttctgccatgaatcacaa

SEQ ID NO: 8344 - DNA, 540 bp, Homo sapiens
  MAP TO AC002401.1; EXPRESSED IN ADULT LIVER, SIGNAL = 1.6; EXPRESSED IN LUNG, SIGNAL = 3.6; EXPRESSED IN PLACENTA, SIGNAL = 1.8; EXPRESSED IN BONE MARROW, SIGNAL = 1.7; EXPRESSED IN HEART, SIGNAL = 1.8
taatatgcgtaaggcccctggcacatagtaagtgctttaaaacagtagaagtcatggtggttgctgatactggcatgaggtcctgtttctagtgtggatggtctaggccagctgtccccgtggctaactaggggtgggtggtctctgctcttcctttcttcccccatggccccatggtccccacctttccagttgtaggcaccgggggcgccgaagtacacagtgttctgggtgaagccaccgctggtgcccagctggcacatgcccgtctccaggtagtctgtgttgctattgcacatctcgttgtggtaggtctgccagtcatcactggagtccagctctaggtcattgcctcgcacgtagcacttgcccaccatgcgccgctggtcttctgaccctgaccacagcacctgggtgtagcggtgggcacagacctggggaccccccaaacacaggcagccttagtcaggcacagggacccgggtcagctgtctcttttaccctgtaagcctctggctttgccaaacaggagtcaaagga

SEQ ID NO: 8345 - DNA, 600 bp, Homo sapiens
  MAP TO AC015971.2; EXPRESSED IN BRAIN, SIGNAL = 6.8; EXPRESSED IN BONE MARROW, SIGNAL = 5.8; EXPRESSED IN FETAL LIVER, SIGNAL = 8.1; EXPRESSED IN LUNG, SIGNAL = 9.5; EXPRESSED IN HEART, SIGNAL = 8.1; EXPRESSED IN PLACENTA, SIGNAL = 6.5; EXPRESSED IN HELA, SIGNAL = 7.7; EXPRESSED IN ADULT LIVER, SIGNAL =   6
ggccaagttaaccaatcaggttccatatcttcattagtgttatatgatccatatgacctccccttcctttcacatgggctggtctgacaatatttattggcacatgaacaagcctcagcatcacagtgacttgctgttcctggagaattgtgaagtacgctttgcttatcttcaaatacttccttctcactactcaaagtgtctgtgttctcactttccgagtcattttcagtatcttgagacccctccgacatttcctcttcagactggactccaagacatttaaatcgccacattggtaagtttttaatataatcagttggtatcagagggtgaagccaaaggtcagggaaagctaagcgctccaagaataagtcagggtcttcgtcccaatcagattctacaggaaagttctgaaaagaagcaatcgggtggaagaggtagctggtgtaccagtcccacagacttgataaccattctaagttattggcattgacttcatcattgttgttgttgcgccttctcttcttctcaaagtaatcaattagtaaaccatgaccaaggtatgtactgagaaacagggctgggtgtgaagagtaa

SEQ ID NO: 8346 - DNA, 586 bp, Homo sapiens
  MAP TO AC018503.4; EXPRESSED IN BRAIN, SIGNAL = 3.5; EXPRESSED IN ADULT LIVER, SIGNAL = 3.9; EXPRESSED IN HELA, SIGNAL = 4.2; EXPRESSED IN HEART, SIGNAL = 4.3; EXPRESSED IN PLACENTA, SIGNAL = 3.4; EXPRESSED IN LUNG, SIGNAL =   4; EXPRESSED IN FETAL LIVER, SIGNAL = 3.7; EXPRESSED IN BONE MARROW, SIGNAL = 3.3
aaatttaccatgccagccaggccctgaacgctctactggtaggtaacctggtttctttaaccttagtgtctgtcttaattgataaaagtgtagtctctcagatcgcattggcatatgtaaagatgtcaataaatgcttgtttcctttttaaataaagcattgaaaatgcagatttttcttttcctgggaggactattcattatcaggacatctttccttccagaaagaatttcaattataaggcaaccaaggaaagcaaagatcacctggtggccatcaagcaggccatccagagacaaaactccttatttgaggaatttagaatattagacttccctgttatctaaagcaggcatctggttgcaggtttctttcccaaaaatgtataagtaactagaattgctgtacatctccggaatgcatgcatattgaaactcattgtgcaacccttgttgacatcaaggtaccaaaatgcctacaaatgcaatcatttttcatgacctacatggctaatatggttcaaattaccctaaagtacccactttaagattcataaatattcccaaggaaaaatccaccacattgc

SEQ ID NO: 8347 - DNA, 589 bp, Homo sapiens
  MAP TO AC018506.3; EXPRESSED IN BRAIN, SIGNAL = 3.2; EXPRESSED IN PLACENTA, SIGNAL = 2.4; EXPRESSED IN ADULT LIVER, SIGNAL = 2.5; EXPRESSED IN BONE MARROW, SIGNAL =   2; EXPRESSED IN FETAL LIVER, SIGNAL = 3.9; EXPRESSED IN HELA, SIGNAL = 3.9; EXPRESSED IN HEART, SIGNAL = 3.4; EXPRESSED IN LUNG, SIGNAL = 2.8
atctcatggggaagggagagggcattgcgggttccagaaagtttctgctacccatcgtagacctctttctctctctcttttccctgcccctgccctctctttctccctctgtggaagtgggtaacaagcacgtggttgggttgatgtgccctcaatagggtggggcccagactgcggacactagcgagtaatggtcttttctcttccttcctgaccgtggtggtgggcccggtgctctgcccctcagctctgtgcctcgtcctgggctgcatgatctttcctgatggctgggatgccgagaccatccgggacatgtgtggggccaagacggggaagtactccctgggggactgttcagtgcgctgggcatacatcctggccatcatcggcatcctcaacgccctcatcctctccttcctcgccttcgtgctgggcaaccggcaaacagacctgctgcaggaggagctcaagccggagaacaaaggcgagtgtgctgtgggctggggggcagcggcgggagccaggcctggtcctgggaggcaggataatttcaaataaaaggagtaagagggttgcatgaattggaaac

SEQ ID NO: 8348 - DNA, 546 bp, Homo sapiens
  MAP TO AC011989.3; EXPRESSED IN BRAIN, SIGNAL = 2.9; EXPRESSED IN ADULT LIVER, SIGNAL = 5.2; EXPRESSED IN BONE MARROW, SIGNAL = 7.5; EXPRESSED IN PLACENTA, SIGNAL = 3.9; EXPRESSED IN LUNG, SIGNAL = 9.1; EXPRESSED IN HEART, SIGNAL = 1.9; EXPRESSED IN HELA, SIGNAL = 3.7; EXPRESSED IN FETAL LIVER, SIGNAL = 4.6
tttcctcccatccttcagtgtggctctgcaaaagagaacagggttatctgtgggtgtcctgatctgaatatcagaactaatccatgagactggaggaaacgagtgcatatgtggatggaggtagagggtttctctgataaggcaatagcacagaaacagcaacttacatcacttcgacttggttgcaatgggttcctttcccgatcacttccaaactttggatgtttttgggatgaattccagaggttgtctttatacacatgcagcggagttcagcatacaagtcactgtctagactttcctctagggtagaaaatgtgacctattggtggtcatgaatattttcctcaggtctcttatttgcagattgagggcaattgtacctctctcataaagccattgtgaatatgatctgtaacgctttagtaaagtgcccagaagattgcccagcacacaagaagtgagaagtgacccccctgtgtgtctcctccaattggagttattggtataatggccctctccagccccaaaggcaccaagctagtc

SEQ ID NO: 8349 - DNA, 519 bp, Homo sapiens
  MAP TO AL121767.3; EXPRESSED IN BRAIN, SIGNAL =   2; EXPRESSED IN FETAL LIVER, SIGNAL = 5.7; EXPRESSED IN HELA, SIGNAL = 6.1; EXPRESSED IN ADULT LIVER, SIGNAL =   2; EXPRESSED IN BONE MARROW, SIGNAL = 1.8; EXPRESSED IN HEART, SIGNAL = 5.5; EXPRESSED IN PLACENTA, SIGNAL = 2.5
gaactgggtagcaggcagaggttggaacagtttggagggctcagaagaacagggaaatgtgggaaagtttggaacttcttagagacttgttgaatggctttgaccaaaatgctgataatgatatggacaataaaatccaggctgaggtggtcccagatggagatgaggaatttgttgggaactggagcaaaggtgactattgttatgttttagcaaagagactggatgcattttgcccctgccctgaagatttggggaacattgaacttgagagagatgatttggggtatctggtggaagaaatttctaaacagcaaagcattcaagaggtgacttggctgctgttaaaggcattcaattttataagggtagctgagcataaaagtttggaaaagttgcagcctgacaatgtgattgaaaagaaaatcccattttctgagaagaaattcaagctggctgcagaaatttgcatgagtaatgaggagacaaatgttcatcaccaagacaatggggaaaatg

SEQ ID NO: 8350 - DNA, 545 bp, Homo sapiens
  MAP TO AC018686.3; EXPRESSED IN BRAIN, SIGNAL = 4.6; EXPRESSED IN HEART, SIGNAL = 3.9; EXPRESSED IN ADULT LIVER, SIGNAL = 5.7; EXPRESSED IN PLACENTA, SIGNAL = 4.1; EXPRESSED IN LUNG, SIGNAL =   6; EXPRESSED IN HELA, SIGNAL = 4.4; EXPRESSED IN FETAL LIVER, SIGNAL = 2.1; EXPRESSED IN BONE MARROW, SIGNAL =   4
gcaaaaggagcaagttcagggagacaggaccctcaggaaaagcacgggctgcagttagcagatgcttgaaaagggtgtagacaatcccagggctggctgtgttgcggtgaggggtcaaggctggcagtgccataggcctcccacagctccccatctgccacagtttccctacccagagcagctcctgaaagagcactctgtcatccttacagaagaggaaaaggcaaggaagagtgacatgcaggtgcctgctgcatgccaggtgctggagttcatgtacatcatcaaaatcatgacaacccagccagttggatactgccagccccatttcatggaagagaagactggggtcagaggtaaagtgacttccctgagcatctccccagaggacaaaggaatcctagagtgatacaatatattcacctatgtcgaaggatgggaatgatatgggtgggaggaaatggtcaagcaatttggcatgacagaatgatgccctttccaaatggtcagagtgagccgtccccactgggcttctctctccctct

SEQ ID NO: 8351 - DNA, 547 bp, Homo sapiens
  MAP TO AC009242.2; EXPRESSED IN BRAIN, SIGNAL = 2.8; EXPRESSED IN ADULT LIVER, SIGNAL =   4; EXPRESSED IN HELA, SIGNAL = 2.6; EXPRESSED IN HEART, SIGNAL = 3.5; EXPRESSED IN PLACENTA, SIGNAL = 2.7; EXPRESSED IN LUNG, SIGNAL = 3.1; EXPRESSED IN FETAL LIVER, SIGNAL = 2.4; EXPRESSED IN BONE MARROW, SIGNAL = 2.5
gtgtgtgtgcgtgtttctcctttcatctttccctggctcccccaatttaagaaaggttagtttaggtaaaatgagcattacaaggctcccacaacctccgcagcctttctgtcacaggattaaagagaagaatgaaccccaggctgagtatgaactttttgtagggctcaagagaacagaaccccaggctgaggagggagaggcagacttggagtgtgggaggacagggtaaggggtgtaacctcatggtcaggctgctactaggggagcatggcagaagcagacctggctcagtggccaatagcagagaggtccaccctccaggccaggacccataggtccagtgaggtcttccttgctgagagctccaaggggactgacccttgggtcccttaggaggagggatcaaggccaccagaactggaagcccagaggccacagtgagcctgattcccaaaagagaagcagagggggtctggggagggaatatctgccatctttcatctgacaggggacagacataggcactggctgtgctgatgagaaa

SEQ ID NO: 8352 - DNA, 567 bp, Homo sapiens
  MAP TO AC023221.2; EXPRESSED IN ADULT LIVER, SIGNAL = 2.5; EXPRESSED IN FETAL LIVER, SIGNAL = 1.9; EXPRESSED IN LUNG, SIGNAL = 3.3; EXPRESSED IN PLACENTA, SIGNAL = 2.2; EXPRESSED IN BRAIN, SIGNAL = 1.7; EXPRESSED IN BONE MARROW, SIGNAL =  13; EXPRESSED IN HEART, SIGNAL = 2.1
cagcagttgcaaaagcagagggggaaaaacagggactatgggacaccacagaaacaagtgaatctagcgttattaactttaaattttttgagcctgcctaaaggccagatgttatcagcaactgaacagcatatacagaacagaaaccagctgcaaagacagaagcagaacaactggtttggtggaaagatctgataacaaaaagttgggaaataggtaaaataataacttggggtagaggttatgcttgtgtttctccaggaccgaatcaacagctgatttggataccatcaagacatctgaaaacttatcatgagccagatgatgaagaagagattccgggaggatcccaaggaccccacagttgcagtcatgttgagactgatgctgagaagaaccccaactgtcacgagcaacacccatcaaacacagccacctacctggggacagatcaagaagctgtcacagatggcggaagaaaatctgagaaaagcaggacaaacagtcacaatgagtaatttaatggtagctaggatagcggtgatcaccattgctgcgagtattcct

SEQ ID NO: 8353 - DNA, 560 bp, Homo sapiens
  MAP TO AC012614.3; EXPRESSED IN BRAIN, SIGNAL = 3.6; EXPRESSED IN ADULT LIVER, SIGNAL = 2.8; EXPRESSED IN HEART, SIGNAL = 2.8; EXPRESSED IN PLACENTA, SIGNAL = 2.8; EXPRESSED IN LUNG, SIGNAL = 2.5; EXPRESSED IN HELA, SIGNAL =   3; EXPRESSED IN FETAL LIVER, SIGNAL =   3; EXPRESSED IN BONE MARROW, SIGNAL = 2.7
gatggaagtgccaaggagacagggttccctcttccccagcttccagtcaaggtatataatatttccctgggaggtcaggatgccagcacaactaatccctgccagctccaggctgtggagactaaattccaggcaaatgcaactgagcagtctggggctctcatcttccactcagctctgactcataagatggagactctactgctggtgtgacagggcagtaacactgggacccgaagttccctcaccccagtttactcataggacagagatttcatgctgggagaagtgaactgagagaccagagtctaccatgacaaccaggctagaattacaactaaggttgtcattctaagagaactgggccattatgcccacaccaaactctggagcagtggcttggagattttggccatggggcgagacaggccattaaaatggagagctctgactgagaggaatttggaacagagtatgaggaagtttgagcctaaaagtactcttaaaacaatgaacattttggtggtaagtaattaagaggaggctggtagctccatgag

SEQ ID NO: 8354 - DNA, 590 bp, Homo sapiens
  MAP TO AC009989.6; EXPRESSED IN BRAIN, SIGNAL = 2.1; EXPRESSED IN PLACENTA, SIGNAL = 1.7; EXPRESSED IN ADULT LIVER, SIGNAL = 2.4; EXPRESSED IN BONE MARROW, SIGNAL = 1.6; EXPRESSED IN FETAL LIVER, SIGNAL = 1.8; EXPRESSED IN HELA, SIGNAL = 1.7; EXPRESSED IN LUNG, SIGNAL =   2; EXPRESSED IN HEART, SIGNAL = 1.9
ttatttggccatgtggtgtgaggtagggttgcattttctcccctagataattgagatattaatagttacttttgaggtcagatatccatttcccatagaaaataaagcaataaaagttcaatcctaacatgagggaagcctaaacccacttcattgcttggtccaggctgggaaggccatctctgcactggaaccagaggatggcctgttcttggcctttcccagatgaggaagcgtagagcagtggttaagagcaagagtccagaggcaggtggacggagtgaaagtgcttctctctcaatacctagttgtatgaccctggtcaaatgttctcacctctttaatgtgctttctcctcatctgcaaaacagggataatatcagtacctgcatcataaaatggtggtgagaagtaaacaaagtcctgaatgtgaactgcactgcacagtgcttggcaagggaacacaggggagctgctgccattatcattgtcaccattaccctcaccaccactatttggacccttggtgatggctccaacctcaggcctgccatttactgatgtagaagtgactggaaagtgctggcttc

SEQ ID NO: 8355 - DNA, 599 bp, Homo sapiens
  MAP TO AL158801.1; EXPRESSED IN HEART, SIGNAL =  53
ttgattttgcttcccagaggacatcagcaatgtctggagacatttccagttgtcactacttgagaggaagcgtgatcggcctctagaagggagagaccagggatgccgctgctcaatatcctataatgcacagaacagcttctacgacaaagagttattccaccaaaaatgtcagtagtgccaaggttgagagaacctgctctagggtaatcagtgtggtcccaatctccctgtcagtaactgattcaactcacataataatcttatgggagtgtgatgtaattctagccaataaaatgcaatgggaagttggccgagatacttctgaaaaaatcttctcttacccctaaaaagagacattcattttctgttgaaatgcattactttcctaaataaaatcatatttaccaacaacgagaaaaagagaaacatgcaagaaaccatctgtttgctgctagatgccattgtgtctgcaatgtgatatctggaactatggctgtcatcctggaaccatgagaggagttagctgaagaaacaggaggatggcaaagcggaaggatggaagttacctgaggctgaggacatcagtgcacctctga

SEQ ID NO: 8356 - DNA, 552 bp, Homo sapiens
  MAP TO AC018552.2; EXPRESSED IN FETAL LIVER, SIGNAL = 2.4; EXPRESSED IN HEART, SIGNAL = 2.2; EXPRESSED IN BRAIN, SIGNAL = 2.8; EXPRESSED IN PLACENTA, SIGNAL = 3.1; EXPRESSED IN BONE MARROW, SIGNAL = 1.8; EXPRESSED IN ADULT LIVER, SIGNAL = 1.6; EXPRESSED IN HELA, SIGNAL = 2.9; EXPRESSED IN LUNG, SIGNAL = 3.2
ctgtgaggtctggctttgtgctggcacactgctgatgcagagctggtggagaggtctctgtagttcctgctgatccagctatctgcccctcacctttacaggagcgcatgatgcacgaagagcacctgcggcaggtggagacccagctggactacctggccccattcctggcccagctcccgccaggagagaaactaacatgctggcaggcggtgcgcctcaaggatgagtgcctcagcgacttcaagcagcggctcatcaacaaggccaacctcatccaggcccgctttgagaaggtgccaccagggcctttgttggggagggggggatctcagcatctgcatccaggaaatgggcccacggctgtccgcccactacctcacaggcttgtgagggcctgatgacgggatgaatatgtcaatgcttggggtttccaaatgactgagttgttcctcctcacacttgtttatcggatagatgaatcgatagggagatggatggatgtaggtatggataggtgggtgggtgggtgggtggatggatggatggata

SEQ ID NO: 8357 - DNA, 587 bp, Homo sapiens
  MAP TO AL158801.1; EXPRESSED IN PLACENTA, SIGNAL = 6.1; EXPRESSED IN BONE MARROW, SIGNAL = 6.8; EXPRESSED IN HELA, SIGNAL =  13; EXPRESSED IN LUNG, SIGNAL = 4.6; EXPRESSED IN ADULT LIVER, SIGNAL = 7.1; EXPRESSED IN HEART, SIGNAL =  11; EXPRESSED IN BRAIN, SIGNAL = 5.8; EXPRESSED IN FETAL LIVER, SIGNAL =  13
tttcagaaggccctgaagtgggacaggaaatgaactgtaatcttaattttttaaataatgaaaattcatgtaagttgggttttgtccttttccttgacaggatgtcttcatcacattttgccagtcgacacaggaaggatataagtactgaaatgattagaactaaaattgctcataggaaatcactgtctcagaaagaaaatagacataaggaatacgaacgaaatagacactttggtttgaaagatgtaaacattccaaccttggaaggtagaattcttgttgaattagatgagacatctcaagggcttgttccagaaaagaccaatgttaagccaagtaagtaaaggtctgttgtaattttaagtactttgaagagtgaataatagttggtttaatgcctgtgtgagtaaaaaactctggccagaagagttttgaaataccattctataaataactttcctttttggtctttttccttttttttttttttttttttttaaattacaagagacagggtctcactgtgtcacccaggcgggagtgcagtggtgtgctcactgtaacctcaaattcctgggctcaag

SEQ ID NO: 8358 - DNA, 597 bp, Homo sapiens
  MAP TO AC007340.3; EXPRESSED IN BRAIN, SIGNAL = 7.6; EXPRESSED IN PLACENTA, SIGNAL = 7.3; EXPRESSED IN LUNG, SIGNAL = 3.7; EXPRESSED IN ADULT LIVER, SIGNAL = 7.8; EXPRESSED IN BONE MARROW, SIGNAL = 6.9; EXPRESSED IN HELA, SIGNAL = 9.8; EXPRESSED IN FETAL LIVER, SIGNAL = 9.4; EXPRESSED IN HEART, SIGNAL = 8.5
agtgtgtccaaaccccaaaggtgatcacagaacatgaagcaatggtttctaattaacccttttctttaggcataagggctcagggtatacatagaactctttatggcatgtggactttttattgtttgccttaggattataacagaaattaataaaaaaaataaacttcccacaatcaattctagtaagacataaaattattttgaacaactgcttcaatgcatgaatctgttttgttttgtttcgttttttaattatagacccctatttttcaacacttacctcttggacaagtgttatgttgatccaagtgctaaactcttggatcagactcagaaggaaaaggagtcatgggataaatgaggtttggagaagtggagttctcctgaaaaagaaagagagaaagaaggagaaggagaagaagaggaacaggaaggggaagaaaagaagaagaagaagacgaagaggaagaaggaggaggaggaggaagaagaaaggggaagggtagggggagggggaggaagaggaaggagtaggaggaagagaaggaaggaaagacgagagagtgagaaagaaagaaggaagggaggaaggaag

SEQ ID NO: 8359 - DNA, 541 bp, Homo sapiens
  MAP TO AC019055.2; EXPRESSED IN BRAIN, SIGNAL = 2.3; EXPRESSED IN PLACENTA, SIGNAL = 2.3; EXPRESSED IN BONE MARROW, SIGNAL = 2.3; EXPRESSED IN FETAL LIVER, SIGNAL = 3.1; EXPRESSED IN HELA, SIGNAL = 3.2; EXPRESSED IN ADULT LIVER, SIGNAL = 2.8; EXPRESSED IN HEART, SIGNAL = 2.9
ggggtcaatcctcctctctcactacagccagcacctgcatacaccattggagagcttaatgacagccctgccttgtctgccactgtcaatactcatgcatgttaccaggggcgtggggattgatctgtccttcccaccactacaacaaggcctgaggataggtccaccctaccggccactactgcctacatgcacctccctggggtgcatgggcatgggtcctaccaacaccactgacaccaaaacccacctgtatggccttaccacccacccttatcaccaccaacacccatgcatgctgctcagggacctaagggttgaccctagtgacagtgctactgtcactgctgatgtcatgcatgccactcaggagcctgacggccaacctgaccacctgatccacatctaccactgctggcatccaagcaagcaacctggaagcccaaggatcaattgccctaaaccctgtacaactggagcctgtatatgctgctcaggtgccctaggatcagcaaactcagcttgctgttgtcaccaatgg

SEQ ID NO: 8360 - DNA, 600 bp, Homo sapiens
  MAP TO AL137190.2; EXPRESSED IN ADULT LIVER, SIGNAL = 3.8; EXPRESSED IN HEART, SIGNAL = 4.4; EXPRESSED IN BRAIN, SIGNAL =   4; EXPRESSED IN PLACENTA, SIGNAL = 3.4; EXPRESSED IN HELA, SIGNAL = 4.3; EXPRESSED IN BONE MARROW, SIGNAL = 3.7; EXPRESSED IN FETAL LIVER, SIGNAL = 4.1; EXPRESSED IN LUNG, SIGNAL = 4.3
ttttctactgggcttggcagtattttaaggttttgccaagctctacacacccttgtttagtctagagataatacactggcagccccgggatgaatccagcccacacacctgttttgtttggttcaagtagtagccagtccccaaggacaatgaccatccattctgtcccttgctcctagacacacacactacatcaagagctggaatccgactcccctccctttaaatctgggctggcctggagactttcttgactaaaagaatgtagtgttaatgacattctgggacttctaggcaggtcctacgaagcctgcagcttctacctggaactgctggaacactctttcttgggggagccagcaccatgcaagaagagcaacaaccttgggacctccatactgggaggaagcccaagtcacctgaagaagcccttgcaggatgaaatcccaagaggagagtggccaagttgcctagaggcaccagacaagttcagaggaaactacacgctggaagcctagactccagtctctgctgttccagctgatgccactcgggcaaaaacaaactgtctagccaagcccttcctcaattctggtccca

SEQ ID NO: 8361 - DNA, 507 bp, Homo sapiens
  MAP TO AC021012.2; EXPRESSED IN PLACENTA, SIGNAL = 1.4; EXPRESSED IN BONE MARROW, SIGNAL = 1.9; EXPRESSED IN HELA, SIGNAL = 2.8; EXPRESSED IN LUNG, SIGNAL = 1.7; EXPRESSED IN ADULT LIVER, SIGNAL = 1.9; EXPRESSED IN BRAIN, SIGNAL =   2; EXPRESSED IN FETAL LIVER, SIGNAL = 2.7; EXPRESSED IN HEART, SIGNAL = 2.6
agtgcacccatcacctaaccagtgtacactgtacccaatatgtagtcttttgtccctcacctctccaaaccttccctgccaagcccgcaaagtctattatatcattctcatgcctttgcttcctcatagcttaactcccacttataactgagaacatatggtatttggctttccattcctgagttacttcacttagagtaatggcctccagctccatccaagttgcagcttgctctttgaagccttggagcaaagcattgacttctctcctactccaaaagtcctagatggcatcaatgatcttagctatatcttctggataacttacagcagcttctacatcagggcttgctcctttaccttgaacttttatgttatgaagatagcttccttttattaaacctcatgaagcaacctctgctagcttccaacttttcttctgcagcttcctcatctcactcacccttcatagtattgaagagagttagggcctttctttggattagg

SEQ ID NO: 8362 - DNA, 513 bp, Homo sapiens
  MAP TO AC022267.2; EXPRESSED IN ADULT LIVER, SIGNAL =   2; EXPRESSED IN HEART, SIGNAL = 4.4; EXPRESSED IN BRAIN, SIGNAL = 2.3; EXPRESSED IN PLACENTA, SIGNAL = 1.8; EXPRESSED IN BONE MARROW, SIGNAL = 2.1; EXPRESSED IN FETAL LIVER, SIGNAL = 4.9; EXPRESSED IN HELA, SIGNAL = 4.3
gtttggatttgtgtccccacccaaatctcacgttgaattggaggggcggcctggtgggaggtgattggatcatgggggtggatttccctcatgctgttcttgtgatagtgagtgagttctcacaagatctgatggttaaaagtgtgtggcacttccccctttgttctttgtctctcctgctccaccatggtaagacatgcttgcttccctttcaccttccaccatgactgtaagtttcctgaggcctcccaaccatggttcctgttaagcttgtggaaccgtgagtcaattaaacctcttttctttataaattacacagtctctttatagcagtgtgaaaacagactaatacaccatcttttgagatccagctcaaaccttatcagccccacaaaccttttcttgctcccttttgtccctcaggaatctctttgtatgaatctcatgctgtttgaccttacggttactgtaatcaagcctttaatgagagagaaaataaaagtgctttgcatg

SEQ ID NO: 8363 - DNA, 600 bp, Homo sapiens
  MAP TO AL136170.2; EXPRESSED IN HELA, SIGNAL = 1.9; EXPRESSED IN HEART, SIGNAL = 3.5; EXPRESSED IN BRAIN, SIGNAL = 2.5; EXPRESSED IN PLACENTA, SIGNAL = 1.9; EXPRESSED IN ADULT LIVER, SIGNAL = 1.5; EXPRESSED IN BONE MARROW, SIGNAL = 3.4; EXPRESSED IN FETAL LIVER, SIGNAL = 2.1; EXPRESSED IN LUNG, SIGNAL = 4.4
gttaattgtggggaggaggcagatttttttctcattatatagtttaaaaaaaaaaaatacccaaattatgaaaagatttaaaaaaaaaagaagctctcttataaaaaagaattcatcaaagggttattgtcattgcataaaaagtaaggaatcacagcaagcaacagtcaaattaagtctatgtaataaaaaaaaatacagcatactctgaggtacgaaggtctgatctgagttggatgaggagccactggatagtaactctcgatctgttggtatctttctctggattctggtacatacgatggtactgctgcaggtggaatctcaatgggtatagggctttctcggaatatctcttctcttgtgtaagacggagcagggtacactcgacggccatcatagtgagatgggtatataggtgggtactgctgtggctgtgtgccatactgagagtttacaacacgttcttggaggtagggtggataatgatccaagtagggaggagcaggttcaggagcagatggtggaggtcggacaaagcgggacacacattgtggtggtggagtataatacatacctgcacaatacaaaagaggaccc

SEQ ID NO: 8364 - DNA, 542 bp, Homo sapiens
  MAP TO AL158148.1; EXPRESSED IN BRAIN, SIGNAL = 1.6; EXPRESSED IN PLACENTA, SIGNAL = 1.3; EXPRESSED IN ADULT LIVER, SIGNAL = 8.9; EXPRESSED IN HEART, SIGNAL = 1.8
caggtagatgtggccatgtgactcagttctaactaatagaatgttggtacaagggcatcacctccaagcctggtgtgcagagaccacccacacgcacgtctccattgtgccttccctcatctgccaaccagatccagaggaccccaaggtccaaggggattgcagaaccacccatctggaggaaggtaatgccctaaattaccacgtgttcggttgccagggctgccataacaaaataccacagactgtgtggtttaaataacacatttcttccctagtggcctggagggtagaagcccaaagatcaaaacgtctgcagtttggttttgccttgtcttgcacatggctaccttctcgctttgtcctcagagtcttttcctctgtgtgtgtatgtccctggtgtctctttgtgtgtcataatttcctcttcttagaaggacaccagtcagactggatcagggcctaccctaatggcctcatactaacttaatcacccctttaaagaccgtatctccaatacctcactttctgaagctctgggg

SEQ ID NO: 8365 - DNA, 520 bp, Homo sapiens
  MAP TO AC002126.1; EXPRESSED IN BRAIN, SIGNAL = 1.7; EXPRESSED IN BONE MARROW, SIGNAL = 2.5; EXPRESSED IN FETAL LIVER, SIGNAL = 2.6; EXPRESSED IN HEART, SIGNAL = 2.3; EXPRESSED IN LUNG, SIGNAL = 2.3; EXPRESSED IN ADULT LIVER, SIGNAL = 3.4; EXPRESSED IN PLACENTA, SIGNAL = 1.9; EXPRESSED IN HELA, SIGNAL = 2.7
gtaccccctctcctcgagtctctcccttaagctccctagtccccccacccaccaagcgacccacttaactgcagcatgggtctgtcctccgacatggtcagtgcgtcccggtgggtctgggccagccgcaggcctgggaaggtgaggaaggcacccagcacagagcccaccactgccagtcccacgcggatagccagcttggccacaggaagcctaggagaacaccaggtcacgagcctgcctgggggaccctgggagggtcccagcctgcccttgcctccctcccccattcccaggactcacgcccagtcccagccctgcttcttcagaagtggctctaagttctgggtcatgctggccagacctggggacgataagaagaggaccgagtagagtgaattcctagggtctctaaggccactctgttccctaaccccccatccctcaggcatccgtttgcttcccaagtaggaatgaacaagggtctgccaggccctgagccaggcacaaggacaatttt

SEQ ID NO: 8366 - DNA, 524 bp, Homo sapiens
  MAP TO AC022845.2; EXPRESSED IN ADULT LIVER, SIGNAL = 2.7; EXPRESSED IN PLACENTA, SIGNAL = 1.8; EXPRESSED IN BRAIN, SIGNAL = 2.4; EXPRESSED IN FETAL LIVER, SIGNAL = 1.9; EXPRESSED IN HELA, SIGNAL = 2.3; EXPRESSED IN HEART, SIGNAL = 2.1; EXPRESSED IN LUNG, SIGNAL = 2.5
gactgcctcttccttccctcatgcccaaggcttctctggcctcttacctgactctctcttcttcggccctcttcagagcagcatcccgctgcaaaaccttcatgatggcctcttgttcctcttcagtcaggaagcttaagtcaatcattttgaaaagtgcatgcaaaaataatagcaacaaatgtggctcaaaattctcagggctgaacaactaagactgcaaccaggaagattaaaacacacaaaaatgaaatatcttgttcagttctgcatcaaagtcttattttggctcagcaaaagtttagggcagctgatagcaagatcctaagtgctctttcccatgaggaagtcctggtctgtgggatagtgtcgagaagaggctctcagaaggatgctgtattccttgccaaacaggtcgcttgttcctatggtggcttccagcacactcactctctggtccagtcttagacacagtttattctctctctgcacctgtcgtcaattcataagaggcagcagcatca

SEQ ID NO: 8367 - DNA, 567 bp, Homo sapiens
  MAP TO AC011447.2; EXPRESSED IN PLACENTA, SIGNAL = 1.7; EXPRESSED IN BRAIN, SIGNAL = 1.9; EXPRESSED IN FETAL LIVER, SIGNAL = 1.8; EXPRESSED IN LUNG, SIGNAL = 2.4; EXPRESSED IN ADULT LIVER, SIGNAL = 1.6; EXPRESSED IN HELA, SIGNAL = 1.9; EXPRESSED IN HEART, SIGNAL = 1.8
gcctgtcctcgagatgctacagggtacagtccatttgaacttttatatggacgcactttcttgcttggccccagcctcatcccagacaccagccctctaggtgactatcttccagtcctccagcaggctagacaggaaattcaccaggcttctaatcttctcttacctactccagatcgccagccatatgaagacaacctagctggacgatcagttgttgttaagaatctgacccctcaaactctacaacctcgatggacgggaccctacttagtcatctatagtccccgactgccgtccgcctgcaggatcctccccactgggttcaccattccagaataaagctgtgtccatcggacagccagcctaatccctcctcttcctcctagaagtcacaagtactctcccccacttaagtactctcccccacttcccttaaactcactcgtatttctgaagaacagtaataacccttatgagcctaatacatcccttcattctattaggtctgttcgtccttaccctactttttgcaacagggctttacgaagtcacccccaccactta

SEQ ID NO: 8368 - DNA, 569 bp, Homo sapiens
  MAP TO AL157817.3; EXPRESSED IN PLACENTA, SIGNAL = 5.1; EXPRESSED IN BONE MARROW, SIGNAL = 4.9; EXPRESSED IN FETAL LIVER, SIGNAL = 4.1; EXPRESSED IN HELA, SIGNAL = 3.6; EXPRESSED IN HEART, SIGNAL = 4.8; EXPRESSED IN ADULT LIVER, SIGNAL = 5.2; EXPRESSED IN BRAIN, SIGNAL =  10
gatggagccagagagtctgcatttctaattatctcccagatgacatcaacgctgctttgggtggcaaggctctacagcagggatttccacaactgaattcacgaaagtcccttagtaactctgatatgcagcaggattttggaactggagctattgaaaagctcattgaagattaattaatgcaagaaccagaggaatcaggacagtattgaagcttcttcaagcaaaacgttttatttccagcagcatgtggaaaaacatattgtagatgtctgtataaaatatctcaaacagccatcagaaatttgggatgtaatgtttttaataaaccatagaatgcctgttttaaagatgttgaagtcctggagtaactaaaaaggatggatgaaatgagtaaatctgtagacacagtgacacttttgtcgcttcttgaatcatactttaaattatttgagtaataaatgtgaccagtgacttctagatatttaaggagctacaatcagagtgtgtgtgtgtgtgtgtgtgtgtgtgtgtgtgtgttagagaaaccctactttcacagggaatcc

SEQ ID NO: 8369 - DNA, 584 bp, Homo sapiens
  MAP TO AC007497.2; EXPRESSED IN BRAIN, SIGNAL = 2.6; EXPRESSED IN PLACENTA, SIGNAL = 2.6; EXPRESSED IN ADULT LIVER, SIGNAL = 2.3; EXPRESSED IN FETAL LIVER, SIGNAL = 2.4; EXPRESSED IN BONE MARROW, SIGNAL = 2.1; EXPRESSED IN LUNG, SIGNAL = 2.1; EXPRESSED IN HELA, SIGNAL = 2.7; EXPRESSED IN HEART, SIGNAL = 2.2
ctcgcactacgggagttgtctgtagttcaaaatcatagaaagcataggtacagaaagtgacaggctctttatctccagatgcctgtaaaacttcagaagaaaaggttactttgttgatatggatttcaaatagattttcgcctcgttctaagtggatggtttcatcaaattcatcaacagagtcatctggcatgatttctggtttaaatttgtactgcttggtgccataggcaatatcctttaattgggctgcaagagaagacacacagtttagagatttcaaaatattgacatgagaaaatgaaaactggcttttgaagtgtaagaatgagtacttctggtgaacagtctctattttaaattctatgactacactgtttttctgtaaataatactttatcgtacaaaaatttatcatttctgttttgacatcacttattaggcagcaacaaaattgcaacttcagttttaatatagcctaagccaggaaaaaggggagaaaaatatcaaaagaagaaaagcgctcttaatgaacagctgagataactacctggatttcacctgcttccctgtctctgctccac

SEQ ID NO: 8370 - DNA, 597 bp, Homo sapiens
  MAP TO AL049873.2; EXPRESSED IN BONE MARROW, SIGNAL = 4.2; EXPRESSED IN FETAL LIVER, SIGNAL = 7.7; EXPRESSED IN HELA, SIGNAL = 7.2; EXPRESSED IN LUNG, SIGNAL = 3.6; EXPRESSED IN ADULT LIVER, SIGNAL = 6.2; EXPRESSED IN HEART, SIGNAL = 7.1; EXPRESSED IN BRAIN, SIGNAL = 8.8; EXPRESSED IN PLACENTA, SIGNAL = 7.6
caagccttggcagcttctacatgatgttgggcctgtgggtgcacagaagtcaagaattgtggtttgggaacctccacctagatttcagaggaggtatggaaaggcctgaatgtccaggtagaagtctgctgcaggggtggagtcctcatagagaacctctgctaaggcagtgtgaaaaggaaatgtggggttggagcccccacacagagttcccactggggtactgcctagtggaactgtgagaagagggtcactgtcctccagaccccagaatggtagatccactgatagcttgcactgtacacctagaatagccacaggcacccagcctgtgaaggagctgcttaaggccataggaacccatcccttgcatcagtgtgccctggatgtgagacatggagtcaaaggagatcattttagaggtttaatgactgccctgctggattttggacttgcatggggcctgtagaccctttgtttttgccaatttctcccatttggaataggtgtatttacccaatgcctatacccccattgtatcttggaaagaactaactcgttttttattttacaggctcataggcggaagagacttgc

SEQ ID NO: 8371 - DNA, 586 bp, Homo sapiens
  MAP TO AC023066.2; EXPRESSED IN PLACENTA, SIGNAL =  15; EXPRESSED IN BRAIN, SIGNAL =  17; EXPRESSED IN BONE MARROW, SIGNAL =  39; EXPRESSED IN LUNG, SIGNAL =  11; EXPRESSED IN FETAL LIVER, SIGNAL =  25; EXPRESSED IN HELA, SIGNAL =  25; EXPRESSED IN HEART, SIGNAL =  54; EXPRESSED IN ADULT LIVER, SIGNAL =  29
ctgtggtgtgatggctatggggctctccagaacatcatccctgcatctatctactggtgctgccaaggctgtgggcaaggtcatccccaagtcgaacaggaagctcaatggcgtggcctttcatgtccccactgccaacatgttagtcatgaacctgacctgctctctggagaaaccagccaaatatgatgacatcaaggtggtaaagcagcatcagagggggccctcaagggcatctggggctacaatgagcaccagattgtctcctccaactttaacagtgacaccaactcttccaccttcagtgctggggctggcattgccctaatgaccactttgtcaagctcatttcccagcatgacaatgaatttggctacagcaacagggtggtgggtttcatggtccacatggcctccaaagagtaagatcccctggaccaccagccccagcaagagcatgagaggaagagagaagtgttcaattgttggggagtccctgccacactcagtcctccaaacacactgagaatctcccctcctcacagtttgtacaccagaccccctgaagaaggagggatctcagggac

SEQ ID NO: 8372 - DNA, 586 bp, Homo sapiens
  MAP TO AC018826.3; EXPRESSED IN FETAL LIVER, SIGNAL = 2.3; EXPRESSED IN ADULT LIVER, SIGNAL = 2.2; EXPRESSED IN BRAIN, SIGNAL = 2.7; EXPRESSED IN PLACENTA, SIGNAL = 1.7; EXPRESSED IN LUNG, SIGNAL = 2.7; EXPRESSED IN HEART, SIGNAL = 2.4; EXPRESSED IN HELA, SIGNAL = 2.3; EXPRESSED IN BONE MARROW, SIGNAL = 2.8
gcccaatatgctggagtaggaaaatcacgtatgagaattatatgtggtcattgaaaattattgcagttgttgccataaaataaattggtctactagctgaatcccagaagactttatggatctatttggttgattctttaagcaatgtgataaaattttggcattttataccagaattttccagctgtttataaaaagaacatgaattaagctaagatatgatgagaggagtatttgtgaattttgctgtgcagtctctttttttcataaagcgtgcaccagttcaagtctctctcaatttggcaatgccactctcaatcattaactcattaattcttacaataacgtgtgggttttttatcatgtcaatcatcatggctgtttgggaaataggcaaatataattaaaacagaaacccttggttttttccttttaatttaactttgattttaagttcagggatacatgtgcaggtttgtaacataggtaaacttgtgtcataggggcttgttgtatagattgtttcatcacccaggtattaagcctactactcattagttatttctcctgatcctctccttcctcc

SEQ ID NO: 8373 - DNA, 531 bp, Homo sapiens
  MAP TO AC018826.3; EXPRESSED IN PLACENTA, SIGNAL = 1.5; EXPRESSED IN HELA, SIGNAL =   2; EXPRESSED IN FETAL LIVER, SIGNAL = 1.5; EXPRESSED IN HEART, SIGNAL = 1.8
agaaggccgtgtatgctctgaattggtgtccaatatatgtttctgtttctcccatagccaggattcatgggcccaggaatcaatggatggaagtggaagtggcacaactcaccatcacccctagtgatccactagcaaaatgtttgcttcctgttcccgtgacattctgttctgctggcctagaggtcttagttccagagggaagaaggctgccactaggacacacaacaatgattccattaaactggaagttaagattgcctcctggacactttggtcttctcctatctttaagtcaacaggctaagaagggacttacagtgttggctggggtgattggcctggactatcaagatgaaatcagtctactaccccataagagaagtaaggaagactatgcatggaatacaggagatgcattagggtgtctcttagtattaccaagccctgtgattaaggtcaatgggaaactacagcagcccaattcaggctggactacaaatggtccagacccctcaggaatgaaggttt

SEQ ID NO: 8374 - DNA, 586 bp, Homo sapiens
  MAP TO AC011428.2; EXPRESSED IN BRAIN, SIGNAL = 6.4; EXPRESSED IN PLACENTA, SIGNAL =   5; EXPRESSED IN BONE MARROW, SIGNAL = 4.6; EXPRESSED IN LUNG, SIGNAL = 6.3; EXPRESSED IN ADULT LIVER, SIGNAL = 5.9; EXPRESSED IN FETAL LIVER, SIGNAL =   7; EXPRESSED IN HELA, SIGNAL = 6.9; EXPRESSED IN HEART, SIGNAL = 6.5
atcgtgggcactgagttttccaggaaaaagtagttggctctagaaatatggaccaacgttccccagcttttgggctggaccagaggtcagacgtcccagtgttttgtcctcagttacatcctcagtctgtgtatgcagatctctggtttgcagaaggcagccactgtcaagcagagctgagcccttgtttgtgtgagttcttctggagccatggtaaggagagcatgaggcccctgctgccagcaggtctgtgggggatgctgccaactgggtgagggagggggcttggcccctgacacaccttcagggcacagctgtctagtgagcccaagccgagggcctctgagcaggtgggcatgtgtgggccgttctttgtacagtggcactgtctgcttcaaggaggtccctggggacagtgaaggacagcacacatgccttgcctgtgtgtgtgtatgcatgtggcagatgtcaacacattcatggtcatactggattctacagaagaggtagcgtgaagtgtgggggcacagaggagggaggaagtggaaacaggacatcatccttgagggagtggaaattttgctga

SEQ ID NO: 8375 - DNA, 582 bp, Homo sapiens
  MAP TO AC010457.3; EXPRESSED IN BRAIN, SIGNAL = 2.1; EXPRESSED IN PLACENTA, SIGNAL =   3; EXPRESSED IN HELA, SIGNAL = 2.1; EXPRESSED IN LUNG, SIGNAL = 3.6; EXPRESSED IN ADULT LIVER, SIGNAL = 1.4; EXPRESSED IN HEART, SIGNAL = 1.9
aaagtggctgtgctgttgtgtgaaatacagagtagtagagacacctgtttacaagcagattggggaaaaatgtgtccctttttataggaggagcattgcaatggcatttagtgctatttttaatcactgtgtttaaatttatttctagggaagcagtgctcttaaaacattggaaatgaatccttgtaccccaaataatgttgaggttctggaaactcgatcagcatttcctaaaatagaagatacagaaataatttccccagtagctgagcgtcctgaagatcgctctgatgcagagcctgaaaaccatgtggttgtgtcctattgtccacccatcattgaggaagaaataccaaacccagccgcagatgaagctggagggactgcacaggttatttacattgatgttcagtcgatgtatcagcctcaagcaaaaccagaagaagaacaagaaaatgaccctgtaggaggggcaggctataagccacagatgcacctccccattaattctactgtggaagatatagctgcagaagaggacttagataaaactgcgggttacagacctcaggccaatgtaaa

SEQ ID NO: 8376 - DNA, 551 bp, Homo sapiens
  MAP TO AC010828.3; EXPRESSED IN ADULT LIVER, SIGNAL =   6; EXPRESSED IN HELA, SIGNAL =   6; EXPRESSED IN BRAIN, SIGNAL = 4.5; EXPRESSED IN PLACENTA, SIGNAL =   4; EXPRESSED IN BONE MARROW, SIGNAL = 4.7; EXPRESSED IN FETAL LIVER, SIGNAL =   5; EXPRESSED IN HEART, SIGNAL = 5.2; EXPRESSED IN LUNG, SIGNAL = 4.4
tgccatgagttctgtgcttcagaaggccccactctggacttcctacagggcaggagcaagaagtccacaggactaaggatatttgcccacctggaacccatgccccaaattctagaccaagctctcagtacctgggaccctgggattactaatcctggaatgtacttcggagcctgcagagcctcctgcaagggagcagcctcctgagagcagacagcacgatccaggtctgaactgtgacaaagaggtagctttctgtgggatggggaaggggcagacagatgagatggagcttgctcatgtggatgcagaggtgtaagtgccctgaacagcagatgggactaaaagatggtaagccttggtaggatgggagcttggggatggggagatggtctgcgtttgtacttttgcccctggccctgcaaatgaaatgactgttgtgggaaggctgcctttatcactacctaaaaagcaaagcctcctagtagactcattgcctttttcttctgctcaattcatcttctacactgtgcccaccatcatcctttaaa

SEQ ID NO: 8377 - DNA, 565 bp, Homo sapiens
  MAP TO AC019191.2; EXPRESSED IN BRAIN, SIGNAL = 4.4; EXPRESSED IN PLACENTA, SIGNAL = 2.6; EXPRESSED IN HELA, SIGNAL = 2.7; EXPRESSED IN BONE MARROW, SIGNAL =   3; EXPRESSED IN FETAL LIVER, SIGNAL = 2.2; EXPRESSED IN HEART, SIGNAL = 2.4; EXPRESSED IN LUNG, SIGNAL = 2.9; EXPRESSED IN ADULT LIVER, SIGNAL = 3.4
cagaatggggactttcatgggtgaatagttttctcccttcagggtagttaatgtcagaagagtgaaagttactcatacccaaagccagtcagtgggaaatgcttaagattctccggcaaattttttatatcagtattgagaacacttatcaaatggccaaatccctatttaaagggccaaatatcctccagaccatccagcaagaagtcaaagcctgtgaggtgtgccaaaagaataatcccttggtccatcataaggccactctggggaaacaaagaatatggcactatcctggagacaactggcagttagacttcacccatatgcctaagtcaaagggatttcaatacttgttggtctgtgttgataccttgacaaattggatcgaagccttccactgcaaggcagagaagattcaggaagtggttaaagtcctaattcatgaaataattcctagatatgggctttcccaaagcttagaaagcaataattgcctggcttttaaagccatggtaattcagggaatttccagggcactagggatacaagatcaccttccctgtgc

SEQ ID NO: 8378 - DNA, 598 bp, Homo sapiens
  MAP TO AC018764.3; EXPRESSED IN ADULT LIVER, SIGNAL = 3.7; EXPRESSED IN BONE MARROW, SIGNAL =  13; EXPRESSED IN HEART, SIGNAL =  11; EXPRESSED IN LUNG, SIGNAL = 3.3; EXPRESSED IN PLACENTA, SIGNAL = 4.1; EXPRESSED IN HELA, SIGNAL =  12; EXPRESSED IN BRAIN, SIGNAL =   4; EXPRESSED IN FETAL LIVER, SIGNAL =  11
cagtggccaaggtatggaagcaacaagtgtttgttgatagatgaatgaataaacaaactgtggtacatagataaaatggaatattattcagcccttaagaagaatgagaacttaccattttccacatcatggatgagcccggaggacattatgctaagtgaaataagccagacacagaaagaaaaatagtgtatgatctcacttatatgtggaataaaaaaaaatcaaatataacagaaatagatgacaaaacaatggctatggggagggggaagcaaaggaaatggggagatgtaggttagagcatacagaacagatatataagatgagcaagttgcctctttttccggctggaaccatggagggtgtagaagagaaagagaaggttcctgctgtgccagaaacccttaagaaaaagcaagggaatttcgcagagctgaagatcaagtgcctgagaaagaagtttacccaaaagatgctttgaaaggcaaggaggaagcttatctgtgaaaaagcaaaacactgtcacaaggaatataggcagatatacagaactgaattttgaatggcaaggatggcgagaaaagctggcaacttc

SEQ ID NO: 8379 - DNA, 543 bp, Homo sapiens
  MAP TO AC018839.3; EXPRESSED IN PLACENTA, SIGNAL = 2.1; EXPRESSED IN HELA, SIGNAL = 3.2; EXPRESSED IN LUNG, SIGNAL =   3; EXPRESSED IN HEART, SIGNAL = 2.8; EXPRESSED IN BRAIN, SIGNAL =   3; EXPRESSED IN FETAL LIVER, SIGNAL = 3.2; EXPRESSED IN BONE MARROW, SIGNAL = 2.4; EXPRESSED IN ADULT LIVER, SIGNAL = 2.5
gctcccaaagacactcttgcatttccgtgcctctgcgtctttgcatgtgccaccccctctgccagggatgccttccctttccacttctctgcctggagaactcctactgatccttcaagactcagctccagcagcccctcctccatgaagccttccttgattttccctccgtcccccttttccccatgccccaagaagagttttttgcaattaacctttttatatgcatctgtgttgtccatctggctggggtactccccagggacaggaaactgggtctcatttgcctgagttatccctagcactgggaaaagatcctcaataaatattgattgaactgataaatgcaggtttgttgaatgaaaaagcaattctgctagtagttttggatggtgtttgcatctctttaggctctggaaatattctttggacgcatttaggggtcctggcttaggagttgctatttcctgagctgtcaatgaatggggctccctccccatgcccagcttgggaagggtaaaaggagaccccaactccactcag

SEQ ID NO: 8380 - DNA, 568 bp, Homo sapiens
  MAP TO AC009044.3; EXPRESSED IN ADULT LIVER, SIGNAL = 4.4; EXPRESSED IN BONE MARROW, SIGNAL = 3.5; EXPRESSED IN HEART, SIGNAL = 4.1; EXPRESSED IN LUNG, SIGNAL = 4.8; EXPRESSED IN PLACENTA, SIGNAL = 3.3; EXPRESSED IN HELA, SIGNAL = 4.3; EXPRESSED IN BRAIN, SIGNAL = 4.7; EXPRESSED IN FETAL LIVER, SIGNAL = 4.4
gccactcaggaagaaagcagatgggagaaaggccaggcagcaggaaggcaggcgcagggggcacgcaggagcaagggagccccagggccctagcgccaggctccagggcaagcctgcagggaagcagaagcacctctggggctgagtggcaaaggaggagacgccccacagagccagaggcagaggtgggcttaggaagccggaagcgggtcatgtgcatctttgtactctggggcccagtgcaccacccacccacccacagaagcctgcggctgaccctcccaaggtgattcatttactcatcccacaggggctcatcttatggcttctgggtgccaagcactggggacactcagatgaacaagctgccccatgacatctgcaacctgggcaagggagacagggccaacaaggaggagtacacagccaaggctaagcacgaagaagcagagaaacaaggtgactagtacaaggtcgaggggacacccacagttaagaaggtctcttgggcagtgacatgtaagctcagctctgaaggatgagaaggagcctttccccaacagatgta

SEQ ID NO: 8381 - DNA, 539 bp, Homo sapiens
  MAP TO AC009396.5; EXPRESSED IN BRAIN, SIGNAL = 2.6; EXPRESSED IN PLACENTA, SIGNAL = 2.1; EXPRESSED IN ADULT LIVER, SIGNAL = 3.5; EXPRESSED IN FETAL LIVER, SIGNAL = 1.8; EXPRESSED IN BONE MARROW, SIGNAL = 1.9; EXPRESSED IN HELA, SIGNAL = 1.7; EXPRESSED IN HEART, SIGNAL = 2.6
tccaaagacttgaacaccccaagggaacactgaagtctcagcagaacccttgatgcttgggaaagtagaaatatagggaaggtttgcataattccctgtgttcacttctagctcactgaatgtgactttctgctgagcctaagcatacagcaatgaataacaacaatagtaacaacatgaggggtccctgctttcatagagcttgcattctagtaagtggggcaaaaagcaagcaaagaaatctaagttatatatggtggtataaatgctatgaggagaggaaataaagcacaatgagggagaagatgatggagtgcattttagaaatgggaattgatagaatctgggatttgcttgacaaaaagttgaaggagaagcagatgcaaagacctgagattcaggtgcttgttgaattcaagggacatgaaaaagaacaaattagggaaggtcaagttatataaagcctttaagccatggtaagaagtttggattttattctggttacaatgaaaaagccatcaagcgctatttagcaaggg

SEQ ID NO: 8382 - DNA, 534 bp, Homo sapiens
  MAP TO AC017004.2; EXPRESSED IN BRAIN, SIGNAL = 7.3; EXPRESSED IN PLACENTA, SIGNAL = 6.3; EXPRESSED IN BONE MARROW, SIGNAL = 6.5; EXPRESSED IN HEART, SIGNAL =  12; EXPRESSED IN LUNG, SIGNAL = 5.9; EXPRESSED IN ADULT LIVER, SIGNAL = 7.8; EXPRESSED IN FETAL LIVER, SIGNAL =  12; EXPRESSED IN HELA, SIGNAL =  14
ttccatgcttacaattccccctctctgcagtctgagaaccttacctccactgtgcttgtcccctgacttctcacatacatacccatgcggaccgtctgcccacattccttctatgaactatacttccatagtttctgtatagtaaccgtgttcagaatgttgaattaaatgtaataaattaaatttattaataacaatataatgagttaaatctaataatgcaaaacttacaaattgaaattctaaaagtatgaaattcaaaactctgaacttgattactacagcttgtgagaaacaggagcacgaagctgtggaaggtatatacgttgagattaggaaggtggtggcctccctgcagctgcacaattgtcacagtgagaatgctggtgagcatggggacagtaatgggtgatgaatctgctgctatatggattttaaaagatatttcattatccagaaaaatcaagccagcacagtggcgtgtgcctgtagccccagctattcaggaggctgaggtgggaggattcctttagc

SEQ ID NO: 8383 - DNA, 586 bp, Homo sapiens
  MAP TO AL158845.1; EXPRESSED IN HELA, SIGNAL = 2.7; EXPRESSED IN FETAL LIVER, SIGNAL = 2.4; EXPRESSED IN ADULT LIVER, SIGNAL = 1.5; EXPRESSED IN HEART, SIGNAL = 3.1; EXPRESSED IN BRAIN, SIGNAL = 1.4
aaagcctcttgggatcaaccgactaaacagaaaaggtagtttgtgtactttatagaacagaacacagtgtcactattacgtgtaatggagtcagaagagatttactatctattgatagtacatccttttctaacaaatgttatatccatttctgacaaagatgtcccaccggaagacaatacccaaagatcagaacaatcaaacaaactttagccatttttggcactagaatatgccatagcccacaattatctccatctacatatttttccaggctcttgagccattgccaatggtctgctcatctggtcaaagaacaaccacaattcagtaaccaaagtcatccctttggggtaaaattctatggcaatgtcctcacaaataataaaaatataaatcaaaatcacacctatatctgtacatactcaaactacaatacaagttattaccagatacttcttattccttttgaagttgtaaacattattgatagtgaccaaggaactaatttcatttctcaaaatactcaaggcactcttgagcaaggaattcagcagagctttaatctcccttaccagccttaggc

SEQ ID NO: 8384 - DNA, 535 bp, Homo sapiens
  MAP TO AL121963.10; EXPRESSED IN PLACENTA, SIGNAL = 3.2; EXPRESSED IN BRAIN, SIGNAL = 4.8; EXPRESSED IN LUNG, SIGNAL = 2.7; EXPRESSED IN HEART, SIGNAL = 3.8; EXPRESSED IN HELA, SIGNAL =   4; EXPRESSED IN FETAL LIVER, SIGNAL = 3.9; EXPRESSED IN BONE MARROW, SIGNAL = 3.1; EXPRESSED IN ADULT LIVER, SIGNAL =   4
tgctcccctttgatgaaaactgattgaaatagttgtttgtctcactgtttgcaatctgttttcgctcccattctctcttaagcacatgaaggtgaactttgcccttcaatattccacaaaaactgtagagtcactgacgttatttatttgctaaacccaatggtcaatcctcagtattattttattttattttatccatgaccgtcatttgacagagttgatctctccctccttggtaaacgcctttgggcttataggaaccctactccttcttcattgactgatccttctcagtctcctttgctggttcttcctcatcttcttgatgtctaaacttctgcgttccttgaacttcctcatcttcttgatgtcttgatggttccttgtcttcttgatgtctaaacatctctgttcctttccctccccttccttctgcctcctattttctcttctttaaatctgatctgatgacttaaaagatatatctatactttgaaaactccaacatttttattccttgccttgacctctcttc

SEQ ID NO: 8385 - DNA, 528 bp, Homo sapiens
  MAP TO AC007115.1; EXPRESSED IN PLACENTA, SIGNAL = 4.4; EXPRESSED IN FETAL LIVER, SIGNAL = 1.8; EXPRESSED IN ADULT LIVER, SIGNAL = 2.6; EXPRESSED IN HEART, SIGNAL =  10; EXPRESSED IN LUNG, SIGNAL =  17
aatggaatgaacaaacatgcccttgttttacatgtatgtggaaggttttggatttaaagagatgtttttcttcactatctacaggcattgattcttgtcaacaataaaattagcaaagttagtcctggagcatttacacctttggtgaagttggaacgactttatctgtccaagaatcagctgaaggaattgccagaaaaaatgcccaaaactcttcaggagctgcgtgcccatgagaatgagatcaccaaagtgcgaaaagttactttcaatggactgaaccagatgattgtcataggtacagacatttttataactttaagaccaaaactcaagtttttatcttaagagatttcaactgggttttaagtgcaggaaggtaaattagctacaagctacatgcctggagcctatgtgatttataagaacagggccaagagaaattgggattttgaatctggaccttacagtgatgtttttatgtatgtccttgagtatctgagaatatggagaaaaccctagggctga

SEQ ID NO: 8386 - DNA, 575 bp, Homo sapiens
  MAP TO AL031658.11; EXPRESSED IN HELA, SIGNAL = 2.2; EXPRESSED IN HEART, SIGNAL = 2.3; EXPRESSED IN PLACENTA, SIGNAL =   2; EXPRESSED IN ADULT LIVER, SIGNAL =   2; EXPRESSED IN BONE MARROW, SIGNAL = 1.7; EXPRESSED IN FETAL LIVER, SIGNAL = 2.1; EXPRESSED IN LUNG, SIGNAL = 3.4; EXPRESSED IN BRAIN, SIGNAL = 2.4
gtcctgcatagccagtcctcttagacatgaagaatttttgcccctcaaagaggggcacacctggggtcatcctaattacagggctcagggctgggcccctcttgcccaggtctaagggaaacactgagagcaattgtgtaagggtcctagcaggccaggtcctgactaactgaggctcctctctcgacccggctgcccggggcccagggctgcaagtggacgctgcagcgcttccggcagtacctggcgtccaaacacgggcccgaggcagtggagacactcttcagggacatcgacaacatctttgtcaaaagcctgcagagtgtgcagaaggtgatcatcagtgacaagcactgcttcgagctgtacggctatgacatcctcatcgaccaggacctcaagccgtaagtgggtgggtgggagagccaggaggtcatagtttgcatactcggcacccagactgcccaggtttgaatcccagctctgccaattcctagttgtataaccttgtgcacacttacatttactgtgcctcaatttgcccatttgtaaatggggttggtcatgacaggatc

SEQ ID NO: 8387 - DNA, 599 bp, Homo sapiens
  MAP TO AC010278.3; EXPRESSED IN FETAL LIVER, SIGNAL = 2.2; EXPRESSED IN HEART, SIGNAL = 1.9; EXPRESSED IN HELA, SIGNAL = 1.9
tcctgtgacgtttgatgtcctgagaaaaatagaagtaatcatgttgtgagtacagaaatgcaccttaaaacaacactttggtcaatgatggacctcacacatgatgatggtcacctaagattttaatggagctgagaaattcccattgcctcatgacatggtagccatcttaacatcataagcatcataaacgccatgcattactcatgtgtttatgatgatgctggtgtaaacaagcctactgtgctgctagtcatgtgaaagtatagtttatatgattatgtatagtacataatactagataatagatgactttgttcctaatttatgtatttactatattatactttttatcattatttttcccatgtattccttctacttataaaaaagttagctgaaaaacagcctcaggcaggtccttcaggcagtattccagaagaaggcactgttataggagatgacagctccatgcgtgttattgcccctgaagaccttccagtgggacaagatgtggaggtggaacacagtgttaggtatgagcctgactctgtgtgggttaaattaatgtatgtatttgcgtctcatttttgcacaaa

SEQ ID NO: 8388 - DNA, 553 bp, Homo sapiens
  MAP TO AC006144.1; EXPRESSED IN ADULT LIVER, SIGNAL =   5; EXPRESSED IN PLACENTA, SIGNAL = 4.3; EXPRESSED IN BONE MARROW, SIGNAL = 3.9; EXPRESSED IN FETAL LIVER, SIGNAL = 3.3; EXPRESSED IN HELA, SIGNAL = 3.7; EXPRESSED IN LUNG, SIGNAL =   4; EXPRESSED IN HEART, SIGNAL = 2.9; EXPRESSED IN BRAIN, SIGNAL = 4.7
tctggcttggggtgtagttcctacctattggggattatgaaactcaccctgctctatctagtggaggcagggtagcttcttgatggccaggggtggtgtcttcacctagaactgggtggaaccttttttgcatgatcatctgaagcttgatggtccctaggcgacaggaaatgaatttggttaaaagatttaatgggaacttcaggggatagatagctatactgtcagaaatgtttgctacagagatttgcaagagaaaaaacaaaacctgatctgttccagaatctatgtgtttccttaaagtcttagcacaaacgactccattttggtttggtttggtttggtctactggggcctagtgcatgagctcagtccaaaacaatggcctcccagaattttgtttcaaaaattccccctttttggtcaggttctcacttaggcaagagtgtgaccaaaacttaggaccttacttagcaccactcttagttaccatcattttgggtttctggtctcagcgcatcattcataggttacagtgtcctcatggttgcac

SEQ ID NO: 8389 - DNA, 573 bp, Homo sapiens
  MAP TO AC016902.2; EXPRESSED IN BRAIN, SIGNAL = 1.7; EXPRESSED IN PLACENTA, SIGNAL = 2.1; EXPRESSED IN ADULT LIVER, SIGNAL = 2.3; EXPRESSED IN BONE MARROW, SIGNAL = 2.2; EXPRESSED IN FETAL LIVER, SIGNAL = 1.8; EXPRESSED IN HEART, SIGNAL = 1.8; EXPRESSED IN LUNG, SIGNAL = 2.5; EXPRESSED IN HELA, SIGNAL = 1.9
ttagccttggctctgcctacaaggcccctctctttggtgctggggctgatgccgaatggtattctgatgtgtgacaaagggaagcagtacaaccacagaaagcacagaggaagagtggtgaagatgatgggcaggattaaattggagaaataaagatagcaggggagaaacaaaaatattttttccttttcctgcaagtactgatgtaatcaaatcttctaaaacatcagttgcccacaactgctatgataattattcataaaaagcaatggagtcctagctactccttaaaataaaaccaacctctacttgtgaatagctaattgtccagtgctgcactcccgtcccttgatgaggccccacatgtctttctatcatcacacaaggtcaaataaggaaaaagcagggaccttattattattactgttatagttaacatctgttaggcactcactttgatcccagagagtgtgaattcattcttgtgaaggttcctaacgactctcatgttcccacacccagtggattttcttctctgtcctccttttacttggcctcttagcagcattcacc

SEQ ID NO: 8390 - DNA, 537 bp, Homo sapiens
  MAP TO AC012153.10; EXPRESSED IN HELA, SIGNAL = 3.1; EXPRESSED IN HEART, SIGNAL = 2.8; EXPRESSED IN BRAIN, SIGNAL = 2.2; EXPRESSED IN PLACENTA, SIGNAL = 1.8; EXPRESSED IN ADULT LIVER, SIGNAL = 1.5; EXPRESSED IN BONE MARROW, SIGNAL = 1.6; EXPRESSED IN FETAL LIVER, SIGNAL =   3; EXPRESSED IN LUNG, SIGNAL = 2.1
tcaccaccatcatcaccatcaccaccaccacaatcagtaccatcaccaccatcactatcaccaccatcatcaccaccatcaccatcatcaccatcaccactatcactaccgtcaccaccatcaccgtcaccaccaccatcatcaccaccatcaccatcaccacaatcactacaatcaccaccatcatcaccaccatcaccaccaccatcatcaccatcaccaccaccatcatcaccatcaccaccaccatcaccatcaccaccatcacaccatcaccactaccatcacactagacccatcattcttccttttcttcttttccagttgaagccacagtatttcagatccagctggaatcacaggggtttcttgtttggcccctccctgaaaccctggaagaatctggagtcagcagaaggtgatgctctttctcagtttcatactgctgtagggacagggctctccagggtctcagatcccaactccagtttgattgctttttccactgtacccttgtgaagatgcccagtgatccat

SEQ ID NO: 8391 - DNA, 592 bp, Homo sapiens
  MAP TO AC017016.3; EXPRESSED IN ADULT LIVER, SIGNAL = 5.8; EXPRESSED IN FETAL LIVER, SIGNAL = 5.1; EXPRESSED IN PLACENTA, SIGNAL = 2.9; EXPRESSED IN BONE MARROW, SIGNAL = 3.9; EXPRESSED IN HELA, SIGNAL = 4.6; EXPRESSED IN HEART, SIGNAL = 4.2; EXPRESSED IN LUNG, SIGNAL = 3.1; EXPRESSED IN BRAIN, SIGNAL = 4.1
ccaacattgacaaatatgcccaataagtataattgttttctgtgtcagcccttgctaaaggaatactcacagcaatggtgatcactgctatcatagctatcattaaattactcattgtgactggttgtcccgcttttctcaggttttcttccgccatctgtgacagcttcttgatctgtccccaggtaggtggctgcattcgacgggtgttgctcatgacagttggggtcctcctcagtgtcaatttggacaatgctgccaccggtgggtctttgggatcctcccgaaacctcttcctgggtatctggctcatgataaagttttcaggtgtcttgatggtatccaaatcgactgctggttctggcctggagaaacacaagcataacctctacccttagttattattttacctatttcccaactttttgttgttggatctctccaccaaaccagttgttctgcttctgtttttgtagctggtttctgtagatgctgttcagctgctgatagcatctggcctttaggcaggctaaaaaaacttagagttaataatgttagattcaattgtatatgtggtgtcccatggtcctag

SEQ ID NO: 8392 - DNA, 557 bp, Homo sapiens
  MAP TO AC019055.2; EXPRESSED IN BRAIN, SIGNAL = 2.8; EXPRESSED IN PLACENTA, SIGNAL =   2; EXPRESSED IN HELA, SIGNAL = 2.8; EXPRESSED IN ADULT LIVER, SIGNAL =   5; EXPRESSED IN BONE MARROW, SIGNAL = 2.8; EXPRESSED IN FETAL LIVER, SIGNAL = 3.5; EXPRESSED IN HEART, SIGNAL = 2.7; EXPRESSED IN LUNG, SIGNAL = 2.2
ttcctagtggcagtcagcaggaggcagaggctcttccagtctaatgacttgcaaatcaaaagcatgaaaaccagaatgcacctttgaacctctttcccatccagcctagatgtcctcataattttctcccatagcgttcctggtatttttgctaccagagcaataaccttccccatgcatttttttacatgttggaggaggagctatccagtgatctcaaagcatatgtttttgattctcataagattatggataccaaaggaataaaaatggaaatcactactgccaagatatgaaagaaactttgcatagtaaaataatttaaacctaacatttggacccaataaggcaaacgcaatgttttttccatatttttggaaaatgtgcattttctttacattaagtggtaccaataaaaaataatgattctcactccgtttatttctataagttagattggcttatagttttccaggacatggttttctatcaagctatatggcaaacacctgggcataaaatacactcagctatttacttccatgtgggaaaaatgg

SEQ ID NO: 8393 - DNA, 539 bp, Homo sapiens
  MAP TO AC008786.6; EXPRESSED IN HELA, SIGNAL = 3.5; EXPRESSED IN HEART, SIGNAL = 2.9; EXPRESSED IN LUNG, SIGNAL = 2.8; EXPRESSED IN PLACENTA, SIGNAL = 2.2; EXPRESSED IN BRAIN, SIGNAL = 2.4; EXPRESSED IN FETAL LIVER, SIGNAL = 3.3; EXPRESSED IN ADULT LIVER, SIGNAL = 2.3; EXPRESSED IN BONE MARROW, SIGNAL = 2.3
gaaaatccccctgaaggaacctgacacttttaatctaaactctgggcaaactagctgctactgcatctgaatgatttgcaagcaaatgatcctactctctgaagcttatgatttcattttattttatgtttattttccctctctgaatgaaaagtaccacattaggaagtcagtgtttgtgtgtgtgatttttgttttacttggttttgtttttattctcaaatgaaagtaccctgccagtaatcactggtgttttgggaagacaaccagtagcagtgctggctccctatcttggagtggatgggctttatgtccaggcagccatctgtgggagtggtagcctggagccaggtcttggagctacctgtgcatggtaaggatatggtttttatttagcttaattgttacagagcaataaaaataacagtttctaaagatgctttcatgaatattatatatacctgtgagaaaattataattggctccatgaagaagtttttaaaaaatattgttaaatttgtggcagcattgagtgagat

SEQ ID NO: 8394 - DNA, 598 bp, Homo sapiens
  MAP TO AC007262.4; EXPRESSED IN BRAIN, SIGNAL =   2; EXPRESSED IN PLACENTA, SIGNAL = 2.7; EXPRESSED IN ADULT LIVER, SIGNAL =   2; EXPRESSED IN FETAL LIVER, SIGNAL =   2; EXPRESSED IN HELA, SIGNAL = 2.1; EXPRESSED IN HEART, SIGNAL =   2
gaatttgctccttgccagtcagttatttccagactgcagcatgtagatgataagatcaagatatgatcgaagagacttttacttgtgcaagaaggtagtaaccatgctactatttttaatccttaagatttaaaacatgcatttaattcttttaaagatgtacttaatgtatattctgatagcattccaaggcatttccattgaaaagtacatgctataaattcagtagtcttaacatacataatacaatatattatgttgttcgcacgaatgttcattgtagcacttttcacaatagcaaaaacatggaatcaacctaaatgtccatcagtgacagattggataaagaaaatgtggtacatatataccatggaatattatgcagtcgtaaaaaagaacaagattatgtccttttcagggacttggatggagctggaggccattatcctccgcaaactaacagaggaacagaaaacaaaataccacatgttctcacttataagtgagagctaaatgatgagaactcatggacacaaagagaacagacactggggcctgcttgaaggcagagggtgggaggagggaaaggagcagaaaa

SEQ ID NO: 8395 - DNA, 586 bp, Homo sapiens
  MAP TO AL122010.2; EXPRESSED IN BONE MARROW, SIGNAL = 2.4; EXPRESSED IN HEART, SIGNAL = 3.8; EXPRESSED IN LUNG, SIGNAL = 2.5; EXPRESSED IN PLACENTA, SIGNAL = 2.4; EXPRESSED IN ADULT LIVER, SIGNAL = 2.7; EXPRESSED IN FETAL LIVER, SIGNAL = 3.2; EXPRESSED IN HELA, SIGNAL = 3.4; EXPRESSED IN BRAIN, SIGNAL = 2.6
cccctcacaagatggttttcttcacatggtctcgggggcggtctggtaagagaggaggatgactgtctgagcccagaaagatgaggtcacccgaaaggaggtcgtcttgtttgcaggaagaggtggtaccgtgggggtgatgacctgtgcacatggcttgagctttccttgctgccaggcactcgtggcatctcttgctcaccaggtagatgagctccacgaggttgagcaggatgcagatggcagctgtggccaccatgaagagggtgaaaatgttcttctctgagggcttggagatgaagcagtccactatattgggacatggatctgcgtggcacttgaccacaggagggaggatatatttggggtagaatgagtggaacacatagagaaaggcgatgtccacgctcgccttgaacactaggctgcagacatatgtccaccagagcccaccccgcttcttgccggggttcaggtagaggcgcccactgttctccccatgggcttctcggtgcctcttctcctgaacctcccggtaggccacgtgcatgaccacgagcagtgaggggcatgtcaccaggataag

SEQ ID NO: 8396 - DNA, 502 bp, Homo sapiens
  MAP TO AC024019.2; EXPRESSED IN ADULT LIVER, SIGNAL = 3.6; EXPRESSED IN FETAL LIVER, SIGNAL = 3.7; EXPRESSED IN HEART, SIGNAL = 3.2; EXPRESSED IN PLACENTA, SIGNAL = 3.3; EXPRESSED IN BONE MARROW, SIGNAL = 2.7; EXPRESSED IN LUNG, SIGNAL = 3.3; EXPRESSED IN BRAIN, SIGNAL =   4; EXPRESSED IN HELA, SIGNAL = 3.7
ttggcactcacacactctcccatcttctgcatttcattggctaaagagattcacaaaactagttcacattcaaggggtaggaaaatagactccatctcttcgtgggagaacctacaaaaatcacttttcaaaaagagcagatatagtgagaaaaaagtaagtccactttcacaatgaacctacattatcaataacagtttggccaaaacaacaacaacaacaacaacaacaaacacttagaggccttcttcatgtggctgggtctcagacaaggccaggagctcaatattgaaatcaggttctgggaagaaaagtcagtggactttaaaggcgagagatgggtgttgcagaggttctttgaagagcgtggaatacacccaaactccaacatttgaagatacccctgatttgggttaccaacttgcaggtttatttaaatgcaagatttaaagcatagagtattgctaatgttgctgtttgcagtcctggctctctctggatg

SEQ ID NO: 8397 - DNA, 588 bp, Homo sapiens
  MAP TO AC009009.2; EXPRESSED IN FETAL LIVER, SIGNAL = 3.6; EXPRESSED IN HELA, SIGNAL = 3.4; EXPRESSED IN HEART, SIGNAL = 2.8
agcatctcagaccccaactgctgaatcagaagctgcattttaacaagacccaggtaatttgtatgacacgaaagcttgagaagcactgttcttcatacttagatctattaactcagttaatcctttaacaatcttctcagctgagtccttttattatcatccgcacttcctatacaaaaaaaacctgagtcatagagaagtcaggtaacttgtcttaggtcacacagctagtaattttgataggtagaattcaaacctaaaaaaactgcctctggagcctgcatagttagccactatgatgctgaccttgtaaacagcatggagaacagcttctttatccatccaaatggcagagggcttaggacactagtgaggaataaagtcaacttcaccaagattgacctgatgaataccatgtctttcaaaagcatagaaatggagaccatagtagtggttgtcaggactagggacagagttgggtggggttggattatggtggtgatcgaactcactgcatcttgattgtatcatcattgatattctggttgtgatatttcactatggttttgcaagatgttatcatggggg

SEQ ID NO: 8398 - DNA, 530 bp, Homo sapiens
  MAP TO AC010253.2; EXPRESSED IN ADULT LIVER, SIGNAL = 4.3; EXPRESSED IN HELA, SIGNAL = 4.7; EXPRESSED IN HEART, SIGNAL = 3.5; EXPRESSED IN LUNG, SIGNAL = 4.1; EXPRESSED IN BRAIN, SIGNAL = 4.2; EXPRESSED IN PLACENTA, SIGNAL = 3.7; EXPRESSED IN BONE MARROW, SIGNAL = 4.1; EXPRESSED IN FETAL LIVER, SIGNAL = 4.4
agaaacagtaacccaggggcgaacagcagcactttcatcttcacagaggctgccaggctggaacaccagcagccccagccccagcgcgggaccagcaggaggctgataccgagggcactgggtcataggagagccacagcacaaaggtgcagtggacacagtaagaggcgtggcacatgaaaaataagataaagggaggtaccttgtaggtctggaggtagatcaagaagacaagcagcaaggtggccaggcagagcacagcaaagatgttctggacatgtgaatgtcagtgcctcggccaggggcatagaacagccccataaagatggacacaaaaccagctgggtacacaagtggcccactgtcacaggccactgtcatagacagctgggtctagtcataggtaccgctgatgacgccttccacctgggccatgtaggccttctggtcgatctctgtgtctttcactaattttcagattttgtaataggagtcgttcaggtacctgtagaggaactggcacaggatgt

SEQ ID NO: 8399 - DNA, 507 bp, Homo sapiens
  MAP TO AL160007.1; EXPRESSED IN BRAIN, SIGNAL = 1.9; EXPRESSED IN PLACENTA, SIGNAL = 1.8; EXPRESSED IN ADULT LIVER, SIGNAL = 2.1; EXPRESSED IN FETAL LIVER, SIGNAL =   2; EXPRESSED IN HELA, SIGNAL = 2.2; EXPRESSED IN HEART, SIGNAL =   2; EXPRESSED IN BONE MARROW, SIGNAL = 1.6
gaaccagaatctctgaggcggggcctgggtgttggtaattttcctttgaaacactccccaggtgattctaatggaatctaggagtgagaatcactgggggaaggcatttgtagatgggaaggctggtggcatctgctagaagacttgatgtgtacttggccagagataaaccacaggtctggcctgaatgggtgtggaaatgtgtcagtcatgttttcagatttccaaggtcattttccaagagacctctgtgagcttggactggatagcgcagcacagggccagcgatggcagctggaagggtggctgcctaggaaggaggtaagctttaataactgaaatagatgctgcactttcatctacttaattgctatgatttgaagtctccccatagcctgaaacgaggtacgcatgggagggtgtgaagaaggggagggtactgagggatcctggggcccctaatccttatctcatgaaaggtgctgggctgggtcagcaggattcaat

SEQ ID NO: 8400 - DNA, 558 bp, Homo sapiens
  MAP TO AC018760.4; EXPRESSED IN PLACENTA, SIGNAL = 1.4; EXPRESSED IN FETAL LIVER, SIGNAL = 3.7; EXPRESSED IN HEART, SIGNAL = 2.2; EXPRESSED IN LUNG, SIGNAL = 1.8; EXPRESSED IN BRAIN, SIGNAL = 2.7; EXPRESSED IN HELA, SIGNAL = 2.1; EXPRESSED IN BONE MARROW, SIGNAL = 2.4; EXPRESSED IN ADULT LIVER, SIGNAL = 1.9
ctggcatgtgcttgtgtctcctcaggaagccagcactgtcctgcactacgtgctccagcaacctcctgagctgctgcaagagcctgtgggggctcaggttccttcagagacacatgggaggcccctcggaggagctatcgggggagccactgtctgaggagccacagaagagacctccccagaaagcggtgaggacgctgccctctgaggctgtctagacctagccccaggacactgaagataccgctcccggtccccaagatgtgactcctggagctcctaaggacccagtctccaaagccaccaaggactcaccctggactgaatctgggggctcccagaacacacagctgggtgtggggtcctcaggcctagggcggaacagcctattctgtgctcagcattcccagacaggcacgcaagactcctctgggcccgagtgggctgaatcccatgggttcaaagctcacgttggtgctggccctgggagtcatgagcagagacggtgggacagacggggatgcgtgcacatgtgtgtgcatgggtgcatacgtgtag

SEQ ID NO: 8401 - DNA, 600 bp, Homo sapiens
  MAP TO AL139289.4; EXPRESSED IN BONE MARROW, SIGNAL =   3; EXPRESSED IN HELA, SIGNAL = 5.4; EXPRESSED IN LUNG, SIGNAL = 3.7; EXPRESSED IN BRAIN, SIGNAL = 4.3; EXPRESSED IN PLACENTA, SIGNAL = 3.3; EXPRESSED IN ADULT LIVER, SIGNAL = 7.9; EXPRESSED IN FETAL LIVER, SIGNAL = 4.9; EXPRESSED IN HEART, SIGNAL = 4.5
atatccccatcacctagcccagtgtctggcacacagtaggtattctgtaactcttgaatggatgaataaatgatttgttgacgatgggaggaacagggtgtgaatgatctgttgggcatttctagctctagatgccaaggctgggaggaatgacaagggagtcttggggtgcctcagggggtctggtaataggggtatccgtgctgagctggaagggcacaggcaagtctgattccgggagctggactgggggcagcaagtggagggggcagggtgacaggaggatggctcttacctacactgtccacaaagaggactcgctgagtccgagtctggtttaggaacacattcttcacccagaggtgcagcggaaagaagagacgcacttcctcctggtctggaaactggcacacgtatcgggttccaaagtggggcatgctctgggaactcagggggcaagcacggggcttctccctgttggcatagaagaggtccctcctacacagccaccatgcggagccctgaggacccagacctgggcccatgcccaacttctgtctctagtactgccatttttcttctcactgcctgggataggtg

SEQ ID NO: 8402 - DNA, 536 bp, Homo sapiens
  MAP TO AC000097.1; EXPRESSED IN BRAIN, SIGNAL = 3.9; EXPRESSED IN ADULT LIVER, SIGNAL = 3.5; EXPRESSED IN HEART, SIGNAL = 2.9; EXPRESSED IN PLACENTA, SIGNAL = 3.1; EXPRESSED IN LUNG, SIGNAL = 3.3; EXPRESSED IN HELA, SIGNAL = 3.4; EXPRESSED IN FETAL LIVER, SIGNAL = 3.8; EXPRESSED IN BONE MARROW, SIGNAL = 3.5
tggaggaggtggtaggtcaggcagcctctggcccgcaaagtcggccctgggtccaccagccgcccctctgccctgcctttcctgggtcccgccttccctttctagggctatggctgcttgtggacaagcgtctcacgggtaggaaacgggacctctgagagctcctggcctggctgggtcctcagcatgtgggtctgtgagccaggtccacgccaggcaagggtttttacctctctgagcctcggtttcctcgtctgtaaaaatcagtgaggggatgtctccttgttgcacacacagcaggactgagattagagccacagcctgccccaccccagcccctggtcaggtgggggtgctgccatctcccagcagcctgcccaggcccctccctcacctgttccgagacttcctggccccacatgggcacccggcatccttgtgggctcaccacagcctgatgctgcccacagcccatctgtgtggcctggcagggggccccacagcttggaaatgccggtatctccttgcagacccca

SEQ ID NO: 8403 - DNA, 560 bp, Homo sapiens
  MAP TO AC011431.2; EXPRESSED IN BRAIN, SIGNAL =   4; EXPRESSED IN ADULT LIVER, SIGNAL = 3.1; EXPRESSED IN HELA, SIGNAL = 3.1; EXPRESSED IN HEART, SIGNAL = 3.7; EXPRESSED IN PLACENTA, SIGNAL = 3.4; EXPRESSED IN LUNG, SIGNAL = 3.9; EXPRESSED IN FETAL LIVER, SIGNAL = 2.9; EXPRESSED IN BONE MARROW, SIGNAL = 3.3
atctatcacagcagggggtgaaaattttggggatattaatcataataccttcgtctgtccacctggatataggaacaatatcacaaggggggtgtacaacctccacgatattgagagtatagcatcctctcccccccggttattagtaaatatatcacaggggggaagtacacaacctgcgatattgggagtaatatcattttctccccttctggaattacaaacaatatcacaagagggttgtacaatctctatgatattgggataagaacattctctccctctctggatattaggaacaatatcaggggtgcgtacaccacctgcgatattgggagtaatatcatcctctttccccctggaattagaaacaatatcacagggatggtgtaaccatctgagtaattaggaaaatgttatcttctccccaccctagatattaggaacaatatgacaggagagtgtacagcccctgtgatatttggaataattttattatctcctccctggtattaggaacaatatcacaggggtggtgcacacaccctttgatattgggg

SEQ ID NO: 8404 - DNA, 595 bp, Homo sapiens
  MAP TO AC000134.14; EXPRESSED IN BRAIN, SIGNAL = 1.6; EXPRESSED IN PLACENTA, SIGNAL = 1.6; EXPRESSED IN HEART, SIGNAL = 2.2; EXPRESSED IN ADULT LIVER, SIGNAL = 1.5; EXPRESSED IN BONE MARROW, SIGNAL = 1.5; EXPRESSED IN LUNG, SIGNAL = 1.7
aagcgccctctaaagtttcccagaatcctgctggccatgaccaagaccttgctgggcctggaccagtctttccagacgtgccgcttgctcccagcaccactctccagcagccacacctgggtgtcttttgcccgtgaaccctgacccccataccctctttggtcaagcttatccacatcctccacccgcatgccaaagatgaagaagttttcctctcccgcctcttctgccatctccacattggccccgtccatggtgccaatggtcagagccccgttgagcatgaacttcatgttgccggtgcctgaggcttcagtgcccgcagtggagatctgctcagagaggtctgcagctgggatcactgtggggtggcagcagggggacaagtcaactcagggaagaccctcacaccagctggggactctcagattaggctggccccaggcatagctggactcagagtcgccccaccccaaactcccagtcttcaccagccaagcctccctctcacaccgcacccccactgccctctacctcttgttgattcttgaccatctaggtccaacctggatttccccacctctgttgcagattt

SEQ ID NO: 8405 - DNA, 588 bp, Homo sapiens
  MAP TO AL133375.3; EXPRESSED IN BRAIN, SIGNAL = 4.1; EXPRESSED IN PLACENTA, SIGNAL =   3; EXPRESSED IN BONE MARROW, SIGNAL = 2.8; EXPRESSED IN HEART, SIGNAL = 3.5; EXPRESSED IN LUNG, SIGNAL = 4.3; EXPRESSED IN HELA, SIGNAL = 3.8; EXPRESSED IN ADULT LIVER, SIGNAL = 3.7; EXPRESSED IN FETAL LIVER, SIGNAL = 3.2
cttctgtctcttccctccccacaagcccagaagctgtggctaccctggcatctctacagctgcctgcaggccgcaccatgagcccccaggaagtagaagggttgatgaagcagacggtgcgtcaggtgcaggagacgctgaacttagagccagatgtcgctcagcaccttttggctcattcccactggggcgctgaacagctgctgcagagctacagtgaggaccctgagccactgctgctggcagctgggctgtgcgtacaccaggctcaggctgtacccgtacggcctgaccactgccccgtctgtgtgagccccctggggtgtgacgacgacctgccctctctctgctgcatgcactattgctgtaaggtgaggccccaccagcattgctcctgcccctggctttctgccctaccctaacaaaattccttgggaattcttgggttctagcccagcactgccattttcatcacctgggcaatagtggatttagtctcttagtccttcttaaactagttttgtcatctgtaagtggtaccacctgccttgacactctaaagggtggtggttgggatccagcgatata

SEQ ID NO: 8406 - DNA, 571 bp, Homo sapiens
  MAP TO AC019224.2; EXPRESSED IN PLACENTA, SIGNAL = 4.3; EXPRESSED IN BONE MARROW, SIGNAL = 4.6; EXPRESSED IN FETAL LIVER, SIGNAL = 5.4; EXPRESSED IN HELA, SIGNAL = 5.7; EXPRESSED IN LUNG, SIGNAL = 3.6; EXPRESSED IN HEART, SIGNAL = 6.4; EXPRESSED IN BRAIN, SIGNAL =   6; EXPRESSED IN ADULT LIVER, SIGNAL = 4.8
agaggaaagcaagagctcccttgccatgcgtttgctcagaactttaattttttctcctcaaggaaagtaaaagaaacaggtcttccttccactgtgcaggcagtcagcgagctcctgcaggtcctgctctgtaagcagaaagctggaggctgcaccccagatcaaggccctcacacctcaaaggttctcacggaggcctcgtctctgccccgcatctccagaatgtgcttgctggtcagagaagagtccagtgtggctcagacaaacacaatcacctttcccagcagccaggtccattctctgacaacatcccactgggcacagccacactgactcctgctgccactgcagccacacctgggcctctcctcccctgcaccaagcatggcaaccctctaggccatggcctcacctgccattaccccctggccccattacccctgcccccagctccgcatgtcaggtttgctgccctgtcctgcctagaacgctccgcaggctgctgtctctgtaccccctcctgccgaataacgactgttggcggctctgtgggttcatgtgcttcggaatt

SEQ ID NO: 8407 - DNA, 543 bp, Homo sapiens
  MAP TO AC017079.2; EXPRESSED IN ADULT LIVER, SIGNAL =   3; EXPRESSED IN HEART, SIGNAL = 2.2; EXPRESSED IN BRAIN, SIGNAL = 2.6; EXPRESSED IN PLACENTA, SIGNAL = 2.1; EXPRESSED IN BONE MARROW, SIGNAL =   5; EXPRESSED IN FETAL LIVER, SIGNAL = 2.6; EXPRESSED IN HELA, SIGNAL = 2.6; EXPRESSED IN LUNG, SIGNAL = 8.2
gcggcttcctctgtaaaatggggggcttctccaaagttccaagcacactccaagctcctgcaaccagaactacaggcccatccccaacccacggcattaagctgagggcatagctggcatggacgaggctgtgcaggaggcccacacagcggagcctgccctccggagagggcctgcagccccaggacacagctaccatccctacctggaccctggcagggatgggacactggagaagagggggggaccacccaccctctcccaaaccagcgccgccttgggccatgctggtgaccaggtgtggcttccacagtacgcctgcccccagccctgcacctgggccacgtcaagggggccgtgtgttcgcggaggtgtctacctggggcgctgtgtgcacgggggtatctctgggttcttgggccctgaagctgagcagctccagtccctctcccagcaagtagggagggacagctgggacccccataggactgtctgtctagcacctgttgtaattaatctcttcgggggaggctgtaactaagg

SEQ ID NO: 8408 - DNA, 516 bp, Homo sapiens
  MAP TO AL157955.1; EXPRESSED IN BRAIN, SIGNAL = 3.4; EXPRESSED IN BONE MARROW, SIGNAL = 2.6; EXPRESSED IN FETAL LIVER, SIGNAL = 3.5; EXPRESSED IN HEART, SIGNAL = 3.8; EXPRESSED IN LUNG, SIGNAL = 7.2; EXPRESSED IN ADULT LIVER, SIGNAL = 3.3; EXPRESSED IN PLACENTA, SIGNAL = 2.9; EXPRESSED IN HELA, SIGNAL =   4
aggaaccagagaaagcagggaaagctttgaaggagaatttgagttgggttgatacaaaaaaaaaaaaaaaaaacccagctcagaggaaggaggtatacactcaacacagttttcaaaagtgggaacactgggatgggcaaaggggagcaattaaaggtcacaggtacttagtttgtgttattatcagacaccattagaacaaattagcctcatggcataaaatggttagtcaaaaagtaccacagaatcaaattattttctaaattacaaacaaatgtccaaaactgaatcatattttaaatatattactaactccaatataatcaatgtccaaatcatggtaacgcttggcgcccacaatccaggtcacgacataataggcagtcagctgaagattgacataaggccagtcgaaaccttttcccagccatccagggaatgaccatggcaaccctgcagagagaagggaggaggcaaaggtagaggaggtataacggtgctggcgctattgaaaat

SEQ ID NO: 8409 - DNA, 559 bp, Homo sapiens
  MAP TO AC004551.1; EXPRESSED IN HELA, SIGNAL = 3.8; EXPRESSED IN HEART, SIGNAL = 3.3; EXPRESSED IN LUNG, SIGNAL = 2.6; EXPRESSED IN BRAIN, SIGNAL = 4.7; EXPRESSED IN PLACENTA, SIGNAL = 2.6; EXPRESSED IN ADULT LIVER, SIGNAL = 3.1; EXPRESSED IN BONE MARROW, SIGNAL = 2.5; EXPRESSED IN FETAL LIVER, SIGNAL = 3.6
acagacaagaacaccgaggctcggagtggttcagccccttggccaaggccatggagcagcaagtggcagagctggctctgaacccaggaagcccatgctgcccctgccatgctgtccatccagtttggccaagaagaactcatgttcgaagtgatgctgacacagggtttgtgaaaggcagagagagaatgcagcctgaggttgtgagctggaatcttgactctcctctgcagacctgctgcagtgcctctgctacccaataccccgtggatctatttcccccaattcagacccagaggaaggcagctcccccaatctcccctcctcccatcagatcctcagggtaaagtcactcacaggaatcactcgctccaggcagatgttgaaattcttcctctggttgggcttcagtttcttgagggagaatctggtctcaccaataaattcattgtggccaaatttgtcctcatcacagacggagatcctgccaccaacacaagggggtagagagagaaacaggaacaaatattaagacaccactgtgtgccaagagttgcag

SEQ ID NO: 8410 - DNA, 557 bp, Homo sapiens
  MAP TO AL049780.2; EXPRESSED IN ADULT LIVER, SIGNAL = 1.6; EXPRESSED IN HEART, SIGNAL = 1.7; EXPRESSED IN LUNG, SIGNAL = 4.4; EXPRESSED IN PLACENTA, SIGNAL = 1.8; EXPRESSED IN BRAIN, SIGNAL = 1.9; EXPRESSED IN BONE MARROW, SIGNAL = 2.3; EXPRESSED IN FETAL LIVER, SIGNAL = 1.7
tctatataacaaagatggccccattaaaattttaagtccttttaatgtgataatgctaccactttttaaattgtttaatatagtagtagtagtacacatgactctctgacatagaactctagacttgcacagtctgtccttttaatttcttggatataatcaattcatgtgagatcatttgctggggtagtcctcattccagccctgcccaactttctgattagataaaataagtcagtcctttgatggattctgttttcctttcttttgcagatgagggtcagctctatgccttcggatcagattattatggctgcatgggggtggacaaagttgctggccctgaagtgctagaacccatgcagctgaacttcttcctcagcaatccagtggagcaggtctcctgtggagataatcatgtggtggttctgacacgaaacaaggaagtctattcttggggctgtggcgaatatggtaggggtagccttgtctctgtccacttcttcacaggtatacaacctgacttcaaagttgtatgcatctaaacccatcatgca

SEQ ID NO: 8411 - DNA, 574 bp, Homo sapiens
  MAP TO AC013329.3; EXPRESSED IN ADULT LIVER, SIGNAL = 1.8; EXPRESSED IN HEART, SIGNAL = 1.8; EXPRESSED IN BRAIN, SIGNAL = 1.5; EXPRESSED IN PLACENTA, SIGNAL = 1.4; EXPRESSED IN FETAL LIVER, SIGNAL = 2.1; EXPRESSED IN HELA, SIGNAL =   2
taactttgagcccttgcctctcagtgttctattctgagctagtcaaacaagtggtagcaggcatgctgggctcaataatactgcctctcatatttaaatactctatttcacttggattgcaaattaaagacagtctcctgaatgctgacacattttcaatgattgattttgcaaaacgtgttgatttttcctacactgttttgcctctctgtgtgtcaactttggccttcttttcttgctcctttgcagcactgctgtctctttgaagacattgtctgcctgatacaaaaaaaaaatgtacattaaacctcatgactaattatgtggatagaaaattcccgacctcaaacataaaatacccctgcccagaaaccataacaaaagcttctgactatgtacaaaacccttaatcaaacctttcacagacttggattaaaagaaatcccaataatttattttctgttaacgttgtgcttacattctttgaaaagttgatttcttatgcatgttacatgcatacatacataagtcaatccattttatagtaaacaccatgcttttccccacaaacgtt

SEQ ID NO: 8412 - DNA, 598 bp, Homo sapiens
  MAP TO AC019043.2; EXPRESSED IN ADULT LIVER, SIGNAL = 1.6; EXPRESSED IN HEART, SIGNAL =   2; EXPRESSED IN BRAIN, SIGNAL = 1.6; EXPRESSED IN PLACENTA, SIGNAL =   2; EXPRESSED IN FETAL LIVER, SIGNAL = 2.2; EXPRESSED IN HELA, SIGNAL = 2.1; EXPRESSED IN LUNG, SIGNAL = 2.2
cacaaacacacaccctagcctaggcctacacagggcaggctcatcaatatcactgtcttccacctccacatcttgtcccacaggaaggtcttcaggggcaatagcacatgtggggccatcatctcctatgagaagaatgccttctgccggcatatctcctgaaggacctgcctgagtctgtgtgagtgttagttttgctttttaataagtaaaaagagtgcattctaaaataatgataaaagtacagcaaatacacatgtaccgtgcacagctagactagactttcatacaagtgggagtgcagttggctcgtctacaccagcatcaccacaaacatgtaattcactgcactgtgacatcatgagggccacaaggtcagtcggtgacaggggttttcagctccactacaaccatatgggaccaccatcatgtacgcgatctgctgctggtggaaacattgttatgttgtgcttgctgtttacagtttctcaacatcacttgaacctacaagaatatctaaggaccttctgagacacaaaagcttgattctcaaatacataaaaataagaaggatttttgttttcccccaaagtgatga

SEQ ID NO: 8413 - DNA, 550 bp, Homo sapiens
  MAP TO AC017111.2; EXPRESSED IN PLACENTA, SIGNAL = 1.8; EXPRESSED IN FETAL LIVER, SIGNAL = 2.5; EXPRESSED IN ADULT LIVER, SIGNAL = 2.1; EXPRESSED IN LUNG, SIGNAL =   2; EXPRESSED IN BRAIN, SIGNAL = 2.2; EXPRESSED IN HEART, SIGNAL = 2.3; EXPRESSED IN HELA, SIGNAL =   2; EXPRESSED IN BONE MARROW, SIGNAL = 1.5
acacagccctgactacaccctgacttaaccttagactcaattggaacttctgacctccaaactgtaagataataagtttgtgttgttttaagtcactacatctgtgataatttgttatagcagcaataggaaattaatatggtaactctgagaaatttaattctttgagactcaatttcttcctaagtaaaatgagaatactagaaacgactgactgctcctgtaataatcaaatgagtgaccagggtaaagtttgtgtcacatatgaagtatttaatacatgctgtttcctatctctgccctctgtttgctggcccacctaccaacctgccaccataaatcttgcaatgatgtccacattcgaaactggaggtatgtaattaagagataattgtttaataaatattacagaataatctcttaaaatattagagtaattttttgtagtgaaagaaaaagagagagggagaaactggtagaatgagagccattagtaaatactacagaaacgctgtgtacatacagcttatcgctggaggatgtaaattga

SEQ ID NO: 8414 - DNA, 597 bp, Homo sapiens
  MAP TO AC004552.1; EXPRESSED IN PLACENTA, SIGNAL = 2.1; EXPRESSED IN ADULT LIVER, SIGNAL = 2.1; EXPRESSED IN BONE MARROW, SIGNAL = 1.8; EXPRESSED IN HEART, SIGNAL = 2.4; EXPRESSED IN BRAIN, SIGNAL = 3.1; EXPRESSED IN LUNG, SIGNAL = 2.9; EXPRESSED IN HELA, SIGNAL = 2.8; EXPRESSED IN FETAL LIVER, SIGNAL = 2.5
agcttcagcttgagagccagctgatcttagcgacagctgaaccactgtgtcttgatccttctgtagcagttgcctgcactgcaaacaggctgctgtacaacaagcaaaagatgaataccgacccgatgaaacggtgcctccagaggtattcgtggccctctgtaaagccacagcaggagcagtctgactgtccacctcctcctgagctgagagtgtcgacttctggccaaaaagaagaaagaaaagtaggtcagccttgtgagctgaacattgctaaagcaggaagttgtgtagacacgtggaaaggcagaccctgtgatttggccgtgccttcagaagtggatgtggagaaacttgctaaagggtatcagtccgtcacagctgctgacccacagctcccagtctggccagcccaggaggtagaagacccttttggatttgcgttggaagctggctgtcaggcctgggacaccaagccaagcatcatgcagtcgtttaatgatccgcttctctgtggtaaaatacggccacgtaaaaaagccaggcagaagagccagaagtctccctggcagcccttcccagatgaccattcagctt

SEQ ID NO: 8415 - DNA, 587 bp, Homo sapiens
  MAP TO AC011469.3; EXPRESSED IN BRAIN, SIGNAL = 2.2; EXPRESSED IN PLACENTA, SIGNAL = 2.1; EXPRESSED IN FETAL LIVER, SIGNAL = 2.9; EXPRESSED IN ADULT LIVER, SIGNAL = 1.9; EXPRESSED IN BONE MARROW, SIGNAL = 2.8; EXPRESSED IN HELA, SIGNAL = 2.6; EXPRESSED IN HEART, SIGNAL = 2.3; EXPRESSED IN LUNG, SIGNAL = 1.9
actttcacacccctgacacccagagcctggaccctggacctctccatccctgagttccgggacccccctgtacctacacaggagcgagtcccagtcccagctctgcccttggccattgtgtgacctcggacaaatgcttttccctctctgcgtctcggtctccctctctgtaaaacgggtgggtctgggggagtcttgcgggagtgaggttgcggcagtgacgttgcggcagttagcgctcccagccgtggctgacagctgcgaggtccctgtaggagcctggacagcttcagcgggaagccacggggctcggggccacccgctggcacggcgctgcccatcgagggcgttatcctgagcctgcaggacctcatcatctacttcgagcctccctccgaggacttgcagcacgaggagaagcagagcaagctgcgaagcctgcgcaaccgccagagcctcttccaggaggaggtgaggacgtggcgagggcggagcggggcctgtgggcccagggggcgggaccactgaggggcggggccacggcgctgggcggggcagggcctgagggacctggggaagtagggtct

SEQ ID NO: 8416 - DNA, 557 bp, Homo sapiens
  MAP TO AL157789.1; EXPRESSED IN BRAIN, SIGNAL = 1.4; EXPRESSED IN PLACENTA, SIGNAL = 1.8; EXPRESSED IN FETAL LIVER, SIGNAL = 1.9; EXPRESSED IN BONE MARROW, SIGNAL = 1.5; EXPRESSED IN HELA, SIGNAL = 2.3; EXPRESSED IN HEART, SIGNAL = 2.3
tgctcaagcaatgaaaccacatctgatacagcagctgcaactggagtcaccacttggcttagcttatgataatccactgtcattctccaagatccatctgtcttctgcacaggccaaatggaagagttgaatggggatgtggcgggaatcaccacctctgcatctttcaagtcgttggtggtggcactaatctctgcagttcctccaggaatgtgatattgtttttgatttactatttttctaggtagagacagctctaatggcttccatttggcctttcccaccataatagctctcaccctaccagtcagggagccaatgtgggggttctgccagctgctaagtatgtctgtgccaattacgcattctggcactggggaaatgaccataggatgagtctggggacccactggacccactgtaagttggacctgagctaaaacaccattaattacctgacctccataagcccctactttaactggaggaccacaatgatgttttgggtcccctggaatcaatgtcagctcagagctagtgtccagtagtccccgaaa

SEQ ID NO: 8417 - DNA, 558 bp, Homo sapiens
  MAP TO AC012596.2; EXPRESSED IN PLACENTA, SIGNAL =   3; EXPRESSED IN FETAL LIVER, SIGNAL = 3.9; EXPRESSED IN ADULT LIVER, SIGNAL = 3.1; EXPRESSED IN BRAIN, SIGNAL = 3.2; EXPRESSED IN LUNG, SIGNAL = 2.5; EXPRESSED IN HEART, SIGNAL = 3.3; EXPRESSED IN HELA, SIGNAL = 3.6; EXPRESSED IN BONE MARROW, SIGNAL = 2.6
cagactttgtggacactccgtgggtgcaatgccatctttatttgtctttggtaataaggagctaccctaagcatgccagtctttttttctccagacaccacatgtgctgtgccctcctacatctgctccacctcccttgccatgaaagcttactcacttcaggtgatctccttcctcgattgtctcaatctgagaaagaagaggcgtgtgaagaagggtcatcaactgtttaaatgacatcctctccacttccaggggagaaaactgacccacaatatgctatgtaccacgaagaatcacaacaatttttaggaaaatatggggttatgtaagtcaattatctttcacttgcaatcgatgactagacccacaaggataagacagaaggtcagcttctaagatggaccccaataagccccacctccggtgtaatccatgctataggcccccaccccctgtctccacacatgataccagggctggtctgtgggactagtggaatacagccgaagtgacagcatgcgacgttgtgtcttctgccttgccctctctttctct

SEQ ID NO: 8418 - DNA, 557 bp, Homo sapiens
  MAP TO AL138806.5; EXPRESSED IN PLACENTA, SIGNAL = 3.1; EXPRESSED IN BRAIN, SIGNAL = 3.1; EXPRESSED IN FETAL LIVER, SIGNAL = 3.5; EXPRESSED IN HELA, SIGNAL = 3.2; EXPRESSED IN ADULT LIVER, SIGNAL = 3.6; EXPRESSED IN BONE MARROW, SIGNAL = 2.8; EXPRESSED IN HEART, SIGNAL = 2.5; EXPRESSED IN LUNG, SIGNAL = 5.7
ggctgagtccgaaaacagagtcagcgaagggagataggggtggggccattttataggatttgggtgggtaaaggaaaattagtcaaagggggctgttctctggcgggcaggggcgggggtcacaaggtgctcagtaggggagcttctgagccaggagaaggaatttcacaacgttaatcgctcggttaaggtggggcaggaacaaatcacaatggtggaatgtcatcagttaaggcaggaattggccattttcacttcttttgtgattcttcacttgcttcgggccatctggacgtatatacgtgcaggtcacaggggatatgatggcttagcttgggctcagaggcctgacagctgtggcattgtggactttgtcttcgtggtgctcgtggtacgagagagtcagcctgaagtccagtccaggctttccttttccctgctgccttgtgttcaaggaggcaaggcagagcagaaagagctggcctctggtgttatactgagcccatttcaagtcctagctctgccattgctatatcagaacctgggcaaaacaggta

SEQ ID NO: 8419 - DNA, 555 bp, Homo sapiens
  MAP TO AL034423.18; EXPRESSED IN BRAIN, SIGNAL = 3.1; EXPRESSED IN PLACENTA, SIGNAL = 1.6; EXPRESSED IN FETAL LIVER, SIGNAL = 2.7; EXPRESSED IN BONE MARROW, SIGNAL = 4.3; EXPRESSED IN HELA, SIGNAL = 1.7; EXPRESSED IN HEART, SIGNAL = 1.8; EXPRESSED IN LUNG, SIGNAL = 4.3
aggcttacaagttcccctggagttgctggtatcttgaatttctttccatttattttaggagtaaaagtccctcgcaatttccgactgttggaagaactcgaagaaggccagaaaggagtaggagatggcacagttagctggggtctagaagatgacgaagacatgacacttacaagatggacagggatgataattgggcctccaagagtaagcgtcgagctacggctataaatgtcaatgtcttaaattcactgtgcctccttttaaaaaatattagccttatcacggaaaaaaagctcaccaatggtatattttctgaaatgtggctattcttttttgaccagtttcagtttatatatttgaaccccctctgatgctgtttaacccctctaaatggtaagcaaaaacctgtttagactcatagtgtgaatttatatgacaatgtagacagtgaggtgtgaagtcattgcaccatcagatgtcgttcagaacaatctctgggctaaccaaataactaggccctaggtatagccagcattcctgaagccagtctcc

SEQ ID NO: 8420 - DNA, 598 bp, Homo sapiens
  MAP TO AL133444.1; EXPRESSED IN HEART, SIGNAL = 1.9; EXPRESSED IN BRAIN, SIGNAL = 1.3; EXPRESSED IN ADULT LIVER, SIGNAL = 1.5; EXPRESSED IN FETAL LIVER, SIGNAL = 2.2; EXPRESSED IN HELA, SIGNAL = 2.2
atctgaggaaatgctgtggcaagtttcttgtacctactttggtaattgtaaaccatccaggaccgtatcctttaggtttaatttatcttgctcctctttgcccctcttttccaagggagggtttagaagatgaattatactcaagagttagtgtttctccagaagatcagaccacaagttgtagaaagcacaccagaactttgcacttctgccctttatcttaattcctagcccatgcttaagccttttaggatctatctacatccacctcacataaccatctagaattctcccaaaatcttgtttcagtagcctgggaatcatggcagttatatctgcatttgtgtgtttcctggccatatagtaaaaatggcaaaagagatttatatggtcaaatccctagcctttccattcctttgctttataaatgaataacagtgatctaaaagcgaaagaatgtagctaaccagtgtcatttgggatcttctgaagtagtacggaaactccacattcttcagaccaacttgcggcatgccagcacattcctctccgatgaggtggaggaatactggtggctggcctgggacttgtaggactg

SEQ ID NO: 8421 - DNA, 507 bp, Homo sapiens
  MAP TO AL109925.11; EXPRESSED IN ADULT LIVER, SIGNAL = 3.1; EXPRESSED IN HEART, SIGNAL = 2.4; EXPRESSED IN PLACENTA, SIGNAL = 1.4; EXPRESSED IN FETAL LIVER, SIGNAL = 1.8; EXPRESSED IN LUNG, SIGNAL = 3.6
tcccagaatgagggtactggacagtgcacagaacaagggcataaaccactgtcccaacgagtgcatgtgagagtcacgtgggacagcagaaaaccaggtaagaacagctaccctagaaaaacacagcagcaaaagaaaaatagccaacaggaactttttaatttttcccttgagatgtcagagatgaagctctgaggtctctctctcacttacacaccggtctgtttctacctgatttcttgaaatgcttccatccactgggtcgctgtattcaaagttatcggccttctccacagtgtaaactttgtcatttgctgagaactgcttccccacaaaggagcgatcaaacatcagggcctccaagtccttcatcattttgtttgcgccctcagcttccacctcctcgtaatcatacctggaagaagtcacgaagttgaggcccacgggctgactgcagatcacaccaaggcctatcagtcagcactttcttcatcatttgtttggccc

SEQ ID NO: 8422 - DNA, 537 bp, Homo sapiens
  MAP TO AC011455.3; EXPRESSED IN ADULT LIVER, SIGNAL =   3; EXPRESSED IN BONE MARROW, SIGNAL = 3.1; EXPRESSED IN HEART, SIGNAL = 3.2; EXPRESSED IN LUNG, SIGNAL = 3.7; EXPRESSED IN BRAIN, SIGNAL = 3.8; EXPRESSED IN PLACENTA, SIGNAL = 3.4; EXPRESSED IN FETAL LIVER, SIGNAL = 3.5; EXPRESSED IN HELA, SIGNAL = 3.5
taaccagcagaaggtgaggggctgaggggcccacccagagaggcagctcagcgccggggagggctggggcatctgcagtgtcctgaggtctgctctgtccccaggacggctcagtgctcgtgccccctgccctccagtcctacctcggcactgatcggatcacagcccctacccacgtgcctctccagtacatcggccccaaccagccccggaagcctgggctgcctggccagcctgctgtaagctaagaacccacccacagcagccctcgggggtgtcactgcttcctggagttcaggagaccccggacacctgggacctgtgttgctgagcccgtcctgacatctgtgttcttcctgtcagctccacgcccgggcccctggaccacggggtccacctctcctctgtccttgctgcctcagagtcagtcactgaccctgttatcattgagggtcccagtgggaagcaggacgtctgggctttacggttctagggacaggagaagcagaggaagaggcttccatccctccttccttc

SEQ ID NO: 8423 - DNA, 502 bp, Homo sapiens
  MAP TO AC018790.3; EXPRESSED IN PLACENTA, SIGNAL = 2.6; EXPRESSED IN BONE MARROW, SIGNAL = 3.7; EXPRESSED IN ADULT LIVER, SIGNAL = 3.7; EXPRESSED IN LUNG, SIGNAL = 2.9; EXPRESSED IN BRAIN, SIGNAL = 2.6; EXPRESSED IN HEART, SIGNAL = 4.1; EXPRESSED IN HELA, SIGNAL =   5; EXPRESSED IN FETAL LIVER, SIGNAL = 4.6
tgaaatccaaaactcccagggaagctcattctccctgagcaggaccagaaatgccccagcaaaagaaggcctttgtcccccacactcactctagatctcctggagagagagaacgcgagatcaatcaatgccaggggctgccaatctttgctgtttttccccttaagtcatgtttattgatataattggtccaaatattttaattcccacacaaatgtgtcacctccagtctccacaatgtcaaaatgtcatcaagtaacctccccaaagtcgcgtttaacctctgtggcggcatcaacacccacacagctgcggcgccacaaagcagcggtgaggcagtgggtgtatcatcccctctgcctgcctctcttgtttctatatatatatgcaaaatagttataagaaataaaacaattgtctctggctctcaagctaaatcttgcaaagattatgtctcactactctctatatgaaccgcccaagaactgcttgcctccagaac

SEQ ID NO: 8424 - DNA, 537 bp, Homo sapiens
  MAP TO AC025488.1; EXPRESSED IN BRAIN, SIGNAL = 2.6; EXPRESSED IN HELA, SIGNAL = 2.1; EXPRESSED IN PLACENTA, SIGNAL = 2.4; EXPRESSED IN LUNG, SIGNAL = 4.6; EXPRESSED IN HEART, SIGNAL =   2; EXPRESSED IN FETAL LIVER, SIGNAL = 6.3; EXPRESSED IN BONE MARROW, SIGNAL = 2.4; EXPRESSED IN ADULT LIVER, SIGNAL =  25
ttttccagcttcaaatgtcggacataactaatcccttttttccttcttcacttttctagtaaacttccagaaacaaaacagacaacactttgtgatgataaatgtcacagttgccacacaggccagcagaaacccaatcacatccaaagagtggtactggaaccaggtgaggtcacgggctgcaactcgaaggtgtttggctcctttgtggcgcatgacaaattcaatccagaagactgctcgatccaggggcttcactggttgatcacgttgaattcttgataatttcataacattctctttatatctgaaggacaaaaataaagataccaacactgaaagtaagttaatttgcctgtacatatcaagtctatgaaaggcttttaaagtgtccaataattcaaagtaaatgtcaaagaaatgacagagaatttgtgtatcttaatttgagtcatcatagaaagtttggcttttaaattggacttttctaattgacaaatatttttaaagtagaaatggaagcccaggtgagaaagt

SEQ ID NO: 8425 - DNA, 583 bp, Homo sapiens
  MAP TO AP001224.1; EXPRESSED IN PLACENTA, SIGNAL = 1.4; EXPRESSED IN BONE MARROW, SIGNAL = 1.7; EXPRESSED IN HELA, SIGNAL = 1.8; EXPRESSED IN HEART, SIGNAL = 1.7; EXPRESSED IN LUNG, SIGNAL = 2.3; EXPRESSED IN ADULT LIVER, SIGNAL = 1.6; EXPRESSED IN BRAIN, SIGNAL = 1.6; EXPRESSED IN FETAL LIVER, SIGNAL = 1.7
cacacaacatacccactggcatctatgttgggaacaaacatgaacatccccaagtattaataccaaacaagtagttcattcagtttgatgaagttctgatcagaaagcaaaacaggctaaccacttcatcttcaaggagacattctagtagaaaatgcagacaaataggatgaagcctgcatcttccttcctcactagagaatcagaacagcaggaggaacaggaacaaagctgggtgcccatgtccatggggagcctccggaggccgattctgcttggagctggcaaggatggtgtagtagtccactgggactcccacaccaaaatggatatggctggacaacttaaactgcagaaattaatttttatatttctggtggctggaaattgcaagatcaaagtccaacaaggttcactttctggtaaggaccttcttcctggtttggagatagccaccgtgggtagaaagttgagttaggggcaagagggaggagagagagagagagaaaaggagagctctctggtttctattcttataagaacattaattctattggatcatggtcccatccttttgacctca

SEQ ID NO: 8426 - DNA, 585 bp, Homo sapiens
  MAP TO AL133467.1; EXPRESSED IN BRAIN, SIGNAL = 3.4; EXPRESSED IN PLACENTA, SIGNAL =   3; EXPRESSED IN BONE MARROW, SIGNAL = 4.5; EXPRESSED IN LUNG, SIGNAL = 4.3; EXPRESSED IN ADULT LIVER, SIGNAL = 4.4; EXPRESSED IN FETAL LIVER, SIGNAL = 4.3; EXPRESSED IN HELA, SIGNAL = 3.6; EXPRESSED IN HEART, SIGNAL = 2.3
ggcccagtacctaggaggagctgaacagaaatgtgcagaggtatcagtgactcttacccagccttccaagccctgcacagcgcctccttgtttgtggtctggaatccttccggcaagtgggtgtccagcctcaacgtccccagggcttggggcttgtgaagggctccctctgctggaggaggagagcattgggcccaggcatgagtgcaccatcagtaccaggcaatcctgggagcaattctggagagatcaaagtggttctcaaagacattggtgacacctaccccggagagtgaatccttcaggtcacaggtaccagagatggacaacttggccagaagacatagccttatctcacttatctcagacatgacatggacaaagaccagctgaaggaccaggaaccaaactgttgtcacctgcagctccgtggcttttttcataccaggtccaagggttgagggatgggagacctggccaaagagggtgatcggtgaagcaatctattttccaccttgaggctaactggtagttatttctttctgcctatggagacctctgcttaccttctgaccacccactcat

SEQ ID NO: 8427 - DNA, 504 bp, Homo sapiens
  MAP TO AC023154.3; EXPRESSED IN BRAIN, SIGNAL = 2.9; EXPRESSED IN PLACENTA, SIGNAL = 2.7; EXPRESSED IN ADULT LIVER, SIGNAL = 2.8; EXPRESSED IN BONE MARROW, SIGNAL = 2.2; EXPRESSED IN FETAL LIVER, SIGNAL = 3.2; EXPRESSED IN HELA, SIGNAL = 3.4; EXPRESSED IN HEART, SIGNAL = 2.9; EXPRESSED IN LUNG, SIGNAL = 2.5
ttgtcttgaaaatgctccccatactgtaattagtatggtcaggggcagtctgtgaatggtgggagaagtgtcagaagtttggcttatggtcatctttttcttctctggaggctggcttgaggagctgagccaggccggtggtcaggtggtggaaggctttggaggaaaggtgagctggaagaatttcttcgtaaccagagtttgggtgaagatgaagcaggaggcacaggacgttcactgctccttgattaacaagcaggaacacaatagacatttggtataaatcctgcaaagggcctccaacaaataaggaaaaagaggggggcttgggggaaggaggactgtggccatggcagagctcccggaaactccctgctgctgccaggctcgtgggcacacttctcagcatgggagaggctggaggagaagcaagtcatgccctccacccccggaaggagcagcaggcagaaaagggctctgaaggcttctctgggcctaagtccc

SEQ ID NO: 8428 - DNA, 585 bp, Homo sapiens
  MAP TO AL121955.4; EXPRESSED IN FETAL LIVER, SIGNAL = 1.7; EXPRESSED IN HELA, SIGNAL = 1.9; EXPRESSED IN BONE MARROW, SIGNAL = 2.2; EXPRESSED IN HEART, SIGNAL = 1.8; EXPRESSED IN PLACENTA, SIGNAL = 1.4
tggtacagttccaaggtgtcctgaatacagatatctggctttggatgaaatctccaaggagttttatattcactcaccacttcctgtggaagaagtagttgtaataatcattacaaatatcttgaactgcaaacttagcagcattgttttcttttctgtttcagacatattcagcattgaatcactgaataattttatttctaattatgaaattgaagctttggcagatttcattttattcacttgaaattaaagcaagttattttatatattctaatgagatcagaatgttacaagtatgtgtttggattttatttccatactcttggagagaaggccataacttgaaaaatgactggaaagaaactattatagtcattattaagaagagactatttatgatagtcattatttagtaaagtgagtttccttaaacttggtacatttctgtgtaaccagtgaattaattcacaagtcatttaagcttcgtgaatatattttaaatgtttaaaatctatttcagaagcttaaccaataagataaagttatatctgataaccaagcaccattctgtgcaccagtgat

SEQ ID NO: 8429 - DNA, 562 bp, Homo sapiens
  MAP TO AL133375.3; EXPRESSED IN BRAIN, SIGNAL = 3.3; EXPRESSED IN PLACENTA, SIGNAL = 9.6; EXPRESSED IN BONE MARROW, SIGNAL = 2.5; EXPRESSED IN HELA, SIGNAL = 3.6; EXPRESSED IN LUNG, SIGNAL = 2.8; EXPRESSED IN FETAL LIVER, SIGNAL = 3.4; EXPRESSED IN HEART, SIGNAL = 4.5; EXPRESSED IN ADULT LIVER, SIGNAL = 3.8
gcactcttgattcctggtccctccagtgctggccctgtgagcacctgtcttgccacctccctggccctagcctcatcatgtctcctagactccagctcgattacttccttgatcaccaacccggcctcctgccccatcactgtcttagaccccggtcccatctctcctagactctggctccgtcacctcccccttagctcctggctccatccccttttccctctaccacacgacatctcctccctcaccccagcttctgatcttatcacctctcttagcccctggcttcatcatctcttccttcccatccccctgcccgaggcccgaaccttgcaacttcttgagcacggccacctccatcttgaggacctgcttgggctgctgggctgactccaccttgagggccacattctccctggtcagcaggtccatggcctcgtagatctcaccaaagcccccgcccccgatctttttcagctatgaagatgaggggatagggggtgctcagggatcaggctgaacagctcctcatcccacctgctgcttggttgcatccttcatt

SEQ ID NO: 8430 - DNA, 551 bp, Homo sapiens
  MAP TO AC016910.2; EXPRESSED IN PLACENTA, SIGNAL = 2.2; EXPRESSED IN BONE MARROW, SIGNAL = 2.3; EXPRESSED IN HEART, SIGNAL =   3; EXPRESSED IN BRAIN, SIGNAL =   5; EXPRESSED IN LUNG, SIGNAL = 2.1; EXPRESSED IN HELA, SIGNAL = 3.1; EXPRESSED IN FETAL LIVER, SIGNAL = 3.8; EXPRESSED IN ADULT LIVER, SIGNAL = 2.8
gttgtgatttgtgggtgtgcctagtggaaaacattaactaatagtcaatttagaaagattctgaccagaatcttgctgcgggagacaaaagtgatccaatgatagcaactacattagacttcttaagatgattaggcaaatggaaattctgtatttttgaatagtatttcttaaacagtatgtatatttcaatagacaaaacttaggttgctgtcaaaaattcttaaaatttttttcttagtattatgtttgtaaagacaattaatgttatctgctgtaacaaacaatccccaaatttcagtagattcacaataaagtttattttttgcttcccccaaaatcagagagtttttctgaattcttctttcaggtgatacctataaaactcaggctcttcgtgtcatacgatttcaatacatggcctccattgttgctattgaaggagaagaaagattacgaaaaatcacacagttttctagccagtcctagaactgttgtacatcatttccatccacttccaattggccaggacttaatcacatggcccatcc

SEQ ID NO: 8431 - DNA, 543 bp, Homo sapiens
  MAP TO AP001206.1; EXPRESSED IN ADULT LIVER, SIGNAL = 4.7; EXPRESSED IN BONE MARROW, SIGNAL = 3.3; EXPRESSED IN HEART, SIGNAL = 3.5; EXPRESSED IN LUNG, SIGNAL =   3; EXPRESSED IN PLACENTA, SIGNAL = 4.3; EXPRESSED IN BRAIN, SIGNAL = 4.2; EXPRESSED IN HELA, SIGNAL = 4.1; EXPRESSED IN FETAL LIVER, SIGNAL = 4.2
attctcccttgagagcctccagaagaaaccagccctgccaccttcattttagcccagtaagactgatttcagacttttgacctccagaactgcaagagaataagtctgtgctgtttgaagcctctaagtttgtggtgatttgttacagcagcaataggaaactgatacaactacctctcatcctgcaactgcctttccatgctgacctcacctccacccaactttgctcttccctgacaacctacacattatattcaaatgagggatttgggagtacccagtcctcatcgatcctaaaggacctgtcttgggggttggaggcctcaaggcagcagaatctctgtgccatgaggacaagaaatgattgcaagcaatgggataggatgtgcaggaataatctggagttcaggacagtggtaggggctacagaaaaggattttggaatcattagcacgtaagtgatggttgaagttaacccacagagagacttcataaatatatgatagtggcttggataggactaggaagcagatcaaggggatt

SEQ ID NO: 8432 - DNA, 535 bp, Homo sapiens
  MAP TO AC023314.3; EXPRESSED IN BRAIN, SIGNAL = 1.8; EXPRESSED IN PLACENTA, SIGNAL = 1.4; EXPRESSED IN ADULT LIVER, SIGNAL = 1.8; EXPRESSED IN BONE MARROW, SIGNAL = 1.8; EXPRESSED IN HELA, SIGNAL = 1.9; EXPRESSED IN FETAL LIVER, SIGNAL = 1.9; EXPRESSED IN HEART, SIGNAL = 1.8
gaacttcccatgaggctgagtgactgaccagcaggcagtgcactgggcttcctctcaggtccacatccggagcttgcagcaggcgccaatccctgcctttgttgtaagtgatgtatgtcttcacctggtcgtccaccttcttgtttgccagaaatatccctttgatacctgctacctaggaaaaaaggtgagagatggagaaccatgctgggccaacatgcctttggtcttggagaagcccttagagaagccgcagaatttcccacggcatgttggggttccaagcaagaaaagaaggaacatgataggaaacgttgaatgccatgtggtctctgaaaaatgtttaaaaagttcatctctgaaccttatgtcaccccctagatgtccctttctatgcttacccatctgtttttttcccagtttgctcgtctctgtactttgttccataggactttacctttaattaactattaacattccctctgagatgggagtggctgacaagaactgaaggagttaccccttccagcaaaca

SEQ ID NO: 8433 - DNA, 589 bp, Homo sapiens
  MAP TO AL117356.3; EXPRESSED IN BRAIN, SIGNAL = 1.5; EXPRESSED IN ADULT LIVER, SIGNAL = 1.8; EXPRESSED IN HEART, SIGNAL = 1.8
aatggcattgctccaaaaaggaaggttacactgggtcccacacacctcctgaatcctaaacagctacagcacagtgccattttgaaggccagcccccaccagactttattctgccctggggcccaacagctcctgcatctccacaataacgagcatctttgcattgagccccatgacatcctctgcctgcagcttctgccactgctggctgctgccaccagggccaaagtgaaagccactggcagcaacagcactgcccccagcagtggggctgctatgcattttcacgcatcctgacaaaagggtccaccaccactgccggctgctgttgccatgtgacaaagtgcatcccaatgaagtgatcacaccacctccaacagtggggctgctgtgcatttataagccctctaaggacaaactgccccacccacagcaactgcccctgctagctgccatcaccatggccaaagcataagccactggcagcaacaccacttctcccagcagcaggtggccatgcatttacaagtgccatgaggacaggttccctggctgacagctgtcacctggagcagaagccaccaaccta

SEQ ID NO: 8434 - DNA, 573 bp, Homo sapiens
  MAP TO AL121975.3; EXPRESSED IN ADULT LIVER, SIGNAL = 2.1; EXPRESSED IN BONE MARROW, SIGNAL = 1.8; EXPRESSED IN HEART, SIGNAL = 2.1; EXPRESSED IN LUNG, SIGNAL = 2.2; EXPRESSED IN PLACENTA, SIGNAL = 1.9; EXPRESSED IN BRAIN, SIGNAL = 2.2; EXPRESSED IN FETAL LIVER, SIGNAL = 2.2; EXPRESSED IN HELA, SIGNAL = 2.4
ctgggctcctcagagttgtcttctccactcaactaattattggaatttcattttccatattatttaattgttaatagtatctttcattacattttatatagtctttccaaatcatagtacagttgttttgaggtatttaggatacactgattgctattttcagctcaaactcaagaagccagaagctctagctaccagttctaattatctatcactgtataacaaactatcccaaaacttaacagtttaaaataacagccattgtattacagctctcaattctgatggtcaggtattcagaaagggtgctgctggcaatgtctctactccatgtggcaccaaatgaagtcaccagaggtactgagctggtgaacagattaatctggaggttcttagatggctctgctctcatgtatggcaccgtgacagggatgcttaaaaggctgggctcaggtgggaatgtcaacatgcctctccagcatggcaattactagttactgccaggtttcagaacagattctccatcaagtctacttagaattcttaatggcatcccagagctcctgaagactg

SEQ ID NO: 8435 - DNA, 520 bp, Homo sapiens
  MAP TO AC012087.10; EXPRESSED IN HELA, SIGNAL = 4.7; EXPRESSED IN HEART, SIGNAL = 4.2; EXPRESSED IN BRAIN, SIGNAL = 4.9; EXPRESSED IN BONE MARROW, SIGNAL = 3.5; EXPRESSED IN LUNG, SIGNAL = 4.9; EXPRESSED IN ADULT LIVER, SIGNAL = 4.4; EXPRESSED IN PLACENTA, SIGNAL =   4; EXPRESSED IN FETAL LIVER, SIGNAL = 4.5
tctctctgctcctctctgcccagtaaaattatgaacccttggaatagcacaagagacaaccaaagaaaaactgcaaaaagcatgaagaagaaggtaaactcgttcgagatctagaattggaggaaaaacacagcagcagggtgtcttacattccccaccaaacagaaaaaggtggctcagacccaacattttctgactctaaacaagcaacagaaggcagtctaggtaaggtcattcctcctatggctcgaacagaccctctgacaacaccaggtaagcctctagtcccattgtaagagcggtttggttgggagccccactaacaataaactggccggagaagtgttccccttttctgctgtgcttagactcccctcccccaccaaaagatactgaggggcccagcagcatcagcaagaggcatcttaccacaacaagcctggccgaagcttcattgcctccacaggcctgagacttccctccaccaaccagaaaaacaggagtgcccattaggggagat

SEQ ID NO: 8436 - DNA, 529 bp, Homo sapiens
  MAP TO AC008873.4; EXPRESSED IN HEART, SIGNAL = 7.7
atttccaacccttgattccccaagttctggctaagggagaaatagcacaatctggcttagactatatactgcatcctggaggatattcctccagccctacaaggtgctgccatgcagctattgtcataaccgagtcttcagtggccattcaatcattctttcaggccacttgcttcagggtgatgggaaacatgataagaccaatgaattccaagaccatgagcacattagcatatgttatgtgctataaaacaaatttcttggtcagaagcaatgctgtgctgaataccatgaaggtgagtaaggcatttcgtaagtctacagatggcagttttgataaaagcactgtaggcagggaaggcaaatccctatccagggtgagtatctattccactgggaacaaagagctgccacttctataatggaagtggtccagcataatcaatctgccaccaggtggctagctggttttctccatcttcacacctggcctgggaatggtgccatatcaggggttcactgttggact

SEQ ID NO: 8437 - DNA, 553 bp, Homo sapiens
  MAP TO AL133388.2; EXPRESSED IN PLACENTA, SIGNAL = 2.4; EXPRESSED IN BRAIN, SIGNAL = 1.9; EXPRESSED IN HELA, SIGNAL = 2.6; EXPRESSED IN HEART, SIGNAL = 2.3; EXPRESSED IN BONE MARROW, SIGNAL = 1.8; EXPRESSED IN FETAL LIVER, SIGNAL =   3; EXPRESSED IN ADULT LIVER, SIGNAL = 2.2
cagggcttagtcatgttgctcagttttcctttcagcaagagaaccacaatctcttctgttaaatgactaaagtctgtgcaatgtaatatcttcagagaaaatgaacctaacaatttatttgagtcaatgggaataggaatttcatttcttaaaaaaaagtaagatgacactttctcagatttaaaaatatagacacataagacctataaaatggagacatggctagttaatcatgtttattgccacttgtccctcatgggggtaatggtcccagacaaaacagctgttcccaacattgctaaaattccagtgtcaccttgtgtgaccacagaatacatagacatgcatgtgaggcagctggggatatcaggttgagattttgaaaactggctctcaggttttattttctaattatttctctttttctctccctacggacagcagcagtaggacattattagtcactttctgacttcctgtgttttttactaatagtggtaacattatggtggaaaaaatattatatttgtacagccactgactgcttgtttca

SEQ ID NO: 8438 - DNA, 529 bp, Homo sapiens
  MAP TO AL121997.7; EXPRESSED IN PLACENTA, SIGNAL = 1.6; EXPRESSED IN BONE MARROW, SIGNAL = 2.9; EXPRESSED IN FETAL LIVER, SIGNAL =   2; EXPRESSED IN LUNG, SIGNAL = 2.9; EXPRESSED IN HEART, SIGNAL =   2; EXPRESSED IN BRAIN, SIGNAL =   2; EXPRESSED IN HELA, SIGNAL = 2.2; EXPRESSED IN ADULT LIVER, SIGNAL = 1.8
tcaggtatttcaagcctgggactcatttcgccatggaaggaattatttaagaagcacctgactaggtcagaactatgcctgaaaatattatagggttaagtaccaatttccagtaattttaagccaatcttcagttagaaacaaacaacaaaaacacatagttttaaaagtaaatttgtatttgttttcctaatcttttttttttgtaatacttattttatagctcggtcatgagcaccgacagtaactcactggcacgtgaatttctgaccgatgtcaaccggctttgcaatgcagtggtccagagggtggaggccagggaggaagaagaggaggagacgcacatggcaacccttggacagtaccttgtccatggtcgaggatttctattacttaccaagctaaattctataattgatcaggtaacatttttatatcaaatacttactttcatcaatatatgatagttaactgtagctacatggttttggattacatagtttctgaagcctccttgagataaagtcca

SEQ ID NO: 8439 - DNA, 554 bp, Homo sapiens
  MAP TO AC021881.2; EXPRESSED IN PLACENTA, SIGNAL =  12; EXPRESSED IN BRAIN, SIGNAL =   4; EXPRESSED IN FETAL LIVER, SIGNAL = 3.7; EXPRESSED IN HELA, SIGNAL = 4.4; EXPRESSED IN HEART, SIGNAL = 3.7; EXPRESSED IN LUNG, SIGNAL = 4.6; EXPRESSED IN BONE MARROW, SIGNAL = 3.1; EXPRESSED IN ADULT LIVER, SIGNAL = 3.9
aaatgtcagctggccaagtccccacctggaagctctggagaaaacttgacttccaagctcattcaggttgttggcaaaatttacttcctttccggttgtaggactgaagtccccattttcttgctggctgtcagccagggacttctctcagtttctttagaccaccttctcacaaagtctccatctataacccagcaacaacatgccaaatcttccttatgcctcaaatttgagctcctcttctgccaccagccacagaaaaccctcggagtttttaaaggatctcacgtgagtattgggcccaccaaaataatcccccatcttaatgtcaactaataatttaacatactcatgggaataatattatatttattggtgccaaagattaggatatggaatctcgaggggccgttcttggaattctatgtactgtacccactttttccctgaggtcactgccattctacttggcttggactgctagcactgaaacagaaagccactatctattagtctaaggagtcagaacatgcaccacaggcccagaaaatcta

SEQ ID NO: 8440 - DNA, 501 bp, Homo sapiens
  MAP TO AL078590.27; EXPRESSED IN ADULT LIVER, SIGNAL = 2.4; EXPRESSED IN HELA, SIGNAL = 2.8; EXPRESSED IN HEART, SIGNAL = 2.3; EXPRESSED IN BRAIN, SIGNAL = 2.2; EXPRESSED IN PLACENTA, SIGNAL = 1.9; EXPRESSED IN BONE MARROW, SIGNAL = 1.7; EXPRESSED IN FETAL LIVER, SIGNAL = 2.7; EXPRESSED IN LUNG, SIGNAL =   2
tcactgttcattgccctgacttgtgcctgagatgtttttagtccttcagccagttcaaatcaggaatgagatgcatttgatctggacttcttctactctgccaagcagataatcccctaacgactggtcagcattttcatcccagagagtcaaaactgacctttcagtagcagaggttgctttaggtttgtgcaaaataacgttaaggacaaattcccacttttggggcgccaccgccgtccctttcattgcctgcagtttctagcatttattttccaatgtggacactgcaaaactgtgattcttcaaagtggttatttagttcctaaaacatttagagttggggcaaaatttgcataattctattaaaaggcttacacctcagctttgaaaaatatttgagaaaatgtgatttatgggggaaggaagtcttatcttttggcccagaaggtgtttcatggaactaaacctgttaatgttaggattgcctgttaagcacca

SEQ ID NO: 8441 - DNA, 512 bp, Homo sapiens
  MAP TO AF223391.1; EXPRESSED IN PLACENTA, SIGNAL = 2.2; EXPRESSED IN FETAL LIVER, SIGNAL = 3.1; EXPRESSED IN HELA, SIGNAL = 4.1; EXPRESSED IN HEART, SIGNAL = 2.6; EXPRESSED IN BRAIN, SIGNAL = 2.6; EXPRESSED IN LUNG, SIGNAL = 2.5; EXPRESSED IN BONE MARROW, SIGNAL = 2.1; EXPRESSED IN ADULT LIVER, SIGNAL = 2.9
agagttccaagatgggggagaaaggggcataacatggacaaaagcctgcctaaagaagcagtgaatggaccacatgcaattggggagacagaagcagaagaaaaaggggagggtggggtgggggagaaagcaggtgggggctgggaagttctgcctatgtgcattgtcttccaggtgcttttgtaagcctgagccatgcccaaggcagcactggcagctcaagctcaggccaaacacacacgagaagagtatcgtattgtgtttccttttcttcgtgtttttgaaacaggaataaaaactaccaaaagagaaacacaggaaaaaaaaatagaaagggaaaaaaatctattcaaggaggcatgaagatttaatcaacacccagtgttcttagcaggtcgggagcaagcacaaatcgtattgtctatgcagctatttctgacaccccccagcagccctcagagcaacctctgccactgcccagagtctgggaggcagttcctgggttccagtgt

SEQ ID NO: 8442 - DNA, 548 bp, Homo sapiens
  MAP TO AC016025.11; EXPRESSED IN PLACENTA, SIGNAL = 3.2; EXPRESSED IN BRAIN, SIGNAL = 8.7; EXPRESSED IN FETAL LIVER, SIGNAL = 5.2; EXPRESSED IN HELA, SIGNAL = 5.1; EXPRESSED IN ADULT LIVER, SIGNAL = 3.9; EXPRESSED IN LUNG, SIGNAL = 5.6; EXPRESSED IN HEART, SIGNAL =   4; EXPRESSED IN BONE MARROW, SIGNAL = 4.1
atatcactgccacctccctgctggggacaagggaacctgacacagaagtgatcacagttgagaaatccagccctgctacatctctgtttgtagaacttgatgaagaagaggtgaaagcagcaacaactgaacctactgaagtggaggaggtggtccccgcactggaacccacagaaacgctgctgagtgagaaggagataaacgcaagggaagagagccttgtggaagagctgtcccctgccagcgagaagaagcccgtgccgccgtctgagggcaagtctagactgtcccccgccggtgagatgaagcccatgccgctgtctgagggcaagtctatactgctgtttggaggggctgctgctgttgccatcctggcagtggccatcggggtagccctggctctgagaaagaaataggaggcttttcagaagagaaagacagaaggatgtaaggttggagttgtattggctggaatttgaacctccagcagctgtctggacatttgtggaacactctgggataatgggggacttctgctcaacatggca

SEQ ID NO: 8443 - DNA, 505 bp, Homo sapiens
  MAP TO AC009144.4; EXPRESSED IN BRAIN, SIGNAL = 1.9; EXPRESSED IN PLACENTA, SIGNAL = 2.2; EXPRESSED IN HELA, SIGNAL = 1.9; EXPRESSED IN LUNG, SIGNAL =   6; EXPRESSED IN ADULT LIVER, SIGNAL = 1.7; EXPRESSED IN BONE MARROW, SIGNAL = 1.6; EXPRESSED IN FETAL LIVER, SIGNAL =   2; EXPRESSED IN HEART, SIGNAL =   2
agagtcctgctcgttgatggtgttcagcagcaggcatgcgggcggccgtggcaggtgcgggtgcccaggctctcgagcctgctcctcagaggactgacagaggccttcctcctcatcaccagggggccgcacatggcagctgtcgcagaagtccaggggcccatccagagcatcatcgatgagtgtgttgaactctttgaggtcatcgtcatggtggccccggttgcacacacacacttcaatgcccgagtcacctgtgaagcggcgatgtctcccaggcgtcttctctttgctgtcgggtgcgccgtgttcagagctgtcatctttcagcagctcctccctacattctgcatctttgtccaggaaggcccccgggtccagctcccccaggccagccacagagccactgggctccatccctggggctttggtggctgctcggtcaactggtaggtcagagggatcagggtcagcgatgcttgggggtcttgtgctgcttctgctg

SEQ ID NO: 8444 - DNA, 593 bp, Homo sapiens
  MAP TO AL158841.1; EXPRESSED IN BRAIN, SIGNAL = 1.3; EXPRESSED IN HELA, SIGNAL = 1.7; EXPRESSED IN ADULT LIVER, SIGNAL = 1.7; EXPRESSED IN FETAL LIVER, SIGNAL = 1.6; EXPRESSED IN HEART, SIGNAL = 1.8
caaatgtatgccacaaaatggaataatgtaagaactgggggatatttaatctggagaaaagaagaaccagaggaatatgcttactatcataaaaccttttgaagagctattatttataacaggaatgaacttatcattcatgagcatttaatggaggttgtagtgaaaatcagattatagcaaagtgtgaagacatattttctgacatttgggagctgtttctagggatttctagaccacttcataggaggcttttaagaatggaatggaaaaacaggctaggatgagtatcattcaagaggactaaaaaatagactttgcagttgaaataggtaagttaaacaccatttattgaatttttgttttccaattacagagagttttgaagattttgcaaacatggaaatccttaaggaaatacaaatcaccaaaaatcttactcagaagagataagcactggtaatattttaatatgcagggtactcacatatggttgttcaagctgttgcttgttcaaaggtaaccagctgtgggagtaagtagagacctgagtgtgtgtgtatttgtaaacctgaggtcgcactgtacctgct

SEQ ID NO: 8445 - DNA, 544 bp, Homo sapiens
  MAP TO AC008458.3; EXPRESSED IN ADULT LIVER, SIGNAL = 1.9; EXPRESSED IN FETAL LIVER, SIGNAL = 1.8; EXPRESSED IN PLACENTA, SIGNAL = 2.2; EXPRESSED IN BONE MARROW, SIGNAL = 1.7; EXPRESSED IN LUNG, SIGNAL = 2.5; EXPRESSED IN BRAIN, SIGNAL = 1.9; EXPRESSED IN HEART, SIGNAL = 1.7; EXPRESSED IN HELA, SIGNAL =   2
aggaatgggcagagaaacagtgaacactgtgggagaaaaaacaggaggcagatttttatattaaatgatttaaacatagttcatccctttggaatataagcagtgatttgtctgtgttttcagtagatctccgagcacttggcatttatgcctgaggcattttaacgactaattgtttcatattaattaatttaaaatattatttgagcaacttgtgcataagtaaaatttagagaaaagtggaaaaatcaatacaatattttaaaattttatgagtgaacactaaaattgcatacttttttttaaatttcagaactttcagccaacacagctgcctttgctaaaagtgctgccatgttaggtaattctgaggatcatactgctttatctagagctttgtctcagcttgcagaggttgaggagaagatagaccagttacatcaagaacaagcttttgctgacttttatatgttttcagaactacttagtgactacattcgtcttattgctgcagtgaaagtaagccctttcttgcatgcttctc

SEQ ID NO: 8446 - DNA, 573 bp, Homo sapiens
  MAP TO AC008649.3; EXPRESSED IN FETAL LIVER, SIGNAL = 3.4; EXPRESSED IN HELA, SIGNAL = 2.7; EXPRESSED IN ADULT LIVER, SIGNAL = 1.6; EXPRESSED IN BRAIN, SIGNAL = 3.7; EXPRESSED IN PLACENTA, SIGNAL = 1.9; EXPRESSED IN LUNG, SIGNAL = 9.8; EXPRESSED IN HEART, SIGNAL = 7.5; EXPRESSED IN BONE MARROW, SIGNAL =   6
actgttcaccggattccaagtctgcacatgaggcttgggcaccccaagaataaaagatggccaacgagacaggcctcagggacaaataagggtgcagagaccccctgtgaggccccgctgggccccaggaagtcttgctgagtgctatggggcaggacacagggcctagaagttccagggaagatcacccagctccccgctattcctcctgggcgggagccccaagacacaaggtgaatggaatctggcaggtgcagacttcccagcccagaacacgagcagatctacccaggtcctctgggcccctgcctcggcctcccttgaggggcacccccttagccccaaagcccgaggccgtgggtcaccactcactgtcaaagtcaatcttctccacaatgttcttgggtttaatgctctcttcttggctacagatgaagatctgccccgactcgtcggcactccagccgtatttgctcatccacacctttagctggctgtctgcaggtgacaggggcagcaaggggcttcagtcagcctgatcccacagttccaggggactgagaggcaacagag

SEQ ID NO: 8447 - DNA, 569 bp, Homo sapiens
  MAP TO AL079306.2; EXPRESSED IN ADULT LIVER, SIGNAL = 4.9; EXPRESSED IN HEART, SIGNAL = 5.7; EXPRESSED IN LUNG, SIGNAL = 4.4; EXPRESSED IN BRAIN, SIGNAL = 5.2; EXPRESSED IN BONE MARROW, SIGNAL = 4.6; EXPRESSED IN FETAL LIVER, SIGNAL = 5.3; EXPRESSED IN PLACENTA, SIGNAL = 2.7; EXPRESSED IN HELA, SIGNAL =   6
gaaggggactgaactcatcgttttatcaggaacccactccttcgataacaaacccatgcctgagatattggcattaatccattcatgaaggcagagccctcttgatctaattgcctctgaatagtcccacttctcaacactattgcgttggggatttttttccaatacgtgaactttagggatgcattcaaaccctaccacaccctcaccaccatcctttaattttcctgacttagatagaatagtccacaatgacagctacaccctggtcaacatccacaattcatttcctggttggcttcagtgcaaccatctggcatcagaagctactctggaacaagccacctatctacttccctatgactatgaccaatcctagtgttgccatagaaaatcgcccaactctgaagattcatgccattctgatgacattttacaacaggctagcaacaacacctagaagatttccgcatccatgggtcagtttccctacttattttctgtagtggctgcatcagacctcatgcaacttcctaaagatcagctttcgtcccccaccacctttaatt

SEQ ID NO: 8448 - DNA, 572 bp, Homo sapiens
  MAP TO AC011298.2; EXPRESSED IN BRAIN, SIGNAL = 3.3; EXPRESSED IN HELA, SIGNAL = 1.8; EXPRESSED IN ADULT LIVER, SIGNAL = 1.8; EXPRESSED IN FETAL LIVER, SIGNAL = 1.6; EXPRESSED IN BONE MARROW, SIGNAL = 3.8; EXPRESSED IN HEART, SIGNAL = 1.7; EXPRESSED IN LUNG, SIGNAL = 4.3; EXPRESSED IN PLACENTA, SIGNAL = 1.9
ttctggacgtggtagaagccaagtggggggcctctgcctgtgttcttcaggggctctgtggagaaggcctcgtcgtggcggtggatgaagctgcaaagcagaggagatgctttggtgtggggtgggggacttgggatgagaccttaccaggtggaacccacctcacacgagggcgctggggcgttcagggcctgcgggctgggccaacacagcaccaacatggcctgctccctgcccagcacccaggcacgggagccttgggcacagagtccctgcgcagcgcagggacacaaaggcagcagggcctcacttgaactggcagaagatgtcggcatattcggcagagatgctggacgcctgcaggactgtcacacggaaggtgaaggtgttgcccaggcggaggtggtccagggcagcatccaggggcccatccagggcggctttctcagagctgtctaggaggaggccttctgggggcactgctgctgggagtcaaggagagagtcatggacctccaggccatattgtcttccagccacaggcctgggccgggctcaggaaccaggtctcag

SEQ ID NO: 8449 - DNA, 520 bp, Homo sapiens
  MAP TO AC008557.3; EXPRESSED IN BRAIN, SIGNAL = 2.5; EXPRESSED IN PLACENTA, SIGNAL = 2.4; EXPRESSED IN FETAL LIVER, SIGNAL = 6.5; EXPRESSED IN HELA, SIGNAL = 6.5; EXPRESSED IN BONE MARROW, SIGNAL = 2.1; EXPRESSED IN HEART, SIGNAL = 6.5; EXPRESSED IN ADULT LIVER, SIGNAL = 1.9
aagacctctgacatgcctggagacattttccccattgtcttggggattaacattcagctcctcgtttttaatgcaaatttctgcacctggcttgaatttctcctcagaaaatgggattttcttttctatcacactgtcaggctgcaaattttccaaacttttatactctgtttccattataaaactgagtgcctttaacagcacccaagtcacctcttgaattattttctgcttagaaatttcttctcccagatcatcctctgcctaaatcacctctctctagttcaaagttccacaaatctctagggtggggcaaaatgctgccagtttatttgctaaaacaaagcaagagtcacctttgctccagtttccaacaagttcctcatttccatctgagaccacctcagcctggaccttattgttcatatcactatcagcatttttgtcaaagccattcaacatgtctgtaggaagttccagactttctcacattttcctgtcttctgagccctccaaactg

SEQ ID NO: 8450 - DNA, 584 bp, Homo sapiens
  MAP TO AC015755.4; EXPRESSED IN BRAIN, SIGNAL = 3.7; EXPRESSED IN HELA, SIGNAL = 3.9; EXPRESSED IN ADULT LIVER, SIGNAL = 4.1; EXPRESSED IN BONE MARROW, SIGNAL = 3.1; EXPRESSED IN FETAL LIVER, SIGNAL = 3.8; EXPRESSED IN HEART, SIGNAL = 4.4; EXPRESSED IN LUNG, SIGNAL = 4.3; EXPRESSED IN PLACENTA, SIGNAL = 2.9
tgtactacagcccctgagccaagcccttgctgcatgtacccatgttccagccactggctcagccactgtagagagctagaccatacactgactacagagctactgtaactttgctcatgcctgtgttcccattcttagctacctggttacttcacaaatatctctaccatacatactattatcgactcaacattagggttgtctgtgctcaggacaccagagtaaatactgccccaattccagagatgtactccttctacatgtgcccatgcttcaggcctgagctccgtggctactccatggacacatcacttatcaaacaccagtgcaaccaccactgcaagcaagccaacaggccagattcagtgccaagagagattctggcaatcttagcaggtatggccaccaaaggccttaacacccctcagtgtcattgctgacattcataacatcagccacttttcaatctttatcaacaacaacattatcaatgctgcacagagactaacagctggcaccttcattggtgcgaaaaccacctcatctcaccaagtaagtgtccttgcatacccccacagagagac

SEQ ID NO: 8451 - DNA, 551 bp, Homo sapiens
  MAP TO AC010358.5; EXPRESSED IN ADULT LIVER, SIGNAL = 3.9; EXPRESSED IN FETAL LIVER, SIGNAL = 3.8; EXPRESSED IN PLACENTA, SIGNAL = 3.2; EXPRESSED IN BRAIN, SIGNAL = 3.4; EXPRESSED IN HELA, SIGNAL = 4.5; EXPRESSED IN BONE MARROW, SIGNAL = 2.6; EXPRESSED IN HEART, SIGNAL = 3.8; EXPRESSED IN LUNG, SIGNAL = 4.9
gaggacaagagccaagcaacatggtccatctgctttgctaagtaagctccttctgaaagctgaagttaccatgccattcaaaacagaaaactctgtcggagaaactcaggcggttgtaaaagcttcctctggttaatgccctaaggaggctggggttgggggtgcgcggagggactcctgggccatgggaaagtccgactggctgtgagccccgttacctgatgaggatgcactggttgtcgtggcgcttccacaggcagcggtagcactcgttggcgatggcgaagatgtgcgggggcagctcgcccaggtggcgccggctgtactgctccatggtggcaggctcgtacagcccggcgatgggctggtaggggttcacagaggccaggatggagccgatgtaggtctgcaagcacagagtgagacagggatgcgtcacttctaacccaggccactggatgagctccaacaaaacccaccgagtgtgcgccgggggaaagacgtcttctgtctcccgggtgcacactgtccctgcctttctgggtaccaaa

SEQ ID NO: 8452 - DNA, 582 bp, Homo sapiens
  MAP TO AP001329.1; EXPRESSED IN FETAL LIVER, SIGNAL = 2.1; EXPRESSED IN HEART, SIGNAL = 1.8; EXPRESSED IN PLACENTA, SIGNAL = 1.8; EXPRESSED IN BRAIN, SIGNAL = 1.6; EXPRESSED IN HELA, SIGNAL = 1.8
aagtgcaagatgagggcaacccgctcgggtccccttccacgctgtggaagctttgttctttcgttctttgcaataaatcttgctgctgctcaaaaaaaaaaaaaaaaaaaaatgcaacatgaagcagcaagtgctgatggagaagctgcagcaagttatgcagaagatctagctaagatcattgatgaaggtgactatacttcaaaacagattttcaatgtggatgaaatcgcctctgattggaagaagatgccatctagaactttcatagctagagagaagtcaatggctggcttcaaggctttaaaaaacaggctgactctttgttaggagctaatgcaagtggtaactttaacttgaagtcagtgctcatttaccattccaaaaaattgtagggctcttaagaattatgctaagtctactctgcctgtgctccataaatggaacaacaaagcctggatcacagtacatctgtttacagcatgggttactatgttaagcccattgttgagacctactgctcagaaaaaaagatccctttcaaaatattactggtaattgacaatgcacctggtcactcaa

SEQ ID NO: 8453 - DNA, 573 bp, Homo sapiens
  MAP TO AC022324.2; EXPRESSED IN PLACENTA, SIGNAL = 3.3; EXPRESSED IN BRAIN, SIGNAL = 4.1; EXPRESSED IN BONE MARROW, SIGNAL = 3.3; EXPRESSED IN HELA, SIGNAL = 3.9; EXPRESSED IN LUNG, SIGNAL = 4.1; EXPRESSED IN ADULT LIVER, SIGNAL = 3.8; EXPRESSED IN FETAL LIVER, SIGNAL = 4.1; EXPRESSED IN HEART, SIGNAL = 3.7
tagccttgacatctcaccccaggcactggcaacctatcccatagccagctacaggcagcctgctggggaatttcagtgccacatcagccattcacccgccctcggcaaagtacgctccctcaccttcctacctccttcttaccggcctggtcctgcaggcacccaggggctggcactccaccaggccattcctccaaacaaagtcggcctttcatcaatggtcccaagtgcaagattccccttcctacacactctaggcatcaacacatcttcatgccttatccgatcttggttatcaaactctagatgagaaaaatgaaacccagtttatttataccttagaaaagagtttgttaaccaaaacacatttctcagaagtggagtatgacttattagactttatattattccgtgttaatttttctccatctaatcatcaaaagtgaaatacaggacatccacatgactcatttgaacacagctgcacccctgtgttagcaagtgacttgtaccagtgccattgggctcagtcaaaacaaagaatcatcacttagaggaggtgaggtttgacca

SEQ ID NO: 8454 - DNA, 520 bp, Homo sapiens
  MAP TO AC007845.12; EXPRESSED IN ADULT LIVER, SIGNAL = 1.4; EXPRESSED IN FETAL LIVER, SIGNAL = 1.7; EXPRESSED IN HEART, SIGNAL = 1.8; EXPRESSED IN PLACENTA, SIGNAL = 1.3; EXPRESSED IN BRAIN, SIGNAL = 2.1; EXPRESSED IN LUNG, SIGNAL = 1.7
atgccaacagaaaatggagcgttgggtgggagctcaggaccagttaaggctgaagcccttggacagcatggcagcctccaggtccttgtcctcctctctctcccggagccgctgctcctccagcagcgccaccagtgagtctctctgctccaccacctccagcatctcattgagaatctgcttctcttctgacagctcctcctcagtcttaaggtgatcttgaaggagaagaaggcatgaggtgaggggcctggaggtggcacccaccctggcctccatgggtgccttaccccactcaccttccactgccatgcgttcccggagctcctgctgcagtcgactctgccggtcttccagctccagctcccgggcactgaggaggcagggcaggagggagacaagccacagtgactggggaccacccctcacccccaaatctggaaggacctccatgccggctgtgacaagcatagcgctgacgccccctacccaaggccactcacaagatcatcagctccga

SEQ ID NO: 8455 - DNA, 598 bp, Homo sapiens
  MAP TO AC005323.1; EXPRESSED IN BONE MARROW, SIGNAL = 4.2; EXPRESSED IN HEART, SIGNAL =  89
tgatatgagaaaaagggtgcctgatttagttcatgagacgtttttgagatacaaatcatatttgtgctaaagggaaaaacaaaaaaccaaataatcaatgtgaagtgttgattgtaccttggctttggagacagtctccatgttactagcaaggtcatcgatctccatcttcatctcactcttctccttctccagcttctgcttcactcgctgcaggttgtcaatctgctccccaagctcggccacactatctgcatgcttcttcctcagggtggccgccgtggcttcatgctgtagggtggcctcctccaggtccctgcgcattttctggaactcagcctcccgcttcttgttcatctcaatctgggctgaggtggccccaccggcttcttccagcctctcgctgatctcctccagctcccgggagagatcagagcgctgcttctctgctttggcccgggaggcccgctctgcctcgatttcctcctccagctcctcaatgcgggcctgggaatggtgaaaaatattaatacgaactcaacttcttggtgtcagtaacttttcgatgttaaattagcctggcgaaaatcatttaacg

SEQ ID NO: 8456 - DNA, 562 bp, Homo sapiens
  MAP TO AC023111.2; EXPRESSED IN BRAIN, SIGNAL = 9.1; EXPRESSED IN FETAL LIVER, SIGNAL = 8.7; EXPRESSED IN ADULT LIVER, SIGNAL = 9.7; EXPRESSED IN BONE MARROW, SIGNAL =   8; EXPRESSED IN HELA, SIGNAL = 8.8; EXPRESSED IN LUNG, SIGNAL =  16; EXPRESSED IN HEART, SIGNAL = 7.9; EXPRESSED IN PLACENTA, SIGNAL = 6.8
gggaggagaaagaggaggagaaatgaaaggaaaagaaataataattattattatgaaatgaaaaatcatgctgacaacagtagaagcaaataaatttggcacaagttgagacattattcttaaatttcacacttgcaagtgatgaaagttgctggaaacaaatcttttaaagatcattttaaaaagcaatatagtaaggggttgtattatggagatgatgaattttctcttcctgttgaataaaaactgtatttcgtaagttgcagtttaggataaaattacagtgacatcattcaatgcattacaaaaaaatctgtatctgaactattaaaataaaaacacaaatgattctgaacacagcctttgatgacttcccagatggttccagagaagatggcagtgaatgtggagactctgagaagaattatcccatagacataagaaagtaagaaaatatttctaagttaatagtatgtacatattatatatgttcctacatttttacagtacaaaattactaatttaaatataacaggtagccagtcaactattttacaatgca

SEQ ID NO: 8457 - DNA, 592 bp, Homo sapiens
  MAP TO AL157830.2; EXPRESSED IN FETAL LIVER, SIGNAL = 2.4; EXPRESSED IN HEART, SIGNAL = 2.1; EXPRESSED IN BRAIN, SIGNAL = 1.5; EXPRESSED IN PLACENTA, SIGNAL = 1.6; EXPRESSED IN BONE MARROW, SIGNAL = 1.5; EXPRESSED IN ADULT LIVER, SIGNAL = 1.7; EXPRESSED IN HELA, SIGNAL = 2.6
tacctgcactttgcacatggctttaggtatttgtaactgttactgttggttccatttcacaagtgtctaccttcctacaggtttgacagtctttatcctgaaactataagtaattcaaggtctttatgtaatttaattatttttctatgtttactttttttttcaacttgtattttagattcagggtttacatgttcaggattgttacctggatatattccgtgatgctgaggttttggggatgtatgatcccatcctccaggtactaagtattagttaacaattgttaacatagttaatatagttaacagataacatagttttatatatatatatatatatatatatatatatatatatatataattatatataatatagatagttaacaactgttattcaacccttgagcctgctcccattctccctgcattaatagtcctcagtttctattgaagctatatttatgatcctgagtgcccaatgtttagctcccacttataaatgagaacatgtagtatttggttttctgtttctgcattaattcagttaggataacaacctccagctgcctccaaagtgctgcaaatga

SEQ ID NO: 8458 - DNA, 591 bp, Homo sapiens
  MAP TO AC008583.4; EXPRESSED IN PLACENTA, SIGNAL = 1.9; EXPRESSED IN BRAIN, SIGNAL = 2.4; EXPRESSED IN BONE MARROW, SIGNAL = 1.8; EXPRESSED IN FETAL LIVER, SIGNAL = 2.2; EXPRESSED IN HELA, SIGNAL = 2.4; EXPRESSED IN HEART, SIGNAL = 2.6; EXPRESSED IN ADULT LIVER, SIGNAL = 2.6
ggagaaatgcagggcttatgccactgttctttgtgtgtaacacttttactttcatcatgcttctctatggtttttcattgttgtcttagcaaccatgatatcatcatactatcctaaaaactgttgaagaggctccacttttgagaataagctctggaacaaacctcccctccattttctctttacctacgtgttggctaaaaaatcaaatagtggggtaggggaggggaggaagagcaggaacggagacatatgggcctatcttaaggcatcttgcctcttctattttagtaatttatccattggatttatggctgtgtaactattttctgcgtagcattatggttaagagagcgcatcctgaagctaaagtgcctgtttccaaaggaggcactgagaaagactggcaatgtggccttgggcaagtaagttaacttctctggaccttagtatatccatctgtaaaacgggaataatagcacttcctcacagagctgttgtgagcattacatgttaaggtagtaaggtgcttagaacaacacctggcacatagttaaccttcaatagatggccagccatgatcaccattta

SEQ ID NO: 8459 - DNA, 521 bp, Homo sapiens
  MAP TO AL121857.2; EXPRESSED IN BRAIN, SIGNAL = 4.3; EXPRESSED IN ADULT LIVER, SIGNAL = 3.9; EXPRESSED IN BONE MARROW, SIGNAL = 3.8; EXPRESSED IN HEART, SIGNAL = 7.6; EXPRESSED IN PLACENTA, SIGNAL = 3.6; EXPRESSED IN LUNG, SIGNAL = 3.3; EXPRESSED IN HELA, SIGNAL = 8.9; EXPRESSED IN FETAL LIVER, SIGNAL =   8
agtggcctctgcatcttttcatgttacccaagtgatcctaaagtgtagtcaaggctgagaaccatggctctgggaactcacagtcttgtaggggagattaataacaacagtaaccaacccatttatggtgtgcttaattgtgccaaacagcaggctaagcattttatgtgcctcatctcatttaactcacaacaaccttatggagaaagattctgttactattcctatttaaagacttgaggattagaaagattaagaaacttgtccaaggtcccaccagtgataattgactgagacagaactcaaacagctctgtccaactccagagtggtagctcttcatcacagactatcatcgaggtagaaaccatgccataaaaagatattatattcctttttggagacagggttttgctctgttgcccaggctggagtacagtggcttggtcacagctcactgcggcctcagctacctgggctcaagcgattcccgtacctcagcctctcaagtagctgggaccg

SEQ ID NO: 8460 - DNA, 583 bp, Homo sapiens
  MAP TO AC011449.3; EXPRESSED IN BONE MARROW, SIGNAL = 2.5; EXPRESSED IN FETAL LIVER, SIGNAL = 3.4; EXPRESSED IN BRAIN, SIGNAL = 3.1; EXPRESSED IN PLACENTA, SIGNAL = 3.1; EXPRESSED IN ADULT LIVER, SIGNAL = 3.7; EXPRESSED IN HELA, SIGNAL = 3.3; EXPRESSED IN HEART, SIGNAL = 3.2; EXPRESSED IN LUNG, SIGNAL = 3.3
gattcacccaagagcagagcctcttccttctcacacctttgcttgaaagccctgctggctcctgctgccctgcaagatgaactttccatgccacatcacaataggcacggcctcctgcagctctggcctccctttctggcctcccctcagtacctctcttcctgccacccgctgtgacttcatcaggccacttactgtttcctgtagaagccattcccttcccagggaccaaagaacatggcaccaggcctgatgtggtttttggaacaaagtcagttgattttgatgtaacattgtcaacatcaattaacattgtaaaattttcccctgaaccctttcagatataactggtagagcacgtcaaagatatacagaaataaccagagaaaagtttgaggcattaaaagaagaaaatatggacctaaacaatatgaatcaaagccttacccttgaactaaacacaatgaaacaagcaatgaaagaactacagttaaaacttaagggaatggaaaaagagaagagaaagctcaaagaggctgagaaggcgtcgtcacaggaaggtggggacagacagagtgccttt

SEQ ID NO: 8461 - DNA, 580 bp, Homo sapiens
  MAP TO AL157789.1; EXPRESSED IN BRAIN, SIGNAL = 2.7; EXPRESSED IN PLACENTA, SIGNAL = 2.8; EXPRESSED IN FETAL LIVER, SIGNAL = 3.1; EXPRESSED IN BONE MARROW, SIGNAL = 3.4; EXPRESSED IN HELA, SIGNAL =   3; EXPRESSED IN LUNG, SIGNAL = 4.3; EXPRESSED IN ADULT LIVER, SIGNAL = 2.8; EXPRESSED IN HEART, SIGNAL = 3.2
attggatgaagcccactcacatcagggagggcaagccgctttactcggtctaccaatttaaatgttaattgcgtcccaaaacaccttcatagaaacactcagaacaacctttgatcaaatattggggcatgccatggcttaatccagttgacacataaaattaactcttccacgcttgaggctgtgatgcacaagccctagcctgctggacatagatgtaagactccagatcaggcctccctcttctttctcactatgcacccagggatcccttggtgcttgtgaccttcacatggggaggagtcatatttgtctcttacgcttctccatggctgacagtgatcaaccggccagggtggccaggaccaacgctggtaagagggtaaccctagtgctctcatgggtcaagtccccagaatgctgccctgggatcaggaaggtcagatgctgttggccatggatggcaaggcatcagagtgctgtttgtgggtgaagtaggcagctggtggacaaggcagcggcttcctctctgtggcagccagagggaagggacataccagctgagctggtgaaggagtcc

SEQ ID NO: 8462 - DNA, 556 bp, Homo sapiens
  MAP TO AC024007.2; EXPRESSED IN PLACENTA, SIGNAL = 2.3; EXPRESSED IN BRAIN, SIGNAL =   2; EXPRESSED IN HELA, SIGNAL = 2.2; EXPRESSED IN ADULT LIVER, SIGNAL = 1.6; EXPRESSED IN LUNG, SIGNAL = 1.8; EXPRESSED IN FETAL LIVER, SIGNAL = 1.9; EXPRESSED IN HEART, SIGNAL = 1.9
ttcattcctgaagggtctgggtcatttgtagtcctgcctggactaggctgttgtagtttcccattgaccttaatcacaggacatggtaatactaagaaacactctaatgaatctcctgtattccatgcatactctcccttacctccattgtaaggtagtagactgatttcatatggataatctgggtcagtcatgccagcaaacactgtaattcccttcttagccttttgatttaaaagtaggaggagcccaaagtgtccaggtggcaatcttaacttgcagtttaatggaatcattgtgtctcctggtggcggcatttctccccctggaacaaagacctctaggccaccagaacgtagtgtcacaggaacaggaagcaaaaattttgctagtggatcactaggggtgatggtgagtggtgccacttccacttccaccgcttgattcctggagatgcaaatcttggctatgggagaaatagtgccatatattggatgctgattcagagcatacatggcattctggagaattttgccccagccctgcaaagtattgt

SEQ ID NO: 8463 - DNA, 546 bp, Homo sapiens
  MAP TO AC016886.3; EXPRESSED IN BRAIN, SIGNAL = 1.9; EXPRESSED IN PLACENTA, SIGNAL = 1.5; EXPRESSED IN BONE MARROW, SIGNAL = 1.7; EXPRESSED IN HELA, SIGNAL =   2; EXPRESSED IN ADULT LIVER, SIGNAL = 1.6; EXPRESSED IN FETAL LIVER, SIGNAL =   2; EXPRESSED IN HEART, SIGNAL =   2; EXPRESSED IN LUNG, SIGNAL = 1.8
ggacacagctggagaaggagctcctgaagctgcagctgaggatcccactccacctgcactgcaccaagaacccacaatggggcctcagcaggagtccacggaggaggacgcccactgcctgcacctcaaccagagacttttcaaggtgcaaaaaaatttgaaacgtgtgtgttacacccgcaactactacaagaaaatggcgcagaaccactacaagaagacctggcccaggaattgaaggaagacgcttccaattttcatagggagatcttcttccatgagaaaatggcccaggaaggctggatggccacaatgtccaccaagagagtgctccaggtgctccagaaagaaaatgaccacaacacgcagaagccagatgactgagttccaagttctagcctttcctgagtggccctttggattctggggtttgacccacagcccacaggggcccagaaccccacagggggttcatgggccgctagggccaccaggagggaagctggtcacggtgtgggtatgagggcttctctccagaccacctgc

SEQ ID NO: 8464 - DNA, 501 bp, Homo sapiens
  MAP TO AC013290.3; EXPRESSED IN BRAIN, SIGNAL = 3.6; EXPRESSED IN PLACENTA, SIGNAL = 3.3; EXPRESSED IN BONE MARROW, SIGNAL = 2.5; EXPRESSED IN FETAL LIVER, SIGNAL = 3.5; EXPRESSED IN HELA, SIGNAL = 4.1; EXPRESSED IN ADULT LIVER, SIGNAL = 3.3; EXPRESSED IN HEART, SIGNAL = 3.4; EXPRESSED IN LUNG, SIGNAL = 3.6
cattcaaaagagaggctgggctgtgggtggaattctcaataagcacagctgcactggcacaatcatgtgcatcatccttccctgactcaggaactcaaggttgatcaccatgttccaagagaggcaaaggacaaagaacactggactgagcattataaagatgatggggccagagatctgagaataatttcatttgcagatattgaaagggacttttcagatagcatggccctctatgatctctaaggcttattgatattggtgaacctaaacttaatatcttgaatggatatgtgggcattggctgggaggatgctatgggaactgatagggccctgagaagagtggactgggaaggaaccatggggtctggggaagaatttgtccttcttggctaaagggagcagtggagacttcagtagaagagtaagggaaagtgaacacactttacacaggtactgcttggaatgaacgttggttccccagctgtcacacattctc

SEQ ID NO: 8465 - DNA, 582 bp, Homo sapiens
  MAP TO AC016025.11; EXPRESSED IN BRAIN, SIGNAL = 2.8; EXPRESSED IN ADULT LIVER, SIGNAL = 2.8; EXPRESSED IN HELA, SIGNAL = 2.8; EXPRESSED IN HEART, SIGNAL = 2.6; EXPRESSED IN PLACENTA, SIGNAL = 1.9; EXPRESSED IN LUNG, SIGNAL =  13; EXPRESSED IN FETAL LIVER, SIGNAL = 3.4; EXPRESSED IN BONE MARROW, SIGNAL = 3.7
gagcaggacagcctgtaacccttgtgctggcatcagaggcaggggccccgctgggcttctcaaccttccagagaaaagggcatgggcggcaggcagggaaggagctgacctcaagggttcttacatttctggctaagctcctcacgtaggtgcgtaggttctggttaataaagttcactgttgtgtgaaagacatcacggagcaaggacggcgtgtgactggccaccttcttggccagcagcagggccagcaccagcatggtcttctccttctccatgtctctagggtaggcctgcagcagctgctccagggcagtggccaggtccctgttccggtcctgcacagaggggcacacagaacctggtttactaatactcttccctctcaaaggaaagacagtccccagtatgaagaagcacttcaaagtacttattaagtatccagggctgctgggcggaaagaatgagaaacagttgagttctgagaggcaatggaaagggaagactgcgatcactccctgcagggggctcggtaagcaaacgcatgtgtggtgagcccatgtgcccactgttagacggtgat

SEQ ID NO: 8466 - DNA, 538 bp, Homo sapiens
  MAP TO AL121965.19; EXPRESSED IN PLACENTA, SIGNAL = 1.9; EXPRESSED IN BRAIN, SIGNAL = 1.8; EXPRESSED IN ADULT LIVER, SIGNAL =   2; EXPRESSED IN BONE MARROW, SIGNAL = 1.5; EXPRESSED IN HELA, SIGNAL = 1.8; EXPRESSED IN FETAL LIVER, SIGNAL = 1.7; EXPRESSED IN HEART, SIGNAL = 1.7
cttggaaataaggcttcccctctgagagtaagcaagtagcatccacatataaaggataggattattcttatgtagaaataataagataattaggattatatgagaaaagatattgccccacaattcaaggatgcagcttgacttgcacttcttttcagactgagtttgaataatagatttattgacaaatttaaaagcacattgggtataaccaccaatctcctcctataattttttagaatgcagctagaattgtccgtgctctttttgaaattgctctgaggaaacgttggcctaccatgacctacaggctcctgaatcttagtaaagtcattgacaagaggctttggggttgggctagccctttgagacaattttcaatcctaccaccacacatcctaacaagattagaagaaaaaaagcttactgtggataagctgaaagacatgaggaaagatgaaataggtaagaaggaagcaaatatgtttgaatgtattgttttgtgcaaataaaatatgttgctgggtgtaaaagaagg

SEQ ID NO: 8467 - DNA, 529 bp, Homo sapiens
  MAP TO AC011467.3; EXPRESSED IN BRAIN, SIGNAL = 3.9; EXPRESSED IN ADULT LIVER, SIGNAL = 2.1; EXPRESSED IN HELA, SIGNAL = 6.1; EXPRESSED IN BONE MARROW, SIGNAL =   2; EXPRESSED IN PLACENTA, SIGNAL =   3; EXPRESSED IN LUNG, SIGNAL = 3.3; EXPRESSED IN HEART, SIGNAL = 3.3; EXPRESSED IN FETAL LIVER, SIGNAL = 3.5
aatggtctgaggtgcctgacgtccaggcattcttttacacactcagtcccttcctagtccctgtgcccagtgcaactcgtcccaaatcttccttctttccctcccacctgtcccctcagtaccaaccccaagcgtcgctgagtctttctaatcttccttttctacagacccatctgacctctcccttcctccccaggctgctcctcgccaggccaagctaggtcccaattcttcctcagcctccgctcctccaccctataatcttttcatcacctcccctcctcacagctggtccggcttacagcttcattccgtgactagccctcccccacctgcccagcaatttactcttaaaaaggtggctggagcgaaaggcatagtcaaggtgaatgctcctttttctttatcccaaatcagatagcgtttaggctctttttcatcaaatataaaaatccagcccggttcatgacttgtttggcagcaaccctgagacactttacagccctagaccctaaaaggtcaaaaggcc

SEQ ID NO: 8468 - DNA, 595 bp, Homo sapiens
  MAP TO AC008417.3; EXPRESSED IN BONE MARROW, SIGNAL = 1.7; EXPRESSED IN FETAL LIVER, SIGNAL =   2; EXPRESSED IN BRAIN, SIGNAL = 1.8; EXPRESSED IN PLACENTA, SIGNAL = 1.6; EXPRESSED IN ADULT LIVER, SIGNAL = 1.7; EXPRESSED IN HELA, SIGNAL =   2; EXPRESSED IN HEART, SIGNAL = 1.9
ctgtggacatggaacctgtggatatggagggccaactggattctctttttaaaaaatatgatagtttgttggttttaccaaaaatataaatggtttgcctctcagtagataacatttatctttaataaattcccttccctatcttttaaagatctcttttcgagcacatataccgccattgggactgaaagtgtataagattttggaatcagcaagttcaaattcacatttagctgattatgtcttgtataagaataaagtagaagatagcggaattttcaccataaagaatatgataaatactgaagaaggtataacactagagaactcctttgttttacttcggtttgatcaaactggacttatgaaggtatgttctgaatagttctaaaattcatagaatgcttatcatttttgctacaatgtgtgtagattaattaggcaaaaggggaaaaaagtcttaagtagagctgtatcaaatactcttgagtaaaaggaagcatgagctttttgcaccttcattgaccacttgctgctcacatgtatagtctgtgggtggcgctactccgtggtctgtgtgtcactggtccaccag

SEQ ID NO: 8469 - DNA, 509 bp, Homo sapiens
  MAP TO AC018388.4; EXPRESSED IN BRAIN, SIGNAL = 3.7; EXPRESSED IN HELA, SIGNAL =  10; EXPRESSED IN HEART, SIGNAL = 6.4; EXPRESSED IN PLACENTA, SIGNAL = 8.7; EXPRESSED IN FETAL LIVER, SIGNAL =  15; EXPRESSED IN BONE MARROW, SIGNAL =  19; EXPRESSED IN ADULT LIVER, SIGNAL = 2.2; EXPRESSED IN LUNG, SIGNAL =  17
aacccctaaccaaccaaagcccgtgcaccactgcatcccgcgtccaccacctacatcctgccgccaccatgcccaagagaaaggctgaaggggatgctaaaggagataaagccaaggtgaaggacgaatcacacagaagatccatgaggttgtcagctaaacctgctcctccaaagccagaacccaagcgtaaaaaggcccctgcaaagaagggagagaaagtacccaaagggaaaaagggaaaagctgatgctggcaaggaggggaatagccctgtagaaaatggagatgccaaaacagaccaggcacataaaactgaaggtgctggagacgccaagtgaagtgtgtgcatttttgataactgtgtaaacttctgttgactgcacagtttgaaatactattttttatcaagttttataaaactgcataattttacttttttttaagctatgttgttagcacacagaacacttcattgttgtttttgggggaaggggcatacgtcacta

SEQ ID NO: 8470 - DNA, 514 bp, Homo sapiens
  MAP TO AC022325.3; EXPRESSED IN PLACENTA, SIGNAL = 3.1; EXPRESSED IN BRAIN, SIGNAL = 4.8; EXPRESSED IN HELA, SIGNAL = 4.7; EXPRESSED IN ADULT LIVER, SIGNAL = 4.5; EXPRESSED IN BONE MARROW, SIGNAL = 3.4; EXPRESSED IN FETAL LIVER, SIGNAL = 3.9; EXPRESSED IN HEART, SIGNAL = 3.9; EXPRESSED IN LUNG, SIGNAL =   4
tggcctgtggtgatagagtgtcactttcttacaggcccaggaacctcaacttttttgaggtcctcaagaagagaagggtttacccatttcatgcaggtatctgcagtcgtaggtgaatccttggctgggcttgagaggcctttgaaggtaaagacagattccttgtgagaggttccagcaaagccaatataggagggcctatatggacaatgattcttgctaaactttgtgtgggtaatcaggccaaatatagtgggaatgagcgtattttgcagatagatttgtcttgctatgacttgcttttggtaaaagttgggaactggagagagaaatattgtatttcagaagaaaactatgatattagattagcctttgattcctggatggccacagagtcacccatgatatagagctgccaacaacacacctcctcaacatgaagcagtcagaaagatgatcagattctctatgattgaggaattaataaacagaaagaggggcactaattgtggct

SEQ ID NO: 8471 - DNA, 599 bp, Homo sapiens
  MAP TO AC024581.1; EXPRESSED IN BRAIN, SIGNAL =   2; EXPRESSED IN HEART, SIGNAL = 2.2; EXPRESSED IN ADULT LIVER, SIGNAL = 1.9; EXPRESSED IN BONE MARROW, SIGNAL = 2.5; EXPRESSED IN FETAL LIVER, SIGNAL = 2.1; EXPRESSED IN HELA, SIGNAL = 2.5; EXPRESSED IN PLACENTA, SIGNAL = 1.5
ggagattggagaagtggtgcactttagaacggccatgaacagttttgtctccactctatttaatttgatctggttgcaatttatccacttttagatgctcagggtctgcactttctaactacgaaaacatttgtggaatgtagtaagcacaggtgcagtgttgcttttcacggaagtttatggtttcagtgaaatccaagtaatataaatctatttacagcctatttagtctctggcaaaatgttcaatacttataatcataatagttatcatttactcagcattcttatattctaggctctgggctaagtacttcataaacattatttgtaatccttgaactacatgaaaaatgggtattatgtcccttttaaaaaggagagacccaagattaaggaatttgcccaggaccacccagccaataaggaaaagagcaggaaattgaactggatctgtctgagactaaagcttgtatcctctcaagcacacctggctggcgatgcctgggacgtcatggtctttgaccttttgatatagaccctgcgtggtgattctcttattagttgtattttacgccatcgacccatgatcttcctgac

SEQ ID NO: 8472 - DNA, 599 bp, Homo sapiens
  MAP TO AL160006.1; EXPRESSED IN PLACENTA, SIGNAL =   5; EXPRESSED IN FETAL LIVER, SIGNAL = 6.1; EXPRESSED IN HELA, SIGNAL = 6.9; EXPRESSED IN HEART, SIGNAL = 5.6; EXPRESSED IN BRAIN, SIGNAL = 4.1; EXPRESSED IN LUNG, SIGNAL = 3.8; EXPRESSED IN BONE MARROW, SIGNAL = 4.5; EXPRESSED IN ADULT LIVER, SIGNAL = 5.8
gccatgtcttacctgggttctctgcttagggtcttaggctgctgccgtgaagatattgaccgggttgtgttctcctctggaggcttggcaggggaggaattggcgtccaaattcctgtggttggcagaattgattttcttgcagttgtgggactgagggcctgggctttttgctggatgttggtgggaggtcacccacagttcctagaggctgcttgcagttccttgccatgtgggcttttctagcatgactgcctgctttagcaaagagaatttctagagttagctggcaaggccaagtcttctacaacataatgtaatcatgagagtgatgcctcaccacgtttgccagttctgttagttagaagcgagtcacaggccctgcccacattcagagggaggggtttatacaaaggcttggatgccaggaggtggagatcacaggggccctccttatattctttccactgcagtaggtgttgattatgtcattatataattttgtatgtacaaaaccatgaatcataaaccaattgaagtggtccacggcccaggagctgtgggaatatagcatagatgaggagggactgctctcagatg

SEQ ID NO: 8473 - DNA, 522 bp, Homo sapiens; identical to SEQ ID NO: 7132
  MAP TO AP001331.1; EXPRESSED IN BRAIN, SIGNAL = 2.2; EXPRESSED IN PLACENTA, SIGNAL = 1.9; EXPRESSED IN BONE MARROW, SIGNAL = 2.4; EXPRESSED IN HELA, SIGNAL = 2.8; EXPRESSED IN LUNG, SIGNAL = 3.9; EXPRESSED IN ADULT LIVER, SIGNAL = 2.7; EXPRESSED IN HEART, SIGNAL = 2.2; EXPRESSED IN FETAL LIVER, SIGNAL = 2.8

SEQ ID NO: 8474 - DNA, 510 bp, Homo sapiens
  MAP TO AC018720.2; EXPRESSED IN BRAIN, SIGNAL = 2.3; EXPRESSED IN FETAL LIVER, SIGNAL = 2.3; EXPRESSED IN HELA, SIGNAL = 2.3; EXPRESSED IN HEART, SIGNAL =   2; EXPRESSED IN PLACENTA, SIGNAL =   2; EXPRESSED IN LUNG, SIGNAL = 4.4; EXPRESSED IN BONE MARROW, SIGNAL = 2.1; EXPRESSED IN ADULT LIVER, SIGNAL = 1.8
aaacactgcagctagtgcccacaaggaattaaatggtgttgccacttatttcttcaaactcaagcataaaaccccattcaactgagagcattcagaaagcaagctatcctcacccaaggaaactagatggctgtagttctccaacatcacatccccgtatgttatcttctcatcagggtccagttgccgccactcctcctgggtgaaatccacagccacatctttgaatgacactggcccctgtaatggcaacatgatcagaattgggagatatggaaaagggatagggggataacattttacaaagctcactggtgaagttaaccatgaacattgtacaccttattttatgttacagattatggaagggaaatcatattggaaacacatatcctttggggtcctttatatatatacaaaaataaaaagccaaaacacaactgagctcctattttgcaactgaactgagttttggggatatgagatgagtgaaacaccatgcctgctctc

SEQ ID NO: 8475 - DNA, 536 bp, Homo sapiens
  MAP TO AC007686.5; EXPRESSED IN BRAIN, SIGNAL = 6.2; EXPRESSED IN ADULT LIVER, SIGNAL = 5.6; EXPRESSED IN HELA, SIGNAL =  18; EXPRESSED IN BONE MARROW, SIGNAL =  13; EXPRESSED IN PLACENTA, SIGNAL =  10; EXPRESSED IN LUNG, SIGNAL =  39; EXPRESSED IN HEART, SIGNAL =  19; EXPRESSED IN FETAL LIVER, SIGNAL =  15
aggacacattgaggtgaggccctcacttcatccagtgactagcactgcgtccggcagcgccagtcccacactcgcccgcgccatggcctccatctccgagctcgcctgcatctactcagccctcattctgcacgacaatgaggtgactgtcacagagtataagatcaaggccctcattaaagcagctggtgtaaatgttgaaccttttcggcctggcttgtttgcaaaggccccggccaatgtcaacattaggagcctcatctgcaatgtaggggctggaggacctgctccagcagctggtgctgcaccagcaggaggtgatccacccgcatcaacctccctaagtgctgggataataggcatgagccaccgtggtcagccaagaatgcgcatactctctccattcttcctccatgcgtacgcccatttctgccttggttgcccacctccactgctgctgctccagctgaggagaagaaaatggaagcaaagaaagaagaatttgaggactctgatgatgacatgggctttggtct

SEQ ID NO: 8476 - DNA, 586 bp, Homo sapiens
  MAP TO AC010582.6; EXPRESSED IN BRAIN, SIGNAL = 1.6; EXPRESSED IN PLACENTA, SIGNAL = 3.6; EXPRESSED IN HELA, SIGNAL = 2.2; EXPRESSED IN BONE MARROW, SIGNAL = 1.5; EXPRESSED IN FETAL LIVER, SIGNAL = 1.9; EXPRESSED IN HEART, SIGNAL = 1.7
aggggttcagttgtgtgaggcatactgagatagcccttccaaagtgaaggataagttgttgcctttggccccccctacagccaagaaagaattgtaacctctagtgggcctatttagattttaggtgcaacctattccttatttggatttgttactctagcccatttaccaagtgacccaaaaagctgctagttttgagtagggcccagaacaggaaaaggctctgcaagagatccatactgctgtgcaagctgctttgccactggggccatatgatccagccgatccagtattgcctgaagtctcagtggcagacaggaatgctgatggagtctttggaaggctcctgtaggtgaactgcagtgcagccctttaggattttagatcaggaccctgccattttctgcagataactattcttcttttgagagacagctcttggcctgttactgggccttagtagaacctgagtgcttgaccatgggctaccaattactgtgtgacctgagctgcccttcatgaactgggcattatttgacctgccaagccataaagtttagtgtacacagcagcactccatcatcat

SEQ ID NO: 8477 - DNA, 502 bp, Homo sapiens
  MAP TO AL136980.2; EXPRESSED IN ADULT LIVER, SIGNAL = 3.2; EXPRESSED IN BONE MARROW, SIGNAL = 2.6; EXPRESSED IN LUNG, SIGNAL = 2.7; EXPRESSED IN HEART, SIGNAL = 3.2; EXPRESSED IN PLACENTA, SIGNAL = 2.6; EXPRESSED IN BRAIN, SIGNAL = 2.8; EXPRESSED IN HELA, SIGNAL = 3.8; EXPRESSED IN FETAL LIVER, SIGNAL = 3.6
gcacattctacagcaatgccagtatttgtagttttagaggaaaatacttactcttatgtttgggctgcaaaaattttttgcccaggtacaaaacaacacccattaccaccatgtagtttatgattgagccaatacgagaggggtaggcaatgacaaacaggcccagcacatcaaagaagaccatgtttccatgtcgatacttagaagcagcagccagcatatcagatgtagctagatgcttaagaactgctaaaatgttgtcacctattagtaaaaacaaaaaaaaaaagaaagaaaaggaaaaagataaaaaggctgaataaactatttgtgatttacacataccactatttaaagcagaaataaaccatatactgtttgaatgaagaaatggttagaaagaatgtgaacagaaatcgctttctaccatcctactgctctccctcactttttttactaaatttctcaaataaggtccatcccctgcctttctccatttcct

SEQ ID NO: 8478 - DNA, 576 bp, Homo sapiens
  MAP TO AC018843.2; EXPRESSED IN FETAL LIVER, SIGNAL =   4; EXPRESSED IN HEART, SIGNAL = 5.1; EXPRESSED IN BRAIN, SIGNAL = 3.9; EXPRESSED IN PLACENTA, SIGNAL = 3.3; EXPRESSED IN ADULT LIVER, SIGNAL = 3.7; EXPRESSED IN BONE MARROW, SIGNAL =   3; EXPRESSED IN HELA, SIGNAL = 4.5; EXPRESSED IN LUNG, SIGNAL = 2.9
tggtggaagggcaaaagtagagacctgcgatggtgggatggggaggcctcggacttgggtgggctcctttctcttaagcgagggcccaccttggtgctgaggggactagctgagctccattgagtctgtgctgggggctgaagcggaatccttctggatgctttcaaagagggcagcaagttcagggttggatctgatttgggaagagaagtcggccatgatggggcttttccccacctcggggatggtcagcagggcagccactgccctcattgcagagcgcttcagttcatcttgcttttcaaactcctgcttcacagaaccagctttgacctaaagtaggaaacagcagaagcagccatcctttattgagcctggcccacaccactgcctcctcactggtctttggcttcctctctgccccatcatcttccccaacataaatccctgctgcgaggtctcctgaggcttctgtctcaccagctatttcctaactccacctctgggcttttgcactggctagtttccccacagaggttctttgccattcaaatcagcttgagtacagcctgaggg

SEQ ID NO: 8479 - DNA, 556 bp, Homo sapiens
  MAP TO AC018552.2; EXPRESSED IN BRAIN, SIGNAL = 2.7; EXPRESSED IN PLACENTA, SIGNAL = 2.3; EXPRESSED IN HELA, SIGNAL = 2.8; EXPRESSED IN ADULT LIVER, SIGNAL =   3; EXPRESSED IN BONE MARROW, SIGNAL =   2; EXPRESSED IN FETAL LIVER, SIGNAL = 2.9; EXPRESSED IN HEART, SIGNAL = 2.6; EXPRESSED IN LUNG, SIGNAL = 2.2
aatccttccctgctccaaagtttatgttatggcttggaagtttaatagcttttcacccttaggtctttaattgattttggtaactggtatgtgctagggtcaaatttcattttttttcccgtagggatacccaactgttctagcaccatttattgaaaagtcaactcttccttcaatattcagaaatgtcacctctgtcataaaccaggcagccacatgtgtattagactgctggtgagtgccctatcttgtatatttctgcatgtcttaaattagttctcaattaagttttagaattttatctgggttttgcacatttctagttagatttatttctcagtacttgatatattttgaagtattataaatgatggtcatattagttatcatggccatgtaacaaatcactccaacactcagtggctaaaacaacaaaatttatctccccatttttgtgggccaggaatccaggggtagcctagctaagtggcaatggctcaaggtctcttatgaggtttcagtcaagttggaggacagggctgaggtctcatctgag

SEQ ID NO: 8480 - DNA, 558 bp, Homo sapiens
  MAP TO AC008056.6; EXPRESSED IN BRAIN, SIGNAL =   4; EXPRESSED IN PLACENTA, SIGNAL = 3.8; EXPRESSED IN ADULT LIVER, SIGNAL = 3.1; EXPRESSED IN BONE MARROW, SIGNAL = 2.8; EXPRESSED IN FETAL LIVER, SIGNAL = 3.6; EXPRESSED IN HELA, SIGNAL = 4.3; EXPRESSED IN HEART, SIGNAL = 3.9; EXPRESSED IN LUNG, SIGNAL = 3.7
aagcctgttatgatgcctggtccattcagaccaggtaaggcaaacaaggaaaacgtatgagaataataatgtttcctccacccaacccactaggccggcagttaaccatcttcaacactcaggcgcaaatagccattggtggaaaggacaaaggacgcctcttccaaggccaactctctgggctctattatgatggtttgaaagtactgaacatggcggctgagaacaaccccaatattaaaatcaatggaagtgttcggctggttggagaagtcccatcaattttgggaacaacacagacgacctccatgccaccagaaatgtctactactgtcatggaaaccactactacaatggcgactaccacaacccgtaagaatcgctctacagccagcattcaggtaggcctttttccaagtattaattgcgtctgtatttttatctttgcaacattgttatcatggtcattgctttatgtagctaaagagtttgaattactatgtaagaaggatgctggcagatactcatagtaatgagacccaggagaagagaaaggtg

SEQ ID NO: 8481 - DNA, 596 bp, Homo sapiens
  MAP TO AC008651.4; EXPRESSED IN BONE MARROW, SIGNAL = 3.4; EXPRESSED IN LUNG, SIGNAL =  18; EXPRESSED IN ADULT LIVER, SIGNAL = 3.3; EXPRESSED IN BRAIN, SIGNAL = 2.7; EXPRESSED IN PLACENTA, SIGNAL =  24; EXPRESSED IN FETAL LIVER, SIGNAL = 8.7; EXPRESSED IN HELA, SIGNAL =  20; EXPRESSED IN HEART, SIGNAL = 4.5
cttccaggtgagactccagctctaccttgttcttgtaagcttcatccatatccttcttgatgaggacaaattcattctccatctctgtatgctttttgatatcatcctcgtacttgttcttgaagtcctccaccagcccctgcatgttatcaagttccacctccagcttcagcttctcttggcccagagtgtacagctgccagcagaagtttgttgatgtagctctcgaacatgttgtccatgttgctctgagccgtcttctgccgctgcaggggcctccacttggtctccagcatcttgttctgctgctgcaggaactgtaccttgtcaatgaaggaggcaaacttgttgttgagggtcttgatctgctccttcacctgggtgcacacagcttggatgttggggtccacctccaggttaagggggctcagcaggctctggttgaccgtgactggggtgatgcctcccctaccactggccctgccaaagtctccacccaggctaccccggaaactgctgctgcccattcgggagaagctcgaggagctgatgcaggcactgggcccacacatgtaggaatggctactgaaggccct

SEQ ID NO: 8482 - DNA, 502 bp, Homo sapiens; identical to SEQ ID NO: 8396
  MAP TO AC020912.3; EXPRESSED IN BRAIN, SIGNAL =   2; EXPRESSED IN HELA, SIGNAL = 2.1; EXPRESSED IN HEART, SIGNAL = 1.8; EXPRESSED IN PLACENTA, SIGNAL = 1.4; EXPRESSED IN FETAL LIVER, SIGNAL =   2; EXPRESSED IN BONE MARROW, SIGNAL = 1.6; EXPRESSED IN ADULT LIVER, SIGNAL =   2; EXPRESSED IN LUNG, SIGNAL = 2.4

SEQ ID NO: 8483 - DNA, 591 bp, Homo sapiens
  MAP TO AL136418.1; EXPRESSED IN PLACENTA, SIGNAL =  12; EXPRESSED IN BONE MARROW, SIGNAL =  13; EXPRESSED IN LUNG, SIGNAL = 8.8; EXPRESSED IN HEART, SIGNAL =  16; EXPRESSED IN BRAIN, SIGNAL =  12; EXPRESSED IN HELA, SIGNAL =  21; EXPRESSED IN FETAL LIVER, SIGNAL =  20; EXPRESSED IN ADULT LIVER, SIGNAL =  14
cgccttagcttcccaagtagctgggactacagatgcgtaccaccatgcctggctaatatttccagtttctaatttagttttattgtttaaaatttatattttaataggtctttttttcctaagagaaaatacatgtcatacttgaaagaaataagattttgaaacaagtattttgtctttatagaaagccgaagtgaattcttagagaagttacaaagagctcgaggccaagtaaagccatctacttcaagtcaacctatactgtcagcaccaggacccactaaacttactgtaggaaattggtcactgacatgtttgaaagaaggagaaattgctattcataattcagatggtcagcaagctacaatattgaaagaagatttacctggttttgtatttgaatctaatagaggaaccaaacattcatttactgcagaaacttccctgggtaagtatgtagatatgtaagtttattgggtacaaataaatgaatatgttaaattgtaacaaagtaagctctgtgaatattcttttttttccccccaaggttcagaatttgtgactggctggactggcaaaagaggcagaaaa

SEQ ID NO: 8484 - DNA, 570 bp, Homo sapiens
  MAP TO AC008481.4; EXPRESSED IN BONE MARROW, SIGNAL = 5.1; EXPRESSED IN LUNG, SIGNAL = 7.9; EXPRESSED IN HEART, SIGNAL = 3.8
aaacagggaaggccttgtggccctaggcggaattgtagtagttgtgtgcgtggtggttgtgggcgggctcacccagctctgggtactcgggagtcagacagtacttggggtcgtagacctggcgtggcagcccatacaccgtcatgccccgctgcgaggcgcccttgttgctgcccatctgcaggctgacattgagcgtgtcgcagtgctccatgcccagccccggctcgaagatctgccgcttggtccctggcgcagtcatgccagcctgcgaagggtggtgtggtcaggccgtggggtggccagggtcctgggccttgacggcgtgtcccgggggcccccactcacctggctggctcctttgttggtgcccatctgcaggctgatggtcgcctggtccagaggctggtctgtgcccagcttggggtcgtagaggtggcgccgggtgccataggccgtcatgccctgctggctggcaaacttgttggtgcccatctaggaagccagaaggagaatcacaccaataattacagacctcatcatgggccatgaggcatagctgatgggaga

SEQ ID NO: 8485 - DNA, 581 bp, Homo sapiens
  MAP TO AL121933.9; EXPRESSED IN PLACENTA, SIGNAL = 2.6; EXPRESSED IN BRAIN, SIGNAL = 2.9; EXPRESSED IN BONE MARROW, SIGNAL =   2; EXPRESSED IN FETAL LIVER, SIGNAL = 2.2; EXPRESSED IN HELA, SIGNAL = 2.6; EXPRESSED IN ADULT LIVER, SIGNAL = 2.5; EXPRESSED IN HEART, SIGNAL = 2.1
tagcatccacatgatccctgcctaatcattatttcattacgggctactaaatagtgattttctaattctgttattccttctgcatttattagctagaactctattagcaagaacttttcttatcaactattttataataccacaataaaactcatacaagaaagggaaagtaaatgcactgattctttacttttgtttatcaattttcagaataatgagctggatgtcctaataatcttcaatggtgactacatttttcctaatcacaactccatctccacgtaaggactgaaaatacatgtacgtgtgtgtgtgtgtgtgtgtgtgtgtgtgtgtggcgtttaaattcattgctttcattcttttggttgttccaatagtctcatcttcggccagtgagagtcccttcaagttgtaccttctaaacctttgatatgtctccagcggcctttcatagctttcctgctttctgacacaagaagatatcttgcattcctgctcagctctggaataaatgacttctccaaagacactattcctgttagtggcaaacagtatttagaggccatactcagggcact

SEQ ID NO: 8486 - DNA, 572 bp, Homo sapiens
  MAP TO AC008865.3; EXPRESSED IN HEART, SIGNAL = 2.3; EXPRESSED IN LUNG, SIGNAL = 2.1; EXPRESSED IN BRAIN, SIGNAL = 1.7; EXPRESSED IN PLACENTA, SIGNAL = 3.2; EXPRESSED IN BONE MARROW, SIGNAL = 2.3; EXPRESSED IN FETAL LIVER, SIGNAL = 1.8; EXPRESSED IN HELA, SIGNAL = 2.2
ccagatttggtggctattcctgactttgaagcaggagcaatggaaaattggggtttgctcaccttccgagaggagacacttctgtatgacagtaacacttcttcaatggcggatagaaagctggtgactaaaatcattgctcatgagctggcccaccaggtattagcaaccaaggctgttctgtgtcacacctgtggtctacttcatgtcctggagttattgttagcatttagatgctaataattctttttttttttaagcattgccttcttttataatagaaagatgctttttaaacacaaacttcattttcaaatgaaaatgctatcagatgtttgacgttacaggttaaagcattttcacatctgtcttacttcgcaacttctctaaggtgggtattaatcacattttacatatgtgaaaactgagactcagtttaaataaatggcttgccataagtcatacagctaataagtggcagcactgggccatgaagagccactatctcttcaagatctctttttccccctcagtaatacacagctgcatcacctatgacaaatgcccattgc

SEQ ID NO: 8487 - DNA, 542 bp, Homo sapiens
  MAP TO AC006548.20; EXPRESSED IN FETAL LIVER, SIGNAL = 1.6; EXPRESSED IN LUNG, SIGNAL = 2.1; EXPRESSED IN BRAIN, SIGNAL = 1.6; EXPRESSED IN ADULT LIVER, SIGNAL = 1.6; EXPRESSED IN BONE MARROW, SIGNAL = 1.6; EXPRESSED IN HELA, SIGNAL = 1.8; EXPRESSED IN HEART, SIGNAL = 1.9; EXPRESSED IN PLACENTA, SIGNAL = 1.7
cttgtcctaaagtgggctgctagaggcagaaacacatgaagacagtggcggtaatccagcaccagcactcttcctctcacatgcctgcctcctctgtcctcccagaggagggctggggcctcctggctatcctggctgaggagcagacgctctgcctctttcctaccctggagcagcctggaggcctcatagtgccctgggccctgactgctccactcccagacggcgtggttccccacagtccaggagtgtggtccgggcccccaggcaagacagcctctgcagtggtgagtgctgccacctccctcctccatggtggctcctctgtcatggcctccctcaaagctaaggctgtctgggtgaagcgaggcttgccaactgaagccgcattcttggaaacccagctttcctgcctgtccttccatggcatctcagactctcctgtggtgttggcaaggaagagaggtatcatggacaggtagtactttgctgcaccccaagcccagcacactgttcatctggcttgctctccaggacctgtc

SEQ ID NO: 8488 - DNA, 533 bp, Homo sapiens
  MAP TO AC007868.2; EXPRESSED IN BRAIN, SIGNAL = 4.2; EXPRESSED IN ADULT LIVER, SIGNAL = 3.2; EXPRESSED IN PLACENTA, SIGNAL = 3.9; EXPRESSED IN LUNG, SIGNAL = 9.4; EXPRESSED IN HEART, SIGNAL = 6.9; EXPRESSED IN HELA, SIGNAL = 6.9; EXPRESSED IN FETAL LIVER, SIGNAL = 6.4; EXPRESSED IN BONE MARROW, SIGNAL = 2.9
ccaggaagagatggcagaagatcctctcacctacaaatcccggctgatggtggtggtgaagatggacagttccatccagccggggcccttccgggctgtcctcaagtacctgtacacgggggagctagatgagaacgagcgtgacctcatgcacattgcccacattgctgagctgctcgaggtctttgatctgcgcatgatggtggccaacattctcaacaatgaggccttcatgaaccaggagatcaccaaggccttccacgtccgccggaccaaccgggttaaggagtgcttggcaaaaggcaccttctcaggtatggaacaggcttggaaagcaagggggttctgcattggtgctattagcattgcctgtcggtctcagctcctggtgtcctggagctgcggctgccatgctcttgaagcctggttttccccagctgggagcgggtttgttccgtgccccgaatcttctgggttcaggaggaggctccgtggctccccttggggcttgttctcccagcttctttcaccag

SEQ ID NO: 8489 - DNA, 524 bp, Homo sapiens
  MAP TO AC011501.2; EXPRESSED IN PLACENTA, SIGNAL = 1.3; EXPRESSED IN BRAIN, SIGNAL = 1.6; EXPRESSED IN ADULT LIVER, SIGNAL =   2; EXPRESSED IN HEART, SIGNAL = 1.9
tgtgtcttcattctgctccgttgttctatgtgcctttcttcatgccaacatcagctgttttgcttactacagctctgtaacatattttgagatcaggtagtggatgctcctgttttctctttataccttgaagtctcaagacagtgggcgtacatacaaaaattatggaagaaaggatccctggactcccagggcccaatttagataacagagtgttggccatgaaccaaactcaaagatttccactgatagaggacagacaccctcatttcctcacctctctcctgtctcatgttctggaaacccttcaaatagttggccttcacccactgaaccaagctccaaaacggtgagtacaggaccctcttatatccgcttttggaaccctggggaggtgaaaccttggattcaggcgttgactcagcatctcacagctctgacattgacgcctgtcttctaccatctccgaactccagatactccaacagcgaaaggatctgggcccaacacagggctcagtgaaa

SEQ ID NO: 8490 - DNA, 512 bp, Homo sapiens
  MAP TO AC011462.3; EXPRESSED IN BRAIN, SIGNAL = 2.7; EXPRESSED IN FETAL LIVER, SIGNAL = 3.3; EXPRESSED IN HEART, SIGNAL = 2.6; EXPRESSED IN PLACENTA, SIGNAL = 2.6; EXPRESSED IN LUNG, SIGNAL = 9.2; EXPRESSED IN HELA, SIGNAL = 3.2; EXPRESSED IN BONE MARROW, SIGNAL = 3.5; EXPRESSED IN ADULT LIVER, SIGNAL =   5
tcacatttgactcccagtgcctatggcaagagttggcaatcatattcctttggctttttctcctaggattttgaatgtggaaatgacgtggaactgtcttttaccaagaatggaaagtggatgggcattgctttccgaatccagaaggaagccttggggggtcaggccctctatcctcatgtcctggtgaagaattgcgcagtggagttcaacttcggacagagagcagagccctactgttctgtcctcccggggtttaccttcatccagcaccttccccttagtgagcgtatccggggcaccgttggaccaaagagcaaggcagaatgtgaggtgagtggggccagaatgtattggtggccaccttgctgccaagacagaggagacacacacacacacacacacacagacttgctgcgagagtagccttggggcaagtggccactttgtcccagctcctcagggttggactcagagctgaaaagctgctctgagtgtgaggtgaggggtgt

SEQ ID NO: 8491 - DNA, 594 bp, Homo sapiens
  MAP TO AL159141.1; EXPRESSED IN BRAIN, SIGNAL = 1.8; EXPRESSED IN PLACENTA, SIGNAL = 2.6; EXPRESSED IN FETAL LIVER, SIGNAL = 2.3; EXPRESSED IN ADULT LIVER, SIGNAL =   3; EXPRESSED IN BONE MARROW, SIGNAL = 3.1; EXPRESSED IN HELA, SIGNAL =   3; EXPRESSED IN LUNG, SIGNAL = 4.4; EXPRESSED IN HEART, SIGNAL = 1.9
actgcatccctttaggtccccaagaaactccaaattttttccctgtcgtgagagacaggaagtaaacttggcatctggagatggaggctggatggccctcgggggctcaccctcaaggtgttgagtttcagggaatagcacagagagagttcgacagaattcactatcccaggctgtagggtgttggaaaagagccaccatgcagcccatgcccggttggtcagaagaccatccaagtggaaaggggacgacttgggcctctggcctaccttgcgcacaagcgtaacagtcgcttttgtttagactgcgaacggaatattcaatccattccatccaggcatttgtttctttgtatcctgtttcaattgtcagtgtttgttttaaatttttaacctctacaatagctactttgcttttgtcattagatgaagagacaatggtctggttagcaggtgtagaagaggatagacgtggagatatgagggatggagatgtactgaggtgcaactcgaagaatcctatggggtctttccctcttacatctgctcccataccatagaaacggtttagggtgggggaggaatcttggagagt

SEQ ID NO: 8492 - DNA, 551 bp, Homo sapiens
  MAP TO AC011375.3; EXPRESSED IN BRAIN, SIGNAL = 3.1; EXPRESSED IN PLACENTA, SIGNAL =   3; EXPRESSED IN HEART, SIGNAL = 4.8; EXPRESSED IN HELA, SIGNAL = 5.7; EXPRESSED IN ADULT LIVER, SIGNAL = 3.3; EXPRESSED IN BONE MARROW, SIGNAL = 3.2; EXPRESSED IN FETAL LIVER, SIGNAL =   5; EXPRESSED IN LUNG, SIGNAL = 2.3
atggtgagagtcagcccatcctttgaagccaagcggtgacttctctctagctatcaaagtcctgggatggcatgttctcccaatagaaggctgtttcgtctacactgaaaatctcttgtttagtgtaattgccctcatcgataaccttaacttgatcttctggataacttgctacagcttctacatcagcacgtgctgcttcctcttgcacttatgttatggagatggcttcttacttaaatctcatgtaccaacctctactagcttccaactcttcttctgcagctttctcaccactctcagccttcacagaactgagggcaggtagggcatctcttgtggattaggttttggcttaatgaaatgttgtagctggtttgatcatctatccagaccactcaaactttctccattatcaggaataaggttcttatcattcttatgttcacatgaatagcacttttcatttccttcttttgcattcacaacttggctatttagcccaaaaggcctagctttcagcctatctcggcttttgacatgccttcctt

SEQ ID NO: 8493 - DNA, 570 bp, Homo sapiens
  MAP TO AL139121.2; EXPRESSED IN PLACENTA, SIGNAL = 3.5; EXPRESSED IN BONE MARROW, SIGNAL = 6.8; EXPRESSED IN HELA, SIGNAL = 7.4; EXPRESSED IN LUNG, SIGNAL =   3; EXPRESSED IN BRAIN, SIGNAL = 3.7; EXPRESSED IN FETAL LIVER, SIGNAL = 6.9; EXPRESSED IN ADULT LIVER, SIGNAL =   4; EXPRESSED IN HEART, SIGNAL = 6.4
tgcattagcccctaacaaggcattagtcagcctatcctctggagctttgaagccagacattgacttctcttccctagctatgaaagtcctagatggcatcttcttccaataaaaggctgttgagtatagccacctccatcaatgatctcagcaagatcttctggataacttgctgctgcttctacctcataacttgtggcttcaccttgcacttttatattatggagatggcttatttccttaaaccttacaatccaatgtctgctagcttcaaacttttcttgagcaatttcctaccctctctcagcattcataaaattgaagagagttagggtcttgatctggattaggctttggcttaaaggaatgttctggctggtttgatcttctatccagaccactaaaactttctccatatcagcaagaaggctgttttgctttcttatcattcttgtgttcactggagtagcacttttaactcccttcaaggacttttattttgcattcacactttggctgactggaacaagaggcctagctttcagcctatcttgggttttgacatgcctt

SEQ ID NO: 8494 - DNA, 518 bp, Homo sapiens
  MAP TO AC008897.4; EXPRESSED IN ADULT LIVER, SIGNAL = 3.7; EXPRESSED IN BONE MARROW, SIGNAL = 9.7; EXPRESSED IN LUNG, SIGNAL = 8.6; EXPRESSED IN BRAIN, SIGNAL = 8.5; EXPRESSED IN PLACENTA, SIGNAL =   6; EXPRESSED IN FETAL LIVER, SIGNAL = 6.1; EXPRESSED IN HELA, SIGNAL = 6.9; EXPRESSED IN HEART, SIGNAL = 4.9
tgcactcacaaaccttgagctaaacacagggtgctgattggtgtgtttacaatccctgagctagacataaaggttctccaaggccccaccagagcagctagatacagagtgtcgattggtgcactcacaaaccttgagctaaacacagggtgctgaatggtgtatttacaatccctgagctagatataaagactctccacgtccccaccagactcaggagcccagatggcttcacccagtggatcctgcaccagggctgcaggtggagctgcctgccagtcccgcgccgtgcgctcacactcctcagcccttgggtggtcgatgggactgggcgccgtggagcagggggtggtgctcgtcggagaggctggggctgcacaggaacccacggagtgggtgggaggctcaggcatggcgggcggcaggtcccgaaccctgccctgcgggaaggcagctaaggctccgtgagaaatcgagcgcagcgccggtgggctggcactgctaggggacccagtaca

SEQ ID NO: 8495 - DNA, 552 bp, Homo sapiens
  MAP TO AC009013.2; EXPRESSED IN PLACENTA, SIGNAL = 2.8; EXPRESSED IN BRAIN, SIGNAL = 2.5; EXPRESSED IN FETAL LIVER, SIGNAL = 6.3; EXPRESSED IN HELA, SIGNAL = 7.8; EXPRESSED IN ADULT LIVER, SIGNAL = 2.3; EXPRESSED IN BONE MARROW, SIGNAL =   2; EXPRESSED IN HEART, SIGNAL = 6.7
tatcagcagcatgaaaacggactaatacagtaaattggtaccagtagagtggggtggaactgaaaagatacctaaaaatgtggaagtgactttggaactgggtaacaggcagaggttggaatcatttggagggctcagaagaagacgggaaaatgtgggaaagtttggaacctcctagagacgtgttgaatgactttgacaaaaatgctgatagtgatatgaataataaggtccaagcacaggtggtctccgatggagatgaggaacttgttggaaactggaacaaaggtgactcttgttatgttttagcagagactggcagcattttgcccctgccctagggatctgtggaactttgaagttgaaagagacaatttagggtatctggaagaagaaatttctaagtagcaaagcattcaaaaggtgacttgggtgctgttaaaagcattccattttaaaagggaaacagagcataaagttcagaaaatttgcagcctgacaatgcagtagaaaagaaaaactcattttttgaggagaaattcaagccagctg

SEQ ID NO: 8496 - DNA, 594 bp, Homo sapiens
  MAP TO AC021881.2; EXPRESSED IN FETAL LIVER, SIGNAL =  13; EXPRESSED IN LUNG, SIGNAL = 6.8; EXPRESSED IN BRAIN, SIGNAL = 8.9; EXPRESSED IN ADULT LIVER, SIGNAL =  10; EXPRESSED IN BONE MARROW, SIGNAL = 8.1; EXPRESSED IN HELA, SIGNAL =  13; EXPRESSED IN HEART, SIGNAL =  11; EXPRESSED IN PLACENTA, SIGNAL =   8
aaaatgttgcccataggctgtgctggctttccttcgctgtatgtagaactctttgattccctttagtcagagtgtctttgaatttccctattatgcctcaaagaaattgcagccacaaagtgatggtagaacatatagatcctcttctcttgtaacttgttgctactccctgttctcattgatccttgagcaggcttcactacagtgcatacctccccacagaggggaagctgggtgtccttggcagaacaggtgctcacttaatagaggcagagaagggtctggtgcattttcttcctctggttgcaattccttggtggccagatcacactgtgcgctgtagcagtaatattgagaagttgattgctcctctaatggagcaggatgccattgctgtcttaatttcataggccttcctgaaggtcatcctcacttgggcttatttttactgtctctctcttcttggtttaataagaatccatagtaacataaacattaaaaaaacctatccaaaaggtattctattactagaaacaatatgccagtaacaaataagtctaaataatccaattaccaggtaggagatctgtggcc

SEQ ID NO: 8497 - DNA, 543 bp, Homo sapiens; identical to SEQ ID NO: 8379
  MAP TO AC018499.2; EXPRESSED IN BRAIN, SIGNAL = 3.1; EXPRESSED IN FETAL LIVER, SIGNAL = 3.8; EXPRESSED IN LUNG, SIGNAL = 3.4; EXPRESSED IN PLACENTA, SIGNAL = 2.6; EXPRESSED IN HEART, SIGNAL = 3.4; EXPRESSED IN HELA, SIGNAL =   4; EXPRESSED IN BONE MARROW, SIGNAL = 2.6; EXPRESSED IN ADULT LIVER, SIGNAL = 3.2

SEQ ID NO: 8498 - DNA, 540 bp, Homo sapiens
  MAP TO AC011381.3; EXPRESSED IN BRAIN, SIGNAL = 7.9; EXPRESSED IN BONE MARROW, SIGNAL = 5.1; EXPRESSED IN FETAL LIVER, SIGNAL = 6.5; EXPRESSED IN LUNG, SIGNAL = 8.1; EXPRESSED IN HEART, SIGNAL = 6.7; EXPRESSED IN PLACENTA, SIGNAL = 5.6; EXPRESSED IN HELA, SIGNAL = 6.5; EXPRESSED IN ADULT LIVER, SIGNAL = 7.6
aggattctcaccacccacagttaactgtttaatattctaaactgtaaaacagataaaaatgaagttttctagaaaaaactcatgaaagtggctgcaattacatccgtcatagaacctaaaacccatgtgacaaggtaggaagtgatggctcttacctggctcttcttggttggaatagtggtattcctattaataagtttggtaaagacacctcctagagtttcaatacccagagacaggggagtgacatcaaggagcagcacatccgtgacatcgccggccaacacacctccctgaatggcagctccaatggccacagcctcatcaggattgacagctttacttggggctctgccaaaaagatcctgtacagtctgctgaacctgaacatcaaggaaaaagaacctgtcggcccacacttgggaactacctgagcagaacaaaagggagcacgtgtcctacgctcccagccagatctcaagacaggctaactcaaatctgagaatgtttattcaaataaccatttcgtacttgggttcc

SEQ ID NO: 8499 - DNA, 523 bp, Homo sapiens
  MAP TO AL136038.1; EXPRESSED IN BRAIN, SIGNAL = 3.1; EXPRESSED IN PLACENTA, SIGNAL = 3.2; EXPRESSED IN BONE MARROW, SIGNAL = 4.2; EXPRESSED IN HELA, SIGNAL = 9.2; EXPRESSED IN LUNG, SIGNAL = 3.5; EXPRESSED IN ADULT LIVER, SIGNAL = 3.2; EXPRESSED IN FETAL LIVER, SIGNAL =   7; EXPRESSED IN HEART, SIGNAL = 7.1
ttgatgtattcgacaatcagtggttagttctcatccacattgactgtagatttttgaaaacggtaacacgtacatgggtaaccaaagtatagagcttgtttgttgaattttcatcctcgttacgttttctggacaaccacacagggatacggtatgggacaatccttattcctttggcccaaacagctttgttgagcctagtatcaatgtgcacatctggagtgcccatctccttcatggcacatttttggatctcttcgagtgcccgaggggcacacttcttgaagcccacaccatggatgcgcttgtgaatgctgatggcagaaaggctcttcttcttgccatccttctttgcaagagcgatcctgccgggcccaagttggaaagcaagagaactacagattgtgggagaaagaaagcagcggttccctgaaggtatttcttgaaacactggaggagaatggagctagctcaaatgggaatagatgagatttatagtcactcctccatccctgcaacatat

SEQ ID NO: 8500 - DNA, 524 bp, Homo sapiens
  MAP TO AC007497.2; EXPRESSED IN BRAIN, SIGNAL = 1.6; EXPRESSED IN PLACENTA, SIGNAL = 2.3; EXPRESSED IN LUNG, SIGNAL = 2.8; EXPRESSED IN HEART, SIGNAL = 1.8
tggaaagggacaggtttgagctttgagattaaatgtctgccctttactgcatccatcagaataaatttcattcttcactttaaaggatcattcctaatttaaccaaatagtttgttaaggacttacaattctgcaagaagagagtattccaggtagaagggtccataggacgcatgcgtgccatttgttgactgtgctgctggggcaggagatgtaggcttagttatgggcaaagcatttttgggaatagaaggcagctgtttctttggtgcagttcgtggaggactggttttcacgtcccctgttaatgtcttctcttcaccttcagatcgctatacaagatgaagttgtaagaatatctgttaggatgattcttaaatcacaagagtacattattagctccatggcctaaatgctggaattactcctttacaagcacattctaacaccatgaccaagatgactagaaagtcctttgggcaggcaggtcatataaagagaagacaaacctgaagcaagaccaa

SEQ ID NO: 8501 - DNA, 592 bp, Homo sapiens
  MAP TO AC023128.2; EXPRESSED IN BRAIN, SIGNAL = 3.1; EXPRESSED IN PLACENTA, SIGNAL = 5.9; EXPRESSED IN BONE MARROW, SIGNAL =   9; EXPRESSED IN FETAL LIVER, SIGNAL = 7.9; EXPRESSED IN HEART, SIGNAL = 2.9; EXPRESSED IN LUNG, SIGNAL = 9.5; EXPRESSED IN ADULT LIVER, SIGNAL =   7; EXPRESSED IN HELA, SIGNAL = 6.8
gggagggaagatttgaggactactggcctcgtcagcccaataatgcaattgccctggtgatggtaccctgcagacccctgtgcttgcataggacaagttcaggggacacgcgggatgagcctgtgatggttgtcacattcttgatgacagtattcattattttctctaaggtgcactctgatcagaatgcatacacatctgtaagtgtccttttggtgtatgctttggaatgactattttaggagaaatttccacctcaccaaaacctggtgagattagtgatgatcccaaagcatttaaaacaaattgaaagggttattcagaaagacctggatggctcctattcatccaaagaacaccatatagtgagagagtccttatggctctccaacaactgaaaatgtggagaaaccaactaccattgatataattgcctataataggtgcacctttgagactgcaaggcataattggataatataatgtcaacagaggacttcctgttgccatatcaagcagaaatcttcattaaaaatataaatgtgtaagaaatattggccagaaaggttcttggaaactttgtcagggtgga

SEQ ID NO: 8502 - DNA, 597 bp, Homo sapiens
  MAP TO AC011366.3; EXPRESSED IN ADULT LIVER, SIGNAL = 2.1; EXPRESSED IN FETAL LIVER, SIGNAL = 2.9; EXPRESSED IN LUNG, SIGNAL =  18; EXPRESSED IN PLACENTA, SIGNAL = 1.8; EXPRESSED IN BRAIN, SIGNAL = 1.7; EXPRESSED IN HEART, SIGNAL = 2.7; EXPRESSED IN BONE MARROW, SIGNAL = 1.9; EXPRESSED IN HELA, SIGNAL = 2.7
gcagttacgtgctgttctcgaggaggcaacagacaagtagaaatccctcaaatgctgcgtttgggtatttgtttctggcccgggctgacaagggaaaaattcagatcagataacctgacttatttgcaaggctttctatcttaccatgacctgccaggacgaccgtgtggggtttaaggtgaaaactcagacgaaactcgggcctgttttggggactgaatgagtcctgacagaggccatcacttggacgaccacagcagcccgtcgctgagggtcccctgggctccgtgggcaaagccttgtcaggcacgagggtaactgaggcacacggaaaagaagggcatggaggttttgtttacaactcacttcatttcacattcttttaatttcttaaaacccttgtgtcatttaaatatttatccattatagattttccccagctggattcttgctttgaaaaccaatttctcactccaaagttacagatccctgatgattctggatctgaactcatctacgttattaggcctttgagggctcaaggacttaccaaccacacaggtgaccgtaggcaggtgaggggtgaaatgagtctgc

SEQ ID NO: 8503 - DNA, 597 bp, Homo sapiens
  MAP TO AC011510.3; EXPRESSED IN PLACENTA, SIGNAL =   2; EXPRESSED IN BRAIN, SIGNAL = 1.9; EXPRESSED IN HELA, SIGNAL = 1.7; EXPRESSED IN ADULT LIVER, SIGNAL = 1.8; EXPRESSED IN HEART, SIGNAL = 1.8; EXPRESSED IN BONE MARROW, SIGNAL = 2.1; EXPRESSED IN FETAL LIVER, SIGNAL = 1.9
gagctggctgaccactatccagtcatcctgttcatcctcacccaggggcacctgggtctgggtgctgtccgcgagctccaggatctgtccatcccgaagccaatgtacctcggggggctctccctgaacctggagctgacaccgaagggtgcccgtgagtccccgggcacctgtgatattccctgggttgcccacgaagggactttcttcagcctgcgtgcctggaggggagatgggaagagttagcttaggaaccccccagctccttccggccctcagttccaccctgtccttgcctgcccaccggcggccaggaccccgccaggcccttaggccgacatagttgcagagtgacctcagagtggggtggagggcggaggctctgagaggaggacgggagccctcccaagggactgggatctagcgtccatcccgtcgggaaggaggctcgggatctggcagcctcccacgccctgcactgcctggcagggccagcccctgccccctccgtcctctcttaggtctctagagacttaacaggtcgcgctggtgctggtggatggaggggaagaatcaggggttgggggagagagataa

SEQ ID NO: 8504 - DNA, 541 bp, Homo sapiens
  MAP TO AC010289.2; EXPRESSED IN BRAIN, SIGNAL = 3.8; EXPRESSED IN PLACENTA, SIGNAL = 2.9; EXPRESSED IN BONE MARROW, SIGNAL = 3.9; EXPRESSED IN HEART, SIGNAL = 3.4; EXPRESSED IN LUNG, SIGNAL = 3.1; EXPRESSED IN ADULT LIVER, SIGNAL = 4.6; EXPRESSED IN FETAL LIVER, SIGNAL = 3.9; EXPRESSED IN HELA, SIGNAL = 3.6
ttaaacggcattaagcccagcagtggtcaggtcataaagatgtgagctcagaatggtggcaggggcaccacctggctggctgaggtttgcaggtgggggcactagaggcaggtcagaagagaaccacagaagccagagaccttggccccacacagagaggcctgcacagcactgaaggcctagcctggcttccttgtaaagtttcccttcctggcaatcacataccccaagtctgaagaaaacgtttaagaaggctgaaactgagcatctgaaacctacctgaggacgagtatgcctgtccagcatggtgagctgcacataagtctgtagcgtaagaccccagcgagaggcatcgtggtacatcaggccctgcagaagggaaaacacagcactttccatcaaagtggcatctgcaggaggaccctggtctcacaaggcactgaaggacagctcaagaaacctacacaggcagggttggggctggagataaacccagcatgatcacagggctctgacagcagggtggacaaaggcagacact

SEQ ID NO: 8505 - DNA, 542 bp, Homo sapiens
  MAP TO AC005301.22; EXPRESSED IN HELA, SIGNAL = 3.9; EXPRESSED IN BRAIN, SIGNAL = 3.4; EXPRESSED IN ADULT LIVER, SIGNAL =   4; EXPRESSED IN BONE MARROW, SIGNAL = 5.1; EXPRESSED IN FETAL LIVER, SIGNAL =   5; EXPRESSED IN HEART, SIGNAL = 4.3; EXPRESSED IN LUNG, SIGNAL = 5.2; EXPRESSED IN PLACENTA, SIGNAL = 3.4
aagaatggggacagagggacattccaggaagcaagctctcgggctctgtccacacagagacccagacgtagttttctggtgtcagcagactgcgagctcactttccaggagttcccaaagtccacagggtcttcctccacttggaggttgctgctggtgaggtcactgttctggatgccatcaaaattcccacacaggccacacactttctccttgagagacaagttgagggatgagcaccgtcaagcccaggggcatgctctctggctcaggggaaaggggaacgttcctggcggcaatggaggcagagggcattcgagggagaggaggaggagcgggacagagactcagaggaggcccgaggtgagcagcaaagccttgccattgccaagccctattcctgagcttccttgctggccccattttatttgaagctatggaaacaaagagaggcaacatgcccatgtcacatagtcagccaagggcagaagtgggaatcaggcagccttggccctgagatcactggtgggaactatcgctgt

SEQ ID NO: 8506 - DNA, 515 bp, Homo sapiens
  MAP TO AC003109.1; EXPRESSED IN BRAIN, SIGNAL = 1.6; EXPRESSED IN ADULT LIVER, SIGNAL = 1.5; EXPRESSED IN FETAL LIVER, SIGNAL = 2.4; EXPRESSED IN BONE MARROW, SIGNAL = 1.7; EXPRESSED IN HELA, SIGNAL = 2.9; EXPRESSED IN LUNG, SIGNAL = 1.7; EXPRESSED IN HEART, SIGNAL = 2.2
tggaggcttgttttcctcacatcctgagtggcacagaggcaggctgtgcgtggctggtgggggctccgtgtgcccagagtcctgggtaccttctgtcttccacgccaccatcctaagggtgggtttcatcctcactgcttccagatggctgctccacccccacaggagggtgcggcagggcagaaggggtccctggataggaaagaatcatcaacagagagcagcctgcatctcactggcgacagctgtgttacctggtaaccttgcttttcaaaggagactatgaaaaatagttttaaagtggacacatttccctccccatcaaattgggttttatactttaggaagaagggaagaatggatatagtgtaatcaactaccagaaagggtgtgtactgtagtcatcagattttggaaaggccctagatctgtggctctttatttttgaatcttacaaattgaagtgggagtgcatgtgagcctggccggaggagagtcccctagcctcttccaac

SEQ ID NO: 8507 - DNA, 555 bp, Homo sapiens
  MAP TO AC002523.1; EXPRESSED IN HELA, SIGNAL = 2.1; EXPRESSED IN PLACENTA, SIGNAL = 1.5; EXPRESSED IN BRAIN, SIGNAL = 2.1; EXPRESSED IN ADULT LIVER, SIGNAL =   2; EXPRESSED IN BONE MARROW, SIGNAL = 1.9; EXPRESSED IN FETAL LIVER, SIGNAL = 1.9; EXPRESSED IN HEART, SIGNAL = 1.8
ttggtggcagcactgttatccagagataaaaagttgacctgtattttgcctgagggacatgatttacccctcttattacctgtgcttgctttgtcgtttcggccataggttggcatgctccaacatcattgtggacagggcccacacctatggcaaagtgaccaatgtctccaactgttggatctgcactgtccttccagcagcagctgtagatggcctgccgtggcatgtacattcagcttctgtgaaaaactggatgaggctagagacttggggtctcatggacaatggttgggatgcaacatggcaaactttggatagggggcattgcaaaacctgcattgcaaaaaatgcctgccccctggctgacccatagcattcatgatgaatggggctggctaatgagagaacacatggtgcccccattgcaggtaccataatatatagatcaacactggggtaaagtcactgtgggatggttgcccaccgtggcctgtaaaaacataacacatgtcaccacaccaaggctgtggtggaacaagctgccttaccgag

SEQ ID NO: 8508 - DNA, 515 bp, Homo sapiens
  MAP TO AL139342.2; EXPRESSED IN ADULT LIVER, SIGNAL = 2.5; EXPRESSED IN HELA, SIGNAL = 2.6; EXPRESSED IN BRAIN, SIGNAL = 3.5; EXPRESSED IN PLACENTA, SIGNAL = 2.2; EXPRESSED IN BONE MARROW, SIGNAL = 2.7; EXPRESSED IN FETAL LIVER, SIGNAL = 2.3; EXPRESSED IN HEART, SIGNAL = 2.5; EXPRESSED IN LUNG, SIGNAL = 2.9
agttttctagccctctgcccatattctgattcatctggcctgtgagggggtctgaggatcttcattttaacaagaatgttcacccaggtgattctgtttaggtgatccacagattgcacttcaggaaacattgatctagaaacagagatataccaatgggcctatacatttgcatatgagcaagataagttatgcacacaaagtttatcaccaaaattcattacttaataaagatataaactttccgctaatggtttacctggttagtctttttctatttgtcttattagcacagactcttttaactttcatatctttgtcattttcaacaccctttattatgtttagatttgtttgtttcactgtatcaattttcttcagttcctagaaacaaaaaaaagcctatttaattcttatgtgtaaaattcaaacagtcttttcctaaatcattggttataatatctagatttttctggtcccatgctgctagatgtggaatgttggaacaggggttc

SEQ ID NO: 8509 - DNA, 556 bp, Homo sapiens
  MAP TO AC008372.6; EXPRESSED IN ADULT LIVER, SIGNAL = 1.7; EXPRESSED IN BONE MARROW, SIGNAL = 1.5; EXPRESSED IN HEART, SIGNAL = 2.3; EXPRESSED IN BRAIN, SIGNAL =   2; EXPRESSED IN PLACENTA, SIGNAL =   2; EXPRESSED IN FETAL LIVER, SIGNAL = 2.5; EXPRESSED IN HELA, SIGNAL = 2.5
tttaccctgctgtttttggctactctctttccggctcttctcttttcctagctcacaccattcatctcctgggaatgctttaggattggagatgcctgatgtgatggtgtttgctgctgtggttctaaagcagtgatcttttccaaaggccacagctataatgaaacaaaacaaccccctgggtttttggtggtatgagcccgttgctgtgtgctgggcatctctccattctgatcagcacacagttcctctcgtgtgcatgtctgcagctccctcacctatgtgggctgcctggacacatgggtgggcttcctgctacttcagagctgccctccagttgcccctaccacctggttctacagggtaagtggagcaggcacaacacccagctccacagagaaggtcctgcattgtgaggacctacacttctaacaaggccctctatggggcaggaactggagtaaccctggtttcagcctacccttgcccatctcagaccctatcccagaccaacccaggctgggcttttcattgctgattgctttccccactgaaa

SEQ ID NO: 8510 - DNA, 504 bp, Homo sapiens
  MAP TO AC023153.2; EXPRESSED IN HELA, SIGNAL = 4.8; EXPRESSED IN BRAIN, SIGNAL = 3.6; EXPRESSED IN ADULT LIVER, SIGNAL = 5.8; EXPRESSED IN BONE MARROW, SIGNAL = 3.9; EXPRESSED IN FETAL LIVER, SIGNAL = 5.2; EXPRESSED IN HEART, SIGNAL = 4.5; EXPRESSED IN LUNG, SIGNAL = 4.3; EXPRESSED IN PLACENTA, SIGNAL = 3.6
aaaagcggttcttagctcccagggtaagtcatgtgtcttgtctggttccatacaaggtcctgtgcctttccgtatcaggaattttaccacatgtgtctatttatacatccgagtcctgcaatagacttttagcttcttgaccaggcactgtgactcagaaattacatagccattggatactttcctggaagaatttccttgagaattctgtggagatattttgtcaacttttacagtatcaagcagcaggtgtcagagctgagatttgctcctggactgattccaaagctgcagactgaccaatgcatcttccaaccgaaagtaagaggatttcgtgaccctctgaggctgggcatgctgcttccacctaaacttaggatggttgtaggaagtcacttctctcaggggctgtgcaaattcaatctcaagaagttgttgacatccttttgggctataagcaggaataaggcattgcatctgccgtggagtggctggacctaatga

SEQ ID NO: 8511 - DNA, 582 bp, Homo sapiens
  MAP TO AC005323.1; EXPRESSED IN HEART, SIGNAL = 2.8; EXPRESSED IN BRAIN, SIGNAL = 1.5; EXPRESSED IN PLACENTA, SIGNAL = 1.7; EXPRESSED IN ADULT LIVER, SIGNAL = 2.4; EXPRESSED IN BONE MARROW, SIGNAL = 2.1
aaactctgtcctgggccttccagaattaagctctttttcagttgtgtgtgtataactttgaactttgaactgattaccatgttgcttaggtgatttatgacacatagtcctcgtaaaacattaaaatttgagttacacagtagcactgagactgtacaacactatgtgtatttaccccagcataccttcagtattccttgtgtgtttctaagattccttagtgcctcagcagcctggcggttggcatggttcagctggatttccatttcattaagatctccctccatcttcttcttgatcctcagagcatcatttctgctcctgatctcagcatccagtgtactctgcattgactccacaactctgagatggttcctctttagctgatcgagttcttcatctttttcagcaatttttcggtcaatctcagatttcacctgatttagctcaagttgaatgcgaagaattttgccttcttcatgctcaagagatgccttaataaaagcaacatttatttaggttacctaaagagctttttatttctttcacattatgataatttccccaagaaggcattaaaaa

SEQ ID NO: 8512 - DNA, 528 bp, Homo sapiens
  MAP TO AC009396.5; EXPRESSED IN PLACENTA, SIGNAL = 3.8; EXPRESSED IN HELA, SIGNAL = 4.5; EXPRESSED IN LUNG, SIGNAL = 5.9; EXPRESSED IN HEART, SIGNAL = 4.1; EXPRESSED IN BRAIN, SIGNAL = 4.4; EXPRESSED IN FETAL LIVER, SIGNAL = 4.4; EXPRESSED IN BONE MARROW, SIGNAL = 4.1; EXPRESSED IN ADULT LIVER, SIGNAL = 3.6
tagcagtgggaagggagaaggggtatcaggttgtataagcaaagtgatttctctggcttatgcttctataaatttgtttataaccacaaacctctggtaacagggcatttgcagaaggaaaatatttatagaagtctaccttgccaattacattgcaaaaaataaattgcctttagagtccttaaaaaaattcaaatatgttttccctctccactgccacccccacatcaataatttgcagctcgaggtctatgtctaaaggataagagtttccacaagttgattgtggatatctgaaatcaaatttaattacatgtgatggatcaacttcttgaactcccatatttctttcattgtcttcttcggattccatgcctcacctttgtggaaactgaactatagagaaatgataacatgactcagagccagccctgcaatcaagggggagtcatctaacccaaattggtgagttcaggtcagcagcatatagtgtcttggaaagagcatgggctttgcggtcagatagac

SEQ ID NO: 8513 - DNA, 572 bp, Homo sapiens
  MAP TO AL049829.3; EXPRESSED IN HEART, SIGNAL =  32
cacgtgatgaggatggactggttctcccgatctggaagaaaaaagaggagaagcaatggggtcagggctgaggatctgggtgggtgtctgggaggaggagcagagaccaggggccaccaggctcacctgtcagcatgtactgataggcgttgtcggagatggagaagatgtggggcggggcctcactcctcttcttgccccggtaggcggccaccacctcggcattgtacaccggcagccacttgtaggggttgacagtgacacagaagaggcccgagtaggtctggagcaggagacaaggctgggcatgaggttggtggggagagcctgggacaggcagtggtggcagccaggcatgtccctgttcactccagctggctctactcctcctgcagctgactaggggtggaggggggaaggggacttgggtcccttgggagtctctccccctcttcttgggagagcccccctggcttatttaggcctccacgcagcacaggaagcctctgcagtgtgcaggagccactcacatatatcatccaggccgcgtagcgctccttgaggttgaaaag

SEQ ID NO: 8514 - DNA, 555 bp, Homo sapiens
  MAP TO AL160008.1; EXPRESSED IN HEART, SIGNAL =   2; EXPRESSED IN LUNG, SIGNAL =  16; EXPRESSED IN PLACENTA, SIGNAL =   2; EXPRESSED IN FETAL LIVER, SIGNAL =   2
caccattatggaagctaggaggaattacttccgtcaaaataaataatagttttctttccttgtggtactttagcttctatgaccctaaaccgtatacatttgagacaaaaattaccgctaactccttttgaaatagatggtccacatctttgaaggaactcctgatgaagacttcaatggcctctctctcactgtccctgtgcaggtccagcagctcctggagggtttctgtgggcagctgcaccttctggcccatctgctgttcatagtgggcaatagccttttgcactgcagctgagttctctatctgggccaaggccaggactgcgttctccatgcacggcagatccccactgctgatggcattgacgtaggtcagcaccaggctctctagacctgcatatgaagaacaaatgataatgtttctggtggtaaagaaagtctctattccatgtaattctgagcatgtcaaataccacctattttcctcacagcatcaatgtcctcagcatcacttggaagcttgctggaaatagactctcagaccctgtccga

SEQ ID NO: 8515 - DNA, 537 bp, Homo sapiens
  MAP TO AL133244.1; EXPRESSED IN BRAIN, SIGNAL = 1.6; EXPRESSED IN BONE MARROW, SIGNAL = 2.6; EXPRESSED IN ADULT LIVER, SIGNAL = 2.5; EXPRESSED IN HEART, SIGNAL = 1.9
cccgacacggatgtaaaaactgaaagctctaatttacaaaacactggcaaatgccctcagggtctgatgcctgctccagtgaatatttaccatgctcattctgaattctggcttccaacttcatttttggcctctggggattaagatactttaatttcttgccaagttagctactcattttatccagcattttaaaggtgctttttgggggagaattttcaggatacagagtctgtcatattgctggaagtaaacatcaggaaatttttaaatgaaaaaaaacacacgattcggaaaatggaaatagaaaagtttcataacattccaacatggttccaagtctacctaatgtttatttatatccgagttatgagtgttgtctctggagtcagacaacctcggtttggaatcaggctctgccgcttactactgctagaggtgagggtgggcaaactttttctgtgaagggctggatggtaagtacagttgtccctcagtacgcataggggattcattccaggacaccccatggataac

SEQ ID NO: 8516 - DNA, 561 bp, Homo sapiens
  MAP TO AL121852.2; EXPRESSED IN PLACENTA, SIGNAL = 2.7; EXPRESSED IN ADULT LIVER, SIGNAL = 3.4; EXPRESSED IN BONE MARROW, SIGNAL = 3.5; EXPRESSED IN FETAL LIVER, SIGNAL = 5.4; EXPRESSED IN HELA, SIGNAL = 4.5; EXPRESSED IN LUNG, SIGNAL = 4.6; EXPRESSED IN HEART, SIGNAL =   4; EXPRESSED IN BRAIN, SIGNAL = 4.2
acgtgccataggtcacacagcaataaacagtagagctgaaatctgaagttacatcgaagtatggtagaatgagcagcattggaacatacatctctaaaatgatgctacattatatattttttcaaatcatatattattttttctcttctcaatatttagatttctttttgatcacttacgcaagttgaaaatatttttgttataaaagcattaaatggccttcaatttttataaggaaaaaaacccaaatctctttatctaacagataatcctcctctttcctataattcttagaaagcaaatagaatcttaccataatgcttttaagtcgtttgacctcatcttcctgtgctctgtaagattctagttcttgctgaactgattctgcaacttctgggaatggactaaaacagtattgcacaagaactatgaggatgacattaaaagaccaatttttgtgtaaattctaaaatatatacaatgaacatttattattttaaatatacttatttggatttgaatatatgttatatataacaaaggcagaaaagattcagcaca

SEQ ID NO: 8517 - DNA, 546 bp, Homo sapiens
  MAP TO AL136980.2; EXPRESSED IN ADULT LIVER, SIGNAL = 3.2; EXPRESSED IN FETAL LIVER, SIGNAL = 3.5; EXPRESSED IN PLACENTA, SIGNAL = 2.5; EXPRESSED IN BONE MARROW, SIGNAL = 2.4; EXPRESSED IN HELA, SIGNAL = 3.5; EXPRESSED IN HEART, SIGNAL = 3.4; EXPRESSED IN LUNG, SIGNAL = 2.1; EXPRESSED IN BRAIN, SIGNAL = 2.5
ctcagacaaaggtggaagggctaatggcagcatgggtccaggaggggatgttgccactattggggatggggaaagctgtttcttctggcaaaaaaaaaggttcaccagagtttacaaactcagtgaatctagcttcatcagggtcctcccacacatcccctttccaagttgcagggtcccatttttttccaatcagtgccttcactttaacagtagacacctggtgaggctgtgcatgcaccttttgttgcagatcagccactcaaatgataagagtttgtctctgtgtttccacaattttagctctttctctataggagataagaccctcactcagggcaatcttagcagttttgaggctcagtatctgcttctgggagatggaatccctgagttcatcattttctttcatcaccttgttcactgaacttaggagcaaccaactagcttcattatgttccttgattctccacatatggtcaaaggtgttatgtatagagtcactaaactccttgcgtctcacaagcaatgaatcaggagtgccaa

SEQ ID NO: 8518 - DNA, 503 bp, Homo sapiens
  MAP TO AC018720.2; EXPRESSED IN BRAIN, SIGNAL = 3.8; EXPRESSED IN PLACENTA, SIGNAL = 4.6; EXPRESSED IN LUNG, SIGNAL = 7.2; EXPRESSED IN HEART, SIGNAL = 2.9; EXPRESSED IN HELA, SIGNAL =   3; EXPRESSED IN FETAL LIVER, SIGNAL = 3.4; EXPRESSED IN BONE MARROW, SIGNAL = 3.7; EXPRESSED IN ADULT LIVER, SIGNAL = 2.4
gaacaggattggaggtgctctctggggtgtcctcctaccaagcagcctgttgaaggcctcgtggtgctcagggagcacgagcgacactcgccgtcgcttcagcttcatcttgaggccacacagcatctccgccacccagatctcctcaggctcaggggcgagcaccttccgtggctcctcctccaacgactcctcagattcgtcccaccactccatcttccttttccagcaaaaggacctatgcggggggctgggatctaccccaggggctgagtaaagaaaccaggccatggtgtaatgcttctgcagttgatcacactagagcccaacccaaaaccccaaaccactctccatcctccccagcctcgcagactgctggcttctccaagccatctttccttctgtctgtctcctctgctgagctccatgtgctgctccttctcctccccattctcccgtttctctgtcctcagaacacttcctcatatccttccctggtccct

SEQ ID NO: 8519 - DNA, 561 bp, Homo sapiens
  MAP TO AC010369.3; EXPRESSED IN HELA, SIGNAL = 1.9; EXPRESSED IN HEART, SIGNAL = 1.9; EXPRESSED IN BRAIN, SIGNAL = 1.6; EXPRESSED IN FETAL LIVER, SIGNAL = 1.7
catgtcctgctgattggttcattttacagagcactgattggtccattttacagagtgctgattggtgtgtttttacagagtgctgattggtgtgtttttacaatcctttagctagacacagagcactggttggtacgtttacaatcctctagctagacagaaaagttctccaagacccccggaggtccagctggcttcacctctcaaaagtattagtaaaataagaacagatggtatggtaggctgagatggcttacccaagatgtccacttcctaactcctggaccctgtgaatatgttgatttacatagcaaaagagattttgaaggtgtaattcaggatcttgaggtagagagataatcctattatagattattttgatgggcctattggtgtaaccatgagtttctttgtaagacacaggcagagggagagggtgacagcactgaggaggagaggtaatatgaggaaggaagcagagatcaaagtgctgctgctgtgaactaagaaacccagaaattgcagcagcctccagatgctggaagaggcaaggaatgaacg

SEQ ID NO: 8520 - DNA, 501 bp, Homo sapiens
  MAP TO AC019219.2; EXPRESSED IN BRAIN, SIGNAL = 1.7; EXPRESSED IN PLACENTA, SIGNAL = 1.9; EXPRESSED IN FETAL LIVER, SIGNAL = 3.4; EXPRESSED IN ADULT LIVER, SIGNAL = 2.2; EXPRESSED IN BONE MARROW, SIGNAL = 1.5; EXPRESSED IN HEART, SIGNAL = 2.9; EXPRESSED IN HELA, SIGNAL = 3.2
tcaaaatcaaggcaggcttcagtcacagcaaaaaccgaggctcaggtggaagctgcaggtggcccctccctgagcaaccacctaactggttttgccaaataagatacactggctgaaagttagaactgacatgtgggtaaatgataaggtttattgagaagctgtctataaggaggagctcttcaagaaggagatctggaaatatgtcaatctaggtgatatggtttggctctgtgttcttacccaaatgtcatctcagatagtaatccccatgtatcaggggagagagcaggtaggaggtgattggatcctcggggaagtttcccccatgctgttcccgttatagtgagtgagttctcacgagatctgatagttttatgaggcagtttttcctgcttttgctcactctccctctcccctcccaccatgtaagacgtgcctgctttgccttccaccatgattgcaagtttcttgaggcctacccagtcatgtggaactgtg

SEQ ID NO: 8521 - DNA, 586 bp, Homo sapiens
  MAP TO AC022845.2; EXPRESSED IN ADULT LIVER, SIGNAL = 4.3; EXPRESSED IN HEART, SIGNAL =   5; EXPRESSED IN BRAIN, SIGNAL = 6.6; EXPRESSED IN PLACENTA, SIGNAL = 4.8; EXPRESSED IN FETAL LIVER, SIGNAL = 4.7; EXPRESSED IN BONE MARROW, SIGNAL = 3.6; EXPRESSED IN HELA, SIGNAL = 4.6; EXPRESSED IN LUNG, SIGNAL =   6
catgatgtgttcctaccccctaccccactgtctgccaaaccaccaccaccactatctctccacatcttttcctccattgtcaatctttaatagctgtgttgttatgtattgaaagcatgaatgttcactatcttactaaaatgctcccacaatcatgcctctttttgtagtaccatccttccagatacaagtaggaaaagtcgccagaagacaagagctgtagggaaaaccaccaaccctatcttcaaccacactatggtgtatgatgggttcaggcctgaagatctgatggaagcctgtgtagagcttactgtctgggaccattacaaattaaccaaccaatttttgggaggtcttcgtattggctttggaacaggtactgtttgctacatttttaattctccatgagccaaatttttctagagatactagaggtttgtttgttgctttgcttcttcccagtgaaaaccgagatatcctgaaaacagatatctcttaagtatagtgaaataaatgagtaaagaaatgtcaggttgtatgccaagggctccagatatgaggattaacagggtgaagtgtctctgca

SEQ ID NO: 8522 - DNA, 546 bp, Homo sapiens
  MAP TO AC016372.2; EXPRESSED IN BRAIN, SIGNAL = 3.2; EXPRESSED IN PLACENTA, SIGNAL = 4.7; EXPRESSED IN HELA, SIGNAL =   3; EXPRESSED IN FETAL LIVER, SIGNAL = 2.9; EXPRESSED IN ADULT LIVER, SIGNAL = 4.3; EXPRESSED IN BONE MARROW, SIGNAL = 3.4; EXPRESSED IN LUNG, SIGNAL = 4.4; EXPRESSED IN HEART, SIGNAL = 2.2
taacagaaagggcaaaaggcaacaatttctatgggggaaagatcaaaagactagagaaaattacttttcagaacaaagccttagtcactcaaaaagacaaaaagaagtggaatggaaaaggaagcagaagctaaaacttcagcaagtaaacatcagaaaaaatgtataaatattatatcagtgtaacaaatagcttctccatattgtttgctcccttgatagagagaagtgaggggcaaaaacttaccaaattcaataaaggaatagggtcgggacacagtgggcaccttctttccatgctgttcatcaaattctgagtgcaaatcttctaggtaggcaaaagccaacgtcttagggaaggcagcttcacataaaaccaaatcacacaccccctgctcaataatgtagctggtgagacataaaaagcaagacaaagttgtctgtaaagtaatagcactgacaatagtttaaagcagaatctctgtcccatgcaaacttttttaaaaatctagcctaaatactttgaggctggctaaacgagagtca

SEQ ID NO: 8523 - DNA, 557 bp, Homo sapiens
  MAP TO AC023490.4; EXPRESSED IN BRAIN, SIGNAL = 3.4; EXPRESSED IN HELA, SIGNAL =  11; EXPRESSED IN HEART, SIGNAL = 2.5; EXPRESSED IN PLACENTA, SIGNAL = 1.6; EXPRESSED IN LUNG, SIGNAL = 2.1; EXPRESSED IN FETAL LIVER, SIGNAL = 3.1; EXPRESSED IN BONE MARROW, SIGNAL = 2.4; EXPRESSED IN ADULT LIVER, SIGNAL = 2.1
caccccacaaacacactcacacatatacccacacacactgacacataatctctcacacacacacatgctcacacacacacgccttctccaggaggggctggctgccaaaggccacccagcttcctcccacgtctcactcaccgtacaatatttgagaagaccttggagtcagcagcaacagcggcgtgggcaaaggccgggggtcaaatggggcctggtgtcgagagaggaccacagccagcacaatgacagccagcgccagccccagccccagccccagcaggaccaggtcacccatggctccgtagtcctgggccatggctctgcggcccagaaggagaggggaggccggtgggcagatggagggacagatgggtgggcagatgaatggacaagaagatgcatagatagactcacaggtaattggacagatggacaaacaggtgggggctgaagacagacacgaagatggatcgacagacaggccagatagctagacaaagaggacagtaagagaaagatggtcagatagacaatgggacagagatgggcttaca

SEQ ID NO: 8524 - DNA, 586 bp, Homo sapiens
  MAP TO AL158075.2; EXPRESSED IN HELA, SIGNAL = 4.1; EXPRESSED IN BRAIN, SIGNAL = 4.4; EXPRESSED IN PLACENTA, SIGNAL = 3.1; EXPRESSED IN LUNG, SIGNAL =   4; EXPRESSED IN HEART, SIGNAL = 3.9; EXPRESSED IN FETAL LIVER, SIGNAL = 4.2; EXPRESSED IN BONE MARROW, SIGNAL = 3.2; EXPRESSED IN ADULT LIVER, SIGNAL = 3.8
cccaacaggtaatcaatgggtggaactgaatctggggtggtcccactgcagagaagatgaggggattcctaggaggcatccatccctgactccccagggtccccattcccctcctactcacctgccaccgcctcggtcacctcctgcttgcctgccttgtagtaggtgaagccccggatcacagcctgctgctgggccagggcgcggggcttggctgtgggctggaggaaactgcccttgccgctctcctttctcagcttctccacctgaagcagcttctccttgggaggttttgggaggcctctgtctgcaaagcttttctgcacactgccatacttgctgatgtccttgccttttcctctagctgtgtcctgggagggaagagaagtctcagacttgaaggacagtagaagaaatgttgtggggagtcctgggggctcagcatgtggggactggaggtggccatgttgccccaggccctatgtcccaagcactcacaaagtcacagctttcctttaccccaccatggtggctacatccatgactggtttgcctcagtttcctcacccagctctttagctccctt

SEQ ID NO: 8525 - DNA, 537 bp, Homo sapiens
  MAP TO AC023344.2; EXPRESSED IN BRAIN, SIGNAL = 1.8; EXPRESSED IN PLACENTA, SIGNAL = 2.2; EXPRESSED IN FETAL LIVER, SIGNAL = 1.9; EXPRESSED IN HELA, SIGNAL = 1.8; EXPRESSED IN BONE MARROW, SIGNAL = 1.7; EXPRESSED IN ADULT LIVER, SIGNAL = 2.1; EXPRESSED IN HEART, SIGNAL = 2.8
atcctgacacaaggagtgggagaatgcattcacttactgggagggcaaggggcgcttgatcctgaccacagccacctgcactccatcctgctcgggcctctcctcagcctctcctccatagccgctgtcctctgtgtctacgctgtcactcctccatgtgggctcctcctgctccatcactctccagcccttggttagctcagacaccaggttggcacattttctcctccgcgttggggagccgtggctgtggaggattctgtcaatgtcattctctggctgcccaggttcaagcacaccagcatccctctcgtacctgtggctgaggtggctcacgtcccctcctctctcataagtcttgctgaccaccgttttggacacctctttctttttgatgtgagaaacctcaggggctttctctgagctttgtccatctccatgtccttctggcaggcggggtggcgactttggggcactctgagctttctggtgtgaagtagggggtgtgattggtttaggagcttgaggtgagtcctg

SEQ ID NO: 8526 - DNA, 595 bp, Homo sapiens
  MAP TO AC005323.1; EXPRESSED IN BONE MARROW, SIGNAL = 7.6; EXPRESSED IN HEART, SIGNAL = 6.5
tccaggtggatctgggtatcctgtgaaacaaaccatcattgagacatcatgttctcagggttgcaggcaccccaatagtcctgggaccatctcttggacatatttaccttgaggatgccttgggtgttcctgtagttcctcagggcctcagcagccatgcggttggcatggttcagctggatttccatttcattgaggtctccctccatcttcttcttgagcctaatggcatcattcctactcctgatctcagcatccagcgtgctctgcatggactccacgattctaatgtggtttctcttcagctggtcaatttcctcatctttttcagcaattttcctatcaacctcagacttgacttggttcaactcaagctggatgcgcaggatctttccctcttcatgttcaagagatgccttaatgacagcaagaggtgacattagcaaggaaccaaaagctttatgaagtttttctgcacagcaataattttgtgctatgtgtctttttattcactctatgcagatgtacctaattattttccagatttttttataatgcacaattttacatgtacctctgcttcttctaaagcagc

SEQ ID NO: 8527 - DNA, 585 bp, Homo sapiens
  MAP TO AC021876.2; EXPRESSED IN PLACENTA, SIGNAL = 8.1; EXPRESSED IN HELA, SIGNAL = 3.8; EXPRESSED IN HEART, SIGNAL = 4.6; EXPRESSED IN BRAIN, SIGNAL =   3; EXPRESSED IN LUNG, SIGNAL =  10; EXPRESSED IN FETAL LIVER, SIGNAL = 3.3; EXPRESSED IN BONE MARROW, SIGNAL =   3; EXPRESSED IN ADULT LIVER, SIGNAL = 2.8
tggattgtaatgccagtcctcagatccttattaataagagttcaatgaattttgtactgaaatagaattaaacattgaaaacaaaggcctaaatagctttagtatgggatacacactttacttgcagtatgaaatgctcatatggccataaaacaaaactcacctctgtcaggaacagaaatcagggtgctcgtgagagccaggcttgtgtcatcccccagggtgaggttcacacagtacgtcccagacccattgaaggttcgtctcacagtcagcagacacatctcatccacatccacagggctgcagactgtgttctgggtgatctcgcaggtggggtcagaaatgatggtacagacctccgtgggaatgctgcgacaggggaggtgggcgagggcgcacagggcacagagaaggggagagaggaaggtcagatccattttacaaagggaaagtcattacatttctatgaaattgaattccacctcattgttactcaaactataagatgctgaattgttagtcttataatctgctcttaagcaagcctgtgcgctgagctatgcctttctctgcatcctcagg

SEQ ID NO: 8528 - DNA, 505 bp, Homo sapiens
  MAP TO AC022845.2; EXPRESSED IN BRAIN, SIGNAL = 2.6; EXPRESSED IN ADULT LIVER, SIGNAL = 2.7; EXPRESSED IN BONE MARROW, SIGNAL =   2; EXPRESSED IN FETAL LIVER, SIGNAL = 2.2; EXPRESSED IN HELA, SIGNAL = 2.4; EXPRESSED IN HEART, SIGNAL =   2; EXPRESSED IN PLACENTA, SIGNAL = 2.1
aacggctcttgctggtactggaagaaatcaccacttaacatttttattttatttaagatatagatttgttggaaattctggaagctgagaaagagtaccacttgggctttatctgcatcggggcccagaattctctcatacactgccccttccccatgcccatgaccccagtctggcatctgtactcatagcctgccattctgcccatgtgacaccccaggccatgaaagccacatgcagcagctctccccagaagctttgccttacctcgggcttgctggtgctgcatcctcttctggctcttctacaacgccagccagctctggaggaaggaaagcatctttgttgacattattcacccagctttcctttgccccattttctctgtctttactctgctcagctgaaacaggaaacagtaaagacaggaaggttatctctcacctccatgacctacaactctcttatcagctcttatcactgaagccttgaacctgaacctcag

SEQ ID NO: 8529 - DNA, 522 bp, Homo sapiens
  MAP TO AC008498.3; EXPRESSED IN PLACENTA, SIGNAL =   2; EXPRESSED IN BRAIN, SIGNAL =   2; EXPRESSED IN BONE MARROW, SIGNAL = 1.5; EXPRESSED IN HELA, SIGNAL = 2.2; EXPRESSED IN HEART, SIGNAL = 2.4; EXPRESSED IN LUNG, SIGNAL = 3.6; EXPRESSED IN ADULT LIVER, SIGNAL = 2.8; EXPRESSED IN FETAL LIVER, SIGNAL = 2.2
tttccaggacacttaggaacatctaacctctgttttacacaatctgttccagagaatagaaaaaaagaaggaaatgattcagctctttttaagaggtgaacataatctgataccaaaaatcagaagaggccagtacaagaaaaaggtaaggcccatctcatttataagaatatatgtaaaaatcattcattttttaaaaaccaggtattttccttattgtcttaaagctcacgctggatgtttgaaaaaaacaaaatttatattttatccagcactacggggtattttatagcaggagggttttttagctacattagattgccttgttgctggaaaaaaaatagtctttctaagaaactttaaaatttttcttaatttgttatgaacttattgaagtgtactgcattttttaaaagaatatttattaatattctacttgtacaaaagaaaaagagttgtagtttagtatcaaccctccaaggaaaggggaagagtaaaatgagggaggggagtgaagatagg

SEQ ID NO: 8530 - DNA, 587 bp, Homo sapiens
  MAP TO AC012627.4; EXPRESSED IN ADULT LIVER, SIGNAL = 1.8; EXPRESSED IN FETAL LIVER, SIGNAL = 2.5; EXPRESSED IN BRAIN, SIGNAL = 1.7; EXPRESSED IN PLACENTA, SIGNAL = 1.8; EXPRESSED IN HEART, SIGNAL = 2.8; EXPRESSED IN BONE MARROW, SIGNAL = 1.7; EXPRESSED IN HELA, SIGNAL = 2.5; EXPRESSED IN LUNG, SIGNAL =   2
ttatgccattctctgccctcagagtaatacattagagaatatttctgtgttaaaaattattggataatttcagttattcttataagtcaaccaattctctttactctctcatttcaccttaattcaaataataaattctgcccatggccacttggtaaatatacgtgtgtctgtgcgtatgtgtttttcaggagacgttgacatttagggatgtggccatagaattctctctggaggagtgggaatgcctgaaccctgctcagcagaatttatatatgaatgtgatgttagagaactacaaaaacctggtcttcttgggtgagaataactttaatacataagtcttaatataccctaaacgttttatgtctctttttttgtagaattttctttggtaatttatgctttgtataaatgagtttctgatcccagttttcaagaaaatcttgatgatttgtctctgtagaaaagaatttcttcaacatgtttcatcctgacctgaactttccacattcctgagctgatctgcatccttcactctagattagtggtaattccagaaatttggtggcataaaatattgcccg

SEQ ID NO: 8531 - DNA, 600 bp, Homo sapiens
  MAP TO AC023404.2; EXPRESSED IN ADULT LIVER, SIGNAL = 2.1; EXPRESSED IN FETAL LIVER, SIGNAL = 2.3; EXPRESSED IN BRAIN, SIGNAL = 2.8; EXPRESSED IN PLACENTA, SIGNAL = 1.7; EXPRESSED IN HEART, SIGNAL =   2; EXPRESSED IN BONE MARROW, SIGNAL =   2; EXPRESSED IN HELA, SIGNAL = 2.4; EXPRESSED IN LUNG, SIGNAL = 1.9
acattcccagggagaaaagcctgcaaagagaggcccagagcccaaccaacaaacaaaatccagctaattagacaggaagctaagaacacaagaggaagaaaaaggatataaataggaaagaaagaaaatgataatttattaagcccctagcgtgcaccaaagacagactattcattattattgtctggttttattaatgaaaagttgggaacttgggagtggagagatttttcccaaggtcatgaagctaagatatggcaaagccaagatctaagatgcctaggcgagcctagtctcaagcccaggtatctccctggaggacagctgtgcctctccacagcttagcaccaatgacttccaaatccaaactcagctccaactcacagacgaacctggaaacaaccaggcctggcagcatagctaggtgcataagcaccttccagagcctcagtaccctcctcagcaccagcatcttccatagcaccaacaaccttcagagcaccagtaacctttagagcaccagcactctccttggcaccagctgcctccatagcaccaggatcaccatgatacaagcaccctccacagcagcaagatcac

SEQ ID NO: 8532 - DNA, 518 bp, Homo sapiens
  MAP TO AC011447.2; EXPRESSED IN PLACENTA, SIGNAL = 4.8; EXPRESSED IN BRAIN, SIGNAL = 4.9; EXPRESSED IN HELA, SIGNAL = 8.1; EXPRESSED IN HEART, SIGNAL = 3.4; EXPRESSED IN ADULT LIVER, SIGNAL = 3.5; EXPRESSED IN BONE MARROW, SIGNAL =   3; EXPRESSED IN FETAL LIVER, SIGNAL = 3.7; EXPRESSED IN LUNG, SIGNAL = 3.8
gagcctgaaaaactgcttggctgatttgactaataaaggctcatctgttatcagactgtatagaggcgggaaggctaaactgaggaattatatctaacagaatggaagaaatgactgtggtggccttctcagaccctgtaggaaaggcctgtacctatccagtgaaagtgtctacctagactaagaggtgttttagttacctgactcaggtcatgttgagtaaagctaatttgccagtcctgggtggggcaaatcctcgagcttgatgtgtagggaagggagggggcctgaataatccctgaggagtagtagaatagcagatggaacactgagaagttatttccttgaggatagatttccacaatgggaaggaaatgagaggttctaagaggcaagctagtggcttgtactatagcatcacctgcctttgctggtgtgtggcgattaggcctggtgtaaccgccatcaataaatcaagtgtgatcagggtgaggaacaggaaagaaggaagtttgggg

SEQ ID NO: 8533 - DNA, 558 bp, Homo sapiens
  MAP TO AC007500.2; EXPRESSED IN ADULT LIVER, SIGNAL = 2.9; EXPRESSED IN FETAL LIVER, SIGNAL = 2.6; EXPRESSED IN PLACENTA, SIGNAL = 3.1; EXPRESSED IN BONE MARROW, SIGNAL = 2.6; EXPRESSED IN HELA, SIGNAL = 3.3; EXPRESSED IN LUNG, SIGNAL = 6.3; EXPRESSED IN BRAIN, SIGNAL = 2.8; EXPRESSED IN HEART, SIGNAL = 2.4
ggttttctgcctccttcctcggctgctccacatttgggcctctgcctgattcacgatcaggacatctgcatttgtgtttacaaccagcaaaggtcactcccagattgtgggctgttggcaggtttataaacacaggctggccaatagatagacacgtctccccccacagaggggatgtaaatttttctttgtaaatggagtcaagctgtttgttgcaatcattcacgtgggaacgcatagccgtcaggggagggaggctgctccactccccgctgactcaccccagctctgaacagtggaattccaacttgtgctccacgtgggaccttgcggtcttgatgagccagaaacctgacagccatcttagacttctttcctcaaacccagtcccactgattcttctctggagtatttctcccctacacttcatctccgtagccatcaccctgtccaggccaccagtgtctcttgccgacatgactgcatcactctcctaactagcttccctgccttaaatttgtctccccaatttgatcatgtcactccctgcttcaaacc

SEQ ID NO: 8534 - DNA, 584 bp, Homo sapiens
  MAP TO AC011453.2; EXPRESSED IN BRAIN, SIGNAL = 2.1; EXPRESSED IN PLACENTA, SIGNAL =   8; EXPRESSED IN HEART, SIGNAL = 2.4; EXPRESSED IN BONE MARROW, SIGNAL = 1.5; EXPRESSED IN FETAL LIVER, SIGNAL = 2.3; EXPRESSED IN HELA, SIGNAL = 2.3; EXPRESSED IN ADULT LIVER, SIGNAL = 2.1
accaaatgtcttggctctgggcgggagtctttgtcatcagattccatgactgaaagacagccaggagcagagcgaaaatcccaggggttctctctaccagaagacacagactccgtccagatcaaacccaaattgtcgccagttagcgatgcctggctctccgttccccttggctcatcctgcctgcaccggtgcaatgccctggtgttcccagtccagaggccttcactccttccagtaccccaggagggtcaccttgcagttctcagggaggaagatgtggtcttccacccttgtgagcttcccaggcatcagggtctgcccgcccgactccattcccaaaggatgttccgcccagttctcccagcctcctgcttccatccagggaccacccttcagtggtaagattcacactgcagacaaccaggaccaacccattatcctcaattacagtggtcacaacaggccacctattcaaaactgatctatgtgacatgcccacaagaggcagatccagagctagagagatgcaaagtgtttgtcacggtctgggtggaagagtggggtgggaactgactgcaaat

SEQ ID NO: 8535 - DNA, 561 bp, Homo sapiens
  MAP TO AC016289.3; EXPRESSED IN BRAIN, SIGNAL = 6.3; EXPRESSED IN PLACENTA, SIGNAL = 6.6; EXPRESSED IN ADULT LIVER, SIGNAL = 2.2; EXPRESSED IN FETAL LIVER, SIGNAL =  11; EXPRESSED IN HELA, SIGNAL =  11; EXPRESSED IN BONE MARROW, SIGNAL =  13; EXPRESSED IN HEART, SIGNAL = 9.7; EXPRESSED IN LUNG, SIGNAL =  24
ttctcgtctcctcatgggtccctttagtttattttgctattatgtttttcaactccaggattttcattttattccttttttctttttgtaaattctatctctttatgatattctctgtttgatgtaacattgtcatcatacctttcttctttttttatggtgaaaagatatatatatatatttagccagctagactcagtttagatgatctcgattttgttggcaacatccaaagcattgtaatcaggagccagtcaaacatatgccttcttctctccatcaggccgaatcagggtgttgaccttggccacattggtgtcatagagcttcttcacagcctgtttaatctggtgcttgttggctttaacatccacaatgaacacaagtgtattgttgtcttctatcttcttcatggcagactcagtggtcagcggaaacttgatgatagcatagtggtcaagtttgtttctcctgggggcgctcttccgaggatatttgggctgcctccggagtcgcagtgtcttgggccgccggaaggtgggtgacgtgcggatcttcttt

SEQ ID NO: 8536 - DNA, 523 bp, Homo sapiens
  MAP TO AL158058.1; EXPRESSED IN PLACENTA, SIGNAL = 3.1; EXPRESSED IN FETAL LIVER, SIGNAL = 6.1; EXPRESSED IN HELA, SIGNAL = 6.1; EXPRESSED IN HEART, SIGNAL = 5.3; EXPRESSED IN BRAIN, SIGNAL = 3.1; EXPRESSED IN LUNG, SIGNAL = 2.6; EXPRESSED IN BONE MARROW, SIGNAL = 3.1; EXPRESSED IN ADULT LIVER, SIGNAL = 3.3
ttggctccccgttacttatgcaaatttctacagctggcttgaatttcttctcagaaaataggtttttattttctattgcatcatcagtcagcaaattttctgaacttttatgctctgtttcccttttaaaacctaatgcttttaacagtacccaagtcacctcttaaatgcttggctgcttagaaatttctttcgccaaataccctaaatcatctccctcaaggttccacaaatctctagagcaggagaaaatgttgccagtctctttgctgaaacatagcaagagtcacctttattccagttcccaacaagttcctcatctccatccgagaccacgtcagcctggactttattgtccatatcactatcagcattttgatcaaagccattcgacaagtctctaggaagttccaaactttcccacattttcctgtcttcttctgagccctccaaaccattccagcctctgcctgtacccagttccatagttgcttccacattttcagcaccaccccactttact

SEQ ID NO: 8537 - DNA, 575 bp, Homo sapiens
  MAP TO AC010369.3; EXPRESSED IN BRAIN, SIGNAL = 1.3; EXPRESSED IN HELA, SIGNAL = 1.8; EXPRESSED IN BONE MARROW, SIGNAL = 1.8; EXPRESSED IN HEART, SIGNAL =   2
agagtgtgtttgaccgaggctgacaatgacaatagaaacttttaaagttggaagtgatctggaatccctttaagctaagccactcatttattgataaatgatggatccagaaaggagaagtcatctgtccaaggtcactgagctgctcaccggcagatcctgcttctggatccagagacagaccctcccatttttctcatagaactctgtggcacttgaaaaaggtcctcggggaagtaaattctttgagacaaactgtttctggctgctaataactgactaggaaagaaaaaataacgtaggcagcattagtattttcctgatggatttagttacagagattaaagtgtcagcttggtaaagttccagcatgtctcgggtttgacactagttttagagtgaaggtaaagacgtccagagcagactttttgacatgttggggagcagcgtcccaggggtctctccctcagaacctaggctcagtttgtacggtgggtctggttggctctgggaggcccacagctagaaagaataacagggttgtgccgtccaggcctgagacctgttggcactga

SEQ ID NO: 8538 - DNA, 583 bp, Homo sapiens
  MAP TO AL157951.1; EXPRESSED IN HEART, SIGNAL = 2.4; EXPRESSED IN BRAIN, SIGNAL = 2.5; EXPRESSED IN ADULT LIVER, SIGNAL = 1.6; EXPRESSED IN BONE MARROW, SIGNAL = 5.7; EXPRESSED IN FETAL LIVER, SIGNAL = 1.8; EXPRESSED IN HELA, SIGNAL = 2.6; EXPRESSED IN LUNG, SIGNAL =   3; EXPRESSED IN PLACENTA, SIGNAL = 1.5
ttgtcctccaacctctgaccctccttctcgcaccaggcagatctgcaaggagtttgcagacttgatggctcaggaccgctcaccgctgggcaacagccgcccagcactcatcctggagcccggagtacagagctgcttgacacactttagcctcatcacccatggcttcggtgggcctgccatctgtgctgccctcactgccttccagaactatttgctggagtcactcaaggggctggacaagatgtttctaagcagtgtgggcagtgggcatggtgaaaccaaggcttcggagaaggatgccaagcatcggaaataactgcttctcccaccccatccctaaggggctcccaggccctgaaatagggacttagctcttgggggtgggcctggaaggactgaaaggtgggattagagtcaggccagaaagagaacattcatccagagatcccagagttggggatctggcttggagtaagggagggtggcctctctgtggtggtgtgttggtaagttaagggcccaggtatttgtctcatgtgtgcaattttctgacctttgatggttgagaagggtttggaca

SEQ ID NO: 8539 - DNA, 506 bp, Homo sapiens
  MAP TO AC002041.1; EXPRESSED IN BRAIN, SIGNAL = 3.2; EXPRESSED IN PLACENTA, SIGNAL = 2.6; EXPRESSED IN HEART, SIGNAL = 3.2; EXPRESSED IN ADULT LIVER, SIGNAL = 2.7; EXPRESSED IN BONE MARROW, SIGNAL = 2.2; EXPRESSED IN HELA, SIGNAL = 3.1; EXPRESSED IN LUNG, SIGNAL = 2.8; EXPRESSED IN FETAL LIVER, SIGNAL = 3.4
catcctttcctgtctgctcctcccggggtctactttcctctcttccctctgcctctggctccctggctggctcctcctcactttctttcctgctcactccagaggtctcaggggctcagcccaccaccagtggtccccaagttgcagctgcctctcccatgcctatcccatgaggaccctcatctgcctgagcacatctctgggctcctctgaaaccagaagccccatcttcctgacagacccctccacaactgggcagagttcacctgccactgttccaggccagaatgacggaattgttccgctgctgctgtttcacacccacagccaatcccccacaaatgctgttggcatcacttttacaaccctcatggccaccctgccctcctgctgggctgtagcttttgtcccctccatccatctgccccttggcagccacctgagcccccaagcactgctgtgctcacacctacagtagccacctcacccagagccaacatcaaagt

SEQ ID NO: 8540 - DNA, 562 bp, Homo sapiens
  MAP TO AC010457.3; EXPRESSED IN BRAIN, SIGNAL = 1.8; EXPRESSED IN PLACENTA, SIGNAL = 2.4; EXPRESSED IN HELA, SIGNAL =   2; EXPRESSED IN HEART, SIGNAL = 2.2; EXPRESSED IN ADULT LIVER, SIGNAL =   2; EXPRESSED IN BONE MARROW, SIGNAL = 1.6; EXPRESSED IN FETAL LIVER, SIGNAL = 1.8; EXPRESSED IN LUNG, SIGNAL = 2.2
ttttcctggtggatctgtccaaagcataaaagcatcgaagggagcccttcctgccccctcagccatgagtcagcagttcagaaaatgaaggaatggaatatctggagggcttcctgatttacaggtatttgatccagcaaagtacatagcctcggcacagcaaatggaagactaacaagaaaagcactggcctaattttgctttggtcgagggtcggtcacttacccacatacagagctccattgatgttaagctgccgcatcatgcctggggatttgcctgttctggctccatagtcatccacggttatctttcctgactggccatccctgcaaaacaccaaaacaaaaaagaacaaaaagcctggcatttttggagttcattcaatcattcattcatttcaatacaaatgtattaaaggacacactatgtgccaggtactgtgctaaatgatggggctgcagaaatcaaagcaaaaagcaaatgtgtggccctcaggagcctgtggtctactgaggaagacaaaaagtcaaactgtgaatgacaacacagtgccagcact

SEQ ID NO: 8541 - DNA, 512 bp, Homo sapiens
  MAP TO AC002039.1; EXPRESSED IN BONE MARROW, SIGNAL = 8.3; EXPRESSED IN FETAL LIVER, SIGNAL =  14; EXPRESSED IN LUNG, SIGNAL = 5.1; EXPRESSED IN BRAIN, SIGNAL =  10; EXPRESSED IN ADULT LIVER, SIGNAL =  10; EXPRESSED IN HELA, SIGNAL =  16; EXPRESSED IN HEART, SIGNAL =  13; EXPRESSED IN PLACENTA, SIGNAL = 8.1
gctctcactaggttgcccaggctggtcttgaactcctgagctcaagcaatcctcccaccttgggctccctaagtgttgggattacaggcaagagtcaccacgcccagccaggatcacagacgtttaaattacactccttctgctgtgccttacagcagtagaaggggtgaaatttaaacgtctgtgatcctggggttgttgaagatgccacccatctacatattctttcagatgcacaatatttcactgtgtgaatgaaacagcagcccttcttacgtgtgctttttggaatttgaagattttgtaagataagatgaatgcattggaacaagtgatcctcaattctgtgcagtctgtgcctccggagactggcggctgcccctccctgtctagtcttgcaagagaggcagctggcaagaggacagaagccggcagctgctgcgttttcatcctgtttctgctcttggagctgagggggagaggtggctagcagccacccagtgatcaaactt

SEQ ID NO: 8542 - DNA, 534 bp, Homo sapiens
  MAP TO AC017004.2; EXPRESSED IN ADULT LIVER, SIGNAL = 2.6; EXPRESSED IN HEART, SIGNAL = 2.4; EXPRESSED IN PLACENTA, SIGNAL = 2.6; EXPRESSED IN BRAIN, SIGNAL = 2.3; EXPRESSED IN HELA, SIGNAL = 2.6; EXPRESSED IN BONE MARROW, SIGNAL = 1.9; EXPRESSED IN FETAL LIVER, SIGNAL = 2.3; EXPRESSED IN LUNG, SIGNAL = 3.2
tcgcaggctaatcacaaatgctacaccaattattgttctgcaagtaacatattaccttgagtgattccaaagttcttgtgtttattggttgggattttcccaaagcaatgaggagttaaggaaaagattccagtgcagaggactctagggcagcatctggaagatcagaccaaaatccctgatgctggggaggaatcaggtgttacagctcaggggccatgcaaagagacctgcaatggccattttcttcacctggctgcctcctcttctctatagggctctgagcctgatggagatggatgggagtggagtagcactgatgtgatgaattactttgcatgggagaaaaatccctccaccatcttaaaccctggccactgtgggagcctgtcaagaagcacaggtaagaaacagaagagctgcctcttcccagcactttccactcctcatccccaatttcctgaccttcaggaaatccttttcagctaggtaatgcagtgtttatgtgccttctcccgtctcctctcatctctg

SEQ ID NO: 8543 - DNA, 568 bp, Homo sapiens
  MAP TO AL133391.5; EXPRESSED IN FETAL LIVER, SIGNAL = 2.7; EXPRESSED IN PLACENTA, SIGNAL = 1.9; EXPRESSED IN BRAIN, SIGNAL =   2; EXPRESSED IN HEART, SIGNAL = 2.5; EXPRESSED IN ADULT LIVER, SIGNAL = 2.6; EXPRESSED IN BONE MARROW, SIGNAL = 2.2; EXPRESSED IN HELA, SIGNAL =   3
tacctgagctccacctaccgtgctccttgaggttgttttaaatcagggagcccagctggcccagaacccagatggctttccactccccatgtggcagccatcagctctaagaccccagctcagtgaccaggccatcaaagaggctgccaagatcagacaggctgtattctctcacagctttttacaggaagcaaaggagctaaagggaataatgacagaggtagcctgcaaacgtaaccagaggtatgtattttaaaggatgaataaaaacaaatgactatgttgtagaaatctatttcagcatgtatgtgcatcagagtagaaatcatttattttcctggtctctcatgagagttgatattacagtgcctacatagaataactagccattataaatgtagagtgctttaggactgtcaaagcaatcacaccgaaattaccccagtgatatctaatctccatcatgcactcaatatgtgcatggacctatactgataagatggaattaatatctcaaaggcaagaattttttttttccctgatagagtcaggtgttttgcagtgatgg

SEQ ID NO: 8544 - DNA, 554 bp, Homo sapiens
  MAP TO AC011366.3; EXPRESSED IN BRAIN, SIGNAL = 2.5; EXPRESSED IN HELA, SIGNAL = 2.9; EXPRESSED IN HEART, SIGNAL = 2.5; EXPRESSED IN ADULT LIVER, SIGNAL = 2.4; EXPRESSED IN FETAL LIVER, SIGNAL = 2.5; EXPRESSED IN PLACENTA, SIGNAL = 2.1; EXPRESSED IN LUNG, SIGNAL = 2.4; EXPRESSED IN BONE MARROW, SIGNAL = 1.7
ggactgatgaatttgccctgacggggaggaaggataacaattacagaaatagttactgtttcaaagctaccaggagagaagaacaggaaagtagtttttttcctcttgttatcattacatagctatgcactgtgttttgatgaagcaatgtactatacagggcaattgggaggaactggacaaatatatgaaaatgatttctgttttaaaaccagagaacttatggtagaagaaagtgagtatacgcagttaatagagcttttttcttttatttttaaattatcccatagttagtattgagaactaacacaagtggggaaaactgagtatacgagtaaatattactctcaaaaatgggtccaaatagccaaaaggatacaaaatgtcccaaaactgtaatctaagtcacttacatgatttaatccaaattttcataaaaggctgttaggctattacattgatttatccatatgtaaatactggtattatgtggattttcttaataactaataagaattcatttctgcaccctctccccacttccacaaacactt

SEQ ID NO: 8545 - DNA, 571 bp, Homo sapiens
  MAP TO AC000134.14; EXPRESSED IN BRAIN, SIGNAL = 2.8; EXPRESSED IN ADULT LIVER, SIGNAL = 2.9; EXPRESSED IN PLACENTA, SIGNAL =   3; EXPRESSED IN LUNG, SIGNAL = 3.1; EXPRESSED IN HEART, SIGNAL = 3.3; EXPRESSED IN HELA, SIGNAL = 3.5; EXPRESSED IN FETAL LIVER, SIGNAL =   4; EXPRESSED IN BONE MARROW, SIGNAL = 2.9
atctgcagaggaggcaagaggctggcgagggagtgcaggggtggtgggtggcagggctgtgggactgcagggcttggggcaaacacttacatgcaccttgggagttggggggagcccgtggcaggatgacctctgggagggaggaaaggagtcagggctgatatgacagctgtagccgcccgtctccccaccccactgtagcaccctcttacctcaggatcctcccgctgcttcatggtggcccaggccgtgggcagcagtggggagctgttggggcctgaaggaggtgggggcagggttcctgcaggcacaggcgtgctgtaatttcctgctgtagcccccaccctggggctgcctcctggcctcccaagcctgagactcacctgggggactggacagaggctcctctgctggagggtcagtggggagtggccctaggaacggggcccgcttgatggttcccatggtatcgtctggggagtccagctcctggtaggaggggcagggcccagcccggccgttaccaggttgccctgtaaccacatcccactccaatcgtaccctctgcagt

SEQ ID NO: 8546 - DNA, 596 bp, Homo sapiens
  MAP TO AC018801.2; EXPRESSED IN BRAIN, SIGNAL = 6.2; EXPRESSED IN HELA, SIGNAL = 4.6; EXPRESSED IN ADULT LIVER, SIGNAL = 5.1; EXPRESSED IN PLACENTA, SIGNAL = 4.8; EXPRESSED IN LUNG, SIGNAL = 7.3; EXPRESSED IN HEART, SIGNAL = 4.5; EXPRESSED IN FETAL LIVER, SIGNAL = 5.4; EXPRESSED IN BONE MARROW, SIGNAL = 5.2
gccactgctacggagaaatcagaatggatgaatcatataaataaatgtgttactgatttactctccaaaagtgggaagacacccagtaatgaacatgctgctgtctgggttcctgactctgaggcaactgtatgtatgcgttgtcagaaagcaaaattcacacctgttaatcgtcgccaccattgccgcaaatgtggttttgttgtctgtgggccctgctctgaaaagagatttcttcttcccagccagtcctctaagcctgtgcggatttgtgacttctgctatgacctgctttctgctggggacatggccacatgccagcctgctagatcagactcttacagccagtcattgaagtctcctttaaatgatatgtctgatgatgatgacgatgatgatagcagtgactaaggacacatttgggagtatttaatcaggtgtggctatctgagaaatcaactttgggggaaatgtaagattctgagctctctctctgttttgttctagccatgaatttgcctgagaaacttgtaacctatgtgcctcaatatattccatagaaagtaggtccccctgccttctcccactcctcacac

SEQ ID NO: 8547 - DNA, 583 bp, Homo sapiens
  MAP TO AL138828.4; EXPRESSED IN FETAL LIVER, SIGNAL = 3.9; EXPRESSED IN ADULT LIVER, SIGNAL = 3.2; EXPRESSED IN HEART, SIGNAL = 3.1; EXPRESSED IN BRAIN, SIGNAL = 3.1; EXPRESSED IN PLACENTA, SIGNAL = 2.5; EXPRESSED IN LUNG, SIGNAL = 2.2; EXPRESSED IN HELA, SIGNAL = 3.7; EXPRESSED IN BONE MARROW, SIGNAL = 2.7
tacaggtttttggcttgcaggaaatgtttcttcctttgttgttctaccccatacctgtaagagtacctaggattattttgtacttggtacttaaacaatttatgttgactgacttacctcaaaattaggtcttcgacaaggttccagtggaagcattttcccaataatacgaacaatactcctagttgatccatagtctttattttcccaaatcagcaaaacctattttaaacataaagtatgaattaaaatgcactctgattaagcatatttatataagtatgaaaaaaggagatgtaaaaaagacaaaaaagacgcagtggcattttttttttaatacagggagtcctgtaaaataacatttatttttaaaaagaaatatagaatggcagagcctttcttcaaagaatagaactttgtgagtatttgtcttaaaaagagatggtagtaaacatatatacattccaggaagatcttttaaaaagcacaattcattttgttctatttctgataatgtccaataccttgggagaaactttgttcaaaaaaattgcatcccctcccccagctacaaatcccatct

SEQ ID NO: 8548 - DNA, 512 bp, Homo sapiens
  MAP TO AC006143.1; EXPRESSED IN BRAIN, SIGNAL = 2.1; EXPRESSED IN PLACENTA, SIGNAL = 1.8; EXPRESSED IN BONE MARROW, SIGNAL = 1.9; EXPRESSED IN HELA, SIGNAL = 2.8; EXPRESSED IN ADULT LIVER, SIGNAL = 2.1; EXPRESSED IN HEART, SIGNAL = 2.8; EXPRESSED IN FETAL LIVER, SIGNAL = 3.1
actcccgatcgttgtacaggggaagaccttcggcaatcttccctgctggaaattctaggacctctcagacattttctcatgtcttacttccccttgcatctgcccctggagctgcagctcgaatgtgctccttgcctctgttctcagcagtttccaaattggtatcagtcctatcagcagtctatgtcaagtggaacagaaaacaatccctcaggtagcacccacagaagccagtacattgttgggtctatggtccactctcttgtttttgtcctgagggagaaacctcattatggcagatttcttcccagttgctccacattgtgctatatgggagacagacataaaaggttgtgccaaatgttacaaagttgcttattccttttgttggaatccattcttgtttttacagttgcctgagtactttagcttctcaccaggtctctacagttctcacagaggtattccggcacatatattgttgttaacccagtgtctctgtgaggggagga

SEQ ID NO: 8549 - DNA, 565 bp, Homo sapiens
  MAP TO AC015971.2; EXPRESSED IN BONE MARROW, SIGNAL = 2.5; EXPRESSED IN HEART, SIGNAL = 4.5; EXPRESSED IN LUNG, SIGNAL = 3.8; EXPRESSED IN PLACENTA, SIGNAL =   3; EXPRESSED IN BRAIN, SIGNAL =   3; EXPRESSED IN HELA, SIGNAL = 4.2; EXPRESSED IN ADULT LIVER, SIGNAL = 2.9; EXPRESSED IN FETAL LIVER, SIGNAL = 5.2
aacacattggccagaagaggtggctcacctgtaattgtagcattttgggaagccaaggcaggaggatcacttgagcccaggagttccagaccatcctgggcagcatagtgagaccctgtctctacaaaaaaatacaaaaaataaaaataaactgggcatggtgggcaccctcctgtagttccagctactcaggaggctgaggcggaaggattgcttgagcccaggagtttgaggctgctgcagtgagatgtgatcccgccacggtactgcagcctgggtgagagagtgagaccctgtctcaacaaaacaaaacaaaacaaaagaccacatcccctgcttttccctaccatctctgattcccattcctcagagacactgccttcaattattttagcaattttttcatgtttacctctatattttcaaagaataggtttttactgcttttcttgctttttccattttatacattatctattgatttcttactatggacgatgaggaattctgtcttttatgccctgtattcatacaccatttccctcccctcattcccaacatgatt

SEQ ID NO: 8550 - DNA, 545 bp, Homo sapiens
  MAP TO AC006531.1; EXPRESSED IN BRAIN, SIGNAL = 1.4; EXPRESSED IN ADULT LIVER, SIGNAL = 2.9; EXPRESSED IN HEART, SIGNAL = 2.1; EXPRESSED IN FETAL LIVER, SIGNAL = 1.6
tgctatttcaaagggttgggcacgttcaggtgacagcattcctgccactcacttgattttgacgaacttccgacatggcacggtgttcctcacacacgtctcggtcagggggtctatgtcttccacgatgacgaatggggcctcctccagggtgacgatgctgagatggttgtcatccggctcacagtcggagaaggacttgtacctgggccacacggcgtgcctcaggctcagcgtatggttctcccacttgcccacctgcagcacaaacacaaagacacagctgtgctttcttccgccgctgatttctggagaggcaaatcctttccctgccagagacatccatccgtctcaagggcctttctgccacatatctcaacatatgcatctacttctgtgctaagacaaacgggcataaagagaaaacagaatatagggcagttctccatcccagccgccctcatccccagaggaatcaacctgcatctctggaggcagtgcccaggcactgatacctttacagccccgcaggtggttctaatgtt

SEQ ID NO: 8551 - DNA, 552 bp, Homo sapiens
  MAP TO AL135792.3; EXPRESSED IN ADULT LIVER, SIGNAL = 1.7; EXPRESSED IN FETAL LIVER, SIGNAL = 1.7; EXPRESSED IN HEART, SIGNAL = 1.7; EXPRESSED IN BRAIN, SIGNAL = 1.5; EXPRESSED IN HELA, SIGNAL = 1.7
aatagcaggaatgaaaaggggaatatcactgcagattctatggacattaagagaataataaagaaattttaccaaatactgtgcacaaattttttgaaaacttagataaaatataaaaatttcttttaaaaatttatcaaaatagacacaagaagaaatagaaaatctaatatttttattcttcattctgttaatgaatcacatagtatcatgttaattgatttgcatgtattgaatcattcttgcattccagggataaattccacttggtcgtggtgtaggatctttttaaggtactgttgaatttggtttgctaatattttgttggggatttttacattcatattcatcagggatactgacctgcagttttcttgcggtctcattctctgactttggtatcagggtgatgctggccccataaaatgagtttggaagtatcctctactgttttattttctggaagagattaagaagaatttgtatcaatttttagatgtttggtagaattcatctgttaagccatctggtcctgggcttgtatttcttggg

SEQ ID NO: 8552 - DNA, 520 bp, Homo sapiens
  MAP TO AL078594.36; EXPRESSED IN BRAIN, SIGNAL = 1.7; EXPRESSED IN HELA, SIGNAL = 2.1; EXPRESSED IN ADULT LIVER, SIGNAL = 1.8; EXPRESSED IN BONE MARROW, SIGNAL = 2.7; EXPRESSED IN FETAL LIVER, SIGNAL = 2.1; EXPRESSED IN HEART, SIGNAL = 2.1; EXPRESSED IN PLACENTA, SIGNAL = 1.7
aaatggtcaccagaaggaggacaatcacaagtaagtcactcaggcaaaaactgagagttcacaaaggcaaaggattataaaaatattaatgaactttgaaaaactcaagtctgcatcatgtccttaagaatagaaacagattataaagaaaaggtataattagataaaaatataactatgaagcatgcatgaagtatgactgactctagttgaaatccacacctctcaagaaagaggatgttatggactgaatggttgtattcctcctaaatttgtatgctgaagctttaacccccaatgtgatggtatttggatatggagactttgggaggaaattaggtttagatgaagctgagtctcccatgataagactagtgtacttccaagaagaagaagagaccggagctctctctgccaagtgaagacaccatgagaagatagtttgtcttcaagtcaggaagagagctctggccaggaaccaaatctgccaggaccttgatcttagacttcccagcctcca

SEQ ID NO: 8553 - DNA, 525 bp, Homo sapiens
  MAP TO AL137852.2; EXPRESSED IN BRAIN, SIGNAL = 1.6; EXPRESSED IN PLACENTA, SIGNAL = 4.7; EXPRESSED IN HEART, SIGNAL = 2.2; EXPRESSED IN ADULT LIVER, SIGNAL = 1.7; EXPRESSED IN BONE MARROW, SIGNAL = 3.5; EXPRESSED IN HELA, SIGNAL = 2.3; EXPRESSED IN LUNG, SIGNAL = 5.7; EXPRESSED IN FETAL LIVER, SIGNAL = 3.8
gctatgtttgtggcatcctgtaacggtacagtctaattagagatcaggcagtatgtagtattttattgtaattattttgtcttttaatgtgtttagcccaaagcagtgtccacaccagcaccagctacaactcagcagtcagctcctgccagcactacagcagttacttcctccaccaccacaactgtggctcaggctccaacccctgtccctgccttggcccccacttccacacctgcatccatcactccagcatcagcgacagcatcttctgaacctgcacctgctagtgcagctaaacaagagaagcctgcagaaaagccagcagagacaccagtggctactagcccaacagcaactgacaggtaggaactggattctaggacattctatctcaaaatccgtgtttaacaggaacttcatgcatttattttgattattgttttgatcaaaccgactatatctattacgttaagctttttttaaatgtttgactaaaacatatgctgcgtctgttttgatagc

SEQ ID NO: 8554 - DNA, 576 bp, Homo sapiens
  MAP TO AL121716.16; EXPRESSED IN PLACENTA, SIGNAL = 3.3; EXPRESSED IN HEART, SIGNAL = 3.5; EXPRESSED IN ADULT LIVER, SIGNAL = 3.2; EXPRESSED IN BRAIN, SIGNAL =   4; EXPRESSED IN LUNG, SIGNAL = 4.1; EXPRESSED IN HELA, SIGNAL = 3.5; EXPRESSED IN FETAL LIVER, SIGNAL = 3.3; EXPRESSED IN BONE MARROW, SIGNAL = 2.7
ctagtgcatgaggaggggagaaaataagcccatggagaaaatctcacatgcagttctttcaacaattactgttgtattcatgtatcactttattttaataattctaaataaagctgtctacttctatgtgttattcaccattgctgcaggcaaaattttgcatgaaatgcttgtcactctcctctcctggataacagggagacttattccaataacgttctgcttgtacacgctgtactgaaaccctctgagtttttggatgaagcaggagcaatagcaatggttccaaaactcgtgcaatatcatgtctttgtaggacttggttcagccaggcttgtcccacagagctagtagaaccatcgagactgttaaggctatctaacatgatgaacagtgacctaaaataaacacaaataattaaaataaagaaccaaacatctaccttgtcacactcttttataaaattaataaattctgtttcttattttgaattaactattttgaagtagtcatacttcaggataaattttgatcatagtattttaataatcttaatcccaatagtctcggtgggta

SEQ ID NO: 8555 - DNA, 537 bp, Homo sapiens
  MAP TO AC009144.4; EXPRESSED IN PLACENTA, SIGNAL =  21; EXPRESSED IN BRAIN, SIGNAL =  27; EXPRESSED IN HEART, SIGNAL =  51; EXPRESSED IN HELA, SIGNAL =  22; EXPRESSED IN BONE MARROW, SIGNAL =  20; EXPRESSED IN FETAL LIVER, SIGNAL =  23; EXPRESSED IN LUNG, SIGNAL =  26; EXPRESSED IN ADULT LIVER, SIGNAL =  33
gagcaaacctccgactcttgtgttcgcccagaagaacccctaattgttcaagttatcagtttccaagacaggaagcactagtggcacaaatgagcattgctaactagaagctttcttaaattatccttgaagagccacgaagaaaacaactttatttttcaaataatgcttttgagaatctttttctccttgtcttccaaatcatgcctcacctggcctttggtcatgtctattccagtcacgtgtcctttttcaccaaccagctggctaagtacatagcaatctctgccacttccactacccagatccaaaatccagcagttttctagatgctcagggatcaccagaccacagccataatatctgggaaatggaaaacacatattttttccctggagactgtaagacatgaaaccactaaatcttatacatacttccctcctccctccctccctccgttccttccttccttccttctttcttgcatcattcactcatacttctgatgtttagtctccactgaactggacacccatg

SEQ ID NO: 8556 - DNA, 515 bp, Homo sapiens
  MAP TO AC008882.3; EXPRESSED IN BRAIN, SIGNAL = 6.2; EXPRESSED IN PLACENTA, SIGNAL = 4.5; EXPRESSED IN FETAL LIVER, SIGNAL = 6.3; EXPRESSED IN BONE MARROW, SIGNAL = 4.4; EXPRESSED IN HELA, SIGNAL = 6.2; EXPRESSED IN HEART, SIGNAL =   5; EXPRESSED IN LUNG, SIGNAL = 2.4; EXPRESSED IN ADULT LIVER, SIGNAL = 6.7
  unsure 268
  unsure 272
  unsure 278
  unsure 280
  unsure 289
  unsure 302
ttggtagtgccagcttcttgattttagttaagatagagaatctaaaactttgtgtttgaagtaaaaatggaagcctaaacaaatggcagtgttattggctggttgtggcagacataagttttttgtttgtttgtttgttttttgtcaccaggctggagtgcagctggactggttgaatttcgtcaaggctgcagctgacagtccctcccggccgtcccccaggctttgcaaggggcggaagtttgcgtgcgcttgggccgcgtgcaangccncttgcncncggaagtanggctgggactacnaggtgtgtgcatcaaccagtaatgttttatttagacgacggtttcactgttggccaggatggtcttgatctcttgacctcatgagccctgtgcccggcctgtgttagacataagttactccatgggtagttgttgccttagagctataaaatgtatgtaacttgttttctttgtgcagtaagggtgcccaggagatggactggctactcccat

SEQ ID NO: 8557 - DNA, 506 bp, Homo sapiens
  MAP TO AL132821.17; EXPRESSED IN BONE MARROW, SIGNAL =  17; EXPRESSED IN LUNG, SIGNAL =  31; EXPRESSED IN BRAIN, SIGNAL = 5.5; EXPRESSED IN PLACENTA, SIGNAL = 4.1; EXPRESSED IN ADULT LIVER, SIGNAL = 7.1; EXPRESSED IN FETAL LIVER, SIGNAL = 8.6; EXPRESSED IN HELA, SIGNAL =  11; EXPRESSED IN HEART, SIGNAL = 5.6
ctctggctaaggattggtgccgcatctgtcgagcaatgttgacgatctcatcaaaagtgatattcccactgtgtttaatgtttttctgtttctttctgtctcttggtggttccttgagggctttgatgatcatggcagaggcagaaggcaccacctcaatctgggcctgtctgttctgaatggttagtttcactgtaatcctcaggcccttccagtcacccattgccttggcaatgtcatcaccaaccttttttggagacagacccagggggccgatcttgggggccagggcagaagtggcaccgacttcacctccggtgcacctcaggtatacgactttgatctcgttcgggtcgaacttcggcagcatggtggaggcagctggtgtcggatgaacccggattcaggacgaccgaagaaagttgcaccttggcctcctccgagccgaaagccgagagagctgctctgcctgcttctatggccccccagggactggtatgcacatg

SEQ ID NO: 8558 - DNA, 589 bp, Homo sapiens
  MAP TO AC017016.3; EXPRESSED IN BRAIN, SIGNAL = 2.1; EXPRESSED IN ADULT LIVER, SIGNAL =   2; EXPRESSED IN BONE MARROW, SIGNAL = 1.9; EXPRESSED IN FETAL LIVER, SIGNAL = 1.8; EXPRESSED IN HEART, SIGNAL = 1.8; EXPRESSED IN PLACENTA, SIGNAL =   2
tgccaaaggaagtttatggctatcagacaatcacctacttagataccaggcactactccttaagggactggtgcttcaaatacaaacatgcatggccctcaaccctgccacttttctcccagaggatgaggaaccaatcgagcatgacagccaacaaattatagtccagacttatgccacccgagatgatctcttagaagtccccttagctaatcctgaccttaacctatatgccgatggaagttcatttgtggagaatgggatacgaaggtcaggttatgccatagttactgatgtagctgtacttgaaagtaagcctcttcccccagggaccagcacccagttagcagaactagtggcacttacccaagacttagaactgggaaagggaaaaagaataaatgtgtatacacatagcaagtatgcttatctaatcctacatgcccatgctgcaatatggaaagaaagggttagggttccccctaatctctgggggtactcccaataaatacacaaggaaattatggagttattgcatgcagtgcaaaaacccaaggaggtgacagtctgacactgctgaagccatcaa

SEQ ID NO: 8559 - DNA, 560 bp, Homo sapiens
  MAP TO AC019224.2; EXPRESSED IN BRAIN, SIGNAL = 2.3; EXPRESSED IN PLACENTA, SIGNAL = 2.3; EXPRESSED IN ADULT LIVER, SIGNAL = 2.4; EXPRESSED IN FETAL LIVER, SIGNAL = 4.9; EXPRESSED IN HELA, SIGNAL = 5.6; EXPRESSED IN HEART, SIGNAL = 4.5; EXPRESSED IN BONE MARROW, SIGNAL = 2.9
agctgcagaagaaaagctggaagctagtacaggttgcttcatgaggtttaaggaaagaagttgtctccataacataaaaacaacgtgcagcagcaagtgctgatggagaagctgcagcaagttatccagaagatctagctaagatcactgccgagggtggttacactaaacaagagattttcaatgtagacaaagtcgctttctattggaagaagacgccatctaggactttcaccgctagagaaaagtcaatgcctggcttcaaagcatcaaaagacaggctgactctcttgttaggggccaatggtgcgggtgactttaattgaagccaatgctcatttaaccattctgaaaatcctagagcccttaagaattatgctaaatctactcttgcctatgctctagaaatagaaaaacaaagcctggatgacagcacacctgtttccagcatggtttactgaatattttcagcccactgttgagacctactgctcagaaaaaaagatttctttcaaaacactactgttcattgacaatgcacctggtcaatcaagagccat

SEQ ID NO: 8560 - DNA, 556 bp, Homo sapiens
  MAP TO AL136080.6; EXPRESSED IN PLACENTA, SIGNAL = 1.4; EXPRESSED IN HEART, SIGNAL = 1.8; EXPRESSED IN ADULT LIVER, SIGNAL =   2; EXPRESSED IN BONE MARROW, SIGNAL = 1.6; EXPRESSED IN FETAL LIVER, SIGNAL = 2.1; EXPRESSED IN HELA, SIGNAL = 2.2; EXPRESSED IN BRAIN, SIGNAL = 1.6
tgaggatgtcctgggagaaggggctgagaagtaagctgggatcagagaggtgggcagtgggggtatatccccgtgagatggggggccttttctggtataaagacaaagatctggtcacacttacactttctcctggcattcctgggaaacctgtgatcccagaggaccccttcaggccaggtaagccccggattcccatgaagccagggggccctggctttccactaactcctttgataatgcctgggaggccaggagctccaggtaggcctggtggtccaggtcgaccagcctctcctttgtcacctgtaaaagaaataaaaagacttggaaaaagacactgggcaagaaaaacccagcttgccaagatgcaggtgccccaggtcgcaggccaagtgcaggctcagggagcagttagcttaaaggtaaaggtgaagtggggagagatgctttcagtcttatggggcatcgacagagttgcttctgctataccactgggaaagcagcacagtgctcagggtcctccaggggtaccactgcctgtggttgaaaacct

SEQ ID NO: 8561 - DNA, 550 bp, Homo sapiens
  MAP TO AC007501.2; EXPRESSED IN BRAIN, SIGNAL =  12; EXPRESSED IN PLACENTA, SIGNAL = 9.3; EXPRESSED IN HEART, SIGNAL =  13; EXPRESSED IN HELA, SIGNAL =  12; EXPRESSED IN ADULT LIVER, SIGNAL = 8.4; EXPRESSED IN BONE MARROW, SIGNAL = 8.2; EXPRESSED IN FETAL LIVER, SIGNAL =  18; EXPRESSED IN LUNG, SIGNAL = 5.7
acacacacacacacacacgctccccttattgaataagagtatcctccaacccttggaaatttactgtatagctcatcttttctaatacctgatccttcccagagtggtccttatagttatcttgcagatagtgccaaggccttaccagcccactccaaagtagtgtcccagtcaccccatctcgcttccacatctcgatactctcacccaacactgggcactgcacagtcaaaaatgagtacagttcatgttcctgaccattgatctgccatcaattttttccaagcctgaggcatgcgattatctgcaaagctgacttacaagataaaatccccaggcctctccccttcccctcctcctccaacaagcagacattgattttacacagaatgtgcatggctttgatgctgttattgcaatcaacatgaaaaataccaccacagtgcttatccggacgtctcagttgttttgcctcatagcacaagtgattgtttaaagaggcttgacactgttggagtcttttgttttatggattttgcaaagcattgct

SEQ ID NO: 8562 - DNA, 534 bp, Homo sapiens
  MAP TO AC011467.3; EXPRESSED IN PLACENTA, SIGNAL = 2.3; EXPRESSED IN FETAL LIVER, SIGNAL = 4.1; EXPRESSED IN ADULT LIVER, SIGNAL = 2.5; EXPRESSED IN BRAIN, SIGNAL = 2.7; EXPRESSED IN LUNG, SIGNAL = 1.7; EXPRESSED IN HEART, SIGNAL = 3.1; EXPRESSED IN HELA, SIGNAL = 3.5; EXPRESSED IN BONE MARROW, SIGNAL = 2.4
gtcctctcacctgagcatccacccacagttgcgacattagccgtggagcctggttatggagagcgtggtggagaataagttcggcagcatcctgcagatggacatgatggacatgctgggtgagggctgcaggcaggctcaggcagtgaagaagccggccagccctcatgtgcccctgcagagtgctctcctcactggccattctgcatacatggctgctggtcaaccagactgtggtgctgggcggtgaggtgaagctccgctgtgaggtgtgcagggacttagcatttggaggcgaacagcagcaaggtgggcaccaatgtcatgccctcctcaccatgctcaaggtgggtgctgctgccagctgggtgcaagtggtaggcaggctgtggggggggctccacttcactgaaatctaccaccattatagaagttttagagtagcctgcaaaagataaatttatggcacagccagaagacaaaatcatctgccgtgagcagttctggatatgaacttgctgctggttcatacca

SEQ ID NO: 8563 - DNA, 529 bp, Homo sapiens
  MAP TO AL049874.2; EXPRESSED IN BRAIN, SIGNAL = 7.2; EXPRESSED IN PLACENTA, SIGNAL = 5.9; EXPRESSED IN BONE MARROW, SIGNAL = 6.1; EXPRESSED IN ADULT LIVER, SIGNAL = 8.3; EXPRESSED IN HELA, SIGNAL =  10; EXPRESSED IN HEART, SIGNAL = 7.6; EXPRESSED IN LUNG, SIGNAL = 4.4; EXPRESSED IN FETAL LIVER, SIGNAL = 9.8
agagccggaattccatttggaaagagcaattatattgagcttgatcaataacctcaaagaacaaagagaaaaaaattacctgttatcagactttaatatgtacttgatgtccatgatttgtgttattgtgttaattgtagggtcactagcaattagatttagctattgttaacatctaaaattgatttaaatgctaaaagaatcaatacttgagctaaatgtttaaatatcaggacactaagaagctactgagtcttcttaattgaattattctctgctttctgcattttagaagactgggcctatttcagagagatgaaagtaatagatgtctatattgtaaatgacaatgtaaatacttgctatggttatagaaatgaaggcggttgcacaggtgggagtcatggtaagtatagcttgtgaaactaaaatacttggttgggtgtggtggctcacacctctaattccaacactttgggaggctgaggcaggcagctctcttgagctcagaagtttgagaccagcctgg

SEQ ID NO: 8564 - DNA, 524 bp, Homo sapiens
  MAP TO AL117692.1; EXPRESSED IN BRAIN, SIGNAL = 5.4; EXPRESSED IN PLACENTA, SIGNAL = 5.6; EXPRESSED IN BONE MARROW, SIGNAL = 8.2; EXPRESSED IN FETAL LIVER, SIGNAL =   7; EXPRESSED IN HELA, SIGNAL = 3.1; EXPRESSED IN HEART, SIGNAL =  13; EXPRESSED IN LUNG, SIGNAL =  28; EXPRESSED IN ADULT LIVER, SIGNAL =  12
cggtgatggaggaagagaagtgtcgtccatacaagatgaatttagtctctgaaccccaggaggtcctgcacataggaagcgcccacaaccgaagttccatgccctttaccacctcgcctgcctccagcactaacgccagggtcatcacaaaccagtacaacaacccagctggcctctactcttctgaaaatatatccaacttcaacaacgccctggagtcagactgctaccagcggggtagaggcgaacatgctcagcctccaatcagccttgtcatcgacaaagaatctgaagtttgcaaggtgcttcaggagatacgggagttgaatgagcccccaaaacagtctgtgtcttttctggttttgcagaaaatcctggagtctgaagaaaaagaggatcccaacaagccctcaggattcagaagtgttaaagctcctgtcactaaagtggctgcattgattggaaatgctcagaagttgcctatgtgtgacaaatgtggccctggaattgtcggtgtgttcgtg

SEQ ID NO: 8565 - DNA, 570 bp, Homo sapiens; identical to SEQ ID NO: 7422
  MAP TO AL157957.1; EXPRESSED IN PLACENTA, SIGNAL = 1.5; EXPRESSED IN FETAL LIVER, SIGNAL = 1.8; EXPRESSED IN HELA, SIGNAL = 2.1; EXPRESSED IN HEART, SIGNAL = 1.8

SEQ ID NO: 8566 - DNA, 532 bp, Homo sapiens
  MAP TO AL158137.1; EXPRESSED IN FETAL LIVER, SIGNAL = 5.3; EXPRESSED IN HEART, SIGNAL =  10; EXPRESSED IN LUNG, SIGNAL = 7.8; EXPRESSED IN PLACENTA, SIGNAL = 3.9; EXPRESSED IN ADULT LIVER, SIGNAL = 3.8; EXPRESSED IN BONE MARROW, SIGNAL = 5.4; EXPRESSED IN HELA, SIGNAL = 4.8; EXPRESSED IN BRAIN, SIGNAL =   6
tctgggaaacactgttgtggaagcttcagaaactgtaacacatggcagaatggagattccttctgttcccaggaggaaaataggaaatgggaaccttaataaatgtttaatgattaggtatttaaaataatattgtttaaaacccccagaaaataagcgggcttaagaaaacagaagaacacagcggacaccaggactctaagatagcgtcagttgtaccagtgaaggacaagaaacttctggaggtcaaactgggggagctgccaagctggatcttgatgggggacttcagccctagtggcattttcggagcgtttcaaagaggttactactggtactacaagtacatcaatgtgaagaaggggagcatctcgggggttaccatggtgctggcatgctacgtgctcttcagctactccttttcctacaagcatctcaagcacgagtggctccgcaaataccactgaagaggacacgctctgcacccccccaccccacgaccttggcccgagcccctctgtgaggaacacaa

SEQ ID NO: 8567 - DNA, 532 bp, Homo sapiens
  MAP TO AL049780.2; EXPRESSED IN FETAL LIVER, SIGNAL = 1.9; EXPRESSED IN HEART, SIGNAL = 1.9; EXPRESSED IN LUNG, SIGNAL = 3.7; EXPRESSED IN BRAIN, SIGNAL = 2.2; EXPRESSED IN ADULT LIVER, SIGNAL = 1.9; EXPRESSED IN BONE MARROW, SIGNAL = 2.4; EXPRESSED IN HELA, SIGNAL = 1.9; EXPRESSED IN PLACENTA, SIGNAL = 2.3
gaagggaatttgggaggaagcaaatactgcaaacagactaatgagattctttctcatatacataggagctggaaaatgcagaatttatccccatgcctgacagcccatctcctctcagtgcagcgttttcagaatctgagaaagataccctgccctatgaagagctgcaaggactcaaagtggcctctgaagctcctttggaacacaaaccccaagtagaagcctcggtaactgagctttttgcctttgaatcacaactaggtaaacagtcactgcaagctctgcctggttcttctggcctcgctctagcttttgggtttcagctgccctgcatcaactcattatactgtctattcagcagtacttaaagcctcaacccaagactaaactgagttgcctcagaaaggtatttacccttccacatttctgacaggctaacacctttctaaagggattgtcttttccctctgcctcagaaataccaaaattcaaattcagtttttcatgacactggcagggtaggttagaggct

SEQ ID NO: 8568 - DNA, 528 bp, Homo sapiens
  MAP TO AC011431.2; EXPRESSED IN BRAIN, SIGNAL = 1.8; EXPRESSED IN PLACENTA, SIGNAL = 1.6; EXPRESSED IN HELA, SIGNAL = 1.8; EXPRESSED IN HEART, SIGNAL = 1.8; EXPRESSED IN ADULT LIVER, SIGNAL = 2.1; EXPRESSED IN LUNG, SIGNAL = 1.6; EXPRESSED IN FETAL LIVER, SIGNAL =   2
aatagcatcctctcccaccctggatattaggaacagatcattgaaggagtgtacaccacccgacatattgggagtaatattatccctttcatcctggatattaggaacaatatcacaggggtggtgtacacctcggcgttattaggactaatgttattttcttcctccctggatatgagaaacatatcacagaaggggtgtacagcccctgcgatatttggagtaattttatatctccttccctggatattaggaacaatatcacaggggggtgtacacaccttcgatatagggagtaatatcattctcattcccctggatatttggaaaataacatgggagagtgtataccccctgctattttgggaggtgtagactgctgcgatattgggagtaatatcatcctctttccccttggatattagaaaaatatctcaggggaagtttacatcctctgggttattgggagtaatatctcttctttccttatagatattaagaccaatatcacattggtggtgtacagcc

SEQ ID NO: 8569 - DNA, 514 bp, Homo sapiens
  MAP TO AL138725.4; EXPRESSED IN BRAIN, SIGNAL = 3.4; EXPRESSED IN PLACENTA, SIGNAL =   3; EXPRESSED IN ADULT LIVER, SIGNAL = 2.8; EXPRESSED IN BONE MARROW, SIGNAL = 2.7; EXPRESSED IN FETAL LIVER, SIGNAL = 3.4; EXPRESSED IN HELA, SIGNAL = 3.2; EXPRESSED IN HEART, SIGNAL = 3.2; EXPRESSED IN LUNG, SIGNAL = 5.2
cctgaaaacaaaagcttgcctttaacaccagggtggcatatgtaaggtcatcaaaaagatgtttttagatatctaaagtatcaggcttagtaagtctcattaagaaaaataaattccttttgcaggacaaaaattgccccaatattttaaaggaaaatctgtaggatatcagctgtggtgcagatacagtataggaaacaccatacaacaaacctaggtggaacttacatccaagttctggaggcagtaccagcaaaatgtatgcttgcagtttttgcacatcatctgagcgcagccttcattgcgttcgatataaacccggcaaactgggcactgcttaatgggggcttctgcatctgtcccaaagagggctctagaaacaaaatggatgagaaatggcattcagctgatggtcatcagttgaattcccagggctcctgatggttagataatgaactcacagttatccatgcttaattcacttccaaaagaaagggtgtgggcaaaaacatta

SEQ ID NO: 8570 - DNA, 600 bp, Homo sapiens
  MAP TO AC008934.4; EXPRESSED IN BRAIN, SIGNAL = 2.1; EXPRESSED IN PLACENTA, SIGNAL = 1.7; EXPRESSED IN BONE MARROW, SIGNAL = 2.5; EXPRESSED IN ADULT LIVER, SIGNAL = 2.1; EXPRESSED IN FETAL LIVER, SIGNAL = 2.6; EXPRESSED IN HELA, SIGNAL = 2.7; EXPRESSED IN HEART, SIGNAL = 2.4
ttccattctcttctgggctcttacacttttgaatcctcataaaaacatggggaattaggacatctgtgtggcatttttaaaatttattcttttttttccttaagtgaggtataatacacagataggaaagtatattgatcttaagtatacaacccaatgaatttttacatatgtgtacactagtataactaccacttgaaccaagatataaagcaagatttaaaaaatctcttctcatcccttcccagttaattttcctccatttagaagttaccaccattttgacttcaagcaccataacttgattttgcctgttcttgttcttcatagaaatggaatgataccttatatttgctttcttttgctcaatattgtgtttgtgagattcatgtgtattcttgcctatggtataataaataatcattagcttcatttttactgtgatgtaatactctatggagatttcattttactcttgatagatctttattttcatttttcagttatgaatgtctgttgtgatttttgatgaatacatctactcattcattttttagttgacatagctagagttaacatggctggtttgtagggtagaca

SEQ ID NO: 8571 - DNA, 506 bp, Homo sapiens
  MAP TO AL109766.3; EXPRESSED IN PLACENTA, SIGNAL = 1.8; EXPRESSED IN BONE MARROW, SIGNAL = 1.8; EXPRESSED IN HEART, SIGNAL = 1.9; EXPRESSED IN FETAL LIVER, SIGNAL = 1.6; EXPRESSED IN HELA, SIGNAL = 1.8
tcacttccaaacaggggaagaagacaagaaaattaatgtagaactggagacccaatatcagcaaagtatggacagtaaattatcaggaagatatcggcgacattgtggacttggcttcagtgaggtagaagattatgatggagaaggtgatgtggctggagatgatgatgatgacgatgatgattcacctgatcctgaaagtctagatgattctgaaagtgattcagagccatagaaagaagaatctgctgaagaactccaagctgctgagcaccctgatgaagtggaggatcccaaaaacaaaaaagatgcaaaaaacaattataaaatgttgtttgttaaatccagtggttcataactcccaaacgcttagtctttgtattaaaagtaagccttattgttataatgcacagtggaggactgcctatagagcacagacctttgtattataatttttaaaaaggcccttttaaataattacaaagagtgtttgctttcaaatgcca

SEQ ID NO: 8572 - DNA, 524 bp, Homo sapiens
  MAP TO AF233439.1; EXPRESSED IN ADULT LIVER, SIGNAL = 3.1; EXPRESSED IN HELA, SIGNAL = 2.8; EXPRESSED IN HEART, SIGNAL = 2.4; EXPRESSED IN BRAIN, SIGNAL = 2.9; EXPRESSED IN PLACENTA, SIGNAL = 1.8; EXPRESSED IN BONE MARROW, SIGNAL = 4.1; EXPRESSED IN LUNG, SIGNAL = 4.8; EXPRESSED IN FETAL LIVER, SIGNAL =   3
gagagaggatgagcctgacgtcatgtcccatgccagtgagtggggcgtcaggaaaaagaaggagattctttaacaatggaaagctgctaaaaatctatggaattggactgagagaccattagcagtttttggaagaagaaaccacttcaggtttgctccctgggaaagaaaaatatcttgggcccccaaaactcactaagataaaaggaaaactcaagctggaaaccgcttagggccaacctgcctctcattctattcaacctacctcccattctattcaacctacctcccattctattcaacctacctcccattctattcaacctgcctcccattctattcaacctgcctcccattctattcaacctgcctcccattctagtcaaagttatctccctgctcattgagatgaatgcatatctgattgcctcttttggaaaagctaatcagaaactcgaaataaggcaagtttgtatttcacctatctgtgacctggaagcccctccctgcttcaagtcttcctg

SEQ ID NO: 8573 - DNA, 551 bp, Homo sapiens
  MAP TO AC023404.2; EXPRESSED IN PLACENTA, SIGNAL = 1.6; EXPRESSED IN BRAIN, SIGNAL = 1.9; EXPRESSED IN BONE MARROW, SIGNAL = 2.6; EXPRESSED IN FETAL LIVER, SIGNAL = 2.5; EXPRESSED IN HELA, SIGNAL = 2.3; EXPRESSED IN LUNG, SIGNAL = 2.9; EXPRESSED IN ADULT LIVER, SIGNAL = 2.1; EXPRESSED IN HEART, SIGNAL = 2.1
ttcttggaggctttgtccagttttaaagaattcttttttctttgtttttgtcagattgggttaatttgaaagccctatcttcgagttctgaagttctttctcctacttgtttgattctcttgttgagactttccagtggattttgcatttctttgtgtctttcatttccagaagctgtgattgttttttatttatgctatttctctggagatttttttatccatatcttgtattatttaaagaatttttttaagttggttttcacctttctttggtgcctccttgagtagctcagtaattgaccttctgaattctttttctggcaattcagagatttcttcttggtttggatccattgctggtgagttagtgtgacctttggggggcattaaaaaactctgttttgtcatatgaccagaattgtttttctggttccttcttacttgagtagactatgtcaaagggaagatatggggctcaagggctgctgttcagattctttggtcccatggacccttaatgtggtattctcttctctcccctagggatgg

SEQ ID NO: 8574 - DNA, 509 bp, Homo sapiens
  MAP TO AC020557.2; EXPRESSED IN BRAIN, SIGNAL = 4.6; EXPRESSED IN HELA, SIGNAL =   4; EXPRESSED IN ADULT LIVER, SIGNAL = 2.7; EXPRESSED IN HEART, SIGNAL = 3.6; EXPRESSED IN LUNG, SIGNAL = 3.5; EXPRESSED IN PLACENTA, SIGNAL =   3; EXPRESSED IN FETAL LIVER, SIGNAL = 4.7; EXPRESSED IN BONE MARROW, SIGNAL = 2.5
atcaacaacctccggaactgacagaataaaatgggataacataactaggaattgataaggtttgaggattgaggatttagtactcttggttttaaaataattcaattttggaccaagagtgggtttaacgattggtccctactggccagtggaggccactgccagctccactggcgccaagtccctgcagtttcactggagccatcacctcttcctccttttcttcccccacggccaaacgcacaccaatgacactgtgaggcttaccagagcaacgaaatattccacccaaggaattcctcacttctgggcacagaaattgcttatggtttaaaaaaaaactatttcccagtcttctaaccattaaggttttaaaaaaacatgaggctcaattgtccagtgggtcccaggtatgttaactcagggagctcctcttcatttttctatacagacacccacaccccatgccatgcacacagactacacacaccacacacatgccccatata

SEQ ID NO: 8575 - DNA, 534 bp, Homo sapiens
  MAP TO AC024496.2; EXPRESSED IN BRAIN, SIGNAL = 1.5; EXPRESSED IN PLACENTA, SIGNAL = 1.5; EXPRESSED IN BONE MARROW, SIGNAL = 1.7; EXPRESSED IN HELA, SIGNAL = 1.9; EXPRESSED IN HEART, SIGNAL = 1.8; EXPRESSED IN FETAL LIVER, SIGNAL = 1.9; EXPRESSED IN ADULT LIVER, SIGNAL = 1.8
atgattttgcccaactgtgggttagtataagtgctctgagcacatttaagttaggctagtctatgatgttcagtaggttaggcgtattaaatgcatttttggcttacaatattttcagcttacgatgtgtttatcaggatgtaaccccattgtaagtggaggagcatctgtatctactatcatagagggtaagagtgctgcaagaataagctgacaagtagccaagtgcatgagagcttatcagatttccattttggaaagatcaccacgtctgcaaagtagaaaaaagatttgacagagacaagattagttagagaagccagttaggaggcaattgccatgctacaaggctaggtaaacgataacttggatgcggatgatgacagtggagaggacagattttaaagagtttgggaagtgaaatctgtgggacttggagacaaactggtaatagaacataaaggagaggaaggtgtcaggagaagcaggtaagttctaagagatgaaggaagaggtgaaggggcaggaaataca

SEQ ID NO: 8576 - DNA, 580 bp, Homo sapiens
  MAP TO AC023066.2; EXPRESSED IN PLACENTA, SIGNAL = 3.2; EXPRESSED IN BRAIN, SIGNAL = 3.3; EXPRESSED IN FETAL LIVER, SIGNAL = 5.1; EXPRESSED IN ADULT LIVER, SIGNAL = 4.3; EXPRESSED IN BONE MARROW, SIGNAL = 3.6; EXPRESSED IN HELA, SIGNAL = 6.1; EXPRESSED IN LUNG, SIGNAL = 2.5; EXPRESSED IN HEART, SIGNAL = 5.1
ctcttgctctttcacccagcctggagtgcagtagcacaatcatagcccactgcagcctcaaactcctggctagcctcatctttaatccaacagatattctattctgtgctccgcactattctaagtgctgggagtacagcagtaaatgagatacacggaacaatattatattccaatgaagggtggaggacaggcagaagagaaagacacttctggaatggcttcctaggttgtctcagatcaaccctcctgctgaaagcagcttaggaaagatggacaaaatatatatatttaagaaaagaagcaaaaaaaaggaaagcatgctttcaaggcatcagaacactgccacagtgattagaaaagttacacaagttatgagacagaagacaaaagaagccacccaagtatttgaggtaactttttccattgaggcaattgccaaatctgaaagcaaaagcaacagctggaaggctgagaagctgagtatagcttctggcaatcttcacacaaattggaacttggggaccatcaaagaggaggggttttagtagataacccaggatttcagttggatcccgaa

SEQ ID NO: 8577 - DNA, 506 bp, Homo sapiens
  MAP TO AL136418.1; EXPRESSED IN BRAIN, SIGNAL =   2; EXPRESSED IN PLACENTA, SIGNAL = 1.8; EXPRESSED IN HEART, SIGNAL =   3; EXPRESSED IN ADULT LIVER, SIGNAL = 2.2; EXPRESSED IN BONE MARROW, SIGNAL = 1.7; EXPRESSED IN FETAL LIVER, SIGNAL =   3; EXPRESSED IN LUNG, SIGNAL = 2.3; EXPRESSED IN HELA, SIGNAL = 3.3
tgccttagggtatagggaactgactgaaaaagggtacaagggaactttcggagtgatggaaatggtctatatcttgtaacagaaaaaagagaaaatatattggaagttaatctcttatttttcctgaaactgtttgctttaggtggtgctttctacacagcagagactagtgaaaatgcaaaattgcattattacaactcctgggcacttatcctccatgctacagcattgtggcttacaagcacgggttttgttgttgctgacccagatgaaggagcatctaatctctccaggcctgtaacaccaacttccatgtgtcagggttcatcatctggggctaccataaagtcccctgaggatgtctacactgatagattccatcttattttaggtcagttaaaccacttttacaagtttacaaccttaggggttttttgtttttttttttttgagatggagttttgctctttcacccaggctggagtacagtggcacgatttcaactc

SEQ ID NO: 8578 - DNA, 542 bp, Homo sapiens
  MAP TO AC021107.2; EXPRESSED IN BRAIN, SIGNAL = 1.8; EXPRESSED IN PLACENTA, SIGNAL = 1.9; EXPRESSED IN BONE MARROW, SIGNAL = 1.5; EXPRESSED IN HELA, SIGNAL = 1.9; EXPRESSED IN ADULT LIVER, SIGNAL = 1.7; EXPRESSED IN FETAL LIVER, SIGNAL = 1.9; EXPRESSED IN HEART, SIGNAL =   2
ttggcactcctgattcactgattgtgagaatcaaggagtttagtgattctatacataatacctttgaccatatgtggagaaccaaagaacacagtgaagctgcttggtagctcctaagttcagtgaacaatatgatgaaagaaaatgatgaactcagggatactgtctcccaacttcagaagcagatactgaggctcaaatctgctaattttgccctgagtgagaatcttatcatttgtagagcaagagctaaaattgtggaaaagcagacacaggctcttatcatgtgagtcactgacctgcaataaaagatgcatgcacagcctcaccaggtgtctactgttatagtgagggcattgattgaaaaagaaacagaccctgtaaatcataatagagatgtgtaggagaaccctgatgaatctggtgacagtgagtggttaactctgatgaacttttttttttttttggtgccagaaagaatggcttcctcatctcaagaagtggcaacatcccctttatgatccatactgccatcagccttt

SEQ ID NO: 8579 - DNA, 591 bp, Homo sapiens
  MAP TO AC021097.3; EXPRESSED IN BRAIN, SIGNAL = 2.6; EXPRESSED IN LUNG, SIGNAL = 3.7; EXPRESSED IN PLACENTA, SIGNAL = 2.8; EXPRESSED IN HEART, SIGNAL = 2.6; EXPRESSED IN HELA, SIGNAL = 2.6; EXPRESSED IN FETAL LIVER, SIGNAL = 2.7; EXPRESSED IN BONE MARROW, SIGNAL = 2.5; EXPRESSED IN ADULT LIVER, SIGNAL = 2.6
aatacagcgagagtggtccggaacgtgggcacctctctactcatgctcatggctaccttgtctgtttccttggatggactggctcggaaacacaggtggcatgagagaggcggcaggactggaggagccacgctgcctggggccctcccctgtggccggtccagggaggaatagctccaggagggagcctcgtggtggcagctgagggccaaatgagcaggtcagttcttcgagcacgtgtgactattggaacagagcaacgacctaaggtttaagccttaaaaagggcattgaagttaagggactagacacagcagcccaagaagggacctgttatccacggcaccactcaccgtccggctgaccgagtaatgtttggagacaagagaggtccccaagtggggagggtgtgggtgggaccagggctccccagcctgtccctgccctctccatccgacctggctcttcccaaacccctgttcccccaaatatgccatcctgatgcccgcatgtgatacgccggctctccatctgcctctggagcagtactggagcagagctcagggggagtctgtcctgttcctctgcaca

SEQ ID NO: 8580 - DNA, 537 bp, Homo sapiens
  MAP TO AC006946.20; EXPRESSED IN BRAIN, SIGNAL = 1.5; EXPRESSED IN HELA, SIGNAL = 2.1; EXPRESSED IN ADULT LIVER, SIGNAL = 1.7; EXPRESSED IN HEART, SIGNAL = 1.7; EXPRESSED IN PLACENTA, SIGNAL = 1.8; EXPRESSED IN LUNG, SIGNAL = 1.7; EXPRESSED IN FETAL LIVER, SIGNAL = 1.8; EXPRESSED IN BONE MARROW, SIGNAL = 1.6
ggatctctctccgacagcactgcagccctcaggggacattccccagtggccacttgagaagtccctgcctcagccaggcagacaaggctgaaccgaggccagcccggggtggggggtgagaccatggtttgtcgtggtggggccagagaggacagagcctggggctggggagcagggctgggggcctcagggtgggcagggcaggccccgccgcatcactcacgctgttctgctcaccgcagactacatgcccctgtgggtgtactggttcatcacgggcatctccatcctgctggtgggctccgtcatcctgctcatcgtctgcatgacctggaggctagctggtaagcgctggggctctggctgtcctggagtcaggctctaataccagcaccaccactcactaccaaggcaaatcgctttattctcagagcctcagcttcttgcttgagaaccacgtcataaagctgttgtaaggactgagtgaaataagacacatgaattcttagcacagaacctggcatgtgctatttgcac

SEQ ID NO: 8581 - DNA, 597 bp, Homo sapiens
  MAP TO AC007342.2; EXPRESSED IN ADULT LIVER, SIGNAL = 3.4; EXPRESSED IN BONE MARROW, SIGNAL = 3.4; EXPRESSED IN FETAL LIVER, SIGNAL = 3.6; EXPRESSED IN BRAIN, SIGNAL = 4.2; EXPRESSED IN PLACENTA, SIGNAL = 3.1; EXPRESSED IN HELA, SIGNAL = 4.1; EXPRESSED IN HEART, SIGNAL = 3.5; EXPRESSED IN LUNG, SIGNAL = 6.1
tcactctagccaaacctcgggtaacttttcaatacatgccacagagaaggaactcaatatccaactctgccttccttaccttgcacaggaatggttaccgtttgcccattgttggctgtgacagtggcggttgccatggtgaccaaagtctgtccaggaactggtgtgacagaaacagtctccccagatacattctgcacagggacagcattgactaggggctgtgggggcatgcgcccaggcgtccctccatcagaggggctatcattctcaacaaatagccgccttctggtagtgctggctggtggggagctgtacctatcgtataatgtggttggagatgttatgcctagggtcaaaacaaatcaaacaaagcatttaactcaaggagactcagatctgacttccgtccaagctcttatgttaaaaaataactacagtgtttgaaatacttcataattcaaaaagcaaacaagaattacagaagtcatatcttacctatattcattagtgaactttcattcgtgttcagtgaacactactgagagcaaaattttaaaacggaattttttgtcttgcagtgttcctttctccacg

SEQ ID NO: 8582 - DNA, 571 bp, Homo sapiens
  MAP TO AL133380.3; EXPRESSED IN PLACENTA, SIGNAL = 2.1; EXPRESSED IN BRAIN, SIGNAL = 2.4; EXPRESSED IN HELA, SIGNAL = 2.3; EXPRESSED IN FETAL LIVER, SIGNAL = 1.9; EXPRESSED IN ADULT LIVER, SIGNAL = 2.1; EXPRESSED IN BONE MARROW, SIGNAL =   2; EXPRESSED IN HEART, SIGNAL = 3.6; EXPRESSED IN LUNG, SIGNAL = 1.8
tggtaagggctcttgcagtcttttcagatagcctctgtactagagcactctttcaagactagcgaggcttattcagaccctagggatcagcttcaggtaaagcctaaggctttcttcagactttgtgagcctgtgtcttgcctgggcatgcacatggctttctaaattctctcgtaacagctgcttttgagtgtcctaatttcccaaagagtcttactccagcttctcatctgggccttagatggtctactctatggctccactcaaaatctcttgcccaggccatgagcctatagtgatcttgcagcttttattaacagtgtccacttatttttccagctgtgttctgagttaggtaacacagattagtgagtcagtccttcacttatctcccagacagtttaaaagacatgtatataataattcgcaagtaatatctgctctgattcttccagtttacaaggaggaaattggaacaaggctggctgctgtgtttcaagacaaagactgctgccacaccggggagaggatggggccagggtgagttaaaacacaaaacttccctgccatt

SEQ ID NO: 8583 - DNA, 580 bp, Homo sapiens
  MAP TO AL139342.2; EXPRESSED IN BRAIN, SIGNAL =  14; EXPRESSED IN HELA, SIGNAL =  24; EXPRESSED IN ADULT LIVER, SIGNAL =  18; EXPRESSED IN FETAL LIVER, SIGNAL =  23; EXPRESSED IN BONE MARROW, SIGNAL =  15; EXPRESSED IN HEART, SIGNAL =  19; EXPRESSED IN LUNG, SIGNAL =  12; EXPRESSED IN PLACENTA, SIGNAL =  15
tctgggttttcgacaccttccgcaagttaggagcccttttctctgcccagagtcctttgaaaaaactgacaccctaagactatcatggatgctttcctcattctccgaatttgcttcacatgagtaatgttcacattctgtgtttaaagagtggtgagtatgaatgaaattttgtgatgtcaggctgagtccttgggtctggagaatccagtgccacatgcatgcctccccatggttggtagaggaagccaggcaaatggggctccagtccttactctgccatgctgttttctgttggtgaggcctgggacagtttcttcatccttatgtctcagtttactcttatcaaaatgagaatagtatatgcttctcagggtattctgagggttcgctacatgaatacacttgaagtaggtaggacactcagtgtctgggatgcaggaaaggccagacaaacattagctgttgtggctgttgttgttttatatcagttgtcaaaaagaatagctggtcaggagagggaggcagcagtgagctatgatcatgccactgcactctagcctgggtgacaaagcaagat

SEQ ID NO: 8584 - DNA, 551 bp, Homo sapiens
  MAP TO AC011465.4; EXPRESSED IN BONE MARROW, SIGNAL = 2.9; EXPRESSED IN HEART, SIGNAL = 3.4; EXPRESSED IN LUNG, SIGNAL = 2.7; EXPRESSED IN PLACENTA, SIGNAL = 2.9; EXPRESSED IN BRAIN, SIGNAL = 2.8; EXPRESSED IN HELA, SIGNAL = 3.6; EXPRESSED IN ADULT LIVER, SIGNAL = 3.2; EXPRESSED IN FETAL LIVER, SIGNAL = 3.5
aattccgaaacacatcaggcccaagaggtttaggaagggatcatgccaccgtatatatgaagaaagcacttagcctagtacctggcacatagtaaatgctgtgtcaatgttaaccatttactgttgctactattactagttaaagtgcttacctcaccatccgtaatcatcatcatggaaaagcgagtgataatcacagtgagataccgtgacacacctgcttcagtggctacgataaaaagagggcacggaggagctgaggtcagagagttccacaggaggtctgctagggactggggccttttccttacatggatagggggagggttctgagcagaggaaggacatgatctgacccatagattaatagagtccctctggctgtgtgtggcagcaggagccagagccaggaaattggggcagaagctcctgctgtggtccatggtcctgcctgtgggggtgtgaaggaggggtgagcccatttatatcttgaaggtggagctgacagtgagtactgatggcctggatgtaggggtgagagaaagagaggg

SEQ ID NO: 8585 - DNA, 598 bp, Homo sapiens
  MAP TO AC008407.3; EXPRESSED IN PLACENTA, SIGNAL = 5.2; EXPRESSED IN FETAL LIVER, SIGNAL =  11; EXPRESSED IN HELA, SIGNAL =  12; EXPRESSED IN ADULT LIVER, SIGNAL = 6.4; EXPRESSED IN HEART, SIGNAL =  11; EXPRESSED IN BRAIN, SIGNAL = 6.9; EXPRESSED IN LUNG, SIGNAL = 4.9; EXPRESSED IN BONE MARROW, SIGNAL = 5.8
gatcacttgagcctgggaagtcaaggctgcagtgagcagagatggcaccactgcactccgacctgggcagcagagcaagactctatctcaaaaaaaaaaaaaaaataataataataataataataatagttttacctcttcattcccacccacgcacttctcgacgtaatacaggctagaccaaagcaaagtcatgcaactgcttccattttttatggcagcttgtagcacattcaggtcagtactggaggggaaaataagaaaatattccttggcttttgttcaggaaatgttttaactacatgcgtctgaatagccttccctgaatatctgttctgtgaagtcatttggctgaaagcttccctctgtcacagggtgcctgtaataaaactatcagagagtagataaatagagccagttcaaacactcattgctctgtgttgccttaaacaaaggagagagagagcctatatccctgaagaatcgagcattagtaagatgtttctctgctttgggaaatatccacttgcagatggaaagggactgtttgttggcatcaggtacaaataaagcaccaagatgctttaccacgcacatg

SEQ ID NO: 8586 - DNA, 553 bp, Homo sapiens
  MAP TO AL133262.2; EXPRESSED IN ADULT LIVER, SIGNAL = 2.1; EXPRESSED IN BONE MARROW, SIGNAL =   2; EXPRESSED IN HEART, SIGNAL = 2.1; EXPRESSED IN PLACENTA, SIGNAL = 2.1; EXPRESSED IN BRAIN, SIGNAL =   2; EXPRESSED IN FETAL LIVER, SIGNAL = 2.2; EXPRESSED IN HELA, SIGNAL = 2.3
gatcctttttggactgaggcaatgtattcatttgttatttaatatcaagttgaatattttacatttaaagatataacttagcaaataataaatttgccaattgaatttcatttttacttcgttttaaaatggggctacaagctgctaatcctctataaatctggcatcttgactttataaatctggcatcttgacttttgtttctgaaaagcagtttttataaaatcataatcaagaagtctatgctatcacagagcaaaactttggatgtgtgcatgtcctttgatcatcttcagggaaggaacaattctgagccccaaatcaagaataaaacagctgaagaccaggtgaatgaggaagaggtcacagcacacctttttgtacaggaaactcacaagtggcagcatttacaccacggagaacagcagcagccactgggacatgacaacaggcagggcagggcagggcacagggactagaatgaggaatttggaaggtaaaatttgtgtaacttgcaattttgctaaagaatgctgctgttgccaagtgacat

SEQ ID NO: 8587 - DNA, 512 bp, Homo sapiens
  MAP TO AC008649.3; EXPRESSED IN BRAIN, SIGNAL = 2.8; EXPRESSED IN PLACENTA, SIGNAL = 2.4; EXPRESSED IN FETAL LIVER, SIGNAL = 2.5; EXPRESSED IN HELA, SIGNAL = 2.3; EXPRESSED IN BONE MARROW, SIGNAL = 2.2; EXPRESSED IN LUNG, SIGNAL = 8.7; EXPRESSED IN HEART, SIGNAL = 4.9
taacccaaccctgaccactccagtctatcactgactcttcactggactgcgacaactttgtgaagacagggcccaggactgtctcagtcaccagtgtcccagcactgtccagcaccttgccacgctggaccagagcaggcacttgttgtttgtggatacacccacagaccatctccctgggaattcatgcaccttgactctgaccccttcccacacaccccccggccccagtgctggaaggatacatgtgcctggtcgatcatgcacttgcacagggtgaagtctgtgtgcggcaagttggtgagggccttcagcaggatctgggcggtgaccgtggtctgaaagaaggctgggttgaactggtacctaagaaaaagaacaagagacgtggccacagtggcacctccaagtccccaatcctcaccaggtgccaggcagctgctttattctggagtttgggaattggacatgcctgggttccaatcccagtcccagtgcttcccagctgtgta

SEQ ID NO: 8588 - DNA, 539 bp, Homo sapiens
  MAP TO AL136117.2; EXPRESSED IN BRAIN, SIGNAL = 8.4; EXPRESSED IN HELA, SIGNAL =  15; EXPRESSED IN ADULT LIVER, SIGNAL =  11; EXPRESSED IN FETAL LIVER, SIGNAL =  14; EXPRESSED IN BONE MARROW, SIGNAL = 9.3; EXPRESSED IN HEART, SIGNAL =  11; EXPRESSED IN LUNG, SIGNAL = 8.1; EXPRESSED IN PLACENTA, SIGNAL = 9.1
gcactgctacaactgtgctttacctgctctttttcaagcatatctgctttacggagtattttcattgcatacacatgtcccgtatctttcttctgaacaagccgtacctaaaaagttataaaagaaatgccaagtcaaaaactcgtactaccaacctaatgctttcatgtgttataggatgcaataattaactgaaaaagtattacaattttaacatgagcaactagtaataacaaagcagaagaaaatgcttttcagtgttccaaaatgaatacattacacacagtaaagtcgatgctggaaacatcctcaaatacctctacatctgaacagctttggttccttagttgaacaagccaatctaatttaaaaccttcaatttcaaatttaaggactcgttacacctctgacacatgtcatccagtcagctcagaaaatctaagtaaatgattacaatgatgtttaattaaaacaaaagtagctgtgcatggtggtgtatacctgtagtcccagctatttgggaggttgaggtaggagga

SEQ ID NO: 8589 - DNA, 551 bp, Homo sapiens
  MAP TO AC023109.2; EXPRESSED IN BRAIN, SIGNAL = 1.6; EXPRESSED IN ADULT LIVER, SIGNAL = 1.9; EXPRESSED IN HEART, SIGNAL = 2.1; EXPRESSED IN LUNG, SIGNAL = 2.3
tgctttgctggcatgtactcacccatggccaaccccctactgctttgctggcatgcctgcacgtgggtgagcctcacctttgtcctatgccagggagtatgtgcatgattaccctgctgtgccacttctgctggtgtgagttcaacctgttgccaccccaaacacctattctggcacgcgggcacccagccacactgccaatgccagcatgaacacacagacagatgccatcaatcttgcccccatcccctgaagccattgccaccagagtgaataagtgcatagatgccagtggctctgctccccccatgatgacaccaccaccattgtaaacacacacatgaacaccagtaaccttgcccaaccccgtgctgtgaccaccatgaatgtgcacatggaggccagtaatccccatgcccaccagtacccccactgcactgctgctgccagtgtgagtgcaaatacagacaccagcaaacctgcccctgactgtgccccagtgctggcatgagaatgtgcaggaatgccacagccctgtttccactggttta

SEQ ID NO: 8590 - DNA, 568 bp, Homo sapiens
  MAP TO AL121953.10; EXPRESSED IN BRAIN, SIGNAL = 1.8; EXPRESSED IN HELA, SIGNAL = 2.1; EXPRESSED IN ADULT LIVER, SIGNAL = 1.9; EXPRESSED IN FETAL LIVER, SIGNAL = 1.9; EXPRESSED IN HEART, SIGNAL = 2.4; EXPRESSED IN BONE MARROW, SIGNAL = 1.7
aaaacccaaccaagcaactgaaaactgatttaagaaataataaaagaaaacaaggcttttaaatataccttttcagcttcttctgcttctttttctttttgtttcttttcttcttctcttctagtttttatctgatctactatttcatttaatttttcttgcacagctgtcactagagtaaaaatcatcaccataccaagattttcttcagcctgtgtaacacaaaaaggtgatgaggaataactctcagaaaaataaaagtccatacatttataataattactaatttggttatattctatgttcatacagttcaataaaagatcatttaagtaagcatatatataaataataatatcttatttaaaaagtcgtgtaaatgtgccatatccaacctgaaacagatactgtgtttcagcaaattctgtttaataatcatataggtaaaaattcagaaaactgtttcctatagtaactagtaacatcctttctccagcatgttttcagtattttagttctttctattttaagagctgtgacaatgaactgcattgaggccagagtgatt

SEQ ID NO: 8591 - DNA, 590 bp, Homo sapiens
  MAP TO AL122023.2; EXPRESSED IN HEART, SIGNAL = 2.2; EXPRESSED IN BRAIN, SIGNAL = 1.5; EXPRESSED IN PLACENTA, SIGNAL = 2.3; EXPRESSED IN FETAL LIVER, SIGNAL = 1.9; EXPRESSED IN HELA, SIGNAL = 2.7
tacagacccagaaccccttgaatgaaggggaggccgggtctctttgaggaaggaccccactacactaccaacaatttctgctgttcatctttttcccatccttccccacggagacatccagccttttaccagggtaactgtgcactggggaaagggaaatgatcagacattttggggattactggataccggatctgagctgatgttgattccaggggactcaaaacatcattgtggtcctccagttaaagtagggacttatggaggtaaggtaattaatggagtgttagctcaggtcaaacttacagtgggtccagtgggtccctggtctcatcctgtggtcatttccccagtgctagaatgcataattggcattaacatacttagcagcttgcagaacccccacattggctccctgactggtaggatgagggctattatggtggtaagggctgaatagaaaccattagagctgcctctacctaggaaaatagtaaataaaaaacaatatcgcatccctggagggattgtggaaattagtgccaccatcaaggatttgaaatatacagaggtggtgattcccttcacat

SEQ ID NO: 8592 - DNA, 584 bp, Homo sapiens
  MAP TO AC008891.4; EXPRESSED IN PLACENTA, SIGNAL = 1.5; EXPRESSED IN BONE MARROW, SIGNAL = 1.9; EXPRESSED IN HELA, SIGNAL = 2.5; EXPRESSED IN LUNG, SIGNAL = 2.4; EXPRESSED IN ADULT LIVER, SIGNAL = 2.3; EXPRESSED IN HEART, SIGNAL = 2.2; EXPRESSED IN BRAIN, SIGNAL = 2.4; EXPRESSED IN FETAL LIVER, SIGNAL =   2
ctacctctgagggcaccaagcaccctgagggtagttatgtgttggggggacatatttcccccaatagaaccagcttcttcagggtaggaactgtatctgatttctctctccatccctcccactgcttggtccataacatacctcaataaatattaaatgaataagtgattccttttgtttcttcttgggggctgtaaaccagtggtctgtgctctggccctgagccaaatgaccttatgcctatgatagcctgactgctttaagacccccacactctgcccagtagcaacccctttatgcagagtttaaaagtcagacatgcaaaatagaggcaaaatagacattcagcagatgtccctcctcccctgacttcttgtcccctctccctctaatccttccagcctgtgggagctcggaggcctcagcctacctggatgagctgcgtttggctgtggcttggaaccgcgtggacattgcccagagtgaactctttcggggggacatccaatggcgggtgaggggtcagggcctgggggttgggcatactgacaaagggactgtgctgtcctccctctctgccttct

SEQ ID NO: 8593 - DNA, 515 bp, Homo sapiens
  MAP TO AC023154.3; EXPRESSED IN BRAIN, SIGNAL = 3.8; EXPRESSED IN HELA, SIGNAL = 5.7; EXPRESSED IN LUNG, SIGNAL = 3.3; EXPRESSED IN PLACENTA, SIGNAL = 3.5; EXPRESSED IN HEART, SIGNAL = 4.3; EXPRESSED IN FETAL LIVER, SIGNAL = 4.2; EXPRESSED IN BONE MARROW, SIGNAL = 3.3; EXPRESSED IN ADULT LIVER, SIGNAL =   4
gtgctcctcctgcttcagacggaggtgacagtcctcactttggcagagagggcttgcttaaacctcctcttcaggtcctgcatgttgggtgacttgggcctgggaatgagggaggttcttcgcttctcgggtgtactgctaggctgctgtttgtgactgacctctttacagaggacgtggaaggcgctgtagacatcattataattttcactgacagacacttcatagaatgagcagcctagcatgctggctagctgcagtccaagctgagggtcaacctgtttgatgtgcaacaggtcagctttgttggccacgaccaccacaggcagccgggtgcccaggtgtagctgctgcacgtgctggtggagctggctgatgagttcatagctcttgtagtcagtgatggagaaaacgatcaccacagcatctgcccagcgaatgcacctattcagctgttcactgcagctcaggctgttctcatggacctgaaagagaggagtgatggcaaggtgaat

SEQ ID NO: 8594 - DNA, 547 bp, Homo sapiens
  MAP TO AL121838.2; EXPRESSED IN BRAIN, SIGNAL = 1.7; EXPRESSED IN FETAL LIVER, SIGNAL = 2.1; EXPRESSED IN HELA, SIGNAL = 3.1; EXPRESSED IN LUNG, SIGNAL =  16; EXPRESSED IN HEART, SIGNAL = 2.4; EXPRESSED IN PLACENTA, SIGNAL = 2.5
ttttccctctactttccccgcctggctgtgctccccttgattcgtgcctattggccgtgcccatagtctctcccaagctcaaagttcacctctttctccagatcccctggggtccccaagcctgactcagtgtatctgggggggtcccttctgagcccacgcaccgacccagctcctcttccctgcagttgtggctgtgcccatggtgctcagtgccatgggcttcactgcggcgggaatcgcctcgtcctccatagcagccaagatgatgtccgcggcggccattgccaatgggggtggagttgcctcgggcagccttgtggctactctgcagtcactgggtaagtatcctggcggggcttgctggggagggcgatgaggagggcaagagcctccaaggacccagtcccaatctcaaccctatgaacctcaatctccctgttcctctgtctctctctacacattctctcagggtttctctgagggagatggaggagggagggaaggagcccaagccaggaacagtgcactcaggaagactcagccc

SEQ ID NO: 8595 - DNA, 531 bp, Homo sapiens
  MAP TO AC011497.3; EXPRESSED IN BRAIN, SIGNAL = 3.3; EXPRESSED IN PLACENTA, SIGNAL = 2.5; EXPRESSED IN FETAL LIVER, SIGNAL = 3.5; EXPRESSED IN HELA, SIGNAL = 2.7; EXPRESSED IN ADULT LIVER, SIGNAL = 2.7; EXPRESSED IN BONE MARROW, SIGNAL = 2.7; EXPRESSED IN HEART, SIGNAL =   4; EXPRESSED IN LUNG, SIGNAL = 2.7
ctcagacccaggagatcaggggcccagccccttctccctcagacccaggagtccaggcccccagcccctcctccctcagacccaggagaccaggcccccagcccctcctccctcagacccaggagtccaggccccaagactcccctctcaggaactaggcccactgctcacctgtcctcttgaactgccgcgtccacatgcacttgccctcccgcgtgcactgctcgcagtcagcagccccgcacgcagcctcggagcagttccctgcccagaagacctctcgctggttgatccgacagtcattctcagaggtgcaggacccattgcgtccaatgcaagcaccttcggggcagttggtacaccacttacagcggggggtggacgcctggtgagggaagacaggctagatgggaccctcagcacccctcctgagccagctgagaactcggtggttcctgagaccctggggtgggtgggacagctgaccagagtggagaccaggacctccctgccctacacctgctgcttctc

SEQ ID NO: 8596 - DNA, 585 bp, Homo sapiens
  MAP TO AC011489.3; EXPRESSED IN ADULT LIVER, SIGNAL = 9.1; EXPRESSED IN PLACENTA, SIGNAL = 6.1; EXPRESSED IN BONE MARROW, SIGNAL = 6.4; EXPRESSED IN FETAL LIVER, SIGNAL = 9.1; EXPRESSED IN LUNG, SIGNAL =   7; EXPRESSED IN HEART, SIGNAL = 6.1; EXPRESSED IN BRAIN, SIGNAL = 6.2; EXPRESSED IN HELA, SIGNAL =  10
gtcagtgtgtttgcgagagctggaatcgaagcctcttaaaatggcagatgatttggacttcgagacaagagatgcaggggcctcggcctccttcccaatgcagtgctcagcattatgtaacactggcttcgtggtgctcaaaggctggccctgtaaggtctttgagatgtctgcttggaagactggcaagcacagccgcgtcaaggtccacctggttggtattgacatctttactgggaagaaatataaaaataactgcctgtcaccttataatgtgggtgtccccagcatcaaaaggaatgactcccagttgattggcatccaggaaggtacccctcactgctccaggacagcagggaggtgcgagaggaccttcttcgtctgccagaggagaccttggcaaggagatgagcaaaagtaccgctgtggagaagggaccctgatcaccgtgctgtctgccatgacagaggaggcagctgttgcagtcaaggccatggcaaaagaactggctcccagggtgacagtggtggcagcagtgatcttctgagactgcagaggccccctcctctggccttctgtaggctg

SEQ ID NO: 8597 - DNA, 544 bp, Homo sapiens
  MAP TO AL117258.2; EXPRESSED IN BRAIN, SIGNAL = 8.7; EXPRESSED IN ADULT LIVER, SIGNAL = 9.1; EXPRESSED IN BONE MARROW, SIGNAL = 8.3; EXPRESSED IN HELA, SIGNAL =  12; EXPRESSED IN HEART, SIGNAL =  11; EXPRESSED IN PLACENTA, SIGNAL = 7.6; EXPRESSED IN LUNG, SIGNAL = 7.1; EXPRESSED IN FETAL LIVER, SIGNAL =  11
gtttttccaccattggatgctggtggccacagtgatggagaagagatcatgaaaggagaggagagaaaggaagaacgccaagacttgtgttagtgcttgtggaaatttaactcttcattaaaccattttattgtcactgcagagggctgggtgtctcatttgtgggtgggggcagaggctgggctcttcagcatccttgaaaataaaaaagagatgcatgacttgcccgggctctcccctgatggctctgcgtccctgccatgcctttcggcggatgtccctttcctccttcaggttcctgaggctgtggattgctgtgctggtgatctaccccaccaaccaggctgtcatcgccctcaccttctccaactacgtgctgcagccgctcttccccacctgcttccccccagagtctcgcttcggctcctggctgccatctgcttatgtaagtgtcatctgggtcttggtagcaagacagcctcttttattatatttattattattatttttagaaacagagtcttcactctgtcactcaggctgg

SEQ ID NO: 8598 - DNA, 510 bp, Homo sapiens
  MAP TO AC010582.6; EXPRESSED IN BRAIN, SIGNAL =  10; EXPRESSED IN PLACENTA, SIGNAL = 3.8; EXPRESSED IN FETAL LIVER, SIGNAL = 4.9; EXPRESSED IN HELA, SIGNAL = 5.5; EXPRESSED IN ADULT LIVER, SIGNAL = 1.5; EXPRESSED IN BONE MARROW, SIGNAL = 6.5; EXPRESSED IN HEART, SIGNAL = 3.1; EXPRESSED IN LUNG, SIGNAL =  11
tcaaacatcgaggagttcccttagcaaggttgaaaatttcagtctctggtatttggaatttaggctgcagtccttgtttttggatggaccactgggtgtgtggcacagtccatgcttttaaccagatttgaacagaagaatggccacttggcccaggtagaagtagatgaagtgtttggtttcatgtgtcacgtaactactgaagttcctccccaggatgcagtgccaggtggcattgtacttcttgtcacattccttcttgatatgagccgcagtgttcttctctatgttgtatttctccagcgcctgaggagcgcactccactgagttctgttgcatctcctccgacatgtccgcatttttgatcacggcctttcggtcgcacatggttaccatggagaaaggggctggccaactccaacggtcccctgggaggtgccagcacagctcaggcccggctggagctgccgttgctaccaaagccgtggcgcatctcggtttgtgggactt

SEQ ID NO: 8599 - DNA, 572 bp, Homo sapiens
  MAP TO AC019155.2; EXPRESSED IN BRAIN, SIGNAL = 4.5; EXPRESSED IN FETAL LIVER, SIGNAL = 4.6; EXPRESSED IN HELA, SIGNAL = 4.1; EXPRESSED IN ADULT LIVER, SIGNAL = 3.6; EXPRESSED IN BONE MARROW, SIGNAL =   4; EXPRESSED IN HEART, SIGNAL = 3.5; EXPRESSED IN LUNG, SIGNAL = 4.4; EXPRESSED IN PLACENTA, SIGNAL = 3.6
gaagaaatggggaggaggactagagagcttgagctgcaaagatagaaagtgatgactggagagtggtaggtttgaaacagagactatggggttgggttactttgattagtaaagacaatgtttacaatatgaatatggtagtgagtgactgtggtggagttagaaaaaattatcttggaaattaaggggccaatatatgaagaaaattatcttcgtgatttgatatcaacagaaaaaagtagaggagtagttttaaagacagtaattgtgagtcaggtgtcaaatcttcaagggatgaggagcaaatgacttgtgtcatttgaacttagggtctttagagagaaagagaagataatatattagaattgacaattagaataagatgaatatctactacatctccaggcccagtagttagaggtggtaagaaaggagacaaacagcaggtacgtgagctgtgtgagaagccagagggcagtagagcaggaaaatggcaggaatattcagaaaagtttgagaatatagtgaggtctagagaccaaaaaatagaaaggcttcaagagttgggaaag

SEQ ID NO: 8600 - DNA, 522 bp, Homo sapiens
  MAP TO AC008458.3; EXPRESSED IN BRAIN, SIGNAL = 2.5; EXPRESSED IN ADULT LIVER, SIGNAL = 4.4; EXPRESSED IN BONE MARROW, SIGNAL =   2; EXPRESSED IN HELA, SIGNAL = 2.6; EXPRESSED IN LUNG, SIGNAL = 2.6; EXPRESSED IN HEART, SIGNAL = 2.9; EXPRESSED IN PLACENTA, SIGNAL = 3.4; EXPRESSED IN FETAL LIVER, SIGNAL = 3.7
ctttgggagaaaagcacagctcgtctaatagaagaaaatcaacaatgggcaatgagccttaattatggtctatttcaaagtgcttatttctgcaggtaattaacttttagcttgaaccggtaagatcaacttcatcttttctttgaaagccaacgcctctaacaagcagcctttttatcttcagatcctaaatgaatgtcccaaagatggtaagccctccatgactgttgatagtgctgatgggagaagtgagatacctgggagaagcaacaacaagcaaggttttaggcttaagagacttggataaaatctccaagaaaaaaaaaaaaaagccttgaacaaactcgagggtttgtttgtttgtttttaaggaagatacagactatttaacgaaatgtgaatgcactggaaaggattatttatataaataactaccactatggaacacagctccctctccctgcattttccttcccaaggaaagcactttaacaacttgtttcagaacacttggatccagca

SEQ ID NO: 8601 - DNA, 594 bp, Homo sapiens
  MAP TO AL135931.4; EXPRESSED IN BRAIN, SIGNAL = 4.2; EXPRESSED IN FETAL LIVER, SIGNAL = 4.7; EXPRESSED IN HELA, SIGNAL = 4.9; EXPRESSED IN HEART, SIGNAL = 3.7; EXPRESSED IN PLACENTA, SIGNAL = 3.8; EXPRESSED IN LUNG, SIGNAL = 6.3; EXPRESSED IN BONE MARROW, SIGNAL = 4.1; EXPRESSED IN ADULT LIVER, SIGNAL = 4.8
ctgtcatacctgccactcccatagtcctggttcccaccacctctagagtagctgtgaccacgcccatgggccccaaagtcacctcctctggttccccagcagacttgcctgcatgatccacgcggatctggtgaccatccagggactctctgttcatggctctcatggcgtctgggttggtgatggtgatgaaaccaaaacccctggaccactgagtctccttgacaatgaccacctcagagacaggcccgaagctgctgaagtcgtcttccagcacctgctcgtcggtgttaatgttgagccctcccacgaagatctttccttctttagtggacatggcagcgagttcaagtcctggaaattaaaacttaaaaaagccagacagacagtaagctcagaggtgcagaaaaaatagggcacatctaattttcttgtgtcatatattaacagcatggcccctttgcaggaaattctcaaattagcctcctcagtcttttataactgagagcagaataaaaaggacagggctaacgggaaagaaaaacacagaaaacacaaggagaaaaggcaggctcaactgctggctgctttatg

SEQ ID NO: 8602 - DNA, 503 bp, Homo sapiens
  MAP TO AC008917.3; EXPRESSED IN BRAIN, SIGNAL = 2.4; EXPRESSED IN PLACENTA, SIGNAL = 1.9; EXPRESSED IN ADULT LIVER, SIGNAL =   2; EXPRESSED IN BONE MARROW, SIGNAL = 2.9; EXPRESSED IN HELA, SIGNAL = 2.3; EXPRESSED IN FETAL LIVER, SIGNAL = 2.1; EXPRESSED IN HEART, SIGNAL = 2.1
tctttttcatgtcccagcaacaatttatttttcagactaaaatgacattttttaaaaagtttgtaattatagcaattatatcacacttaagattaaaataattcttttaaactgccaataaaggaattaccttcaaaatttttggatggcttataagcataatttttgacaatcatcttaataagattcatacattggacaatgaatcgttcaaatgtaacgccttcaccaacttctgtaaaaacatagcttacagaaaattccagtgatctctgaattagaggagtaaatgaaaaaggatgctgatccaagaagtccaaaagctgtagaaaaataaataaataaaaattaaaatgtattttccccaaattcatattggaatataatcactccaattataactttactaataatcatttagcagtttgaaccttagtgtggagtctatgttcactcagttttacattatcataactcttcttgaggcacatcatataatgagg

SEQ ID NO: 8603 - DNA, 600 bp, Homo sapiens
  MAP TO AL132819.1; EXPRESSED IN PLACENTA, SIGNAL = 2.1; EXPRESSED IN BRAIN, SIGNAL = 1.4; EXPRESSED IN BONE MARROW, SIGNAL = 2.3; EXPRESSED IN FETAL LIVER, SIGNAL = 1.7; EXPRESSED IN HELA, SIGNAL = 1.8; EXPRESSED IN LUNG, SIGNAL =   6; EXPRESSED IN HEART, SIGNAL = 2.5
aaaagttccctcatgtccccatccccagccgttgtgccctctgtctctatagttttgctggtttagacttcttgtaattaattttgctcttgttttccaggaagataaatccgtcttgaaaaaccacgatctttctgttcgtgcaaaaatggccatcaaattgcgcttaggtgagaaagagattttggaaaaagcagtaaagagtgcagctgtcaaccgggaatactatcgccaacagatggaggaaaaggctccgcttcccaaatatgaagagagtaaccttgggctgttggagagcagcgtgggggactcgaggctccccctggtcttgagaaacctcgaggaggaggctggagtgcaggatgccttgaacatcagagaggcaatcagcaaagcaaaggccacagaaaacgggcttgtaaacggtgaaaactctatccctaatgggaccaggtccgaaaatgaaagtctcaatcaagaaagtaaaagagcagttgaagacgccaaaggatcttcttcagacagcactgctggagttaaggagtagctcgaggtgaagctggatgggggatccagtggagcaggagttgacggacagtc

SEQ ID NO: 8604 - DNA, 585 bp, Homo sapiens
  MAP TO AL109938.8; EXPRESSED IN BRAIN, SIGNAL = 1.6; EXPRESSED IN FETAL LIVER, SIGNAL = 1.9; EXPRESSED IN ADULT LIVER, SIGNAL = 1.6; EXPRESSED IN HELA, SIGNAL = 1.9; EXPRESSED IN HEART, SIGNAL = 1.8; EXPRESSED IN PLACENTA, SIGNAL = 1.9
gataagcccaggaaaggaggttgggatcgtttcttctttggttttgaggaagggtttgtcatggtgtgatttacgttttgaaaacactgctgtggcttcagtgtgatgaataagctgaagccggcaaggagtagaggcaggaacaacagtcaggagaccagtgcaggagtccagctggatgaggaagatgacaaatgtcaggcattcctgccagatggccaggacccagacttgagtggtcaccacagaaatcaggtgggagagaaatttgagaggcaccactaaggagaataatcagagtgtggtggttaagaagtaagtataagacaggatgataaggtttggagtctgggacctcaaaaaaaggagagaatgaaggcttacagcctgggtgaagcattagacctagggatatagatttgggcatcagaacaagggataagtgaaaccaacagatagaactaagtctcatgtgagcataggaataaatgaaagccacagagtcttgcagaagtccacaatcaaaggtaagtggagaagactttttaaaaaacccatgatggtgcaatggccctgaaagagaaa

SEQ ID NO: 8605 - DNA, 509 bp, Homo sapiens
  MAP TO AC007226.2; EXPRESSED IN BONE MARROW, SIGNAL = 5.5; EXPRESSED IN HEART, SIGNAL = 5.4; EXPRESSED IN LUNG, SIGNAL = 6.4; EXPRESSED IN PLACENTA, SIGNAL = 3.5; EXPRESSED IN HELA, SIGNAL = 7.5; EXPRESSED IN ADULT LIVER, SIGNAL = 3.2; EXPRESSED IN BRAIN, SIGNAL = 5.8; EXPRESSED IN FETAL LIVER, SIGNAL = 6.4
ttgtgccattgcactctagcatgggcagcaagagcgaaactcagtctgaaaaataaataaatacaaataaaaacagtaactcctggagttagagtgtcaggttttgtggctttttctatattaaacttacttttttttttcttagattcaaaaacatgccacaggaaagaagtctccagcaaagagtcctaatcccagcacacctcgtgggaagaaaagaaaggctttgccagcatctgagaccccaaaagctgcagagtctgagaccccagggaaaagcccagagaagaagccaaaaatcaaagaagaggcagtgaaggaaaaaagtccttcgctggggaaaaaagatgcgagacagactccaaaaaagccagaggccaagtttttcaccactcctagtaaatctgtgagaaaagcttcccacacccccaaaaaatggcccaaaaaacccaaagtaccccagtcgacctaaagtcagtgattcaactggaaggaaacctcaatgctgc

SEQ ID NO: 8606 - DNA, 564 bp, Homo sapiens
  MAP TO AC008569.3; EXPRESSED IN PLACENTA, SIGNAL = 1.5; EXPRESSED IN BONE MARROW, SIGNAL = 1.8; EXPRESSED IN HELA, SIGNAL = 3.6; EXPRESSED IN FETAL LIVER, SIGNAL = 2.6; EXPRESSED IN LUNG, SIGNAL =  10; EXPRESSED IN HEART, SIGNAL = 2.1
tgctatgttgctatgggctggtcttgaactcctggcctcaagagatcctcccgcctcagcctcccaaagcactggaattacaagcatgataacgttatcacatctcacatgtggacagcggtttctgaataagtatcctggccaacgtcatacacttggttatcaggatttggcccaggcagctggtcccagagtcagcccttaatcctcacatcactctgcctctctggggtggtggggtaggtacatgtgcacctgtcccatctcagacgccaggcactgaccctacaaccaaggccctgctctctggatgctgccagaatggctctggtgaccccaaacctcatggatggaaagtcagaggacgtggggtggttcttaccttgacaggtgttctcgctctcattcttgaatgtttttgccccagaaacaggctcatatcccgggctgcacacgcagtcgtagctcccctctgtgttccagcagtccgagaattttccgcatgacactttcgacggtgttgcacactcgttgatgtctggaacacaacaggacagggagtca

SEQ ID NO: 8607 - DNA, 508 bp, Homo sapiens
  MAP TO AC019140.2; EXPRESSED IN BRAIN, SIGNAL = 1.6; EXPRESSED IN FETAL LIVER, SIGNAL = 2.5; EXPRESSED IN BONE MARROW, SIGNAL = 1.5; EXPRESSED IN HEART, SIGNAL = 1.9; EXPRESSED IN LUNG, SIGNAL = 1.8; EXPRESSED IN PLACENTA, SIGNAL =   2; EXPRESSED IN HELA, SIGNAL = 1.7; EXPRESSED IN ADULT LIVER, SIGNAL = 8.7
gccttttctcacagcaggacgcttcaaacttgggggagtttatttaaaatgcctttttctggactccattcctggaggtctagaatgggatgcattcataatatatatgttaagtgttccaggaaatcaataggtgattgggataggctaaataatggtcccccaaaaatgtcctcattgctgtccccagaacctgtgaacatgttaccttcaacgacaaaagggactttgcagatgtgatgaaggatcttgagaaggagggttattttggttatgcaggtggtcacaatgttatcataaggacccttatgagagggaagcaagaggatcaaaatcagaaaaagatgtgatgacaaagccagaggtaagactgatgcactttgaagatagaggagagagccattagtcaaaggatgcaggcaacatctagaagatagaaaagcaaggagacaaattctcagatggtttctaacaccctcaaaaagaatgctgctctgcaacatcttga

SEQ ID NO: 8608 - DNA, 582 bp, Homo sapiens
  MAP TO AC024183.2; EXPRESSED IN BRAIN, SIGNAL =  72; EXPRESSED IN FETAL LIVER, SIGNAL =  47; EXPRESSED IN ADULT LIVER, SIGNAL =  26; EXPRESSED IN BONE MARROW, SIGNAL =  83; EXPRESSED IN HELA, SIGNAL =  41; EXPRESSED IN LUNG, SIGNAL = 1.2e+02; EXPRESSED IN HEART, SIGNAL = 1.2e+02; EXPRESSED IN PLACENTA, SIGNAL =  42
cagaaggactcctacgtggcaatgaagcccagagcaagcgcagcattctgacgctgaagtaccccatcaagcatggcatcatcaccaactgggacaacatggagaagatctggcaccacttctacaatgagctgcatggggccccggagtagcagccagtgctgctgaccgaggacccactgaaccccaaggacaacagagagaaaatgactcagattatgtttgagaccttcaataccccggccatgtacgtggccatccgggatgtgctgtccctctatgcctttgggcgcaccactggcattgtcatggactgtggacacagggtcacccacacggtgcccatctacgagggctactcccttccccatgccatcctgcatctggacctgactggctgggacttgactgagtacctcaagaagatcctcaaggagagaggctacagcttcaccaacacagcccagcgggaaatcatgcgcgatatcaaggagaagctgtgctaggtctccctggacttcaagcaggagatggccacccctgcatcctcctcttctctggagaagagctatgaactgcccg

SEQ ID NO: 8609 - DNA, 513 bp, Homo sapiens
  MAP TO AC005323.1; EXPRESSED IN BRAIN, SIGNAL = 1.7; EXPRESSED IN PLACENTA, SIGNAL = 2.1; EXPRESSED IN ADULT LIVER, SIGNAL = 1.9; EXPRESSED IN BONE MARROW, SIGNAL = 2.1; EXPRESSED IN HELA, SIGNAL = 1.8; EXPRESSED IN HEART, SIGNAL = 2.9; EXPRESSED IN LUNG, SIGNAL = 2.5; EXPRESSED IN FETAL LIVER, SIGNAL = 1.6
attgcaggaaatgacttcgggatactcacagcttgaacctggagttgcaagtcatttttttcttgcatcagagtaaccattttttcttccagctctttcctttttgcctcggtcttagccagctcttctttggttttctcaaattcttccttcatgttggccatctccttctctgtctctgcacttttgaggaggggtttgatcttgaaatacagcttcatccagggccagtgcttcacattcatgaaggcacggacattgtactggatgcagaagatggactctctgtcataggaacagaaatgtccaaatcagattataataagaagcagaattaaaacacctaagatgatgaggttaagtaaagaattcttattaataccttctttccaccattttctggtactccactcttgccaagaaccctctgcacatggcctgggttcgggtaatcagctgggccagcttctcatctcgcatctcctctaggagccccagaagaccagctttgaa

SEQ ID NO: 8610 - DNA, 578 bp, Homo sapiens
  MAP TO AC011478.2; EXPRESSED IN BRAIN, SIGNAL = 8.9; EXPRESSED IN FETAL LIVER, SIGNAL =  14; EXPRESSED IN BONE MARROW, SIGNAL = 6.4; EXPRESSED IN LUNG, SIGNAL = 3.2; EXPRESSED IN PLACENTA, SIGNAL = 7.2; EXPRESSED IN HEART, SIGNAL =  11; EXPRESSED IN HELA, SIGNAL =  12; EXPRESSED IN ADULT LIVER, SIGNAL = 8.5
atttccaccgtcatcctgaggcccccatggatgcagagaggtgcttttctaaggagtgaatgagccccgtcattctgtaggactcaccaggaaacttttccccctttactgtgtgtgctgtgtctgcctctcctgggtctggagtcagtagcatgcaacttctagtttcgtagaaggctgatctccgaagggaattttcctgggcttcctgtcctagtgatctgagctgagtggcattgttccggttgcttgaccttcacctggggcgtgggcttggggtcatccctggtggctgtaaagtctcctgcagcgatggaagccagagagggattattctggaaacccacttcttactccccgtgtgggcagtggaagctgtaacaccaaggcggggaacccagtgacagtgctgcatccactctcgatgccccgtcagaatccaggatcctcccaggaccgaatggcggctatttctagcctagtaaggttgggtggaaaagattaaacatgagggaaggtgccgttatctgggcatttccaagtcctggagaggagagagggtttcaccatgcttgact

SEQ ID NO: 8611 - DNA, 578 bp, Homo sapiens
  MAP TO AC020749.2; EXPRESSED IN BRAIN, SIGNAL = 4.3; EXPRESSED IN FETAL LIVER, SIGNAL = 7.4; EXPRESSED IN HELA, SIGNAL = 6.6; EXPRESSED IN BONE MARROW, SIGNAL = 3.3; EXPRESSED IN LUNG, SIGNAL = 2.4; EXPRESSED IN PLACENTA, SIGNAL = 3.4; EXPRESSED IN HEART, SIGNAL = 6.2; EXPRESSED IN ADULT LIVER, SIGNAL = 3.8
aggaggcaaaaggcacttcttacatggcagcggcaggagaagatgaggaagaagcaaaagcagaaacccctgaagaacccgtcagatctcgtgagacttattcactattatgagaatagcacgggcaagagcagctcccatgattcaattaccacaccccggtccctcccacaacatgtgggaattctggaagatacaattcaagttgagatttgggtggggacacagccaaaccatgttatctataaaattcatgtgatcattggaagcaaaggattatttgagaaaagtaagggaagactacttgtactgatggactgtcaataatttagtactatttgttcaaatattaaaagctaaaaactttaaaaatttaacaaataacaaggcagacattattttttgaagattattttcaccaaataatcggttttaaaaatagatgttactttactgtaggagaaagttgtgattatgaagggaaaagttttatgatgttattgtcatttcaatttcaaaaaaatgaggttgtcacctgtaatctcagcactttgggtggccaatacaggaggattgct

SEQ ID NO: 8612 - DNA, 571 bp, Homo sapiens
  MAP TO AL122127.3; EXPRESSED IN PLACENTA, SIGNAL = 1.8; EXPRESSED IN BONE MARROW, SIGNAL = 1.6e+02; EXPRESSED IN LUNG, SIGNAL = 1.9e+02; EXPRESSED IN ADULT LIVER, SIGNAL = 2.9; EXPRESSED IN HEART, SIGNAL = 3.2
gggagaggctcttctgtgtgtagtggttgtgcagagcctcatgcatcacggagcatgagaagacgttcccctgctgccacctgctcttgtccacggtgagcttgctgtagaggaagaaggagccgtcggagtccagcacgggaggcgtggtcttgtagttgttctccggctgcccattgctctcccactccacggcgatgtcgctgggatagaagcctttgaccaggcaggtcaggctgacctggttcttggtcagctcatcccgggatgggggcagggtgtacacctgtggttctcggggctgccctgtagggacagaggttggtacagcggtcactctcagggcagagggtgggccgagccggcctctgtccatgtggccctcgcaccccacgggtcccacctttggctttggagatggttttctcgatgggggctgggagggctttgttggagaccttgcacttgtactccttgccattcagccagtcctggtgcaggacggtgaggacgctgaccacacggtacgtgctgttgtactgctcctcccgcggctttgtcttggcattat

SEQ ID NO: 8613 - DNA, 561 bp, Homo sapiens
  MAP TO AL158802.1; EXPRESSED IN BRAIN, SIGNAL = 1.7; EXPRESSED IN FETAL LIVER, SIGNAL = 1.8; EXPRESSED IN ADULT LIVER, SIGNAL = 1.8; EXPRESSED IN HELA, SIGNAL = 2.1; EXPRESSED IN HEART, SIGNAL = 1.9; EXPRESSED IN PLACENTA, SIGNAL = 1.9
catgcaaaatactgaatggggaattagaagaagtgaaaaacttgtgtatttcaagtgaacactggaataaaaatatacatttcataatcaattttaaatctctctgctaaagattagaacatccaaaattatgaatcatgaaaagaattggaggctgtttaacataccggtaagaattttaaattgtttttatgacagccaacgtggcagtgtccagactaaacaagacagactacagaccttgccagcaacatacacaatcctgcagctgatacaaagttatgttgcctttaggaagagattatctgttatgattctcataagttctaataagtgtcactgtgaaaaggtaagcagttgtatcactgtgaatttgcttcagtaaaaagctatcacttgcagtcatttttcacacattgtagctcatgcatcttgccctgcatggattgaacttagccttcatcacaattttgccatgacagaagttgtctagttagctaaactataccgtgaaaatagaattcactttttaaacactctggattctgcaaacactgccct

SEQ ID NO: 8614 - DNA, 562 bp, Homo sapiens
  MAP TO AC005664.2; EXPRESSED IN BRAIN, SIGNAL = 2.9; EXPRESSED IN PLACENTA, SIGNAL = 3.4; EXPRESSED IN ADULT LIVER, SIGNAL = 2.5; EXPRESSED IN BONE MARROW, SIGNAL = 2.3; EXPRESSED IN HELA, SIGNAL = 3.5; EXPRESSED IN HEART, SIGNAL = 3.6; EXPRESSED IN LUNG, SIGNAL = 2.9; EXPRESSED IN FETAL LIVER, SIGNAL = 5.5
aaacgtgcacatccacacacatggcaccgcagccaagcagaggccggtgaaaggcatcagagtttcagactctcgggttgtccttgtaatccatattgcaatttcactatccacagaaacacgaccctcctctgagtagcatcccttgtctgcattataagaaaatgaaggacaacgaggaacgggagcaaagcagtgacctcacccctagtggggatgtgtcccccgtcaagcccctgagccgatctgcagagctggagtttcccctggatgagcctgactctatgggtgctgacccggggcccccggacgagaaagacccactaggggctgaggcagcccctggggccctggggcaggtgaaggccaaagtcgaggtgtgcaaagatgaatccgttggtgagtttttgaaggactcttcccttcttgcctcctgggacccatgagctttgtttttctaatgaaggccataattgttcatagttcctagttgtacttgtgagcaaggggctgtgcacctccactgttggtgtggctgaaaggcttgtcttcctgtccttgc

SEQ ID NO: 8615 - DNA, 586 bp, Homo sapiens
  MAP TO AL049829.3; EXPRESSED IN PLACENTA, SIGNAL = 5.3; EXPRESSED IN BONE MARROW, SIGNAL =   5; EXPRESSED IN FETAL LIVER, SIGNAL = 6.4; EXPRESSED IN LUNG, SIGNAL =  11; EXPRESSED IN HEART, SIGNAL = 5.1; EXPRESSED IN BRAIN, SIGNAL = 4.8; EXPRESSED IN HELA, SIGNAL =   6; EXPRESSED IN ADULT LIVER, SIGNAL = 3.4
tcagtgaggacttccttggccttagatgagtccctatttagaggaaggcaaatcaaggtaagcctatgtccattgctgttctagttgtgtataaactctccaggttgcctttaaggctatcatttgttcatctctgactcaggtgatcccaaaacgaaccaacagaccaggcatcagcacaacagaccggggttttccacgagcccgctaccgcgcccggaccaccaactacaacagctcccgctctcgattctacagtggttttaacagcaggccccggggtcgcgtctacaggtcaggatagatgggctgctcctctttcccccgcctcccgtgagccccgtatgcttcctcctctctggtctgaggaacctccctccccccacccctccccgtggtcttcaggaactttgtctcctgcctgtgcaggttgaggaaggtagttgcaggccaggccagaaggccagcctcatcatcttttctgcagtagaaattggtgataagggctgcatccctcccttggttcaaagaggcttccacccccagccttttttttcttgggagttggtggcatttgaaggtgttt

SEQ ID NO: 8616 - DNA, 520 bp, Homo sapiens
  MAP TO AC007954.6; EXPRESSED IN PLACENTA, SIGNAL = 1.9; EXPRESSED IN BRAIN, SIGNAL =   2; EXPRESSED IN HELA, SIGNAL = 2.6; EXPRESSED IN HEART, SIGNAL = 2.2; EXPRESSED IN ADULT LIVER, SIGNAL = 2.4; EXPRESSED IN BONE MARROW, SIGNAL =   2; EXPRESSED IN LUNG, SIGNAL = 2.9; EXPRESSED IN FETAL LIVER, SIGNAL = 2.5
ccactctgggagaaacaaccttctctgctacctgaagccgagctgctgttcagtagggcccttgattcacaggggttcctgtaaatgcttaggcctggctcaccaatgattaggctgagttaaaagctgatgttgcccaccaagcagcagcaggcacttagccccaatgataactctggatggctgatggcagtaaggattgaagcatttggtatgccacttggaagactaaatactgagagatgaaagctgagaagtgtggaaacacatcatggctgcctgccaataggacagactggatcactcacgtaggtgcccacactaagggcaggtactctcgtaagactgactggaatcaaactgctgatccagcctgcaccaccaagactgctgccatagccacctggattcatgcaaccggtgtggaaacatctaccatcatgggctaggcacaacgtaagggactacatgtttctgaggcagaagccaccactgcgtgccagacttgtgactcctgcca

SEQ ID NO: 8617 - DNA, 595 bp, Homo sapiens
  MAP TO AC018720.2; EXPRESSED IN FETAL LIVER, SIGNAL = 2.4; EXPRESSED IN LUNG, SIGNAL = 4.4; EXPRESSED IN BRAIN, SIGNAL = 2.1; EXPRESSED IN ADULT LIVER, SIGNAL = 2.4; EXPRESSED IN BONE MARROW, SIGNAL = 3.1; EXPRESSED IN HELA, SIGNAL = 1.9; EXPRESSED IN HEART, SIGNAL = 1.8; EXPRESSED IN PLACENTA, SIGNAL =  45
tagttcacggtatttgccccaagctaagctttccccactgcaggtgtgagatgtggatcccttagcccttggggcagagaccccaggccagttacctctgaccctgggccctttaaatataggccgtttcaatattgtgtgtcctggcttaacctgcatgttctggttgtctgtgtcagctgtgacaggcccttagctgctccatgcatgctcagctcacccctgctctgccctctgccctaggaagatctttgcctttgacctggatgccaagcggctggcatccatggccacgctgctggcctgggttggcgtctcctgctgtgagctggctgaggaggacttcctggcggtctcccccttagatccgcgctatcgtgaggtccactatgtcctgctggatccttcctgcagtggctcgggtgagatggtgagaaggcgtggctgagggactcggaggtccacagcagcttagacctggagtcatctgttttggtcttagttctgacactttaatgggcttgggaccctggagcaaaagttctcctctgtgaggcaaggatttcaggagcgaggatttcaggactgaggcagc

SEQ ID NO: 8618 - DNA, 581 bp, Homo sapiens
  MAP TO AC004552.1; EXPRESSED IN BRAIN, SIGNAL = 6.6; EXPRESSED IN PLACENTA, SIGNAL =   5; EXPRESSED IN LUNG, SIGNAL =  20; EXPRESSED IN HEART, SIGNAL = 9.4; EXPRESSED IN HELA, SIGNAL =  10; EXPRESSED IN FETAL LIVER, SIGNAL =  12; EXPRESSED IN BONE MARROW, SIGNAL = 6.2; EXPRESSED IN ADULT LIVER, SIGNAL = 3.7
agctccttacatgggctttggtgggggacgtggggcagcacccgcaggtctaaatcggggtgggggtgttcggtccttgcgggcttcacgagatcgattcctgactactttgctgtgaattgcacaactcacacagtaatgtagcttcacatacagcttgggaagcacataggcatcgaagacgctcgcttcagaaatgtccctgattgctgcggcctccactatgtttcgaatgacgaatttcttaatggccttgtccttgggcacgcatcgggcacatttagtgcagcgaataggctgcacgtggccgcggccctttttggcacgaccattgttccttcttttctttgtcatcttggaggcacagaccggagagagcaaacctcttttctttatagcaggtatttctttatagcaatgcaagaacagcctaacacagaactcaaactaaaacatcctccaaccttcatccattttattaaaatttgccttttcccttatatgacaggtataattttcctctaaactgttcactttaaaagtcgacacaaagttggggtagctcctccatccaaacaatg

SEQ ID NO: 8619 - DNA, 556 bp, Homo sapiens
  MAP TO AC023000.2; EXPRESSED IN PLACENTA, SIGNAL = 1.6; EXPRESSED IN ADULT LIVER, SIGNAL = 1.4; EXPRESSED IN HEART, SIGNAL = 1.8; EXPRESSED IN FETAL LIVER, SIGNAL = 2.2; EXPRESSED IN HELA, SIGNAL = 1.9
tgagcagtttgcttcaaaacacatggaaatgtgttcagcacaaagactttaaggtttgcatataaagtttcacaagctgccatgtggcaaatccatacaacactgggaaaaccaagaagctcatacactgtagaaaatattgattgtttaagaaaatgattatcataatggtgatgatgatggtgatggtgttgatggccattatgttgatgatggtgactatgatgatgatgatgatgatgatgataatggtgattgtgatgataatgatgatgatgatgatagtgatggtgatgatggtgataatgatgatggtgatgatgatgatgatgatggtgatagtgatgatgatgatgatggtgataatgatattgataatggtgggggcgatggtgatttatcatggggatgtccgtatatactgatatggtttggccatgttctcacccaaatctcatcttaatttgaagcttccctagttcccacatgttgtgggaggaacctggtgagagataattgaatcatgggggcagtttcccccatactgttctcatgg

SEQ ID NO: 8620 - DNA, 593 bp, Homo sapiens
  MAP TO AC007216.2; EXPRESSED IN BRAIN, SIGNAL = 1.1e+02; EXPRESSED IN ADULT LIVER, SIGNAL =  42; EXPRESSED IN BONE MARROW, SIGNAL =  60; EXPRESSED IN HEART, SIGNAL =  27; EXPRESSED IN PLACENTA, SIGNAL =  47; EXPRESSED IN LUNG, SIGNAL =  99; EXPRESSED IN HELA, SIGNAL =  26; EXPRESSED IN FETAL LIVER, SIGNAL =  45
aggtgcagactgtgttggtggcggtaattttgtccatcaaatgaatatgtgtgaaaacattccctcctttggccctacaggtcagaatggcggcagcggagcatcgtcattcttcaggattgccctactggccctacctcacagctgaaactttaaaaaacaggatgggccaccagccacctcctccaactcaacaacattctataactgataactccctgagcctcaagacacctcccgagtgtctgctcactccccttccaccctcagcggatgataatctcaagacacctcccgagtgtctgctcactccccttccaccctcagctccaccctcagcggatgataatctcaagacacctcccttagctactcaggaggctgaggcagaaaaaccacccaaacccaagaggtggagagcggctgagatggaatcaccacccgaacccaagaggcggagggccgctgaggtggaatcaccacccgaacccaagaggcggagggccgctgaggtggaaccatcatcacccgagcccaagaggcggaggttgagtaagctgagaacaggccattgcactcaagcctgagcaata

SEQ ID NO: 8621 - DNA, 521 bp, Homo sapiens
  MAP TO AL136980.2; EXPRESSED IN BRAIN, SIGNAL =   2; EXPRESSED IN PLACENTA, SIGNAL = 1.4; EXPRESSED IN BONE MARROW, SIGNAL = 1.5; EXPRESSED IN ADULT LIVER, SIGNAL = 1.8; EXPRESSED IN HELA, SIGNAL = 2.4; EXPRESSED IN HEART, SIGNAL = 2.3; EXPRESSED IN LUNG, SIGNAL =   2; EXPRESSED IN FETAL LIVER, SIGNAL =   2
aagggccaccttttctaaccactcaggtttctagagaaaagatttttaaaatttgaaaaaacaaaactactcttctgagtgctttattccactaaaaaaaaaaaaaaagtttcataatgatagaaaaaatagtacaaacaccactgaacttgtatattaaaggatggcagtttaaatgataagagtactgatatggtgacaagacttgagaacaaactaaccttaagcagaaaaataatgaaccaacctgatcagaaagtgcactggaagataccaaggaaaaccacaaagaggtgcattctcctcacagtgagctcggatactatcattgatctcaggaatgtgaggggttatgtgagaaattccagtataatcaaacccattgatccatattccagagtcccgtttaactgcatttccttccaagtcatggaatgttctagtcatatgctgaaaaaaaaagactagtgaaaaaactgtttcaactagtacacccacattcccaccccagattacaaaaa

SEQ ID NO: 8622 - DNA, 521 bp, Homo sapiens
  MAP TO AC000085.5; EXPRESSED IN FETAL LIVER, SIGNAL = 1.9; EXPRESSED IN HEART, SIGNAL = 1.9; EXPRESSED IN PLACENTA, SIGNAL = 1.5; EXPRESSED IN HELA, SIGNAL =   2
ggtgctctctcaaaagtgccatctcctggctggaggccaattaactcaggacattacagcaattcataacagaacaaccctgctccaaggaaggagaaaaacaacagctaattccactgcctgcaacatcctttctaaccagtggtcctgagtgtgtccacatgatgacttcactggtagcataaccagcatttgagaaagcctgcacactaaacatatctacaaacaaggactctcacagagtctacgccattcccctggcaccaccaccacagcaggtgctggtatccacagctgggagatctgaagatggatcacatcaccgggttctttgcagacgttccccagcatgggcccagagcctggtagccccactgggtggctagacccagaagggcaataataatcaccgcagtctggctcataggaatctccatccctaggggaaggggaagtgcaccaaatcaagggatcaccctgtgggacaaaataatctcaacagcagcctctgagttccagat

SEQ ID NO: 8623 - DNA, 600 bp, Homo sapiens
  MAP TO AC004548.1; EXPRESSED IN BRAIN, SIGNAL =   2; EXPRESSED IN PLACENTA, SIGNAL = 9.9; EXPRESSED IN LUNG, SIGNAL = 2.7; EXPRESSED IN ADULT LIVER, SIGNAL = 1.8; EXPRESSED IN BONE MARROW, SIGNAL = 2.2; EXPRESSED IN HELA, SIGNAL = 2.9; EXPRESSED IN FETAL LIVER, SIGNAL = 2.4; EXPRESSED IN HEART, SIGNAL =   2
tgggatcctccttagatttcctcacataacaggactctgaacccagatttataaatccgtctctgtgattttaaaatatgcagtgaatttaattaaaagatcataatttaattacttaacatttcatcagaagaaaatggtttggtttaataaatactttcatttttcaccttttaaaactttttaattcatatatgtacaaactaatttgtaaaatatattgctagcaatccaattgcatcattattaatattctcgattttacatttaaccaataaattacatgataacaattttgtaaatagctaagtttatttattcatttatttgtttatttatttatttaatatattaaatatatttttaatatatttaagctggatttcattaaaatatgttttctcagctgtgtgaagggcagtgaaggaatgggagaaggagtaaaatgtgacaaaactatgacaaaggagttagaaaaaacatttcaggaacaaagagaactaattaactcaaacatacggttcatctcactctgctaagagctaattgtgttttacacactccagctgttaaaagtactgtggcatggctattcatgtg

SEQ ID NO: 8624 - DNA, 558 bp, Homo sapiens
  MAP TO AC008417.3; EXPRESSED IN FETAL LIVER, SIGNAL = 1.7; EXPRESSED IN LUNG, SIGNAL = 1.7; EXPRESSED IN BRAIN, SIGNAL = 1.7; EXPRESSED IN HEART, SIGNAL = 1.8; EXPRESSED IN HELA, SIGNAL = 1.7
cttggccagtcttcttttgctttgattggaccatttccacctcttggtagccattgttttgattgtactttgtcttcagaatcatactggtaaagctgtattccatctcctgttacaattcttcaaagaaatgtttcaggatcttgatcccacttatttaaaatttccattgaaagccctgctcttgtctgcagctgatctggacgcaatggttttggcacccattgagtggaaagtttcctcaactttaatttttcagtcagaattgtataagctgctaattgttagttctcttcagttagagcaggagcaaacttaatttttttcttgaaaattggtgtagtcttcgtcttctacattgtcccatcccttcttaaaacaatttatctgttttgtaaagtgctgattttcttggaccattgtctccataaacttttcataaagcatcagtgatttcaccatacttccacctaagcttcaccataaatttgatgtttgttcttgtttaaattttagcataatttatattgctctgataggggctcttatcaaatccaa

SEQ ID NO: 8625 - DNA, 549 bp, Homo sapiens
  MAP TO AL049837.4; EXPRESSED IN PLACENTA, SIGNAL = 2.7; EXPRESSED IN BONE MARROW, SIGNAL =   3; EXPRESSED IN HELA, SIGNAL = 6.3; EXPRESSED IN LUNG, SIGNAL =   2; EXPRESSED IN HEART, SIGNAL = 5.6; EXPRESSED IN BRAIN, SIGNAL = 3.1; EXPRESSED IN FETAL LIVER, SIGNAL = 5.4; EXPRESSED IN ADULT LIVER, SIGNAL = 3.5
cagccatgtggaactgtgagtcaattaaacctctttcttttataaattagccagtcttgggtatgtctttattagcagtgtgagaacagattagtacaatgtggaattttttttatcattattaaaaaatatttttccttccctttcttgcatgttagaccacttaattttgtcccacaattcacttatgttctattactgttttagtcttttatctctgtgtattttatcttgaatatcttctgttactatgtcttcgaattcactgatattttcttctgcagtgtcaaatctgttgttaatttcatccagttcatgttttatgtcagaaatggtttgattcaagtcattttggtatattacctttttctcctcaccgtgctcattttttccctctaccttcttaaacatattgaggatatttacagtagctgttacaatattcttatctactaattctatcatctttccatttctgggtctatttttattgatagatttttttttccttaaaaataggtgatagtttctcacttactggcatgcctg

SEQ ID NO: 8626 - DNA, 549 bp, Homo sapiens
  MAP TO AC007686.5; EXPRESSED IN BRAIN, SIGNAL = 2.8; EXPRESSED IN PLACENTA, SIGNAL = 3.2; EXPRESSED IN HEART, SIGNAL = 2.8; EXPRESSED IN BONE MARROW, SIGNAL = 3.7; EXPRESSED IN HELA, SIGNAL = 3.4; EXPRESSED IN ADULT LIVER, SIGNAL = 2.6; EXPRESSED IN LUNG, SIGNAL = 4.6; EXPRESSED IN FETAL LIVER, SIGNAL =   3
tgtcacagctccaggtcatccagggggaaatgcccacgggccttttcctcaggggtcaagctctcaatctgtaattgtctcagaaagacccggagagctttaaaatatccagagtccacgtcccgcccctgcacctccagagggagaccatcctggggcagggccttgctcagtgaaagctccaacagggacgctgatgggcttgatgggccaagactgagaaccaccagccagggctaaaatcaggggagagagagagggaggcaagaaggaatggggagggacggcttccccaggggtaaatgcccagaggctcggggacaagtggaaagtgaggcctcggggagctccatagagagcaaatgttcagaacagctgctcgattctgctctattccccggtgtggaagactgggaccagggacaactgttcaccaccaagcaaggcaggaagccacaaaaggcccccagagagggcctccactcccctcaagttgatgcctccatgagggcaaacactacgtcatctgctcactgttctccctggagc

SEQ ID NO: 8627 - DNA, 576 bp, Homo sapiens
  MAP TO AC008392.3; EXPRESSED IN BRAIN, SIGNAL = 2.5; EXPRESSED IN ADULT LIVER, SIGNAL = 2.3; EXPRESSED IN BONE MARROW, SIGNAL = 2.7; EXPRESSED IN HELA, SIGNAL = 2.5; EXPRESSED IN HEART, SIGNAL = 2.3; EXPRESSED IN PLACENTA, SIGNAL = 2.8; EXPRESSED IN LUNG, SIGNAL = 3.5; EXPRESSED IN FETAL LIVER, SIGNAL = 2.3
attcctaggtcctgggttgggaggagctggtggccaggatccctgctgagtcccttggctggccctgttctcagtggattgggagctgagtaggctgcagcgacaatgcaaagtgatggaaggggagaggcgggcctacagcaaggaagtccaccagcgcatcaacaagcaactgtgagctgggcgcctgggccctgagctggggaggagggggtcagaggggctgaagactggactcctgggtcctgcctttagtgatgctgagttctgcccccttactggcccctcttccacctccctgcctgggtagtgaggagatccggcgcttggaggaggtacggggcgatctccaggtgcagatcagcgcagcccagaaccaggtcaagcggcttcgggacagtcagcggctggagaacatggaccgcctgctgaagggccgggcccaggtgcaggcggagatcgaggagctgcaggagcagaccagggccctggacaagcaggtggggtttgagaggtggttctacggatcctgcttacgggcaagtgttgtaacctccctgagccttagcttcctca

SEQ ID NO: 8628 - DNA, 575 bp, Homo sapiens
  MAP TO AC007501.2; EXPRESSED IN FETAL LIVER, SIGNAL =   9; EXPRESSED IN HEART, SIGNAL =   7; EXPRESSED IN BRAIN, SIGNAL = 4.4; EXPRESSED IN PLACENTA, SIGNAL = 2.6; EXPRESSED IN BONE MARROW, SIGNAL = 2.3; EXPRESSED IN LUNG, SIGNAL = 2.5; EXPRESSED IN ADULT LIVER, SIGNAL = 1.4; EXPRESSED IN HELA, SIGNAL = 5.2
tctgccatatgcgtcttcagaaaatactgacctgcgataatacttgagtctgtgtctgagactgtatttgcgactggtgctgctgagaggctggctgggggctcccgatggcagggatgggggatgttatctgagaggcgacaggggagtgctgccgaggagaaggctgagactggtgctgcatgtgttgcagctgctgcagctggaggcgctgctgcagctgctgctgcagctgctgttgattaatttgctgctggagatgctgctgctgctgctgcaggtgctgctgcatgtggtgctggaaatgctgctgctgcatctgctgctggatttgctgatgcatttggtgctgctggagttgctgctgctgcatctgttgcatctgttgttgttgctgctgctgctgctgctgcaattgcatctgatgctgctgggtttgcaccgaaggactcacttgggtggagggtgctgagccaaccatggtcgttcccatggagcttatcagtggagccccaatgttcgagggcatgttggctgcaatggtgactgatgtgacaatctggttcatggggagt

SEQ ID NO: 8629 - DNA, 501 bp, Homo sapiens
  MAP TO AC011449.3; EXPRESSED IN BRAIN, SIGNAL =   2; EXPRESSED IN BONE MARROW, SIGNAL = 1.7; EXPRESSED IN FETAL LIVER, SIGNAL = 3.5; EXPRESSED IN ADULT LIVER, SIGNAL = 1.7; EXPRESSED IN HELA, SIGNAL = 3.6; EXPRESSED IN HEART, SIGNAL = 2.8; EXPRESSED IN PLACENTA, SIGNAL = 1.4
tttgtgaggtcttctgtgccaagtttttatcttcctcttttgattttcagtttctaagctgactaaacaactaatgctcctggaggcaaaaacccacggccaggaaaaggagctggcggagaacagggaacagctggagattttacgtgccaaatgccaagaactcaaaacacactcggatggcaaaatcgcagtggaagttcataaatcaattgtgaatgaattaaaaaggtaaggatttaatgttttttctttttttttttttttcttttttcgagacagggtcttgctatgttgctcaggctggtcccaaactcctgggctcaagtgatctgcccatcccagcctctcaaagttttgggattacaggcatgagccactgcgcccagctgatttaatgactttttgagtataatgagtcactctgcctgtggttataggcagaatggagagaggttgctcagttctttctgggtttcttcacctatggtcatgcacagc

SEQ ID NO: 8630 - DNA, 523 bp, Homo sapiens
  MAP TO AC020714.2; EXPRESSED IN PLACENTA, SIGNAL = 2.9; EXPRESSED IN BRAIN, SIGNAL = 3.3; EXPRESSED IN BONE MARROW, SIGNAL = 3.1; EXPRESSED IN LUNG, SIGNAL = 4.3; EXPRESSED IN ADULT LIVER, SIGNAL = 5.9; EXPRESSED IN HELA, SIGNAL =   4; EXPRESSED IN HEART, SIGNAL = 3.9; EXPRESSED IN FETAL LIVER, SIGNAL = 3.5
acgtggctacctggtcagagatggaaatcagtcaaaagtcttacttcaaaagcctctgctggacctcctcccaggcactaacgcggctctcatccatgtacatccggaagagaatgcgcagccacaggccaggctgctggtctcctgcttcagaaggttgggcttggatttgcctttgaatcctgcagaaaagggaagtttctgggattagtttgggaaggcatcttatgtaaaggtgaaacagcccgtatggaggcacattttgtttgtgctcagccatcagcatctgctgcttacaaaacggagccacagcagcctgatgtgaaggtgatttccatgtccagaattccctccctattcaagctggggatatgagatataaaaaaacttgtggcctgggaaggtggaacccttcacatgaaactgcacttgaatccccaaagctgtggaaggggccatgtgctctgcctgcgccaggggcctcagataaacaggggcaacccccaggaggtgagaactgctc

SEQ ID NO: 8631 - DNA, 523 bp, Homo sapiens
  MAP TO AL079306.2; EXPRESSED IN HEART, SIGNAL = 1.8; EXPRESSED IN BRAIN, SIGNAL = 2.6; EXPRESSED IN PLACENTA, SIGNAL = 1.5; EXPRESSED IN ADULT LIVER, SIGNAL = 1.7; EXPRESSED IN BONE MARROW, SIGNAL = 1.8; EXPRESSED IN FETAL LIVER, SIGNAL = 1.8; EXPRESSED IN HELA, SIGNAL = 2.2
cagacctgaagagaccagggtgatcttgcctgtgagacagggccagtctgacctgagcatgcttctgtctgctgacctctcctgggatcccagcctggatgtgcctgcttgctgtacagccttggatgcccaattgaggtgcctttcaagggcatacatcatagctcctgtactagcagaccataccttaccatcagagagctctagtagagcagcccttgctgacacacaccagcctacacatgtcgttctcccaccacagctgcccgtgttacttcactggcacacactcatccacagtcatcacccatcactttgcttgtgtgcatatgtgcaggcaaaccttgcctctccttccctgctggcatgtggatgtatgtgcacccaccatgccattgctgctgttgtgagtgcaccacctgccctgcatcacgatgctgccattgctggcgcaaacacatgcacagacaccagcaacaccacccccactccaaactaccattgctgccagagtgaatgaaca

SEQ ID NO: 8632 - DNA, 592 bp, Homo sapiens
  MAP TO AC002045.1; EXPRESSED IN BRAIN, SIGNAL = 6.4; EXPRESSED IN PLACENTA, SIGNAL = 4.6; EXPRESSED IN LUNG, SIGNAL =  11; EXPRESSED IN ADULT LIVER, SIGNAL = 1.8; EXPRESSED IN BONE MARROW, SIGNAL = 4.6; EXPRESSED IN FETAL LIVER, SIGNAL = 6.3; EXPRESSED IN HELA, SIGNAL = 5.2; EXPRESSED IN HEART, SIGNAL = 3.9
tggaagctttccttccacccatacgatagaactataaagcagaagagtttagaaagactttcccatttaagtgacgaaacctcatactccatttgtgacaaatagcacaaaggttaaaaaaacttatttttgaccaaaagctctgttgacattctattaaacaccgacctatttaattttcataatgtaaatggcagatattttcataattcttatgctaataaatcatttccctgattttttgggtaaaaccacatattcacaatgaagtccagaaacgtgaattgtttcatataatttactcttatttgtgattacaagtatacctctacagaaagttagtatactcacacaaaggtaacttgtgcagagggagatggcaaatttataacttctcagaaacacagtaatgataagtaaccaaggacttccaccaaagtcagtcccacgatgacgatggtcagccagagtattgataacctggaataataatagttgaaataatgaaaaggtcaatgacactgacaatatttcactcagaaagaatcatccttagaaaccgtcaacctcctccaaaaggtaaccacatccc

SEQ ID NO: 8633 - DNA, 510 bp, Homo sapiens
  MAP TO AC023202.2; EXPRESSED IN BRAIN, SIGNAL = 4.1; EXPRESSED IN PLACENTA, SIGNAL = 3.5; EXPRESSED IN BONE MARROW, SIGNAL = 3.4; EXPRESSED IN HEART, SIGNAL = 3.7; EXPRESSED IN ADULT LIVER, SIGNAL = 4.3; EXPRESSED IN FETAL LIVER, SIGNAL = 3.8; EXPRESSED IN HELA, SIGNAL = 4.2; EXPRESSED IN LUNG, SIGNAL = 2.3
attctcgaacagttgtgggccagagattcatttgataagttaaggttttccaaaatacatgattctgatgagtcagataattctgaagttaattttgtttagaaatagctcggagaacagttttcatattttattttcacattgaaaatcagatttgcttcagcctcaaaaagtgtgtttatgtaaaattaaatgagcactgacagtgagctgcactttttttttctaaatgggaacaggattaaaaggaaaggaaattctgccatttatgacaacatcaatgaacctggaagacattatggcaagtaaagttaaagtaagactcagaagaataatgcataatcttaattatatgtggcatatataaaagtcaacctcatagagacaaatactagaagggtgattatcaggggtcaaagggattggggaaatagggagaaattggtcaaaggataaaaaatgcagctgtaaggtgaataaattctggtgacctcgtgtatagcatggtga

SEQ ID NO: 8634 - DNA, 552 bp, Homo sapiens
  MAP TO AC007857.2; EXPRESSED IN BRAIN, SIGNAL = 2.4; EXPRESSED IN PLACENTA, SIGNAL = 3.1; EXPRESSED IN BONE MARROW, SIGNAL = 3.2; EXPRESSED IN HELA, SIGNAL = 4.5; EXPRESSED IN HEART, SIGNAL = 3.6; EXPRESSED IN ADULT LIVER, SIGNAL =   3; EXPRESSED IN LUNG, SIGNAL = 1.7; EXPRESSED IN FETAL LIVER, SIGNAL = 4.6
cattcctttctgcttgcctcaaggttttatacaaagtcttacttccttaaccaattgcaaataaaaaaaatctctaaatctacctcttgtgtccggaattggttccttccgtgggttcttggtctcgctgacttcaagaatgaagccgcggaccctcgtggtgagtgttacagttcttaaagatggtgtgtcgggagtttgttccttcagatgttcagatgtgtcccaagtttttttcttctgatgggtccttggtcttgctgacttcaggagtgaagctgcagaccttctcagtgaatgttacagctctcaaagatggcacgtgcagagttgttccttcctcctggtgggttcatggtcttgctgacttcaggaatgaagccgcagactttcgcagtgagtgttacagctcttaaacgtggcacacttctggcacgctttgctcctcccggtgggttgctggtctcgctgactgcaggagtgaagctgcagaccttcgcggtgagtgttacagtcataaaggtagtgcagacccaaagaataagcagcagc

SEQ ID NO: 8635 - DNA, 556 bp, Homo sapiens
  MAP TO AC020752.3; EXPRESSED IN BRAIN, SIGNAL = 2.8; EXPRESSED IN PLACENTA, SIGNAL = 1.9; EXPRESSED IN BONE MARROW, SIGNAL = 1.9; EXPRESSED IN FETAL LIVER, SIGNAL = 2.1; EXPRESSED IN LUNG, SIGNAL = 2.3; EXPRESSED IN ADULT LIVER, SIGNAL = 2.4; EXPRESSED IN HELA, SIGNAL = 2.5; EXPRESSED IN HEART, SIGNAL = 2.2
acctgtaggattggtgccagttagggagcagtcctgccatatagagttgttcaatgagtgatgccacatttattgtgcaaaaaggagcaggaattaaccaagagtttcttgccataagattacttgaacaaaattctaaaatagtaactttaaatatattgttaagttggtctaaacaagttagtttgagtcagtttttgctattaatacttacccctccaactctttcaaagtggtccccatctctgtcaaagtctatcaggtgtccattaaatgaccaagtaaacacgatgtctagcgagtgatcatgcgttacctggcacggtaaaacaatactctctccaacagtgacatccatactggaagggggtaccattacccttgttggatctggagagttaaaacaaaacaaacaataacaacaacaaagtctgtgagcttgtgtggaaatacaatgtagactccaagagcaggatgaaatactaagtaattttgctttattttttctgaggctgtgaccagcaaacctcagtcatctgggaagctcagactcagg

SEQ ID NO: 8636 - DNA, 507 bp, Homo sapiens
  MAP TO AC011477.2; EXPRESSED IN ADULT LIVER, SIGNAL = 1.4; EXPRESSED IN BONE MARROW, SIGNAL = 1.7; EXPRESSED IN FETAL LIVER, SIGNAL = 2.2; EXPRESSED IN PLACENTA, SIGNAL = 2.9; EXPRESSED IN BRAIN, SIGNAL = 1.3; EXPRESSED IN HELA, SIGNAL = 2.4; EXPRESSED IN HEART, SIGNAL = 1.9
ccgtcatccaccttcttgagaaagcatatgaagctgtcaatcatgcttccacctcctgcaggtcgagggcagtggtggtgcagtgctcagggtcagaacgagctggcacccaccatgtcacctttctcgcaccacccacctcccagaccaggccacgtatccagtgttcgtcttcgatacccacatccactccccaagtgatgcccaccttctcgctgacctgctctgcttggatcggaggcattttcttattttctttcctcaagaggtgctgtgccatacagaaggccttctcttgccttgtttccaggccttctctcggtgctgctgaggcacatcagaagtgctggaggacgtggcactgcgccagcactgggcggccggccgtgtgctcatcccgcagatcgtgctctacctgtgcttggagatgaagtcctccggaagcagctcgtggcccacttctcaggtaggtggggcacagacatagcaggaatgtcaccagacacg

SEQ ID NO: 8637 - DNA, 566 bp, Homo sapiens
  MAP TO AC011683.3; EXPRESSED IN HELA, SIGNAL =   2; EXPRESSED IN BRAIN, SIGNAL = 1.8; EXPRESSED IN ADULT LIVER, SIGNAL = 1.8; EXPRESSED IN BONE MARROW, SIGNAL = 1.8; EXPRESSED IN FETAL LIVER, SIGNAL = 2.6; EXPRESSED IN HEART, SIGNAL =   2; EXPRESSED IN LUNG, SIGNAL = 2.4; EXPRESSED IN PLACENTA, SIGNAL = 1.6
aaatttctgcagccaacctgttgaatattcacagtccccttcaattttcagtttatcatgatagatctttgcttgtttcataatcagcattccattaaatggcatgtgttcactgtgatgctgatggatcccctctttcaatacacaattgagatcttcatttttagctttatgcagggttttgctattttttttaaattaacatctgttcatcactttcagcatagaacttcaacagtttatctttatgtttcttcaggtcatatatggtggttgttctgacaccagactcttcttggagatgcttgacacttataccattgtccagtttcaccaacagcttgattttcttgttacagataaacatatgctttctattcttatcactgttacccatagggttatctgcaggccttttgacatttgcaacaatatctttacactacagagcagagaataagtaaaaaaaaatgcagcagaaatgcatctaggtcttggcccttggtggggcatcatggagaacctgcccttggtgtgtccagccttcacacatgccgttttattgc

SEQ ID NO: 8638 - DNA, 598 bp, Homo sapiens
  MAP TO AC018506.3; EXPRESSED IN BRAIN, SIGNAL = 6.7; EXPRESSED IN PLACENTA, SIGNAL = 3.9; EXPRESSED IN ADULT LIVER, SIGNAL = 7.8; EXPRESSED IN BONE MARROW, SIGNAL = 4.8; EXPRESSED IN FETAL LIVER, SIGNAL = 4.4; EXPRESSED IN LUNG, SIGNAL = 6.4; EXPRESSED IN HELA, SIGNAL = 4.2; EXPRESSED IN HEART, SIGNAL = 9.1
tcactttcctggttgaagccaaaaaacaaagggtactactttcttctttctttccatatgtaccatactttaggggagagaggggccagtgtttggacactgttgatttaaaaaatcttattttcaggatcataattacggagcccctcctcctccgacacctcctgcttctccccctgtccagacgatcatccctcgttctgacctgaatggcctgccgtcgcctgtagaggaacgctgtggagacagcccgaactctgaaggagaaactgtacctacctggtgtccttgtggtctttctcaggatggcttccttctcaactgtgacaagtgcaggtaagatcctgttccatctaaatttaagtctgggttgctgggattagggtttcttacaagtagggaaaagctcaaagtattctttcttgtgtttgttaatgtagatgattccttagtgctccttggctcgaattctctgcactaggtgagaattgctgacaacaaggaatgagagattgatgttaaagctattgaatttgatatgaaatttaatgtcctggaaacatttggtaggtgggagggagggggtagcatatgcaga

SEQ ID NO: 8639 - DNA, 565 bp, Homo sapiens
  MAP TO AC011595.12; EXPRESSED IN BRAIN, SIGNAL =   3; EXPRESSED IN FETAL LIVER, SIGNAL = 6.3; EXPRESSED IN HELA, SIGNAL =   5; EXPRESSED IN HEART, SIGNAL = 4.1; EXPRESSED IN PLACENTA, SIGNAL = 4.3; EXPRESSED IN LUNG, SIGNAL =  10; EXPRESSED IN BONE MARROW, SIGNAL = 4.7; EXPRESSED IN ADULT LIVER, SIGNAL = 2.6
ggtgaactccagaaagccactgacttattcacagatgccatcaagctgaatcctcgcttggccattttgtatgccaagagggccagtgtcttcgtcaaattacagaagccaaatgctgccattcgagactgtgacagagccattgaaataaatcctgattcagctcagccttacaagtggcgagggaaagcacacagacttctaggccactgggaagaagcagcccatgatcttgcccttgcctgtaaattggattatgatgaagatgttagtgcaatgctgaaagaagttcaacctagggcacagaaaattgaagaacatcggagaaagtatgagcgaaaacgtgaagagcgagagatcaaagaaagaatagaacgagttaagaaggctcgagaaaagcatgagagagcccagagggaggaagaagccagatgacagtcaggagctcagtatggctcttttctgggtggctttcctgggggaatgcctgctaattttcccagaggaatgcctggaatgggagggggcatgcctggaatggccggaatgcctggactcaatgaaa

SEQ ID NO: 8640 - DNA, 577 bp, Homo sapiens
  MAP TO AC006531.1; EXPRESSED IN PLACENTA, SIGNAL = 5.8; EXPRESSED IN BRAIN, SIGNAL = 8.5; EXPRESSED IN BONE MARROW, SIGNAL =   7; EXPRESSED IN HELA, SIGNAL =   9; EXPRESSED IN ADULT LIVER, SIGNAL = 7.8; EXPRESSED IN HEART, SIGNAL = 8.6; EXPRESSED IN LUNG, SIGNAL =   5; EXPRESSED IN FETAL LIVER, SIGNAL =  11
agacatacagcgcaccacacaattaccacagttcacccagagaaagcattccaattgcaccttacagatttagtctgccttgttgcaagaaagacgtgctcttggctgtgagatgggatctagagcagctcaacaggaaatgcgtgggagaaagaagcactgtgagcccctttattgcccatgctttcttccctcccctgcattcagcacacagaaggatgctcaccttttcccattcccggtctttgttcagcacaatcaccaccagcctggggtgcacctggtagccttcctcagtgaaggataagtctttgccatcccatgtaacattgaccataaatctagaaaggggaagagagaaagacaaatttttaggaaagaattagagcaatcgaacaaataagtggatgccaccattaatggaatactgaaaaattataaacttacaatgctatattcatcacaagaagcctctctgcagaagtattaataaccatgcaaccattgctagttgaccatgctttagtaattgactgtaattaacacgtggaatgtaagctttttgtcctgccagatt

SEQ ID NO: 8641 - DNA, 554 bp, Homo sapiens
  MAP TO AC005212.1; EXPRESSED IN BRAIN, SIGNAL =   5; EXPRESSED IN PLACENTA, SIGNAL = 4.1; EXPRESSED IN HELA, SIGNAL = 5.3; EXPRESSED IN ADULT LIVER, SIGNAL = 2.6; EXPRESSED IN FETAL LIVER, SIGNAL = 5.3; EXPRESSED IN LUNG, SIGNAL =  10; EXPRESSED IN BONE MARROW, SIGNAL = 3.5; EXPRESSED IN HEART, SIGNAL = 4.5
gacttggtgtgtggtggttgtgacccctcatcttgccctcaggtctcggtccagctcgacttccagctcaggctccagcaccagcactggctcaagcagtggctccagctcttcctcagcatccagccgctcaggaagctccagcacctcccgcagctccagctctagcagctcttctggctctccaagtccttctcggcgcagacacgacaacaggaggcgctcccgctccaagtgagtgccctgcgcctgggagctaaagtttacaagctcggggctacagatttaccatcgaggttataaaagggacccaaaaggagtctttctgtgttaataggatttctgagacaggaataatgtatgtgaactagcaggaaagtcttccttatgaaaactgtcacacaagcagataagagcttactcgaaaggcgtctagtacattttgacttgacagaaattgtttctggtgttttgttttctcaatcagatccaaaccacctaaaagagatgaaaaggagaggaaaaggcggagcccatctcctaagcccaccaaa

SEQ ID NO: 8642 - DNA, 520 bp, Homo sapiens
  MAP TO AC009818.4; EXPRESSED IN PLACENTA, SIGNAL = 1.7; EXPRESSED IN BRAIN, SIGNAL = 1.7; EXPRESSED IN ADULT LIVER, SIGNAL =   2; EXPRESSED IN BONE MARROW, SIGNAL = 2.1; EXPRESSED IN FETAL LIVER, SIGNAL = 1.9; EXPRESSED IN HELA, SIGNAL =   2; EXPRESSED IN HEART, SIGNAL = 1.8
tgactagatgcagccaggtggaatggctcccactgagggaccaagacaactgacatgctcctaatagatcttcagaaggaaggcacccaaagtggactgagggaagacacagaagctgtactaaagaaggagaaagctgggaacactgcatggggctactgcacacctggactcattcctggccacagtggctccaggggaatgggtaagttaaactggcaaggagcaacctgctctcaccataggcctgtggaactctggcaggagaagattccttaatcaccatggaaatcaagttggcagggagagctgcttagagaagaggtaggggcagcaagccagctgatgtggagcccagatggtttggtgcaggaggatcagtagtgaagtacagccagggatggccatgcccctaggcttgacttgctcctaggagactttagctctagaggaactgttggacctgatctccgaaagacaatcttgcccattagatggggctatgctgacctgagcacca

SEQ ID NO: 8643 - DNA, 520 bp, Homo sapiens
  MAP TO AC017093.2; EXPRESSED IN BRAIN, SIGNAL = 2.1; EXPRESSED IN PLACENTA, SIGNAL = 2.2; EXPRESSED IN ADULT LIVER, SIGNAL = 1.9; EXPRESSED IN FETAL LIVER, SIGNAL = 5.3; EXPRESSED IN BONE MARROW, SIGNAL = 1.8; EXPRESSED IN HELA, SIGNAL = 5.4; EXPRESSED IN HEART, SIGNAL = 4.2
tggtaccagtagagtggggcgctgctgataagataaccaaaaatgtggaagcaactttggaactgggtaacaggcaaaggttggaacagtttggagggctcaaaagaagacaagaaaatgtgggaaagtttggaacttcctagagacttgttgaatggctttgacgaaaatgttgataatgatatggacaatatggtccaggctgaggtggtctcagttggagatgaggaacttgttgggaactggagcaaagatggctcttgttatgttttagcaaagagactggtgacattttccccctgtcctagagacttgtggaactttcaacttgagagagatgatttagggtatcaggcagaagaaatttctaagcagcaaagcattcaagaggtgactggggtgctgttaaaggtattcagttttataagggaaacagagcataaaatctcagaaaatttccagcctgataatgcaatagaaaagaaaatcccgttttctgaggagaaattcaagcagcctg

SEQ ID NO: 8644 - DNA, 561 bp, Homo sapiens
  MAP TO AC004554.1; EXPRESSED IN ADULT LIVER, SIGNAL = 4.1; EXPRESSED IN BONE MARROW, SIGNAL = 3.6; EXPRESSED IN FETAL LIVER, SIGNAL = 3.9; EXPRESSED IN HEART, SIGNAL = 3.7; EXPRESSED IN PLACENTA, SIGNAL = 3.4; EXPRESSED IN LUNG, SIGNAL = 3.6; EXPRESSED IN BRAIN, SIGNAL = 3.5; EXPRESSED IN HELA, SIGNAL = 3.9
gtacttcctacgtgctgggcactttccaggtaattatgacatgaaatcctcacaaaaactctttgaggtaggcactttcatcattctcatttgatagatgaagaaactaaggcaaaaaaggggcttaataatttgtttaatgtcacaaaacagagctgggatttaaacctaggcagtctggttcagagtctagctgaaccgattcacttcattttctctgcagctaaatctgcctacctctgaatctgagtctcagtgtcctcactcataaaatgaaggttgatactatcaccccacagagttgttctaagaacactaaactggcgtgcattctacaaatactaattgttattttgtttgtcaccatcatcatcatcctcacccatcaacgattatttgactgaaataagtgaacaagaaatcacctggaggttctaatttgagcagaattacactttgctcagaaagtctgctggcccagtccaggatttccctggacaaaattactagctatatcaaagcccttgttatattaaacgctgaggcagcatggctattgtt

SEQ ID NO: 8645 - DNA, 561 bp, Homo sapiens
  MAP TO AC009330.5; EXPRESSED IN PLACENTA, SIGNAL = 3.9; EXPRESSED IN BRAIN, SIGNAL = 3.5; EXPRESSED IN HELA, SIGNAL = 3.5; EXPRESSED IN ADULT LIVER, SIGNAL = 3.5; EXPRESSED IN BONE MARROW, SIGNAL =   6; EXPRESSED IN HEART, SIGNAL = 2.2; EXPRESSED IN FETAL LIVER, SIGNAL = 3.8; EXPRESSED IN LUNG, SIGNAL = 6.7
taaaggtctgtccacaggggcaggcaccactcagaacagacccttccactgatcttgcccatctgatgttaccatgtttgttgtaaaggaagagactggcattctggacaactggcatcagagactggctgacatggagaacccactctgtgtgtgctgagggcagggcactcaccagtgcagaggcagaagtgggtgcctgtcctcgagggttaacccgctttgcctcccgcccacagcccctccaccttctaaaagctcaagagatgatcagactgaaacacccgcccatcttgctgttctgcctaggctggaagacctggcccaggtcatggaggcccctgctccacttgccagattcgcaggagtcttctgaccagagctgtcgcaccttgctgctgccactggcactgctgccattctcatcctcttgggggccttcattggtgccacattctttgtagccacctgggctgtcagccatgagggaaggaccctcgttttagtctcggattgtaaggtttccatctctgtaccttctcacaaagaagagtcagggcc

SEQ ID NO: 8646 - DNA, 531 bp, Homo sapiens
  MAP TO AC008843.4; EXPRESSED IN BRAIN, SIGNAL = 1.8; EXPRESSED IN PLACENTA, SIGNAL = 1.4; EXPRESSED IN FETAL LIVER, SIGNAL = 1.9; EXPRESSED IN HEART, SIGNAL = 1.8; EXPRESSED IN LUNG, SIGNAL = 3.3
gcctactgttggaatctggcctgacgggcagactctgttactgctctccgtgatactcggaaggagcagtgtctggacagcattcctttgtcttctggttgattctagagtaactaaggatattggtccagattttcacatccatccactcttcattcccactttattgttgattttaagcccagagttgcctttaatgcagggaggtgtcctgtgtgctacaaaaatggcatggacaagagaacacatgctgagtaaggacaccaagccatacattgccgagggccgctcctccacagtccccctgtggctgtggcaacagccaagactgctgctgctgctgctgctgtgaaggagcccttctttggccaaagctagggaaggaatttcaggggaacttagaaaagtagatcatacatgccagcgctgaagcagaacttaagatcagcaagtcaccacctgcctgattttgaatcctacctatgctatctttcacaagcagacatgcaagctgtgcttgaatagcctgca

SEQ ID NO: 8647 - DNA, 540 bp, Homo sapiens
  MAP TO AC013827.4; EXPRESSED IN FETAL LIVER, SIGNAL =  15; EXPRESSED IN HEART, SIGNAL =  12; EXPRESSED IN BRAIN, SIGNAL = 9.3; EXPRESSED IN PLACENTA, SIGNAL = 6.2; EXPRESSED IN LUNG, SIGNAL =   4; EXPRESSED IN HELA, SIGNAL =  14; EXPRESSED IN BONE MARROW, SIGNAL =   7; EXPRESSED IN ADULT LIVER, SIGNAL = 8.4
cgtcccattaatcccatcacttttcttcattcattttcattttcttctttttttcttctactaactgtatagtttcaaatgaccttttactccacagattcttctgcttgattaattttgcttttgatattttctatttgattttgtattttatgtattatatttttacctccagaatttctatttttttttttcatttctctgttacatttttcattttggtcagttactgttttccgaatttcatagaattttctttccatatttgcttgaaggagactgagcttccttgaaagaattgcttcaaattccttgtcaggaaatttgtttatctcaactgctttgacattagctactttgaaattattgtgttttagtagttttttaaattttatttattttttttgacaggctcttgctctgttgcccaggttggagtgcagtgaaattatcatggctcactgtagcctttaccttctgggcccaagctatcctcccatctcagcctcccacgtagctgggaccacaggcacttgctat

SEQ ID NO: 8648 - DNA, 596 bp, Homo sapiens
  MAP TO AC010931.5; EXPRESSED IN BRAIN, SIGNAL = 3.6; EXPRESSED IN PLACENTA, SIGNAL = 2.3; EXPRESSED IN BONE MARROW, SIGNAL = 1.5; EXPRESSED IN HELA, SIGNAL = 3.2; EXPRESSED IN LUNG, SIGNAL =  12; EXPRESSED IN ADULT LIVER, SIGNAL = 1.8; EXPRESSED IN FETAL LIVER, SIGNAL = 2.8; EXPRESSED IN HEART, SIGNAL = 2.9
cagaggcccttattgtctgcttcatttctcagctgagcccccatccctggcacccccagcagtgacctctgtggtggaacagctacaagatgaggccaaacacctgaggcaggaggtggaaggtctggagggaaagctccagtcccaggtggaaaacaatcaggccttgagtctccttagcaaggaacaaaagcagagactccaggagcaggaggagatgctccgagagcaggaggcgcagagagtgcgggagcaggagagactgtgtgaacaaaacgagaggcttcgggagcagcagaagatgctacaggagcagggtgagaggctgcgaaagcaggagcagaggctacgcaaacaggaggagaggctgcgaaaggaggaggagaggctgcaaaagcaggaaaagaggctgtgggaccaggaggagaggctgtggaagaaggaggagaggctacaaaagcaggaggagaggctcgcgctctcccagaaccacaagctcgacaagcagctggccgagccacagtgcagcttcgaggatctggtgggttgccccacctggggagcctgccctcatccctatccctccaggcctttgt

SEQ ID NO: 8649 - DNA, 540 bp, Homo sapiens
  MAP TO AC011683.3; EXPRESSED IN BONE MARROW, SIGNAL = 1.7; EXPRESSED IN HELA, SIGNAL = 2.3; EXPRESSED IN LUNG, SIGNAL = 2.1; EXPRESSED IN BRAIN, SIGNAL = 2.1; EXPRESSED IN PLACENTA, SIGNAL = 2.3; EXPRESSED IN ADULT LIVER, SIGNAL =   2; EXPRESSED IN FETAL LIVER, SIGNAL = 2.1; EXPRESSED IN HEART, SIGNAL = 2.2
tttctggggagactttgcacagctcctcatgccaccattctggagtgcttctcctccctagaatgttttacactggttcattctcctgtttgtattattcaatgcaattatatgggaagggattataattttatagtataatttttgtctccacaaacatttttctggccacatgaggctgtgggattgctccagtcagcagctcaatgacctcaaagcccagagaagccctggagctgtgaatatagatgaggggggccttgggaacctgcttggtcaggacttcctcagcagatggctctcgctttatgtcctgatttatattttgtgggaggagtaaggataaaaatagtattttactgaggtttttgtttggttcatgacttaaataagctgcacagaatcttagggaaggcatgggaaggcctcaaacaaatatttgctgtccatcagtcatctgcagcaacatgatgattgtagacttaaagtcctacaacccaaaaagctattttatgagacaggacctgatggcttctatgc

SEQ ID NO: 8650 - DNA, 587 bp, Homo sapiens
  MAP TO AP000963.2; EXPRESSED IN PLACENTA, SIGNAL = 2.1; EXPRESSED IN ADULT LIVER, SIGNAL = 1.8; EXPRESSED IN HEART, SIGNAL = 2.2; EXPRESSED IN BRAIN, SIGNAL = 2.7; EXPRESSED IN LUNG, SIGNAL = 4.1; EXPRESSED IN HELA, SIGNAL = 3.2; EXPRESSED IN FETAL LIVER, SIGNAL = 2.6; EXPRESSED IN BONE MARROW, SIGNAL = 2.2
tctagtccatgccagcttccaaaaaccatgccagcttcattctttgatgcctcatcaaaattttctacaagatcgggaacatcatcatcctcctcatcagtgtcttctggttttgctgctttactgtccaagacttgccgtgggaactgttcagctaacttcctaaggcttgttaaactgtcagcaccaagctgacttaatattccaggtatcatttctgtgattggtttggcttctgcatgaccagtaattgcaaaggtgttagcagaaagggaagcttggactttgggattgttgaagtgaataactgtcccatcatctttaatcatgttcatctcttcaataccaactatattattcacagccagtttttttagagaactctgaagctttttgtcatcagccatggctgttttatgtaccaccttctttctgcgagctgtacccttgccccctatccggacctgagcctgaagtttggctaacttttcttgattcatgctgttggtaaatctgaagcagggagggtcctccagcaccagcacgcggcaagagcaagatggctgcccgatatgccccctcttaat

SEQ ID NO: 8651 - DNA, 592 bp, Homo sapiens
  MAP TO AC011462.3; EXPRESSED IN BRAIN, SIGNAL = 7.1; EXPRESSED IN ADULT LIVER, SIGNAL = 5.4; EXPRESSED IN HELA, SIGNAL =  10; EXPRESSED IN HEART, SIGNAL = 7.5; EXPRESSED IN PLACENTA, SIGNAL = 7.4; EXPRESSED IN LUNG, SIGNAL =  17; EXPRESSED IN FETAL LIVER, SIGNAL = 9.3; EXPRESSED IN BONE MARROW, SIGNAL = 7.5
gggggtctagagaatcccagaggacatgctttgttgttcaccttgagttcttgctctgcgcctggccatgccggctcacagtagtcaccaagacaacccagttccctggggttgccatttgggaatgatggcgcctttcatctggatttctccaacacaggtttcaaccgcagcggaggtggtggctatagccagaaccgctggggtaacaacaaccgggataacaacaactccaacaacagaggcagctacaaccgggctccccagcaacagccgccaccacagcagcctccgccaccacagccaccaccccagcagccaccgccaccacccagctacagccctgctcggaaccccccaggggccagcacctacaataagaacagcaacatccctggctcaagcgccaataccagcacccccaccgtcagcagctacagccctccacaggtgagagaatgagtgtgtgtttgtatgtagtgatcgcacgtgtgcttttgaacctgagcaagttaggtggaggcggatctggggaaatcaacacatgccccagctactggtcttcactctaacctctagcctgcccttcttt

SEQ ID NO: 8652 - DNA, 560 bp, Homo sapiens
  MAP TO AC021097.3; EXPRESSED IN BRAIN, SIGNAL = 3.2; EXPRESSED IN HELA, SIGNAL = 4.9; EXPRESSED IN ADULT LIVER, SIGNAL = 4.6; EXPRESSED IN FETAL LIVER, SIGNAL =   5; EXPRESSED IN HEART, SIGNAL = 3.9; EXPRESSED IN LUNG, SIGNAL = 5.4; EXPRESSED IN BONE MARROW, SIGNAL = 3.2; EXPRESSED IN PLACENTA, SIGNAL = 3.7
gaaaccaagagggtcagcagtgtgttggggacctgggggtagaggagaaaaggccccatctggactagaaggcagaacccatgcaggggatggggcaggagcagccctgagggaccctgagcgaagggaatgaaggatggagggtagggtcagctgaggacactgactggcactcgataaaccactgtcggatttgctccttcattttctccttcatgtcaggcccctctgtctctaccagagaatcatgggccttcaccattgctgcccggaactcctcctctttctccatctggcggagcctctggacatcctccacgaggcatggctgggagatgatgctcaggtgctctacctggttgggtgaggggagctgggggagtggaagagaggctgaggggctcaggagtgggaggaaccagcaaccagtctggatgcagcccccagcctcgggcacacacgcctgtacccactccttccccaacaccacgctcacacaaggcctcgcacacacacccacacggaacaacgggcatgcctgcatcgggagaaactgtgtt

SEQ ID NO: 8653 - DNA, 565 bp, Homo sapiens
  MAP TO AL136298.1; EXPRESSED IN ADULT LIVER, SIGNAL = 1.7; EXPRESSED IN HELA, SIGNAL = 2.4; EXPRESSED IN HEART, SIGNAL =   2; EXPRESSED IN BRAIN, SIGNAL = 3.8; EXPRESSED IN PLACENTA, SIGNAL = 1.5; EXPRESSED IN BONE MARROW, SIGNAL = 1.9; EXPRESSED IN FETAL LIVER, SIGNAL = 2.2; EXPRESSED IN LUNG, SIGNAL = 2.4
caggaagcaggagagaggtggactaactgcaaacaggacagggacacctgtcccctaaggcagaaggaaatagtaggtaaaaatggtggttagcaagtctgggccagccaggaagctgagatgttctcactcgatgatcaaaagctgctcagtgaagtagggggcatggtcttcctccaggagaagtggggaggtgagataatggggaggggtttgaggcaaagtttggactggctgctgagagaacaggaaaaagattgaccaggaggatggcctggtggcccagaggcccttctgacagtcgacttcggtacaagtggcccaggagtggcacccatgggagattatggtacaggagagaatggggtccctggggggccagggctgcagggagaagctgttcagaggaggttatacagataggaaagaattgggatcagtaatcaagaggattaaatgaccacccaaagcacacattatatggtcggttccaaaggaaagcttgacaggtcctgggggtgtcaataagtcctggtgagacatcagacaccttggatggcaagtt

SEQ ID NO: 8654 - DNA, 560 bp, Homo sapiens
  MAP TO AL109985.2; EXPRESSED IN HELA, SIGNAL = 1.9; EXPRESSED IN HEART, SIGNAL = 1.7; EXPRESSED IN PLACENTA, SIGNAL = 1.6; EXPRESSED IN BRAIN, SIGNAL =   3; EXPRESSED IN BONE MARROW, SIGNAL = 1.5; EXPRESSED IN FETAL LIVER, SIGNAL = 1.8
atttgccagcaacagagaccaacaccgagccctcgatatggcaccattactctgggtaatcagcccgctacctggtggcaggttgattatattggaactcttccatcatggaaagggcagaggtttgtcctcactggaatagacacttactccagatataggtttgcctatcctgcatgcagtgcttctgccaaaactaccatccatggactcatggaatgccttatcctccatcatggtattccatacagcattgcctctgaccaaggcactcactttacagctaaagaagtgtggcagtgcgctcatgttcatggaattcactggtcttaccatgttccccatcgtcctgaggcagctggatgaatagaatggtggaatggtcttttgaagtcagaattacaatgccaattaggtgataatactttgcaggtcttggccagagttctccagaaggccatgtatgctctgaatcagcatccgatatatggtattgtgtctcccatagccaagattcatgggtctagtaattaaggggtggaagtggaagtggcaccatt

SEQ ID NO: 8655 - DNA, 593 bp, Homo sapiens
  MAP TO AC025286.1; EXPRESSED IN PLACENTA, SIGNAL = 1.5; EXPRESSED IN BRAIN, SIGNAL = 1.5; EXPRESSED IN HELA, SIGNAL =   2; EXPRESSED IN FETAL LIVER, SIGNAL = 1.9; EXPRESSED IN HEART, SIGNAL = 1.8; EXPRESSED IN LUNG, SIGNAL = 2.4
acttcagacccatggacaggacacaggcctggggtcagctggcctcaggatgccccacggcagcctcagggtgacttgtggtctctgttgctttcttctgtgactgatttgctctctctgaggctctggttcctcatctaatgagtttgaacaatatcccttttctagactgaagctgcttacaatttttaaatgagggttttctcagctttggtctgtagggttttttagaaatcagcatcagttcagtctgatacatatgcaccaggaaggagagtgaatgctgtggatacttccctctgtgacctgaccaccccaacaccctctcctggaagtgaaggtccccaggaggggagtggggagcctctcatccatgagctcccccaccctcatgtccttctttccactgtggaggatcaggagcgtgggtctccccagccttccttccaaaggcttcattcagcctcagttgcttccattcttttgcaaatttggagtcctaattgcggaaacagagtcagactggcagaactgaggaaaagcaaaagaaaaagcaggtaagccacaagtctgcctttcttcatggtccagga

SEQ ID NO: 8656 - DNA, 568 bp, Homo sapiens
  MAP TO AC021012.2; EXPRESSED IN BRAIN, SIGNAL = 9.6; EXPRESSED IN FETAL LIVER, SIGNAL =  12; EXPRESSED IN HELA, SIGNAL =  13; EXPRESSED IN BONE MARROW, SIGNAL = 7.4; EXPRESSED IN HEART, SIGNAL =  11; EXPRESSED IN LUNG, SIGNAL = 5.4; EXPRESSED IN PLACENTA, SIGNAL = 6.8; EXPRESSED IN ADULT LIVER, SIGNAL = 8.8
taggggaaattggctcacacaatcatagaggcagataagccaactgcaaactggtgaactagagaagctggtagcatgtctcagtccaagtctgaagcccctgaaccagggaagccaacagtacagcccttagtcaggcccaagaaccctcaagaggccactgctgcaagttccagagtccaaaagctgaagaagctggagttggatgtccaaaggcaggaagaggaaaagcattctgctccctaagggagagaaagagtagagagagccaattgtcttcttattgttccagctaggcccccagccaactggcgtattgagggcaggtcttcctctttcagtctactggaaacatcttcacagacacacctagaaacaatgcttcaccagccctgcaggcatcactcaatctggtcaggttgaagtctcaaattaatgatggttaagtatagtccaccccttatcaacttaccatctatatgcatcttgttaaattataatttccaatcaaagacaataacaaggtcataattccacctaaagtgagacaactgtcctttgcacaacc

SEQ ID NO: 8657 - DNA, 597 bp, Homo sapiens
  MAP TO AC007216.2; EXPRESSED IN BRAIN, SIGNAL = 7.1; EXPRESSED IN PLACENTA, SIGNAL = 4.1; EXPRESSED IN FETAL LIVER, SIGNAL = 5.7; EXPRESSED IN ADULT LIVER, SIGNAL = 1.6; EXPRESSED IN BONE MARROW, SIGNAL = 9.4; EXPRESSED IN HELA, SIGNAL = 4.3; EXPRESSED IN LUNG, SIGNAL = 9.5; EXPRESSED IN HEART, SIGNAL =   4
gggatgtggttaccttttggaggaggttgacggtttctaaggatgattctttctgagtgaaatattgtcagtgtcattgaccttttcattatttcaactattattattccaggttatcaatactctggctgaccatcatcatcgtgggactgactttggtggaagtccttggttacgtatcattattgcatttccgagaagttataaagttgtccttaccctctggacagtttacctttgggtgagtgtactaactttctgtagaggtatacttgtaatcacaaataagaataaattatataaaacaattcacatttctggacttcattatgaatatgtggttttacccaaaaaatcagggaaatgatttattagcataagaattatgaaaatatctgccatttacattatgaaaattaaataggtcagtgtttgtttaatagaatgtcaacagagcttttggtcaaaaataagtttttttaacctttgtgctatttgtcacaaatggagtatgaggtttcgtcacttaaataggaaattctttctaaactcttctgctttatagttctatcgtatgggtggaaggaaagcttccag

SEQ ID NO: 8658 - DNA, 559 bp, Homo sapiens
  MAP TO AL133286.5; EXPRESSED IN PLACENTA, SIGNAL = 2.4; EXPRESSED IN BRAIN, SIGNAL =   3; EXPRESSED IN FETAL LIVER, SIGNAL = 2.5; EXPRESSED IN HELA, SIGNAL = 2.2; EXPRESSED IN ADULT LIVER, SIGNAL = 3.1; EXPRESSED IN LUNG, SIGNAL = 3.8; EXPRESSED IN BONE MARROW, SIGNAL = 2.6; EXPRESSED IN HEART, SIGNAL = 2.4
tgttgtcctttgacctgcacatactgttcttttgcagggaaaacagaccctgtatttttgggattcctgaaaggtgaccaggtgagagcaaagcccaacttcctggggaaaagctctcagcgcagtgaatgctacattcggaggtaggaaggctctggatgtgagtcttcatgtttgttttttgttttttgtttttttttctctaaaattaccaaaaaagaggaatatccacagaagcagaagtaggaatggggaaggaggggacaagtttagaccaagctcttctgtgacctcacttctgcttttgaagtcccacagctctataaggtaaggttacttgtgttattagcgcttaagtcaatattggaggtgataagttcttgttttctcagctaatttacctaatttcttccgaaattcctatgaagtatactggattgtgaaattagttcctgcagagacacctgaatcatgtctcaaagaaggatcattatcttagggtacaatatcatgattttataacataaaactaagtcatgcagccctactgtcttgggaa

SEQ ID NO: 8659 - DNA, 557 bp, Homo sapiens
  MAP TO AC008545.3; EXPRESSED IN BRAIN, SIGNAL = 1.7; EXPRESSED IN HEART, SIGNAL = 2.1; EXPRESSED IN ADULT LIVER, SIGNAL = 1.4; EXPRESSED IN BONE MARROW, SIGNAL =  13; EXPRESSED IN FETAL LIVER, SIGNAL = 1.9; EXPRESSED IN HELA, SIGNAL = 2.1; EXPRESSED IN LUNG, SIGNAL = 1.9; EXPRESSED IN PLACENTA, SIGNAL = 1.5
caaaggaaggtgctgaggtcctgggagccgtctggggttcaccttgaggactggccccagcagggtgccccttgggctgaggcacaggcccctggcagggaggaagacagaagctgtgatgctggcgccccacccaaggacagcacgctgctgagagaccatgagatccgtgccagcctcaccaaacactttgggctgctggagaccgccctggaggaggaagacctggcctcctgcaagagccctgagtatgacactgtctttgaagacagcagcagcagcagcggcgagagcagcttcctcccagaggaggaagaggaagaaggggaggaggaggaggaggacgatgaagaagaggactcaggggtcagccccacttgctctgaccactgcccctaccagagcccaccaagcaaggccaaccggcagctctgttcccgcagccgctcaagctctggctcttcaccctgccactcctggtcaccagccactcgaaggaacttcaggtatgaacagggggctgcaggagaggcagcgggcagtggaggatcccagtt

SEQ ID NO: 8660 - DNA, 523 bp, Homo sapiens
  MAP TO AF111170.3; EXPRESSED IN BRAIN, SIGNAL = 4.5; EXPRESSED IN ADULT LIVER, SIGNAL = 4.7; EXPRESSED IN HEART, SIGNAL = 4.6; EXPRESSED IN PLACENTA, SIGNAL = 3.9; EXPRESSED IN LUNG, SIGNAL = 4.9; EXPRESSED IN HELA, SIGNAL = 4.3; EXPRESSED IN FETAL LIVER, SIGNAL = 4.3; EXPRESSED IN BONE MARROW, SIGNAL = 3.6
agagaggcacattcagccacaccgcacatgccactcagagcctaaagaagggaaacaggtagaacaggatctcatggcacatggagatcacagaaaattcacatttcagtgtccttaaataaaaagtgattggaacccacatataaaaagtgagctcagaaacttacaaggaaaagcacaaatctatattcttaaagttgctgctgtggccgtgtgatacttttcatgttctgtgggaacatttggctaagagctgcctcgtgctgtgtcctagggaggcgccacatccaccacctggggaaccagctgcagctgaaccagcactgcctggacaccgccttcaacttcttcaagatggccgtgagcaggcacctgacccgcggccggaagatggcccacgtgattgctgcctgcctctacctggtctgccgtacggagggcacgccgcgtatcctttggtttgagagcctcccagagggccccatcttgatgcttagttggctcccctcgaatattgggactt

SEQ ID NO: 8661 - DNA, 512 bp, Homo sapiens
  MAP TO AC011510.3; EXPRESSED IN BRAIN, SIGNAL =   4; EXPRESSED IN PLACENTA, SIGNAL = 4.5; EXPRESSED IN BONE MARROW, SIGNAL = 4.1; EXPRESSED IN ADULT LIVER, SIGNAL =   4; EXPRESSED IN HELA, SIGNAL = 4.8; EXPRESSED IN LUNG, SIGNAL = 8.4; EXPRESSED IN FETAL LIVER, SIGNAL = 5.5; EXPRESSED IN HEART, SIGNAL = 4.6
acacccctcacctcacactcagagcagcttttcagctctgagtccaaccctgaggagctgggacaaagtggccacttgccccaaggctactctcgcagcaagtctgtgtgtgtgtgtgtgtgtgtgtctcctctgtcttggcagcaaggtggccaccaatacattctggccccactcacctcacattctgccttgctctttggtccaacggtgccccggatacgctcactaaggggaaggtgctggatgaaggtaaaccccgggaggacagaacagtagggctctgctctctgtccgaagttgaactccactgcgcaattcttcaccaggacatgaggatagagggcctgaccccccaaggcttccttctggattcggaaagcaatgcccatccactttccattcttggtaaaagacagttccacgtcatttccacattcaaaatcctaggagaaaaagccaaaggaatatgattgccaactcttgccataggcactgggagtcaaatgtga

SEQ ID NO: 8662 - DNA, 552 bp, Homo sapiens
  MAP TO AL158148.1; EXPRESSED IN BRAIN, SIGNAL = 4.6; EXPRESSED IN HELA, SIGNAL = 5.2; EXPRESSED IN PLACENTA, SIGNAL =   4; EXPRESSED IN FETAL LIVER, SIGNAL =   6; EXPRESSED IN ADULT LIVER, SIGNAL = 4.2; EXPRESSED IN BONE MARROW, SIGNAL = 3.4; EXPRESSED IN LUNG, SIGNAL = 6.3; EXPRESSED IN HEART, SIGNAL = 4.7
gatgaccttcctctcccctccccggttctcaccttcgtccccttctctgacagatgcgcacgtccccacagctctaagcagaagccaccaaccaggggggtgccgtgagggaagactcccatgggcgccgtggcgggcagacctggtgccccagacttcagctgccacgcagggagtgaacctggcccctctgccaattctccgttatgaaatgccgccgcccccggggagccgtctccggccttccgcagtggctcggcagcaggtttatcacactcgctgagagaagacataatcaattccccagctggcactttgcgctgaatacccactttttcagcttgatagcaggactaaattagttatttagcaactaggccctaatttagagcgagcgagagccttgacaaggatcattgttcaaggccatcccccctttgccttcagatgggaggcccacaaatccccagaaggtgataaatagacaattagaaaatagatatatttggttagatctacaaggcttcccggcgctgtcaggctcacaatgaa

SEQ ID NO: 8663 - DNA, 566 bp, Homo sapiens
  MAP TO AC011447.2; EXPRESSED IN PLACENTA, SIGNAL = 3.6; EXPRESSED IN BONE MARROW, SIGNAL = 3.8; EXPRESSED IN FETAL LIVER, SIGNAL = 4.6; EXPRESSED IN LUNG, SIGNAL =   2; EXPRESSED IN HEART, SIGNAL =   3; EXPRESSED IN BRAIN, SIGNAL = 3.9; EXPRESSED IN HELA, SIGNAL = 5.1; EXPRESSED IN ADULT LIVER, SIGNAL = 1.8
cgcatcctgtagcctttttgtccaaacaacttgaccttactgttttaggctggccatcatgtctccgtgcagccgctgctgctgccctaatacttgtagaggccctcaaaatcacaaactatgctcaactcactctctacagctctcataatttccaaaatctattttcttcctcacacctgacacatatactttctgctccccggctccttctgctatactcactctttgttgagtctcccacaattaccattgttcctggcctggacttaaatgcggcctcccacattattccggataccacacctgaccctcatgactgcatctctctgatccacctgacattcacatttccccaaatttccttcttccctgtttctcaccctgatcacacttggtttattgatggcagttccaccaggcctaatcaccactcaccagcaaaggcaggctatgctatagtatcttccacatctatcattgaggctaccgctctgcctccctccactacctctcagcaagccgaactagttaccttaactcaagccctcactcttgcaaaagga

SEQ ID NO: 8664 - DNA, 573 bp, Homo sapiens
  MAP TO AL157915.1; EXPRESSED IN BRAIN, SIGNAL = 2.7; EXPRESSED IN PLACENTA, SIGNAL = 2.3; EXPRESSED IN FETAL LIVER, SIGNAL = 2.7; EXPRESSED IN ADULT LIVER, SIGNAL = 2.5; EXPRESSED IN BONE MARROW, SIGNAL = 2.1; EXPRESSED IN HELA, SIGNAL = 2.9; EXPRESSED IN HEART, SIGNAL = 2.3; EXPRESSED IN LUNG, SIGNAL = 1.9
gttcaagttccagctctgccatactaaggtatgtaacactgagcaaattacctggcctttctaattttaggttctggcataaataaatggaaagatctataccagatgattattaagatctttcttagctctaaagttatatgattcctttgtaaaatggatttcttttgatgtctaaaaacaaatcacagtgagtatgttacatttcccagcatttgcgtcatctgggagctcatgaaatagcaagctttaaccatgaagtctgtcagtgaaaataacccaggttgagggtgatttttttttttaataataggagtgttctcacatgtttcaaatgccgtttgattgtaagttcctacaatggggaagtcggcagttttctgttgtgggtatagggtagcaggttgatctgtgtctctaaaaattgaaataattcacatggctacccaatgacaagcccattgaagcataaagtaattgggttaataagtgactgcttataattcccaaaaataggaaaatgaaaatctaaaattgacaacaaagcacatgacaaacatctggaacgggagt

SEQ ID NO: 8665 - DNA, 565 bp, Homo sapiens
  MAP TO AC018499.2; EXPRESSED IN BRAIN, SIGNAL = 2.2; EXPRESSED IN FETAL LIVER, SIGNAL = 2.3; EXPRESSED IN LUNG, SIGNAL = 2.1; EXPRESSED IN PLACENTA, SIGNAL = 2.4; EXPRESSED IN HEART, SIGNAL = 2.5; EXPRESSED IN HELA, SIGNAL = 2.7; EXPRESSED IN BONE MARROW, SIGNAL = 2.1; EXPRESSED IN ADULT LIVER, SIGNAL = 2.5
gtcttgggctattggtgtggggtcgagagcctccctgaggggtgtcctgggctgctctgtcagaaccccagcagggagccttgcctggcctctgactcacacccttgccccagtggaggccaaggccttgaatgaccacccggcccttgacatcgtagcttcgcagcatcctccctgcgttgaggccaccctgcgggctaaggggcaggtgggcacccttccatggggctgggggctgaggagcaaggaggtctcagcatggcctactggtgggagacccacctcaggcgctcccaactgtctccctcccgtggcccctctgcacggccgggttctgattttggtgcagtgcagactttcagcttaacgagacaaattggtattctgtgccagcccagggatggagcggcagctcgggacgctcgggcgggcagctcagaggtgggcaggaggtgggggcaggggaaagaggcagcttctgcctggaactgcctcccggggccgcctccagccctgcccctgtcccccatgcacccctccaccctgacaggtgccctgagacact

SEQ ID NO: 8666 - DNA, 519 bp, Homo sapiens
  MAP TO AL133257.2; EXPRESSED IN PLACENTA, SIGNAL = 1.7; EXPRESSED IN BRAIN, SIGNAL =   2; EXPRESSED IN FETAL LIVER, SIGNAL = 2.7; EXPRESSED IN HELA, SIGNAL = 2.5; EXPRESSED IN BONE MARROW, SIGNAL = 1.8; EXPRESSED IN LUNG, SIGNAL = 1.8; EXPRESSED IN HEART, SIGNAL = 2.9; EXPRESSED IN ADULT LIVER, SIGNAL = 2.1
tcaaggaacactcctcaaagcatgaggacattacagagttgccctaataaaactcccatggagcttctaatattaacttgactcggaggattgattttacaaaaattctaatctgcaagataatccgttcctggtctttattcctggacagtctctctgtctctattccctcctctctctcttcttcctcctcctgcttcttactactcttactcctattcctcttcctcttcttcttcttcctcttcctcttcttcttcttttctctctcactgtctctaaatctcactcactctctctccttatgacttctggataataccaatattagactaaaatgaccagtctgtccctctcctctagagagttctatggtctaaatgtctacgccctcacaaaattcatatgttgacatccaaatcccaaagcgatagtgtcaggcctctgagccaagctaagccatcatatcccctgtgacctgcatgtacacatccagatggccagttcccaccttaactg

SEQ ID NO: 8667 - DNA, 596 bp, Homo sapiens
  MAP TO AC006530.4; EXPRESSED IN BRAIN, SIGNAL = 1.6; EXPRESSED IN ADULT LIVER, SIGNAL = 1.4; EXPRESSED IN BONE MARROW, SIGNAL = 1.7; EXPRESSED IN HELA, SIGNAL = 2.3; EXPRESSED IN HEART, SIGNAL = 3.2; EXPRESSED IN PLACENTA, SIGNAL = 1.9; EXPRESSED IN LUNG, SIGNAL = 4.2; EXPRESSED IN FETAL LIVER, SIGNAL = 2.6
aggtgaaggaaactgggttggcttgatatttcaattatgaaatctgtttttaggcccgaaagaatgaacttgccattgaagatatggatggcggtaccttcaccattagcaatggaggcgtttttggctcgctctttggaacacccattatcaacccccctcagtctgccatcctggggatgcatggcatctttgacaggccagtggctataggaggcaaggtaggaaccgtcacttctaaggtcctagtggctaggtctcgatgaaagggaaatccaactaaatgctaattgtaaaacattaactataatttcaggcctaagttccatttcttagtttctaatagctaaggcactgattatcaaattgtggtctggatcagcatcatctgggaccttattagaaatgcatattcttagaccccatcccagacttaaagaagaagtgcagatgatcctgatgcatattcaagtttgagaaccactgagctgaggaggcttgtttgcttctatggagtgggggatatagttggaaacgtggtcccttgcccctgggaaacagatgacaattatgcatgtcagtctgtgagctgccaa

SEQ ID NO: 8668 - DNA, 550 bp, Homo sapiens
  MAP TO AL117694.3; EXPRESSED IN PLACENTA, SIGNAL =   3; EXPRESSED IN BRAIN, SIGNAL = 3.1; EXPRESSED IN BONE MARROW, SIGNAL =   5; EXPRESSED IN HELA, SIGNAL = 3.3; EXPRESSED IN ADULT LIVER, SIGNAL = 2.1; EXPRESSED IN FETAL LIVER, SIGNAL = 3.4; EXPRESSED IN LUNG, SIGNAL = 5.9; EXPRESSED IN HEART, SIGNAL = 2.4
tcaacctgttctggaaacccagtcatttgacatttggacaaacaatgagtgtttactatatgacaattttaaatgaaattgacaaaaatcaattaaaatggacaaaaatccctgcctttatgaaacttacaatggctcggcccatgcccttcaactcacgtggtcccatttgccattgatctcctgaggcgtgatggttgtgtaggggttggtgcccgccatattgacgtggtaggtctggacaatcttggacacctcattgtggatgcccaggatggccaggcgctccttgtcggcatcagggagggtggccttgaactgctcatgggctgtggtcagtccctggacagagatgggaatatgtgggcaagaggaacaaagggagcgctagaagtgagtggaagggccatggaggttgagttccacaccagctgggagaccaggaggcatcaattcaaagattcttgtggctgagaaccaggatggcaggtatggccacaggaaggtgaagccacagtcatcaaaagcaacagcttcatccttagggctg

SEQ ID NO: 8669 - DNA, 534 bp, Homo sapiens
  MAP TO AC005410.1; EXPRESSED IN BRAIN, SIGNAL = 3.8; EXPRESSED IN PLACENTA, SIGNAL = 2.6; EXPRESSED IN ADULT LIVER, SIGNAL = 4.9; EXPRESSED IN BONE MARROW, SIGNAL = 3.1; EXPRESSED IN HELA, SIGNAL = 3.8; EXPRESSED IN LUNG, SIGNAL =  10; EXPRESSED IN FETAL LIVER, SIGNAL = 6.1; EXPRESSED IN HEART, SIGNAL =   5
gtctgaactccgcagaaaggcttttttgcagatggtgcactgaaagtatgtctctccggtgtgagttctttggtgaaaaataagctgagaattcctataaaaggtcttcccacactccctgcaggtggggagcttctgggccatgggggctcttggctgccccttctgggaggtctctctcttctcctcaagccacatggtggacatttctcctgaatgaggattaggcaaatgctgacctagttgtttctcagaaatcctttcttgaggagacagctgttcccctgttccctcatcctgaatgttttgcagagcctcagggagattctctccttctccaaagcatcctggctcatcctcagtgaagaagcccctcaaggaagcctgagaaggaacctctcctgaagcttgacaggaagcatgcaggagctcctggtccctgtgattctccaaatttaggttctccttgtcattctcttgtctatctcctaaaagaagaaagaagatttgaaatggttcaagtgctatgccctg

SEQ ID NO: 8670 - DNA, 562 bp, Homo sapiens
  MAP TO AL133380.3; EXPRESSED IN PLACENTA, SIGNAL = 7.5; EXPRESSED IN LUNG, SIGNAL =  24; EXPRESSED IN BRAIN, SIGNAL = 7.5; EXPRESSED IN HELA, SIGNAL =  11; EXPRESSED IN HEART, SIGNAL = 7.4; EXPRESSED IN FETAL LIVER, SIGNAL = 9.5; EXPRESSED IN BONE MARROW, SIGNAL = 9.3; EXPRESSED IN ADULT LIVER, SIGNAL =  12
gtcagagtatggctcctgggatgcttttgcttatattttgtacagcttttccaagttggcttaggcaggattctcctttaagcgataaagacaacatgcttcccactgaactttttctccaattcacatactagccggacttggattttctggaaagatttcagttgaggaacgggaacaaagattatgatagctttctgaccaccaccaacctcaatttccttggctgccataatattcagctccctgagctgagccttgaggtccaagttcatctccagctccagaagagcctgggagatgcgggactcgaactcgtccggcttctcgccattaggcttcacgatcttggcgctcgtactgaacatggccttctcctgggagaacttgccgagcgccggcttaggaagagcagaaggatgccttttaagcaactccatgctgcaggctcttcgcctgaaatacaactctgcttcaggcaggtgagggcaggaggcaggaagccagacattcaggtaaattatggagatagtgcaaaggatcaggcatctcaatgcaagaa

SEQ ID NO: 8671 - DNA, 600 bp, Homo sapiens
  MAP TO AL157955.1; EXPRESSED IN ADULT LIVER, SIGNAL = 2.2; EXPRESSED IN FETAL LIVER, SIGNAL = 1.9; EXPRESSED IN BRAIN, SIGNAL = 2.1; EXPRESSED IN PLACENTA, SIGNAL = 1.7; EXPRESSED IN BONE MARROW, SIGNAL = 1.6; EXPRESSED IN HELA, SIGNAL =   2; EXPRESSED IN HEART, SIGNAL =   2; EXPRESSED IN LUNG, SIGNAL = 3.9
tctgattgaggggagaggtgattaacaattgtgtaatatgtatggactatgaggaaaagtgttagcaaagcaaacagggatggagttttattcacatttgcatcaccagcatctggggcttggaaagggtcttaagggatgaatggattaatgactcaatataaactgtacctgcagaatctctgatcagacagaacatttgctccaaagccattgaatgggctgggatggagcatgcatggttttagcttcatctcccacaactgtggctttgttctgtgttggtggcaggtggtttccaaaaggaaaagctttgggagatagaagtcctcgttttgacctctgccctccttgtacaccaggagccagaaaaacttcatctcttttacaagaaacattgagattcctgtaaaattaagaaatcacacaatttgatggtctacattatctaaagcaaatgagacttctatttggaacaaagactaccttgttgggaaatgagtctgcaagttaaagtgttttctggtaagtttctttggtccttagcttccttaaaggggaagtaatcattgcccatgggccccttttaatttccccaag

SEQ ID NO: 8672 - DNA, 556 bp, Homo sapiens
  MAP TO AH009158.1; EXPRESSED IN ADULT LIVER, SIGNAL = 4.2; EXPRESSED IN BONE MARROW, SIGNAL = 3.3; EXPRESSED IN HEART, SIGNAL = 3.2; EXPRESSED IN PLACENTA, SIGNAL = 3.1; EXPRESSED IN HELA, SIGNAL = 3.9; EXPRESSED IN LUNG, SIGNAL = 4.7; EXPRESSED IN BRAIN, SIGNAL = 4.8; EXPRESSED IN FETAL LIVER, SIGNAL = 3.7
atatttgcagcctgggtcaggggaaagggtacatgggcttaatagaggtacttgctcagatgctctctctctgttgcttgattcactctttcccttagtcatggccctgtccaaacccagtgaatcttatccttcttgtccacagggaatttgccaaagagagagagagagtggagaaccgaagggctttcatgaagctgcggcgccagcagcagattgagcgtgagctgaatggctaccgtgcctggatagacaaagcaggtaggcctggggggctgcaggaggctggtgagtgggctgcagagacatcagggccggcccctcactcccaatgctcccattcaaggggcagcctagacaagacaagagagacactctggatgcttggttggctcttaaggttccctgctcatccgactttcttcctctggggtctaactgtcctgtctatcaaactgtcccaacaccttaaggcaggcatcttagcaaggtgaactgagtaaaagtaacataacccaatcctggagctgagactgggctgatggcgttttgtaat

SEQ ID NO: 8673 - DNA, 534 bp, Homo sapiens
  MAP TO AL121975.3; EXPRESSED IN FETAL LIVER, SIGNAL = 2.5; EXPRESSED IN BRAIN, SIGNAL =   2; EXPRESSED IN PLACENTA, SIGNAL = 2.3; EXPRESSED IN HEART, SIGNAL = 2.1; EXPRESSED IN ADULT LIVER, SIGNAL = 2.2; EXPRESSED IN BONE MARROW, SIGNAL = 2.4; EXPRESSED IN HELA, SIGNAL = 2.6; EXPRESSED IN LUNG, SIGNAL = 2.8
tgccacccagacctacagactgaagccctgagctgtatgtttttttttaaggtccattagtggttcgacatacatcactggtctaaacagcatatcccaggaaaagaatccgcttttctaaaataaatgtatgatatatatatgatatatataaaacaattaggaatcatttcatttataaagaaattaaaactgtgaatagatcaaatgctgaaagcaaatatcataatttttaatactgttattatcatttcaaataaatataggttctatattggtagcaaatactgtgattataaagggcaatttgtttcccaaatgcactgtgatgtaatcatcaatctggagtacatggggattaaagatggctgcaaagtctttgacacatcctccgttgagagctaagatctatttgccctccccttgaatctggcctggcctgtgactactttgacaggaacgagtgatgccctgccaggcccaggcctattttttgagaggactggcagattctgccttgttcacttggagtcc

SEQ ID NO: 8674 - DNA, 589 bp, Homo sapiens
  MAP TO AC018553.2; EXPRESSED IN FETAL LIVER, SIGNAL =   2; EXPRESSED IN HELA, SIGNAL = 2.1; EXPRESSED IN HEART, SIGNAL =   2; EXPRESSED IN LUNG, SIGNAL = 3.4; EXPRESSED IN BRAIN, SIGNAL =   2; EXPRESSED IN ADULT LIVER, SIGNAL = 1.9; EXPRESSED IN BONE MARROW, SIGNAL = 2.1; EXPRESSED IN PLACENTA, SIGNAL = 1.9
acccacccctaactctgtcctccagccacccctcaagtcttcacgcctcttcagtccctcatgtctgcgatgctctcttctgccacggatcctttgcacttgcggttccctttgctgggaatgttctcttcctgtcgctcccttgtctggtgagctcttctcatgcttcaggtctcagccccagtgtctccttcctggggaagccttttctgactttgctgaccagggatttttgccctacaggctcccaaagcactgggttgctctcctcgccagttctcacggaagatgaacacattttgcccttgttgacgtgctgctgtaactgcctccttgtcgcctggatcatttgctcctgagaggctgcatctgttctattcattgccgtgtcccggtgcattgcagagtgcctgctccacacgggctgaatgagtggatgagttagtgaatgaacaacctgctaaagtcctagatcaccaaggaaaatgatgacctcaggccaggcgcggtggctcacacacaggacagttcctgttggggggaacacaggacttccatggcctcactcacatccacagttgtcaggacg

SEQ ID NO: 8675 - DNA, 599 bp, Homo sapiens
  MAP TO AL138734.2; EXPRESSED IN PLACENTA, SIGNAL = 2.9; EXPRESSED IN BRAIN, SIGNAL = 3.3; EXPRESSED IN HELA, SIGNAL = 3.1; EXPRESSED IN FETAL LIVER, SIGNAL = 4.4; EXPRESSED IN ADULT LIVER, SIGNAL = 2.8; EXPRESSED IN LUNG, SIGNAL = 4.3; EXPRESSED IN BONE MARROW, SIGNAL = 2.1; EXPRESSED IN HEART, SIGNAL = 3.3
actgtaggcaccctggacaccctgccattctgatttgccattttctctcctgcagcacactttcatattccccatcacattggctgaagtcgtcctcaggcctcactcctatccatcaaagaagacaggactcaccttgctggctgctgccagcattgcttacatcagccggtaagaattacatggagaaagtcaacttaggcttgtcgttcaagaccctgagggaagttccagaaatgtgtactgttctgtcagaatccctttatcttggtttaataaggatttaatcatgtttacatttccaggtaagaagcattcttattgtttgattttaatgctcatggaaacctcccaagcacagaaacatgcaggtgtgcacacacatacacagcaagtcacaacttcccctctctctctcgtgaagaattaatcattgcaaagccactcatcttgctttcccaagaaaatgttgctccttggttctatcttcaatgaacatgcttgaatggctgagggatctgaggcatctaactacattctacctgaaaagtcatttagtgggcagagcatgctaggtttgtccactcctgttgcctgtt

SEQ ID NO: 8676 - DNA, 578 bp, Homo sapiens; identical to SEQ ID NO: 6824
  MAP TO AL121997.7; EXPRESSED IN ADULT LIVER, SIGNAL =   3; EXPRESSED IN BONE MARROW, SIGNAL = 2.8; EXPRESSED IN PLACENTA, SIGNAL = 2.2; EXPRESSED IN FETAL LIVER, SIGNAL = 2.8; EXPRESSED IN LUNG, SIGNAL = 1.9; EXPRESSED IN HEART, SIGNAL = 2.2; EXPRESSED IN BRAIN, SIGNAL = 2.7; EXPRESSED IN HELA, SIGNAL = 2.2

SEQ ID NO: 8677 - DNA, 554 bp, Homo sapiens
  MAP TO AC022205.2; EXPRESSED IN ADULT LIVER, SIGNAL = 1.6; EXPRESSED IN HEART, SIGNAL =   2; EXPRESSED IN LUNG, SIGNAL =   2; EXPRESSED IN PLACENTA, SIGNAL = 2.8; EXPRESSED IN BRAIN, SIGNAL = 1.7; EXPRESSED IN BONE MARROW, SIGNAL =   2; EXPRESSED IN FETAL LIVER, SIGNAL = 2.9; EXPRESSED IN HELA, SIGNAL = 2.4
ttcggggctgatagagattgcagtgatcaatggtgcaaatgaaaaaaacgccacagggcagaaaaagatgcaattggtgaagattagccaagcgacatgcttaatcatgctagattgtgagttttctgagaggtcctctttttccaagttgcagtatagtttagtgtagataacggccattaataaaaatgctagtgagtttaatagcactaacgttacagtgaatcctaatgatggcgtttcacctgtaggaaatggcaaacaaaggggtgatgcagaatattcccctctatggaaaaggggaaaacagcctgctactgtagcacctaggaaagccaaaagggcagcaacccggaactgtttgagatgattgctcttcccatttttcattatatcttttgcagataagcttctttcgacagttgctagcattaataaaaatatggcactttctgaggagaaaactgcaagaaacccagctactttgcagccactgccagtttcccaccaaatgccaaattcagcgaatctgccccaggacacagcatcaagaa

SEQ ID NO: 8678 - DNA, 584 bp, Homo sapiens
  MAP TO AC005137.1; EXPRESSED IN BRAIN, SIGNAL = 2.2; EXPRESSED IN ADULT LIVER, SIGNAL = 2.1; EXPRESSED IN HELA, SIGNAL = 3.2; EXPRESSED IN FETAL LIVER, SIGNAL = 2.9; EXPRESSED IN BONE MARROW, SIGNAL = 2.3; EXPRESSED IN HEART, SIGNAL = 2.5; EXPRESSED IN PLACENTA, SIGNAL = 1.9
gacaggaaggaaggaaagggtgaaagaaagacagagagggaggaggagagaagacagagagacccacaggacacaagagacagacacacagggaatcacagagagagacagtctaggccaaagctccctggagatcccacagcgtggggacaaaagcctgtggtcccggctgcctagaggcacagtatgagtgaatgcagttagacatcaggaagaccttccagagagtgaaggatggacacagacaccttctaaccatctaataatggggcaggggataaagttctgagtggggaattaacaatcctgagtctttttcccaacgtctctgcttacccggtctaagacctcatgcctcaattccccatagtagagaagaatttggacaagactgcccgggaggcagctcagacactgcttaaggacaatgacttggctctagtccaggagttttctaggagctctggctatgagaagctgcgtgcttgggccattccttcaggctgggagaaggctggggatgggctggagaaaggtggctgagattctggagaaggaagaagaggtctcaggctaggtgcttg

SEQ ID NO: 8679 - DNA, 593 bp, Homo sapiens
  MAP TO AL138970.2; EXPRESSED IN BRAIN, SIGNAL =   5; EXPRESSED IN HELA, SIGNAL = 2.7; EXPRESSED IN ADULT LIVER, SIGNAL = 3.2; EXPRESSED IN FETAL LIVER, SIGNAL = 2.7; EXPRESSED IN HEART, SIGNAL = 2.4; EXPRESSED IN BONE MARROW, SIGNAL = 2.2; EXPRESSED IN LUNG, SIGNAL = 2.5; EXPRESSED IN PLACENTA, SIGNAL = 2.6
cccctagaagaagaggccagagagctaactctctctctctttgtcttccacatgaggatacaacaagaagttggtagtgtgcaactcagaaaagggccctcaccagaacccaacaatgctggcaccctggtctcagacctgcagtctctagaactgtgagaaataaacttctgttgtttctaagccaccctgtctatggtacatttttatagcagccagaactgactaacacagcttccctttcaaaactgagtaaacctagttccaatcatcttttcttgtaagaaaaaaaatccatcgcacagacttttaacaaagttttttgttctcatctaagctctcacctcccattctctcctgatccctctccacccaggcttctgccccaccattcctccataattgctgctgtgaccatcatcaagaccgccatgttgctaaatccagtcaccaattctcagtcttcaacttaagttgctaacaacttcgttttaatatagttggcccctctttcctccttcaaacacctttcccgcttggtcttcaggacatcacactctccttgttctctttcttcttcactggctgctcct

SEQ ID NO: 8680 - DNA, 504 bp, Homo sapiens
  MAP TO AC002401.1; EXPRESSED IN BONE MARROW, SIGNAL = 2.6; EXPRESSED IN HEART, SIGNAL = 2.6; EXPRESSED IN LUNG, SIGNAL = 8.8; EXPRESSED IN BRAIN, SIGNAL = 2.8; EXPRESSED IN PLACENTA, SIGNAL = 2.6; EXPRESSED IN ADULT LIVER, SIGNAL = 2.5; EXPRESSED IN FETAL LIVER, SIGNAL = 2.6; EXPRESSED IN HELA, SIGNAL = 3.3
gaagacactggcctttctgccctgtagcatgcaaatgaaatatccctgatagtgtccttacagaaagagtgaggttgagagggttgataaggtctccaggtggtcggcagggccaggacccattgccatggacggtgatctccgtgggatacagcagccacttgccattgctgacttcgtagggccactccagacctaggaccagggtccccaggcccaccagcccctcccccattgggcccacctgtgggcacaagatgtgtcatagtcattatctcctggaaaaccacctccatcttaccaacccccaaccctcccaccttcagaccccagagaaaataaaaataatccttcctagaagtccccagcccaggactctggcgagccccttacctggaattcatacttgagggggcttcctacatcctccacagttttcatgccagactcacccatcactgtccccccaaagaagctttgtagccggtgatttaccctaggggt

SEQ ID NO: 8681 - DNA, 503 bp, Homo sapiens
  MAP TO AL158137.1; EXPRESSED IN BRAIN, SIGNAL = 2.8; EXPRESSED IN PLACENTA, SIGNAL = 2.7; EXPRESSED IN FETAL LIVER, SIGNAL = 2.5; EXPRESSED IN ADULT LIVER, SIGNAL = 9.9; EXPRESSED IN HELA, SIGNAL = 2.7; EXPRESSED IN LUNG, SIGNAL = 2.9; EXPRESSED IN BONE MARROW, SIGNAL = 2.6; EXPRESSED IN HEART, SIGNAL = 2.6
cacaaccttttgcatgttgcagtatgggaattgaaaaaaagattggagtgtaagtgaagctgggagttagggataaaagccagttggattgtcagccaaatgacaatgatttttaccatgctacagagctatagatatagaactgtacttgaccacatttattcacatttgttctattccctgtatttaggactattgctgggaagatcatggttattctttggtaaatcgcctttatccagatgtgggacagttgattgatgaaaaatttcacattgcttacaatcttacttataatacaatggcaatgcacaaagatgttgatacctcaatgcttagacgggcaatttggaactatattcactgcatgtttggaataaggttagtcttctttctgtgtttataaagagatgttttcctctgggccaaattattcaagtgcttggagcgcacatgcacatagacacacacataatcaaaacccatcccctccccaataactt

SEQ ID NO: 8682 - DNA, 557 bp, Homo sapiens
  MAP TO AL139342.2; EXPRESSED IN PLACENTA, SIGNAL = 1.5; EXPRESSED IN ADULT LIVER, SIGNAL = 1.6; EXPRESSED IN BONE MARROW, SIGNAL = 1.5; EXPRESSED IN FETAL LIVER, SIGNAL = 2.9; EXPRESSED IN HELA, SIGNAL =   3; EXPRESSED IN HEART, SIGNAL = 2.4; EXPRESSED IN BRAIN, SIGNAL = 1.7
tgagcacaggaaatgagtgcggactaataactttcaccttattcctggggataaaaataaagaatattttttcttataatgaaaggaaaagtgcaccgagtaatattctgaacatatatgagggatcataaaagaaaaagaaattacataggaatattattctgtgcttctacctccttattcatctgaatttctcctccttcaatcatctgatgtttccttcttcctttgagatgtttctctccttgcattatacatgacaaggagtttctccatccttcccacctgcgccatgtccacctgacttatctcataccactggctcaggcatttgatctcttctgcacaaggaggcagaaggagatgctgatactggactggcctcgctccttgactgtccctctcctctgccacctcctcctgctctgacagggtgatggtttaattgcaggaaccaggagtggcagtgggtaacccatacatcaccaacaagacactgctctaggaaatactccatgctccctagcacctgccagaggaggaccacttgtacccaa

SEQ ID NO: 8683 - DNA, 581 bp, Homo sapiens
  MAP TO AC007497.2; EXPRESSED IN BRAIN, SIGNAL = 2.8; EXPRESSED IN PLACENTA, SIGNAL = 2.8; EXPRESSED IN BONE MARROW, SIGNAL = 2.2; EXPRESSED IN FETAL LIVER, SIGNAL = 2.9; EXPRESSED IN HELA, SIGNAL = 2.7; EXPRESSED IN HEART, SIGNAL = 2.4; EXPRESSED IN LUNG, SIGNAL = 3.8; EXPRESSED IN ADULT LIVER, SIGNAL = 3.3
tgggccccaactttattttcttaatcttatgctactggtttgacttttattaatcaaattctgccaagacttccatgaatttatgtgaattattaaaaaaataaactttctctatgttcttcccacttctttcataaataaaaaagccaaccataaaagtctatatacaaatgaatcatacataccattgctatagttatagtagacccactgcccactcttgggttttggaagtgacacgggtgtctcttcagcaggaagactgtagaatcgacactcaacaaacagccgttggatagtgtcatccatggttacttgagaatcattaaggcttagagctatgatctcaatccgaattttttctgatggctgtttaaagagcaaaaacaaaaaacaacaaagaaataaaataattgaacaaaaagatccactattactttccactatcaattttaaataaaacacgaaggccaatgggcttcttttcttgaatgcaatgtacactactgtatgttacacatgatagattattcatgacagagacacagaatgagatgctaatgccccagggtttgaagtta

SEQ ID NO: 8684 - DNA, 597 bp, Homo sapiens
  MAP TO AL133444.1; EXPRESSED IN BRAIN, SIGNAL =  11; EXPRESSED IN FETAL LIVER, SIGNAL =  15; EXPRESSED IN LUNG, SIGNAL = 7.8; EXPRESSED IN ADULT LIVER, SIGNAL =  12; EXPRESSED IN HEART, SIGNAL =  14; EXPRESSED IN PLACENTA, SIGNAL = 9.7; EXPRESSED IN HELA, SIGNAL =  16; EXPRESSED IN BONE MARROW, SIGNAL =  10
tgttaaatggaaaaagcagggtacaaaattgtatgatcccataaaaaaaaaaaagcttatgttcccagttgtataaaagtacagcatgtacagtacagaattcttgacaataaatgactatgttgctagcttatatatatatatacacactatactatcatttttatcattatattagagtgtacttctacttaaaaaaaaagttaactgtaaaacagcctcagactggtccatcagggtccattccagtattattgtcacaggagataacagctccatgcactttattgcccgtgaagaccttccagcagaacaagatatggtgatggaagacagtgatatggatgatcccaaccctatgtaggcctgggctagtgtgtgtgtttatgcctctgtttttaataaaaaattttaagccaggcatggtggttcacaactgtaatcccaatgctttgggaagccaaggcaaaaggactacttatgcccaggagttggagaccagcctgggcaacatagtgagagactttgtctctacaaaaaattttaaaaattagccaggcttggtggtgcgtgactgcagtcccagctacttgggag

SEQ ID NO: 8685 - DNA, 528 bp, Homo sapiens
  MAP TO AC020557.2; EXPRESSED IN BRAIN, SIGNAL = 1.7; EXPRESSED IN ADULT LIVER, SIGNAL =   2; EXPRESSED IN HELA, SIGNAL = 2.1; EXPRESSED IN FETAL LIVER, SIGNAL = 2.2; EXPRESSED IN HEART, SIGNAL = 2.1; EXPRESSED IN BONE MARROW, SIGNAL = 1.5
acacgcaagaggctcaaatccagtgaaagagaacaaacaagagaacccagggatgtggttgctgcggaaactcaggggacattcggtttccagcgtggactccagctaatgtcgccatctagtggccagcatggagagatgcaacctgggccagagggcccatggaaagccccagtaattctccagttccatcagaccctcccccgccatcagaccctcctccatcagagccttcacctccatcagaccctcctccatcagattctcttccatcagaccctccacctccatcagatcttccactttccagtgattcacagcttgggatcctgggccaggaagattgagatcccaatagtgtctgaacatgagaacctccagggacccagaaccccaggagcccaaggcccactggccttggggaacccctaagccctcttcccacatctcagaggtactctgagttctaaagcctgcaaagaccctccttcccatcccccacagaaagcagagggtggcatgaacttt

SEQ ID NO: 8686 - DNA, 538 bp, Homo sapiens
  MAP TO AL121769.2; EXPRESSED IN BRAIN, SIGNAL = 4.2; EXPRESSED IN BONE MARROW, SIGNAL =   3; EXPRESSED IN HEART, SIGNAL = 3.9; EXPRESSED IN LUNG, SIGNAL = 5.4; EXPRESSED IN PLACENTA, SIGNAL = 3.5; EXPRESSED IN HELA, SIGNAL =   4; EXPRESSED IN FETAL LIVER, SIGNAL = 4.9; EXPRESSED IN ADULT LIVER, SIGNAL = 3.6
acctgtccccctacacacacaccaacttggttttacctctctgtattccaaagccttctgcagaagagctacacttctagtttaaatttttactggactttataacttggctgaaaggatttgttacaaagtttgtgtactatgaattaaaattctttgttttatgtaagcatgtcaatgggaggagaaaaaagtttgatctgttttaaacatactttatttattggcagttctgcatttaacttttgtttaaggctatactgtggctagaattaagctcggagactaccatttctatgggtttggcaccgatgtagattatgaaactgcatttattcattaccgtctggcttctgagcagcaacacagtgcacaagctatgtttaatctgggatatatgcatgagaaaggactgggcattaaacaggtgagtgtggcttccaaacacgtttgaatcacataattgtgattggggaaaatacttgcatttgtatagaaaatagactttccttgacattcagttggatttcaggccact

SEQ ID NO: 8687 - DNA, 578 bp, Homo sapiens
  MAP TO AL159141.1; EXPRESSED IN HEART, SIGNAL = 1.8; EXPRESSED IN PLACENTA, SIGNAL = 1.4; EXPRESSED IN BONE MARROW, SIGNAL = 1.6; EXPRESSED IN FETAL LIVER, SIGNAL =   2; EXPRESSED IN HELA, SIGNAL = 1.9
ggaaccagtgctgagctagggaaacccaatgtgtaactgatgaactagtggatgttcactgtggacaggcctgagttaaaactccagggaagccagtcatctaggggcctccacacttttgtgagttttaccaccagtagcttgaccaggttcctgcagtgaatatcaaagatctcatgcatcctgcaggaagaaggcaaaaggaacattttggaaatatgccagagcagtctgttcttctcaataaggtatgctttcagagctgatacagtttggatctgtctctgctcaaattgcatgttgaattgcaatccccaatgctggaggtggggcctggtgggaggtgtttgggtcacaggggtggatccctcatggcttgatgctatcttcccagtaatgagttctggtgagatctggctgtttaaaagtgtatggcaccctcctgctcaacctaacttgctcctgctttacatgtgaagtgcctgctcccacttcaccttccaccataattgaacagctccccaaggtttcaccagaagctgagctgatacgagcaccgtgcttcctgtaaagcctgc

SEQ ID NO: 8688 - DNA, 512 bp, Homo sapiens
  MAP TO AC007372.4; EXPRESSED IN PLACENTA, SIGNAL = 3.1; EXPRESSED IN BRAIN, SIGNAL = 2.1; EXPRESSED IN FETAL LIVER, SIGNAL = 2.1; EXPRESSED IN BONE MARROW, SIGNAL =   2; EXPRESSED IN HELA, SIGNAL = 2.4; EXPRESSED IN HEART, SIGNAL =   2
ggttgcatggtgacttgatgacccatagtcaaacattcagtttccaccaaggcccaggaacaggcaaagagctgtctctcaaaaggagagtagttatctgcagaagatggcagggccatgctccaaaatcctacaggcctctgctgtgattcacctatgagggcctgccaaaggctccaaacagcatctctatctgccactaacacctcaagcatgattggatctgttgggtcatatggcccaagtggaagagcagcttgcacagcagcctggaccttttgcagaaccttctccggttctggattccactcaaaaatggcagccttttgaatcactagataaaggggctggagtagcccacccaaatgaggaatgtgttgcctccaaaatccaaatagacccactaggcgttgtgcctctttcttggttgtaggaggggccaaatgcagcaacttatcctttaccttagaaagaatatctctacaggccccacaccactggacccctagaaa

SEQ ID NO: 8689 - DNA, 509 bp, Homo sapiens
  MAP TO AL133257.2; EXPRESSED IN BRAIN, SIGNAL =  11; EXPRESSED IN ADULT LIVER, SIGNAL =  12; EXPRESSED IN HELA, SIGNAL = 5.4; EXPRESSED IN HEART, SIGNAL =  23; EXPRESSED IN PLACENTA, SIGNAL = 7.7; EXPRESSED IN LUNG, SIGNAL =  12; EXPRESSED IN FETAL LIVER, SIGNAL = 6.6; EXPRESSED IN BONE MARROW, SIGNAL = 7.7
ttgactccataaacacccccaaaattttcctatcagagatgataaactacaccacagttaacaagaacataaagatgagtatagatgctagtggtagcttcaaaggagatgggattgaaatcctcaactatgagaaactctaagcttagttatctttcaattttatatataagattctttttatgtcaatagaggggatttggattggtgagaaggtcattttgcttctccaatcagttatttgtttgcctcaatttgctacttataattctataatagaaagggaaaaaaaaagacaataacctcagggaaatacagggcaaaaagattcacaaactaaatggaatgacatacttccctcttgagaaaaatcagtgaaaggtgatgacttattttctgtgtccttgagctaactaatgagttgcaaagtgacagcataatttgaggagaggcacaggtggaagcagttctgatgggtaaagtgaaagagagtgctttgcaaaattgcc

SEQ ID NO: 8690 - DNA, 566 bp, Homo sapiens
  MAP TO AC002041.1; EXPRESSED IN BRAIN, SIGNAL = 3.3; EXPRESSED IN PLACENTA, SIGNAL = 2.4; EXPRESSED IN ADULT LIVER, SIGNAL = 2.6; EXPRESSED IN FETAL LIVER, SIGNAL = 3.2; EXPRESSED IN BONE MARROW, SIGNAL =   3; EXPRESSED IN HELA, SIGNAL = 4.1; EXPRESSED IN HEART, SIGNAL = 3.3; EXPRESSED IN LUNG, SIGNAL = 2.3
acagtcctcacccagctgtccagcatgcatgtctgctgaaggctgctgcacttgttcttcatcacagaggtgggatgaaagcagtctgagggcaccacactccatgatcagggtctacttctggtgccatagctccaggtggaaggacaggtaagcaaaagacaggtcccaccttccacatccagcccacactcccaccaacttccaggcccacctcaatatcctgatgtgatgctctccttagacctcttgtggttcttcagccaggagatggagagagtggggttgctaggagccaggcagtgaaagttggttgtggtggccagcatggctggcagtttcctgtccatccactggggcaaagtccaggaaggggtctctgctggtggaagcacacatgaaggccatagctgaggtgaggaacagagacccatctgaccagacccccgattcaagatcaccctgcccactccgagtctcatgtttttctcctgtgtagggagagtgttgacatttcaaggacatctacttgggctgaatgaggctcccaggagcttcaacacaat

SEQ ID NO: 8691 - DNA, 598 bp, Homo sapiens
  MAP TO AC010369.3; EXPRESSED IN ADULT LIVER, SIGNAL = 1.9; EXPRESSED IN HELA, SIGNAL = 2.7; EXPRESSED IN HEART, SIGNAL = 2.1; EXPRESSED IN BRAIN, SIGNAL = 1.9; EXPRESSED IN PLACENTA, SIGNAL = 1.8; EXPRESSED IN BONE MARROW, SIGNAL = 1.8; EXPRESSED IN FETAL LIVER, SIGNAL = 2.7
aattagcagtgcaagggtgggcacacaccttgggcccagatactcctacttgggcccagaggccgaagcaggaggattgcttgaacctagtagtctgtggctgtagtgtgcttcgttgctcctgtgactagccagtgcactccagcctgggcaacacagtgagactctgttaaaaaaaaaaagaattggcagtgtgtggctatatcatgggtgttgtcaaataggattataatcacaagtcaaagtcatataaaatatttgttcctaatattaaggatatgacttgtctctttgtttctttcaagagggagcaagaaagtcaaatggctcgtcttaaaaaacagcaggaagaattggaacagatgagactacgttaccttgccgctgaggaaaaagatacagtaaaaaccgagcgacaagaattgttggatataagaaatgaattgaacaggtataataactaaaagtgtttctttcaaaagccaaagtttggttcagggaaggtacaacttgaggtctcccaaggataaagtagatcatatataaaaatatataaaatgtagcagacatatacaatagaaaatctatgccagctggg

SEQ ID NO: 8692 - DNA, 597 bp, Homo sapiens
  MAP TO AC011349.2; EXPRESSED IN ADULT LIVER, SIGNAL = 2.2; EXPRESSED IN BONE MARROW, SIGNAL =   2; EXPRESSED IN HEART, SIGNAL = 2.1; EXPRESSED IN LUNG, SIGNAL = 2.1; EXPRESSED IN PLACENTA, SIGNAL = 1.6; EXPRESSED IN BRAIN, SIGNAL = 2.3; EXPRESSED IN FETAL LIVER, SIGNAL = 2.4; EXPRESSED IN HELA, SIGNAL = 2.1
attccctccaacccctacacccaggacccagatgttcacatgacatcattgcactgaattcggactttacaaatggaatacaaaattacgaacatagcgtgggtaaccactttatctcttcttgaatcttctatgcctgctctacattcctgtgaaatttgtatctccaatggcttacaccaccctaccacagagtagatctacacaaactgtcagatgagtttactgaatacattttactcatcccccttgtcagctttgcttgtgctattaagtggccaagactaccatgtcagtaccagctcatctaaatcccacttcctgtctgtacattcattgtacttactctcagaccattcttatgttcctcagtaatggaatattcaatttgggcattaaatttttgtgtctgtgcccagtgagattcaagagcataaacagtgcttgtacttgtcagaatggcaagcatagtactttgcacataatagaggctcgtaagtactcagtaaacatcagtaagtacctcagtaattaaattgttattttcctataagaaaatgaatttggatggacaaatctgagagaagaatccggtgc

SEQ ID NO: 8693 - DNA, 600 bp, Homo sapiens
  MAP TO AL135787.3; EXPRESSED IN BONE MARROW, SIGNAL = 8.6; EXPRESSED IN HEART, SIGNAL = 9.7; EXPRESSED IN PLACENTA, SIGNAL = 8.4; EXPRESSED IN BRAIN, SIGNAL =  11; EXPRESSED IN HELA, SIGNAL =  16; EXPRESSED IN ADULT LIVER, SIGNAL =  11; EXPRESSED IN FETAL LIVER, SIGNAL =  13; EXPRESSED IN LUNG, SIGNAL = 8.2
aaccagggaaacacagttggaatacaacaacgtgggcactgacctgtcccccgaacccaaaagcttcaattacccattgctctcatcctcaggtgaccagtttgaaattcagctaaaccagcagctatggtccctcatccccaacaacgatgtgagaaggcttgtttctcatgttatccggaccttgaagacggactgcactgagacccatttgcaactggcctgtgccaagctcatctctaggacaggcctcctaatgaagcttctcagtgagcagcaagaattgagaactgtatcaatgacagcatggaagcccagaatgaacagaaagagcagaagtcgaatgaggtgaggaccacacagaaacatgagacccagactttcccatcatttagcatatgccaggaaagtgcccacacaggagaacctgggactcccagagcatagcttgtcttggccatgtaactttgaccatgacaatgatctcccactttactcatttagagagtgaaatagattagtacacaagataaactgtaggccaggtgcaaaggctcacacctgtaatcctagcattttgggaggttgaggtgcatcaat

SEQ ID NO: 8694 - DNA, 562 bp, Homo sapiens
  MAP TO AC008929.3; EXPRESSED IN ADULT LIVER, SIGNAL = 2.2; EXPRESSED IN PLACENTA, SIGNAL = 2.1; EXPRESSED IN BRAIN, SIGNAL =   2; EXPRESSED IN HEART, SIGNAL =   3; EXPRESSED IN FETAL LIVER, SIGNAL = 2.8; EXPRESSED IN HELA, SIGNAL = 2.9
agtggggcactgctgtaatgatacctgaaaatgtagaggtagctttggaaagaggtaatgaaaagaggttggaagagtttggagggctcagaagaagacaggaagatgagggaaagtttggaatttctcaaagactagttaatgattgtgaacaaaatgctgatggtgataggggcagtgaaggccagattgatgaggtctcagatggaaatgaggaacttcttggaaactggagcaaaggccacccttgttatgctctagcaaaacacttggctgcattctgttcatgccctagcgatctgtggaagtttgaacttcagagtgatgatttagggtatctggcaaaagaaatttctaagcagcaaagtgttcaagatgtggtgtggctgcttctaattgcctatggtcagacatgggagcaaagaaataaagttggaatatatatttaacgaagtagagcataaaaatttggaaaatctgtagcctggccatgtgtaagagaaagaaaaagcttttgctgaagaggaattcaagcaggctgtggagcaactacctgctggag

SEQ ID NO: 8695 - DNA, 535 bp, Homo sapiens
  MAP TO AL035705.22; EXPRESSED IN BRAIN, SIGNAL = 3.3; EXPRESSED IN HELA, SIGNAL = 3.2; EXPRESSED IN BONE MARROW, SIGNAL = 2.9; EXPRESSED IN PLACENTA, SIGNAL = 2.8; EXPRESSED IN LUNG, SIGNAL = 4.9; EXPRESSED IN HEART, SIGNAL = 3.1; EXPRESSED IN FETAL LIVER, SIGNAL = 3.3; EXPRESSED IN ADULT LIVER, SIGNAL = 4.1
tgactgcttcctgtgagctgcctctgtgccaggcattcattgaacattcagaggtaatgaaggatatagtatgcaccttcaggaaacttagagtctagtaagatattattcaatgttaaataaatgataaataattgttatccatgaggaatgaatgaaaaactgtacaagtaagcaaagaactgattaggtaagtcacagccctacagtattctcccttttgcatatgtttaggtagatgcctgtgaagggacacctgaaaaaattcagatgaccaacgtccacacaggtagaaggaacatgttggctggaaagcaagaggccatgattgacatcatccagacaaatccctgccctgagggcccaaagctggccaggcactcccaaggccactgtaagttgcatttctttctgatcttcttcatcattacaatttgttttatagctgagcatggccaaaattttaatttattttaccaatatttattgaacatctattttgtgccaagcaacttgccctagtgaggaagctgtg

SEQ ID NO: 8696 - DNA, 513 bp, Homo sapiens
  MAP TO AC007058.2; EXPRESSED IN BRAIN, SIGNAL =   2; EXPRESSED IN HELA, SIGNAL = 2.9; EXPRESSED IN HEART, SIGNAL = 2.8; EXPRESSED IN ADULT LIVER, SIGNAL = 2.1; EXPRESSED IN FETAL LIVER, SIGNAL = 3.6; EXPRESSED IN LUNG, SIGNAL = 1.7; EXPRESSED IN PLACENTA, SIGNAL = 1.9
gagacaaactgcagccacacttagccaggatcatttacatttacttgcatggctctgtgtagcttgctttttatgctaggcaggttcctgaatagtcagataggaattgaattcttggaaatcatgccattgtttaaggatgaggaagaacttactattttaatgaactttattataaaccttttttctaagcaaataatcaccccttactttatcttatctcctatgcaaatcctgattttcacatttaagctttacttaacagtgtcaatttgtatagttatctttaaacaatggtcagtccccactcttataattgaaaagtaagtaattttcatttactttctggcttctacctccagaaaatctcttacctctatctttattttggtaattctcttgtagggactttaatagcccctggaaaatcatcatagctctgcttcaatctgaaaacataactggcaggcatgagtctggaacacatacgagggaacgaagtacccagagcca

SEQ ID NO: 8697 - DNA, 528 bp, Homo sapiens
  MAP TO AC009542.2; EXPRESSED IN BRAIN, SIGNAL =   6; EXPRESSED IN HELA, SIGNAL = 4.7; EXPRESSED IN HEART, SIGNAL = 4.2; EXPRESSED IN PLACENTA, SIGNAL = 4.3; EXPRESSED IN LUNG, SIGNAL = 5.7; EXPRESSED IN FETAL LIVER, SIGNAL = 4.7; EXPRESSED IN BONE MARROW, SIGNAL = 2.4; EXPRESSED IN ADULT LIVER, SIGNAL = 5.3
cacacctccacgtgtactgcctgaaaatctgagcttcccagggtttccttggccccaggcccaacccacctgcagtgcatgatggatgagtggtgttccccgtactcctcctgtcccagcacaataaagggctgctcggggcggactcctccaccctcagggcctgccgaggatgcccgagtcagtggctccactggctccgtgtggagctctgggcagggctcagcctctgggccactggcttctggtttcttctctgcacactgtcacaagcagggtggggacaagtcagccaggaaagggtcccccacaccagggtgtacaccgcagggggtctaggcctaggctgcagcattttgcggggttctcggtaattacagagtggagaggagagctctgacctgcgagggtagtgctcagctcaccctgggagagtgcagggcctgccctcctgacagccccttcctggagactttgctccacacaggccctgctgaaggagagggggctgtggcctctctgtgacac

SEQ ID NO: 8698 - DNA, 598 bp, Homo sapiens
  MAP TO AC010620.3; EXPRESSED IN FETAL LIVER, SIGNAL =  32; EXPRESSED IN HEART, SIGNAL =  16; EXPRESSED IN BRAIN, SIGNAL =  15; EXPRESSED IN PLACENTA, SIGNAL =  14; EXPRESSED IN ADULT LIVER, SIGNAL = 9.5; EXPRESSED IN BONE MARROW, SIGNAL =  34; EXPRESSED IN HELA, SIGNAL =  33; EXPRESSED IN LUNG, SIGNAL =  71
gccccactatatcaggttgcagcagcaaagagccatcctctataggcggctgaaagtgtttttctgtgattaaccagttcacccagggcctggaccaccaaacagctactcagctgcttaagctagcctacaagtacagaccagagacaaagcaagaggagaagcagaggctgttggcccgggccgagaagaaagctgctgacaaaggggacatccttattaagagaccacgtgtccttcgagcaggaattaacactgtcaccaccttggtggagaaaaagaaagttcagctggtggtgattgcgcatgatgtggatcccatcaagctggttgtcttcttgcctgccctgtgtcataaaaggggagtcccttactgcattatcaaggggaaggtaagactaggacgtctagtccacaggaagacctgcaccactgtcgtcttcacacaggttaactcagaagacaaaggtgctttggctaagctgggggaagctatcaggaccaactacaatgacaggatgagatccgccatcactggggagggaaggccctgggtctcaagtctgtggctcagatcgccaagctcaaaaaggcaaag

SEQ ID NO: 8699 - DNA, 554 bp, Homo sapiens
  MAP TO AC024593.1; EXPRESSED IN BRAIN, SIGNAL = 2.1; EXPRESSED IN HELA, SIGNAL = 2.6; EXPRESSED IN BONE MARROW, SIGNAL = 1.8; EXPRESSED IN FETAL LIVER, SIGNAL = 2.7; EXPRESSED IN HEART, SIGNAL =   2; EXPRESSED IN ADULT LIVER, SIGNAL = 2.4; EXPRESSED IN PLACENTA, SIGNAL = 1.9
acaaccaacctgggacaatcgctttaaggcccttgaatctttatctcttttcacagagttctggattgtggtggtgatggtgatagttggaggaaaaggctatccaaccacatttgaagggatgttaacatttggattcaagactagactttctaatcctctcctagggagttttagtaactaaactgacattcaaactagtatttcttcaactgagtttggatccccaaatatctacaggaaaatttataagtgagacacagagtgaattatcacttttcctccagtctgaaatgttacagccattttgagctacagtggaagggcaattcatactcaggaaatgaagaaaagagaaaggagctagatcctttgtggggataagagagatcagattgttactgtgtctatgtagaaaaggaagacacaagaaattccattttgatctgtaccaggaaaaattgtttctgctttgataccataccccagcacaacacccgtaaagggtctctgctgaggaggagtagtgaaagagggaggtctctttgcagttg

SEQ ID NO: 8700 - DNA, 546 bp, Homo sapiens
  MAP TO AC006146.2; EXPRESSED IN ADULT LIVER, SIGNAL = 4.3; EXPRESSED IN BRAIN, SIGNAL = 4.5; EXPRESSED IN PLACENTA, SIGNAL = 3.8; EXPRESSED IN HEART, SIGNAL = 4.7; EXPRESSED IN BONE MARROW, SIGNAL = 3.7; EXPRESSED IN FETAL LIVER, SIGNAL = 4.6; EXPRESSED IN HELA, SIGNAL = 4.9; EXPRESSED IN LUNG, SIGNAL = 5.3
actgtttctggctgactggggctaggataatttcttaagaggagtgttaatagaccatgctgtgcttggaaatgcccccagggaagagcagcagctccggagctggctttgtgaagttctcaagtgtagcattccttctgaggcccaccggtgtagatttcagatttttctgggagggtggtggaaagagcaaggacttggaagacacaagataaagatttgaatcttgcttctggctctgtaacagcagagcctcaacttccctctggagaatgaggacataagactcctccataggaggtttataagcatggattcgaatttgtagaggacccagcccagcgaagtactcgttagctcccttcttttgggaaggatctgtcttttggatattttgtagattggccatggaagtggaaatatttgcctgtggccatttttcctagggaaaagcagggctgcctgacaagctgttgcaatcccaaaggcctctccatcccctagttgttttgatgtcgggatcaagcttggggtcaggttcaatgt

SEQ ID NO: 8701 - DNA, 526 bp, Homo sapiens
  MAP TO AF223391.1; EXPRESSED IN BRAIN, SIGNAL = 2.3; EXPRESSED IN HELA, SIGNAL = 2.6; EXPRESSED IN HEART, SIGNAL = 2.3; EXPRESSED IN PLACENTA, SIGNAL = 2.4; EXPRESSED IN LUNG, SIGNAL = 2.5; EXPRESSED IN FETAL LIVER, SIGNAL = 2.6; EXPRESSED IN BONE MARROW, SIGNAL = 2.1; EXPRESSED IN ADULT LIVER, SIGNAL = 2.3
tactgagcccgtaagatggggattccccacacctgcaatgtggcagtcaccttgccctgggactagagcagcccatcttgcccttcgaatgctccctggcccggaccacaggatattttgcagtctcattcttccttacttctccctcttaggcacacctctggcccgagccagtatcaaaagtgcaaaggtagacggggtctcttatttccggcacaaggaaaggcttctgcgcatctccattcgccacatggttaaatcccaggtgttttactggattgtgctgagccttgtggcactcaacactgcctgtgtggccattgtccatcacaaccagccccagtggctcacccacctcctctgtaagtaaagcctctctctaaagcctcctctgctggtccccatgtggggcagcttgatgtgtgtgtgaacgcaagacagcaaagcaccctgctaggaaaggttctacctcttcacgctgtgagggaggccacatcgtcctcaagggggctggagtatctcatga

SEQ ID NO: 8702 - DNA, 515 bp, Homo sapiens
  MAP TO AC006111.2; EXPRESSED IN PLACENTA, SIGNAL = 3.4; EXPRESSED IN BRAIN, SIGNAL = 4.5; EXPRESSED IN FETAL LIVER, SIGNAL = 4.1; EXPRESSED IN HELA, SIGNAL = 4.2; EXPRESSED IN HEART, SIGNAL = 3.9; EXPRESSED IN ADULT LIVER, SIGNAL = 4.4; EXPRESSED IN BONE MARROW, SIGNAL =   6; EXPRESSED IN LUNG, SIGNAL =  11
tcagggcagaaggaaaacacccggggaagcaacagtgcattgtctgggggcagtaacccaggcagatgtgtccacaggtgccatggcaactccaggtgggagttgaccctggagacaggtgtctacgagtggccagattgtcccacgcaagtgcgctggaggatgtaaggccataaatgcaagatgtgagtgacttctgactgaagctaagcacactcaacaaacccagctgcagtggaatgtggactataataagtctgattgtttatattcagaaggaaatagctacagaagaaatcaggagcattttattccatcagggaggacccagcagagaactctgctgctccaggatgcaggtaggtccctccagccacttacttgagtctccggagacttgagtttaccttcagagcatttgccagggctttggctccagccaccccaatggcatttcctcttaagctgttgggaaagacaggaagcctaaggcatgggtacaggctgagaggtga

SEQ ID NO: 8703 - DNA, 505 bp, Homo sapiens
  MAP TO AL158148.1; EXPRESSED IN PLACENTA, SIGNAL = 3.6; EXPRESSED IN BRAIN, SIGNAL = 5.2; EXPRESSED IN HELA, SIGNAL = 4.7; EXPRESSED IN FETAL LIVER, SIGNAL =   5; EXPRESSED IN ADULT LIVER, SIGNAL = 4.8; EXPRESSED IN BONE MARROW, SIGNAL = 3.2; EXPRESSED IN LUNG, SIGNAL = 5.8; EXPRESSED IN HEART, SIGNAL = 4.4
aggcctagaaggacaggagggactctcacaggtgggtgttccagaggaaggaggaggaacagcacaagcaaagacccagaggtagaaagagaggatgaggaattcagggcagactgtgaagagcatagactgctaggctaaggagtctggacttttccccattggtagtagggagtaattggaggcttttgaataggagagtgatgtgatcagaacacttgaatgaaagagactcctttgtccctcttggaaacagtcttgtgcataacccaaaaacatctcagagcctctggccccccttgagcctaaagaggacttccagtggtctggaaatttcctttgcccacaagaagaaacaccaacaccctgagaagacagtgcaggagaggcaggaagggacacaggggcctgttactggggccttcttccccagtgatgaaagaatgtgtgtgtgtgagctctgtacccaaagtgtctcagaggagggggctgtgtatatgccaac

SEQ ID NO: 8704 - DNA, 554 bp, Homo sapiens
  MAP TO AL157996.1; EXPRESSED IN HELA, SIGNAL = 3.2; EXPRESSED IN BRAIN, SIGNAL = 1.9; EXPRESSED IN PLACENTA, SIGNAL = 2.3; EXPRESSED IN LUNG, SIGNAL =   2; EXPRESSED IN HEART, SIGNAL = 2.5; EXPRESSED IN FETAL LIVER, SIGNAL =   3; EXPRESSED IN BONE MARROW, SIGNAL = 1.7; EXPRESSED IN ADULT LIVER, SIGNAL = 2.2
aaaacgcaaaatgtcaagggccttttaaaagataacacaatgggatgtctatagctaactgcaacgtaaatgtgtttctactctaaaagcttttccattactcaggttttaacctcacctcccctctggactctaggaatacatgtagagatgcgcaaggtgagacaagagactgaggaagtgagtagctgtcacgtgccggctgttctcactggatggcaaacggccctggaccaaggctggaccttgaacatttaatgctggtgtcctactgacaggatgagagggatgaggcaacccagaaccagggctgccacttccaggcggctgaggcctctccctcccgtggcatcgggcttgtggctgtgccctattccgcccacctcagggaggacatgtactgtggcaacataaagaaatgtcccggcagagaaaagcatggccactcccgtggcgttcacctctgaaagggcttctttactgctctgtgaattagaagagagaaagaggaaaaactaagtcaagtaaaattcagggtcaggaagaagtcccag

SEQ ID NO: 8705 - DNA, 580 bp, Homo sapiens
  MAP TO AL133551.4; EXPRESSED IN BRAIN, SIGNAL = 3.2; EXPRESSED IN PLACENTA, SIGNAL = 3.5; EXPRESSED IN HELA, SIGNAL = 3.8; EXPRESSED IN HEART, SIGNAL = 3.8; EXPRESSED IN ADULT LIVER, SIGNAL = 3.7; EXPRESSED IN BONE MARROW, SIGNAL = 3.4; EXPRESSED IN FETAL LIVER, SIGNAL = 3.7; EXPRESSED IN LUNG, SIGNAL =   4
taaacagtggtggggagaggctagctggcagacttttaagaacaaggaagtctaatgtgcaactgtacatgccctacacatcagccacctagaaactttcactttccaaacacagtaagtgctgtgaagcctccacactgttccttccactaaaaataccctcttgcctctcatcctagctcttcatcctggagaactcctatgcattcttcaaaagccagtacagatatccatacctccatgaagacctctctgattcctcccccacaaggttggcttgctcctttatctacaactctataaggctttgaacatgtttctactatagcacttctcaaattgccctgtcattatctacatgcatgtccgagtccaccactaaactatgggctctttgagggaaggggcaatattggttcatctttttatcctgagtccctaccgcagtgcctggcacattcaataaatgcttactgaatgaaagaaaattagaagaggaggaagagaagaagaaaagggaagagaaagcaaagacaagatcaaaacaagaggagaaagaagaaaaggaggcaggaaagga

SEQ ID NO: 8706 - DNA, 559 bp, Homo sapiens
  MAP TO AC007115.1; EXPRESSED IN PLACENTA, SIGNAL =   3; EXPRESSED IN HEART, SIGNAL = 4.1; EXPRESSED IN LUNG, SIGNAL = 5.3
cccaaaattcaaacaagcagatttaaataatactcagatttctcatcctaagtaaatagctgtgcaaatgatactataatgtacctgattgtctttcaatacatttttaatgctctgcttcctgataacaaatgaaatattattttgcatcttttctctgtgctcactgtattgtggcatattatataagaaacgacacacagattaggcagtgctactcttcttaaatctctcatttgtttcctaggttccctggttgtgaaaatacatgagataaatcatgaaggccactatcatcctccttctgcttgcacaagtttcctgggctggaccgtttcaacagagaggcttatttgactttatgctagaagatgaggcttctgggataggcccagaagttcctgatgaccgcgacttcgagccctccctaggcccagtgtgccccttccgctgtcaatgccatcttcgagtggtccagtgttctgatttgggtgagtgggatgcagtttctctttacctaccttacttgttttattcttgggaatggcaactctgagag

SEQ ID NO: 8707 - DNA, 580 bp, Homo sapiens
  MAP TO AL158137.1; EXPRESSED IN BRAIN, SIGNAL = 4.9; EXPRESSED IN HELA, SIGNAL = 4.1; EXPRESSED IN BONE MARROW, SIGNAL = 5.3; EXPRESSED IN HEART, SIGNAL = 3.6; EXPRESSED IN LUNG, SIGNAL = 3.3; EXPRESSED IN PLACENTA, SIGNAL = 3.4; EXPRESSED IN FETAL LIVER, SIGNAL = 4.3; EXPRESSED IN ADULT LIVER, SIGNAL = 4.1
gtcacttgggactctggctcctgcctgcctctctgggaggctttgagcagtatcttgtttcctggcttctttcttctctgtacactcttcccttaagctcctttgctaacgagagcaggggctctcaatcttagctaatagactcacctgtggaactttgaacacagattctcagcctcatcccagagcttctgaatcagaattcctagggctggggccaggaaggtgtttttagtttttttgggttttaactccacagctgatttcaatgctctaccaccatcgagaactgaattaaggcaacctgaacatgcacttctgctccctgcaacctgagtcagtttaatgctcatggagccgactgtgaacctcaatgattaaaaaaaaatgctcacttttttttccttattgtgttttaaaacacatgtacaaaattatatttacctggaaaaaccaaatttcacatcaacctagcaaacccaattatttcaaacaactcctgagttccagtttctgtttagtagcacggtgttacaacacttaaagagtttccagagcacgtcagccaccttctgaggac

SEQ ID NO: 8708 - DNA, 571 bp, Homo sapiens
  MAP TO AC011510.3; EXPRESSED IN BRAIN, SIGNAL =   3; EXPRESSED IN PLACENTA, SIGNAL = 2.5; EXPRESSED IN BONE MARROW, SIGNAL = 2.7; EXPRESSED IN FETAL LIVER, SIGNAL = 3.6; EXPRESSED IN HELA, SIGNAL = 3.5; EXPRESSED IN HEART, SIGNAL = 2.8; EXPRESSED IN ADULT LIVER, SIGNAL = 2.9; EXPRESSED IN LUNG, SIGNAL = 2.8
tatatgcagaaagggagggggtgtcagagaaagaaggagaagaaagatgcaggggggtaggagtggaggaggaagacagagacagagaaagagagggagataaagacagagagagagagagagagacactaagatcaagaaaaagtcagggagacactgacagcaaaccacccgggctcaggccccgaggcagagaaccatgggtggcagccatacgcatacccacctggggcagggtgtaccctcggaagcgggtggtccgcatgagggtgcggggtattcccatgggcaccagcgccagcagccgctgcgcctcatgcagaaccgcgtcggtgtaagggaggcgggtacggtcccctaggcttggtgcctggccagcccccagctcccgattcagctcctcacgtacccactctgcaagcaagaggagggcaggagtcagacgggggtagggcccagggatcctcctctcagaagcccatctgcttgcatagctgtagtttggggtgaggctgacaggtggggaggagtggtcccccagccctcactgagcccaaagaccacacatctt

SEQ ID NO: 8709 - DNA, 588 bp, Homo sapiens
  MAP TO AC019248.3; EXPRESSED IN BRAIN, SIGNAL = 4.4; EXPRESSED IN ADULT LIVER, SIGNAL = 5.4; EXPRESSED IN HELA, SIGNAL = 3.8; EXPRESSED IN HEART, SIGNAL = 5.2; EXPRESSED IN PLACENTA, SIGNAL = 3.5; EXPRESSED IN LUNG, SIGNAL = 3.3; EXPRESSED IN FETAL LIVER, SIGNAL = 3.9; EXPRESSED IN BONE MARROW, SIGNAL = 2.8
ggaaggtaggaggcagaagccagggctggatggaaggaaatgacatacatacctggccccaagctggtcttgtgttagttcattcattgccacagtaagatttctcctaagtgagttgaaatagcttgtggcctcgggataactgacataggaggctctaaactcctctgcctcaaacccaagatctctatctgctctcttgttctctgataacactaaaccttcactacagacttttgccaggttgccctacagtgcgttgcaggggacgccctatccaatgatgaggagggggaatcatatataaactgggatataaatggtgcctttaggatctacaccattatacgcagctacgggccacattctgggagcaaacatttcctggcacaactgcgatggacctggagcttgaattacgttctaagtcttgtggatgtgggtaagtgctgagaagaatgttatattttctcaacttttagaaatctgatcattttagaatctgctaaagatcctgaaggcattgtacaaataacttagtggcaggcaggctctgctacaaccacggcaaaatcccacatttcaccc

SEQ ID NO: 8710 - DNA, 591 bp, Homo sapiens
  MAP TO AL138831.2; EXPRESSED IN HELA, SIGNAL = 6.2; EXPRESSED IN BRAIN, SIGNAL =  12; EXPRESSED IN PLACENTA, SIGNAL = 4.5; EXPRESSED IN LUNG, SIGNAL = 4.2; EXPRESSED IN HEART, SIGNAL = 4.8; EXPRESSED IN FETAL LIVER, SIGNAL = 6.8; EXPRESSED IN BONE MARROW, SIGNAL = 5.5; EXPRESSED IN ADULT LIVER, SIGNAL = 4.7
ctgtcattgcccaaaatgtgcactgtgtgtatatattttgtatgtatatgcatgtttttaatatttttgatagaccccaaaacaatctgatttaagttgtatatgcttagtaacttatttagagatacgcattttaaaaattatttttaggagaaagttactgttatgagcaccattaatccaactaaggacctgttggctgacttgattgggtgccagagacttcctgaagaccaacgtaagaaagtacaccagctaaaggacttgttggaccagattctgatgttggacccagctaaacgaattagcatcaaccaggccctacagcacgccttcatccaggaaaaaatttaaacaagatgaagaaactccaagggtttgagtaaatacaaagactgaagaaatttcacagcagtttattaatgtatataaacttataaatatttctccagcaaatttgaggaagcatgatatatttgaattaacaccaagggtgatatttcttttagagatgttagttaatctgttttgtgtcttacgtgaaatttcactgtagactgttttaaattgccaagactgcacaaaattaca

SEQ ID NO: 8711 - DNA, 588 bp, Homo sapiens
  MAP TO AC010093.2; EXPRESSED IN BRAIN, SIGNAL = 1.3; EXPRESSED IN HEART, SIGNAL = 2.1; EXPRESSED IN HELA, SIGNAL = 1.7
tcctgaccagccttgatttcacagcacaccactctgagcactcctgtactggcccctgcactgtgaactcctgatcattgatcagatcctgcattctctggaccatccctggatggttcttggggctgagagtcagagaagggaattgcacagcatagcttatttatttatttatttatttattttagcccaagtgctgtttatttaaaagaacaaaaaagagtggaggccccctagggacggatgaaacaaaactagcagtgcaagtctgcctctagctcagcataaaagcttgttgccccactgggccatcttgttgttgataggcatcttcaagaagcagtcagactgcatgtaggcagcaattttctccaaagcctcaacggcacatgaaagccttaagatgtgggaactcatccaggcacttgggctcaaacatgcacttttgatccaggacgtcatagatgggaaaatccacaaaggtgagctttcccctgcaaaccatgagaatttctcccaggaacatggagaattgtttcagttgttcaggtagctgttccaagtactgaggtttcagggttggttttt

SEQ ID NO: 8712 - DNA, 582 bp, Homo sapiens
  MAP TO AC018552.2; EXPRESSED IN ADULT LIVER, SIGNAL = 5.7; EXPRESSED IN HEART, SIGNAL = 4.7; EXPRESSED IN BRAIN, SIGNAL = 7.8; EXPRESSED IN BONE MARROW, SIGNAL = 5.4; EXPRESSED IN FETAL LIVER, SIGNAL = 5.8; EXPRESSED IN HELA, SIGNAL = 6.3; EXPRESSED IN LUNG, SIGNAL = 6.5; EXPRESSED IN PLACENTA, SIGNAL = 7.2
atctcaggctccaggttcacatgtactcagcctaggtcctgtccccttccatgcctctggtcagcccctgccacggggtcccatctgcagcctctgcctcctcaggtgcccacggcaggggccacagggaagactttcgcttctgcagccagcggaaccagacacacaggagcagcctccactacaaacccacaccagacctgcgcatctccatcgagaactccgaagaggccctcacagtccatgcccctttccctgcagcccaccctgcttcccgatccttccctgaccccaggggcctctaccacttctgcctctactggaaccgacatgctgggagattacatcttctctatggcaagcgtgacttcttgctgagtgacaaagcctctagcctcctctgcttccagcaccaggaggagagcctggctcagggccccccgctgttagccacttctgtcacctcctggtggagccctcagaacatcagcctgcccagtgccgccagcttcaccttctccttccacagtaaggcaacttccaggcggagggaacaactgggcagtggtctagaggcaggga

SEQ ID NO: 8713 - DNA, 532 bp, Homo sapiens
  MAP TO AC007341.3; EXPRESSED IN BRAIN, SIGNAL = 7.3; EXPRESSED IN HELA, SIGNAL =  12; EXPRESSED IN HEART, SIGNAL =  10; EXPRESSED IN ADULT LIVER, SIGNAL =   8; EXPRESSED IN PLACENTA, SIGNAL = 7.5; EXPRESSED IN LUNG, SIGNAL = 4.6; EXPRESSED IN FETAL LIVER, SIGNAL =  11; EXPRESSED IN BONE MARROW, SIGNAL = 6.6
atcctcaatcctcctgcctcagccccacaagtagctgggactacaggtgtgtgcaaccatgcccaggtaatttattttaatgttttgtagagacagggtctccctttgctgcccaggctggtctcaaactcttggcttcaagtgatactcccatcttggcctcccaaatggttgtgattacaggcaggagccactgtgcccagccagaagtagggtctgatattcccttcagttctaacttaaaataacataggtaatgtgtttgtagtaacagaaaatggaatggacttcaagttaataggaacaatgtttctcaaactttttctcagtattccactcaacaaaagtaacacatggagctaaatggtgtaaatagacccatgaatgaatgaagcaacaagtccggggctctgctcacctcaagtcagccaggtctccttgagggatcagcttcttggtatgcctgtcacccagagttggcttgactgaggtgctgatgaagttcatactgcaggaggacttactctcatgg

SEQ ID NO: 8714 - DNA, 525 bp, Homo sapiens
  MAP TO AC007611.2; EXPRESSED IN BRAIN, SIGNAL = 1.5; EXPRESSED IN PLACENTA, SIGNAL = 1.7; EXPRESSED IN FETAL LIVER, SIGNAL = 3.5; EXPRESSED IN HELA, SIGNAL = 3.5; EXPRESSED IN HEART, SIGNAL = 3.2; EXPRESSED IN BONE MARROW, SIGNAL = 2.7
ttgtgaatgcaaaagcaaggttcttgaaggaaattaaaagttctactccactgagcacatgaatgataagaaagtgaaacagacttattgctgatttgaagaaagttttagtggtctggatagcatatcaaacagccacaacattcctttaagccaaagcctaatccagagcaaggctctaactctcttcagctcttacaagactgagagagatgaggaggctacagaagaaaagtttgaagctagcagaagttagttctttaggtttgaggaaagaagccatctccataacacaaaagtgcaagatgaagcagcaagtgctgatggagaagctgcagcaagttacccagaagctctaactaagatcattgatgaaggttgccacactaaacaacaggttttcaatgtagatgaaacagccttctattggaagaagatgccatatagctaaagaggagaagtcaatgcctggcttcaaagcttcaaaggacaggctgactttcttgttaggggctaatgcagctg

SEQ ID NO: 8715 - DNA, 561 bp, Homo sapiens
  MAP TO AC003677.1; EXPRESSED IN FETAL LIVER, SIGNAL = 1.6; EXPRESSED IN BONE MARROW, SIGNAL = 1.9; EXPRESSED IN HEART, SIGNAL = 5.6
gaagccattggagctctgtcttgggactcccagacttcacccccttttgagggtccaaacaagcttctctcctccagaaggcctttctaaacacaggtgtcaactatgtcatccacccaggacaacactgaaccccaaatcactgctttcccttctcaaaaatcttccaatgcaagtcagtcttttatgaccttctctttgggtttgtcttgtttccctagggaaatcatgagctcctggaaggtagggcccaagccttctctttctctagtgtccttccatggtgttgagttcaacataagctggacatatcttaggagtcccatggccccatgatgattggccattggccaggacttccactccctgggtcacagctcagctctagaaggtatttcgcccttccctcctgaatggcttctcctagatgattttggaagagatgcctgttatttgcatttggtacactgggttgcaggatggaccctgtgccagcatcgtctccttggccgttaacagaagtgtccaccacatccctcttgaggaggcagcatagtccac

SEQ ID NO: 8716 - DNA, 519 bp, Homo sapiens
  MAP TO AC010198.8; EXPRESSED IN BRAIN, SIGNAL = 2.1; EXPRESSED IN PLACENTA, SIGNAL = 1.7; EXPRESSED IN BONE MARROW, SIGNAL = 1.8; EXPRESSED IN FETAL LIVER, SIGNAL =   2; EXPRESSED IN HELA, SIGNAL = 2.2; EXPRESSED IN HEART, SIGNAL = 1.8; EXPRESSED IN LUNG, SIGNAL = 2.2
tcattcatgttgtagcatgggtcaaaattttcttccttttttaggctgaataatattccattatatatatgaattacgtatttgagtcatgtagatgaattatatacatgaatatatgtatctcctatttatttttaaaggcagcaaattgtattaatgattttgatatatattggcttttaagtataaagactattaccatttaactcttggaccctaaaatcgtttttcttaagcagcaaattatcatcctgatggaactattcaagtaagcaatggtagccttgccttttacccagcacagacgaatgtgtttcccagacctactcagccatttgtcaatagccggggatctgttagaggatgtactcgtggtgggagattaataaccaattcctatcggtcccctggtggttataaaggtatgccctgaataaaattgaattatactgaattattttgtctgtgtgtttacttgactcacaccatttttacctaaccttgctcccttttgtcatt

SEQ ID NO: 8717 - DNA, 545 bp, Homo sapiens
  MAP TO AL133475.14; EXPRESSED IN BRAIN, SIGNAL = 2.2; EXPRESSED IN PLACENTA, SIGNAL = 2.2; EXPRESSED IN HELA, SIGNAL = 2.5; EXPRESSED IN ADULT LIVER, SIGNAL = 2.3; EXPRESSED IN BONE MARROW, SIGNAL = 1.9; EXPRESSED IN FETAL LIVER, SIGNAL = 2.6; EXPRESSED IN HEART, SIGNAL = 2.3
gccaattgtgggaacttgtgatcatgtgagttaataataaactccccttcatatatatatatatatagttctgtctctctagagaaccctgactaatacaacaaccactttagaaaacaatttgtcagtttcttcaaaagttgcatatacacctagcagaagatacagccattccactcctaggtatttactcaagagaagaggaaacatagtccttaaaataatttatatgaatgttcttaacagctttacttgtaatcacaccaaactgaaaacaatccaagtgtgcatcaacaggtaaagagtacatagatgaacagatcatgatataaccataaagtggaatactacatagcaatacaatggaatggactatttgtacatgcaacaccatcaatgaatctcaaaataattatgctgagtgaaagagccatatgaaaaagaatacatattacatgattccgtttatatgaaattataggaaatataagctaaggtatactaacagcagcctagtggctccctggaggcacaagggagaagat

SEQ ID NO: 8718 - DNA, 566 bp, Homo sapiens
  MAP TO AC021881.2; EXPRESSED IN BONE MARROW, SIGNAL = 2.5; EXPRESSED IN FETAL LIVER, SIGNAL = 3.2; EXPRESSED IN LUNG, SIGNAL = 2.8; EXPRESSED IN PLACENTA, SIGNAL = 2.6; EXPRESSED IN BRAIN, SIGNAL = 3.4; EXPRESSED IN HELA, SIGNAL = 3.2; EXPRESSED IN ADULT LIVER, SIGNAL = 3.2; EXPRESSED IN HEART, SIGNAL = 2.6
aaatgcagaaacaacccaccaaagaattggtaaggagccaagccgataaagtaattgagccaagggctccctccctcaccaatgacgaagtggaagaatttagagcctacttcaatgagaaaatgtccatccttcaaaaaggtggaaaaagactcgaagggacagagcacagacaggataatgatactggtaatgaagaacaggaagaagaagaagacgatgaagaagaaatggaagagaaactggcaaaagcaaaaggatctcaagccccatctcttcctaacaccagtgaggcacagaagatcaaggaagttcctacacagttcttggacagagatgaggaggaagaagatgctgatttcttgaaggtgaagcggcataatgtgtttggattggaccttaaagacgagaaaacattacaggtaagtttactcccagtggagggtcttctattacattgtcttactatgtgcttattgttgccttttggggactgagagaaagtgaaaactaagaaacttagactgggtttctttgcaatgaactcttcctcctttcccccatac

SEQ ID NO: 8719 - DNA, 541 bp, Homo sapiens
  MAP TO AC020557.2; EXPRESSED IN ADULT LIVER, SIGNAL =   2; EXPRESSED IN FETAL LIVER, SIGNAL = 1.8; EXPRESSED IN HEART, SIGNAL =   2; EXPRESSED IN LUNG, SIGNAL = 2.2; EXPRESSED IN BRAIN, SIGNAL = 2.1; EXPRESSED IN PLACENTA, SIGNAL = 1.5; EXPRESSED IN BONE MARROW, SIGNAL = 1.6; EXPRESSED IN HELA, SIGNAL =   2
attctgtgtgtaggcctggggtgtggcctgggacctgtgtctacttttttagtttcccaaatgctttaaatgagaaccagcagttgagtcactggccaagacctccctcctcctgttccccagcttcatggccgagacctccctcctcctgttccccagcttcatggccgagacctccctcctcctgttccccagcttcatggccgagacctccctcctcctgttccccagcttcatggccgagacctccctcctcctgttccccagcttcatggccgagacctccctcctcctgttccccagcttcatggccgagacctccctcctcctgttccccagcttcatggccgagacctccctcctcctgttccccagcttcatggccaagacctgagcagcattcagattctggctcacaccctgcatccaaaccccagaagttctcatacagggaaagacagagaagggagagggtcatcaagattagggaaaaaaacaacaaaaaaaggaaaaccaactaggattaggctcagcagcaagc

SEQ ID NO: 8720 - DNA, 503 bp, Homo sapiens
  MAP TO AL138761.3; EXPRESSED IN ADULT LIVER, SIGNAL =   2; EXPRESSED IN BONE MARROW, SIGNAL = 1.8; EXPRESSED IN LUNG, SIGNAL = 1.8; EXPRESSED IN PLACENTA, SIGNAL = 2.1; EXPRESSED IN FETAL LIVER, SIGNAL = 2.2; EXPRESSED IN HELA, SIGNAL =   2; EXPRESSED IN HEART, SIGNAL = 1.8; EXPRESSED IN BRAIN, SIGNAL = 2.4
atgctcttaaccaggccctcaagcttctagaaggccaagaaggcactgtatatactaattccaaatatgcctgtggaatagtacacacctttaaaaagatctggacagagcggggcctaataaatagcagggagaaagaatttgtacatggggaactgatcaaacaagttttaaaaagcctcttgcttctagcagagatagccataggcaaaactatagaagctgtggggaacaggcttgcagataaagctgctaagcaagcttccctggaggaagaagttagattgtttagcctaatcccacagatccctaaggtgatattaaaacccaaattttctaaaaaggaggaggaagagctgggcaagataggggccactcaaactgaggatgggaggtgggtgctccctgatgggagagaaatgataagcaaacccataatgagaaaactgatgtccatactgcataaaggaattcactggggtccccaggatatgtgtgatgca

SEQ ID NO: 8721 - DNA, 567 bp, Homo sapiens
  MAP TO Z97197.2; EXPRESSED IN BONE MARROW, SIGNAL = 1.6; EXPRESSED IN HEART, SIGNAL =   2; EXPRESSED IN LUNG, SIGNAL = 2.3; EXPRESSED IN BRAIN, SIGNAL = 5.2; EXPRESSED IN PLACENTA, SIGNAL = 1.8; EXPRESSED IN ADULT LIVER, SIGNAL = 2.3; EXPRESSED IN FETAL LIVER, SIGNAL = 2.1; EXPRESSED IN HELA, SIGNAL = 2.2
tatgtcggggatgacctagccctttcctccttttccagtgggtggccatgtagattttgatgacttcgtggagctaatggggcctaaactcctggcagagacagcagatatgattggtgtaaaggaactgcgagatgctttccgagaggtaacggacagaggcaggcaggcatggggcggctattggaatcctatctgcagtataaatacttcaaaagaagcctgagcctcaagtcccagatcaggggagggagcttggacagagaaaggtctctggtaaaggggggcaatgacactggagaaggagctcaactttgggatctgctgctgccaatcgccatgctggggcgacctctccttccttcctgccttctctagtttgacaccaatggtgatggggaaataagcaccagtgagctgcgagaggctatgaggaagctcctgggtcatcaggtgggacaccgagacatagaggaaattatccgagatgtggacctcaatggggatggacgagtggactttgaaggtaggtggggcttgaaagtgggagagaagcaagccagcagt

SEQ ID NO: 8722 - DNA, 565 bp, Homo sapiens
  MAP TO AC007376.8; EXPRESSED IN BRAIN, SIGNAL = 5.9; EXPRESSED IN HELA, SIGNAL =  25; EXPRESSED IN HEART, SIGNAL =  13; EXPRESSED IN ADULT LIVER, SIGNAL = 7.6; EXPRESSED IN PLACENTA, SIGNAL =  10; EXPRESSED IN LUNG, SIGNAL =  36; EXPRESSED IN FETAL LIVER, SIGNAL =  17; EXPRESSED IN BONE MARROW, SIGNAL =  19
ccattaaccatttttccatgttgcttaagagcctatgcaagaacagcttaagaccattcagtggttgctcctacccattcagtggcctgagcagtgggagctgcagaccagtcttctatggcaggctgagcgctccagtcttcagtagggaactgctgaataggcacagagggcacctgcacaccttcagaccagtctgcaacctcaggccgagtagcagtgaactcaggagctggagcagtccattcaccctgaaattcctcctcggtcactgccttttcagcagcagcctactcttctttttcaatctctccaggatctctgtagaagtagagatcaggcatgacctcccatgggtgttcacgggaaatggtgccatgcatgcgcagaacttcccaagccagcatccaccacatcaaacccactgagtgagctcccttgctgttgcatgggatggcaatgtccacatagcacagaggagaatctgtgttacacagagcaatggtaggtaggttaacttaagatgcctctgtgagaggctggtggtcagccctgggatcagtaa

SEQ ID NO: 8723 - DNA, 574 bp, Homo sapiens
  MAP TO AL137852.2; EXPRESSED IN BRAIN, SIGNAL = 4.8; EXPRESSED IN HELA, SIGNAL = 5.4; EXPRESSED IN ADULT LIVER, SIGNAL = 5.4; EXPRESSED IN PLACENTA, SIGNAL = 5.1; EXPRESSED IN LUNG, SIGNAL = 3.2; EXPRESSED IN HEART, SIGNAL = 4.9; EXPRESSED IN FETAL LIVER, SIGNAL = 5.6; EXPRESSED IN BONE MARROW, SIGNAL = 3.8
atcagtagcaggcaagggtgaccccagggccacctgtgccagccctggggctgacccagcttctctggcaggcccaggtggctgccttaggctgacagagcagtcacggggaaggggaggggtcttctgcaagcggggccagggcccaccaatcagaccgtgtctctgcatctctgcagctgagtctcttgtttgagctcatttgcataatttggttcaatatttactgagccaacctcattttctgggctgtctccatggccgacagctgggaaggctgcaattacagcattatccatgcagggttgccactgggagcccacaccgagacgcagcttccaaacaaacccagccctggggagccccttccttgggccgctccagatctctgcagctggaagtcggcctgggccacaactgcaaaccaggctatacccagacacagccacaacaacaacaacggcaacagcagcgatcatggttacttgtcattaagtgaataatagccgccttttgttgggcacttgtgcgcaggcaccggctacgtggaatttctcacctcatcctcacagca

SEQ ID NO: 8724 - DNA, 551 bp, Homo sapiens
  MAP TO AC008044.4; EXPRESSED IN ADULT LIVER, SIGNAL = 5.4; EXPRESSED IN BONE MARROW, SIGNAL = 8.7; EXPRESSED IN LUNG, SIGNAL =  13; EXPRESSED IN PLACENTA, SIGNAL = 4.5; EXPRESSED IN BRAIN, SIGNAL = 3.4; EXPRESSED IN HELA, SIGNAL = 7.9; EXPRESSED IN FETAL LIVER, SIGNAL =   7; EXPRESSED IN HEART, SIGNAL = 4.2
atcctggcccgttttacttcgctattctggtcatccagatggcagaaaccttctgtactgatgtctcttttttcatcctcgatgggttctagagggaaattctggtctgtggccaggacctgtcggacagtcatgttaacacgagcggtcttcaagtagctggcacacacctgccagtcctccatagaacaaggctctaccattgaatctctcgggaggacagcagggagaggtgcctctaggcagtgaggcaggccttccccttctggatttggaaggacacgagggactgcgtggttcaagaggcggctgaaacccgacattatcatgatgtcaccactgtgcataaacatggccgtgggggcctcatccctttgaagaccacccaggagaaagatggcggactgtccaaagctacaaaaaataagtaaaaacacacaacaataaaaaagtataaattttgtttattaactatgactgggaaagttactgccaactgtgttattttgtaatttcaggttgatatttattgctcccaaatcctccttttt

SEQ ID NO: 8725 - DNA, 518 bp, Homo sapiens
  MAP TO AL121769.2; EXPRESSED IN BONE MARROW, SIGNAL = 1.8; EXPRESSED IN FETAL LIVER, SIGNAL = 1.9; EXPRESSED IN LUNG, SIGNAL = 1.8; EXPRESSED IN PLACENTA, SIGNAL = 1.5; EXPRESSED IN BRAIN, SIGNAL = 1.7; EXPRESSED IN HEART, SIGNAL = 1.9; EXPRESSED IN ADULT LIVER, SIGNAL = 1.8; EXPRESSED IN HELA, SIGNAL = 2.1
tcccaggactgtcatcttccccagaccagtccgagagctcctccggggagaaccatgtggtggatggaggctctcaagaccattcccactcggagcaggatgactcctctgaaaagatgggcctcatctctgaagcagcttccccacctgggagccctgagcagcccccacctgacctggcctcggccatcagcaactgggttcagtttgaagatgacacaccctgggccagcacatctccacctcatcaggaaacagctgagacaggtgaggaggtaggaagggcccggcttgggtttgtggtcagcagggatgcttttcagtgagaggtctatagggctgccaggattccatttcatctgccccctaaccctgaagcactggtcgcataggggagagcagacggagttctcatctggtttaattctgtaacttgtttttgttgacataagcatacaaaagaatgtatgtgttctaggacatttctagtcctttactcttgtccctggctgttgact

SEQ ID NO: 8726 - DNA, 579 bp, Homo sapiens
  MAP TO AC012178.2; EXPRESSED IN BRAIN, SIGNAL = 2.9; EXPRESSED IN HELA, SIGNAL = 3.2; EXPRESSED IN ADULT LIVER, SIGNAL = 2.8; EXPRESSED IN PLACENTA, SIGNAL = 2.4; EXPRESSED IN LUNG, SIGNAL = 2.8; EXPRESSED IN HEART, SIGNAL = 2.9; EXPRESSED IN FETAL LIVER, SIGNAL = 2.7; EXPRESSED IN BONE MARROW, SIGNAL = 2.5
tatctcagctcccccaacaggcgcatattctgggctccttttcccactgggtacttggcacctcagctggtctgtttctcagcatttcctggtgatctccttacactgaacccaggctccctcccacagcagtgtctcttgtattcctgactgcacctgatatctttcatctgtccaacaaacattctcccattttttctttctttctttttttttttttcactaaagaaagagtcaattgttcagcctcaggggatgcatcacaattggtctgatttatctgtggaaattccattttattttgcctggaattggtttaggggtgggcatgtgactcagtggctcggttcttgccaacgacacctaagaaatctaccaggagtttccgacaaacattttcctctctcattaaagaacgattccttccttttggaagagtgtcatcatgtggagatgtattgcttggagtcatagcagccatcttgtgaccatgaggtgagacctcattttcacactgagagtaacagaggacaggatggtcccaggattctcatgctatcactgagctgctaagccaaa

SEQ ID NO: 8727 - DNA, 509 bp, Homo sapiens
  MAP TO AC023000.2; EXPRESSED IN BRAIN, SIGNAL = 3.5; EXPRESSED IN FETAL LIVER, SIGNAL = 3.2; EXPRESSED IN HELA, SIGNAL = 2.9; EXPRESSED IN ADULT LIVER, SIGNAL = 2.9; EXPRESSED IN PLACENTA, SIGNAL = 2.3; EXPRESSED IN LUNG, SIGNAL =   2; EXPRESSED IN HEART, SIGNAL = 2.7; EXPRESSED IN BONE MARROW, SIGNAL = 2.2
tgtcaagcagatgccttttgttttgaactttgttctataagaacagacactgtggaaagaggccacggtaatacaggtattttgtctatacatgaagcagaaggtaagccagaaaaatctagcagggaggtcaaggtgcagtcagaaaggaaagaataatgagaagcaggtgcacttgcctccaagtaggaacaatagctgtggaagcttgggaaggatagtggtagcagagaccaaggtggatggcagcgcacagaagaggtggttagctctcgtgctcagatgaatcagcttcattgggcttgacacctccaacctgtatccttgcaggctgaatagaagagggaaacagagaaggagagggggaaggaaagggaagaaaatgaaagggaagagggggacgaagaggagaagcagaagggaagagaggtaggggaaagaaagagagagagatgagagagaagagagagataaatgaaagagagaggagagagagaggcagggagaca

SEQ ID NO: 8728 - DNA, 503 bp, Homo sapiens
  MAP TO AC000026.3; EXPRESSED IN PLACENTA, SIGNAL = 2.2; EXPRESSED IN BRAIN, SIGNAL = 1.9; EXPRESSED IN HEART, SIGNAL = 2.3; EXPRESSED IN FETAL LIVER, SIGNAL =   2; EXPRESSED IN HELA, SIGNAL = 2.5; EXPRESSED IN BONE MARROW, SIGNAL = 3.5; EXPRESSED IN LUNG, SIGNAL = 5.8; EXPRESSED IN ADULT LIVER, SIGNAL = 1.7
gcagttgccctctgcttaacaactttgagttgtcgtgtcctcatttctaaattgtcagcccgatgccgagattgagtgaagtgtctggtttgttctgctgtgagagaaggaagcagagcagcttccacagtgtccacagggcctctgcagccacccactgactgctttcgccctgctattctcaccttaggtggtgatcgtggcagaggtggccctggtggcatgcggggaggaagaggtggcctcatggatcgtggtggtcccggtggaatgttcagaggtggccgtggtggagacagaggtggcttccgtggtggccggggcatggaccgaggtggctttggtggaggaagacgaggtggccctggggggccccctggacctttgatggaacagatgggaggaagaagaggaggacgtggaggacctggaaaaatggataagtaagtgctggtgaaaagcagctgtgggccgccaggcacagtaagaggacagcccttccc

SEQ ID NO: 8729 - DNA, 524 bp, Homo sapiens
  MAP TO AC002044.1; EXPRESSED IN BRAIN, SIGNAL = 3.8; EXPRESSED IN PLACENTA, SIGNAL = 3.3; EXPRESSED IN FETAL LIVER, SIGNAL = 3.9; EXPRESSED IN HELA, SIGNAL = 3.7; EXPRESSED IN BONE MARROW, SIGNAL = 3.1; EXPRESSED IN HEART, SIGNAL = 3.3; EXPRESSED IN LUNG, SIGNAL = 3.2; EXPRESSED IN ADULT LIVER, SIGNAL = 3.9
ccctccgacaagtctgtctctttcaaccttccagaaaacaaatggaatttaaggagaaaaagtgaaatgtctgcatcagccagagtgatcgacgccagaagtgttgatttagagggagtttttctgcctcgccccgtcactttctcattctctcttttaagagaagaataaaataaaaaatcaagccccttgtacgaggcagaaggcagccttgtgggtgctgcttacctcctgcttgtgttgcgccggctgccctgtcttctctcattatgaaggtgatgaatgtatttgtcagcaaatagtaggaactcaagaggagcctctgggtttgagcaccaaattcatgctctgcagcaacaaccagaaagttgaagagcatgggaggaattttaaagagcattttcctctcgcatttggttgaaattcttctgtaggctcggttccagcaagacatctgggcaggtgcactcagcgggctgcagagcaagggaggaaaaaatgatgcctcatgctttcccatcaag

SEQ ID NO: 8730 - DNA, 588 bp, Homo sapiens
  MAP TO AC018493.4; EXPRESSED IN BRAIN, SIGNAL = 2.2; EXPRESSED IN PLACENTA, SIGNAL = 2.1; EXPRESSED IN BONE MARROW, SIGNAL = 1.7; EXPRESSED IN FETAL LIVER, SIGNAL = 3.1; EXPRESSED IN HELA, SIGNAL = 2.5; EXPRESSED IN HEART, SIGNAL = 2.1; EXPRESSED IN ADULT LIVER, SIGNAL = 2.3
tcaaccacactcagctgctctacaataaccccagagcttctgagttacaatatgccagaaataggtaagtggctctgctcacacaatataattcaggcagatccagtgtccagtcattgttgttctaccacccagttgtgagctagaataacttccttaatttttttgaccctcgaggatattgaaataatataatgcttacttcattaggtcatagtggagattaaaaaatggttattaagatgatatgcccttcatctaggaaaaaatcaataaatgttactgatgctatcgtcatcatcatcatcatcatcattatcatcatcatcaaggtcatgacagaaagaggacacattacatgaaatctcaacttcatccctgggccatgcacacctgtagctaatttttgtatctttctatttgagttcgggtttcgcatcgttttgtcccacacaacagaagctgatctccaaagagaggaatgatgtagcctcaagtaacaaagacattgagggaagtctttcacatcctgggatgcctgtggcccagcacagagggctgttgggttgccaacacagagtttacccc

SEQ ID NO: 8731 - DNA, 505 bp, Homo sapiens
  MAP TO AC023084.2; EXPRESSED IN ADULT LIVER, SIGNAL = 3.7; EXPRESSED IN BONE MARROW, SIGNAL = 2.6; EXPRESSED IN HEART, SIGNAL = 2.3; EXPRESSED IN LUNG, SIGNAL = 2.9; EXPRESSED IN BRAIN, SIGNAL =   3; EXPRESSED IN PLACENTA, SIGNAL = 2.1; EXPRESSED IN FETAL LIVER, SIGNAL = 3.1; EXPRESSED IN HELA, SIGNAL = 2.7
ccctctcatctctgccattctcaataacctctatcagtatgcagatgctcctcaaaaatattagacagctgtgccagaatttgcttagcagatgggagagggatagtagtggcaaatacgcataggttaatagttctttgctcttgcctgtctaatgtctgtctcccaacacaactgtgatctctcggagggaaggaccatgtctttcttaaacacctgcatacccccagcagccagtatggtgttgggcacatagtagatgcttggtgaatgttttgactaaatggatgtcaggtcccttggcagtaacgggctgccactcttcttcccacagtgagaactacctagtgcgatggggcagccggggcttccctaaggagattgagatgctcaacaatctgaaggtggtcttcacggtgagtgtgcaccctcttctcgttaccgtgctccccaaccacaaaaatgtgaccttggaaatgaggctggtcaggagctcagggtgaag

SEQ ID NO: 8732 - DNA, 532 bp, Homo sapiens
  MAP TO AL135788.2; EXPRESSED IN FETAL LIVER, SIGNAL = 4.5; EXPRESSED IN HELA, SIGNAL = 5.1; EXPRESSED IN HEART, SIGNAL = 4.4; EXPRESSED IN BRAIN, SIGNAL = 1.7; EXPRESSED IN PLACENTA, SIGNAL = 1.8; EXPRESSED IN ADULT LIVER, SIGNAL = 1.5; EXPRESSED IN BONE MARROW, SIGNAL = 1.5
cattttccccattgtcttggctattaacattcagctcctctttacttatgtaaatttacaccacctgtttgagtttctccccctaaaatgggttttttcctaccacatggctgggctgcaaatttttcaaattttttgttctgtttccctttcaaatataagttccagtttcagttctttaatttgcttatgcaaatgagcataggctttttaaagcagccagaccacatcttgaaagctttgttgcttagaactttctttccccagatactctaaatcatctctctcaagttcaaagttccacagatccttagaacaggggcatgatgccaccagtctctttgctaaagcatatcaggagtgacctttactccagttctcaatgagttcctctttgccatctgagacctcctcagtctggacttcactgttcatatcactatcagcatttcagtaacaaccattcaacaaatctctataaagttccagactttcccttatcttcctgtattcttctgagccctccaaactg

SEQ ID NO: 8733 - DNA, 517 bp, Homo sapiens
  MAP TO AC016372.2; EXPRESSED IN BRAIN, SIGNAL = 3.6; EXPRESSED IN ADULT LIVER, SIGNAL = 1.7; EXPRESSED IN HEART, SIGNAL =  16; EXPRESSED IN LUNG, SIGNAL = 3.1; EXPRESSED IN PLACENTA, SIGNAL = 4.5
ctgcaggaggtgaggagttcccaaagtccataggtacgggttctcttttattaacactccttttcctactgctctgccttctggcattcaccttttccgtctctactttccctctgaaattcatcaatgttcctgggtcttagggctcctaatctaggtagaaattttgcagcctctcagtttttgttctttttccaggaatccaggctagcaaagaatgaagctgcgcggatggcagctctggtggaagcagagaaggagtgtaacctggagctctcagagaaactgaagggagtcaccaaaaactgggaagatgtaccaggagaccaggtcaagcccgaccaatacactgaggccctggcccagagggacaagtaggtgccttcggtgctctttttgtcgcttgtcttttgcccattctcaaggcatacagcagctgtcctgttccctttcaaggactgacagtaggagcttcactatttctaagactttatgggcccacaaccgaagacattct

SEQ ID NO: 8734 - DNA, 501 bp, Homo sapiens
  MAP TO AC000097.1; EXPRESSED IN ADULT LIVER, SIGNAL = 5.3; EXPRESSED IN HEART, SIGNAL =   9; EXPRESSED IN BRAIN, SIGNAL = 5.1; EXPRESSED IN PLACENTA, SIGNAL = 4.9; EXPRESSED IN BONE MARROW, SIGNAL = 5.6; EXPRESSED IN FETAL LIVER, SIGNAL =  11; EXPRESSED IN HELA, SIGNAL =  10; EXPRESSED IN LUNG, SIGNAL = 4.6
aaaaggaagatttgggctgggcgcagcggctcacattgtaatcccagccctttgggaggccaaagctggaggactgcttgagcccagattagcctgggcaacatagcaagaccccatctctaaagaaaaatgaaaattaaaaaattagcagggcatggtggtacacacctgtagtcccagctacttgggaggctgaggtaggaggatcacttgagctcaggaggtggaggctgcagtgagccgtgattgcaccactgcacttcagcctggatgatggagaaaaaccctgtctcttaaaaaaaaaaaaaaaggaaaaagaaagatttggacacggacggatacgcgcacaggaagaacaccgtgtaaagactggaattctgctccacgagccaaggcatcaccagaagctgggagaggggcctgcttcagagcctctcttagagccttcagagggagcagacctgctgtcactctgatcatggacttccagcatccagagct

SEQ ID NO: 8735 - DNA, 588 bp, Homo sapiens
  MAP TO AC018826.3; EXPRESSED IN PLACENTA, SIGNAL = 1.8; EXPRESSED IN FETAL LIVER, SIGNAL = 1.8; EXPRESSED IN HELA, SIGNAL = 1.9; EXPRESSED IN HEART, SIGNAL = 1.8; EXPRESSED IN BRAIN, SIGNAL = 2.3; EXPRESSED IN LUNG, SIGNAL = 2.1; EXPRESSED IN BONE MARROW, SIGNAL = 1.7; EXPRESSED IN ADULT LIVER, SIGNAL =   2
gtgctttctggcagaccttccatggagctggcaatgatctccttaatttcagtgtgcaaataactgacaatatctattagttttggatccacactcctctctgagtctgcctggtactggctgaataatgaattggctggctctaaatgtaaggtcaggggaaacacagacatgagaatcagaggtggaaagagaagaatgaagtggaaagagaagagcaagcatctttcttgaagctagagagttgaatattttggaccagaaaacacaagaaagcttggaatttaggcattaaagaaatgtcaaaatattgtattttaccaaaatattttctcatttcagcaatgttgaggatgacgaggacaatgaggagggggaagagcatggtgatgatgataatcataatgaacgtttattgagtagttattatatagaaggcactgttttacattgctttgtacatgttttctaatttggtctttgtaaacatacgggggcagttactatcacattcattctgcatatggggaaaccgaggatcaagaagctgcagtaatttggctaatgtggcacaggtgtaagtgctca

SEQ ID NO: 8736 - DNA, 581 bp, Homo sapiens
  MAP TO AC012683.3; EXPRESSED IN BRAIN, SIGNAL = 1.6; EXPRESSED IN HEART, SIGNAL = 2.3
gccaggagcatctcactttccccgcaagctactgcctggatttccagggatgctgacgctgtgaggcccagcgtggagcctacatgctcacctggttgttgacgacgacgtgcacggtaccattggtcgtgtaggagggcaggtcgctcaggtggaaggtctcatataccacgccctggccagcaaaggcggcgtccccatgaaccaggatggacatgacctgcagggcaggtgtgagccaggaggggctgcgtgccccagcccatgtagcccagccggcacctgtactgtggagacccagggtccagcccagccctctgggcccaccctgaagggcccaggtcctctgggttcccccaggtgagctcaccttcttgccctgggcatctccacggtagaactgctctgcctttgtcttcccctgcaccacagggtccactgcctccaggtgggaggggttggcaaccagcgacagagtgatgttccggttggtgacgcggttgatcctctcatggtacatgcccaggtggtacttgacatccccggagccctgaaggtggagatgggaacatgatggatcc

SEQ ID NO: 8737 - DNA, 597 bp, Homo sapiens
  MAP TO AC007263.4; EXPRESSED IN BRAIN, SIGNAL = 7.9; EXPRESSED IN HEART, SIGNAL = 5.7; EXPRESSED IN LUNG, SIGNAL =  12; EXPRESSED IN PLACENTA, SIGNAL =  12; EXPRESSED IN HELA, SIGNAL = 6.5; EXPRESSED IN FETAL LIVER, SIGNAL = 7.2; EXPRESSED IN BONE MARROW, SIGNAL = 5.4; EXPRESSED IN ADULT LIVER, SIGNAL =   5
tgtctttactaggagccttcacgtaaatgggtccagtcatgcctcccagtaagaagccagaaagctcaggaattagtgtctccagtggactgagtcagtgttacgggggcagcggtttctccaaggcccttcaggaagacgatgacctcgacttttctctgcctgacatccgattagaagagggggccatggaagatgaagagctgaccaacctgaactggctgcacgagagcaagaacttgctgaagagctttggggagtcggtcctcaggagtgtcagccccgtccaggacctggacgatgacacccccccatcccctgcccactctgacatgccctacgatgccaggcagaaccccaactgcaaacccccctactccttcagctgcctcatatttatggccatcgaggactctccaaccaagcgcctgccagtgaaggatatctacaactggatcttggaacattttccgtattttgcaaatgcacctactgggtggaaaaactcagtgagacacaatttatcattgaataagtgttttaagaaagtggacaaagagaggagtcaggtaagcctctgtgtctggaacccaaggt

SEQ ID NO: 8738 - DNA, 586 bp, Homo sapiens
  MAP TO AP001341.1; EXPRESSED IN BRAIN, SIGNAL =   6; EXPRESSED IN PLACENTA, SIGNAL = 7.7; EXPRESSED IN ADULT LIVER, SIGNAL =   6; EXPRESSED IN HELA, SIGNAL = 6.3; EXPRESSED IN FETAL LIVER, SIGNAL = 7.6; EXPRESSED IN HEART, SIGNAL = 4.7; EXPRESSED IN BONE MARROW, SIGNAL = 9.2; EXPRESSED IN LUNG, SIGNAL =  28
aaaagtgtgtggcacttccccatcactctttctctccctcctgccaccacgtgaagggggtcagtgcttaccctatgccttccgccaggattgtaagtttcctgagatctcccagtcatgcttcctgttcagactgcagaacaattagtgagtcagctgaacctcttttcttcccaaattacccaggctcaggtagttctttatagcagtgtgagaatgaacgaatacaatctggtccttcatacaataacaagcatgcttacaatgtgccctcaaagagcacccagtcacttactcctccaggtaatcaccatcactgaacatcttcatttaatttatagcaaaagcttctcccttccttcatcctgaggttttctctggcttgaaagattctgttggagcaggtgcaggtgagcatcctctccttccctactttgcttttcttctcaacttcctcctccattcaccagcttaggttctaccccatgcagggtcaggccaagaagtgagagatcaaaagagattggatttgatttggggaaacaaatgctgtcatgatctgtgagggtgtcttctgggtaaggca

SEQ ID NO: 8739 - DNA, 584 bp, Homo sapiens
  MAP TO AC020557.2; EXPRESSED IN ADULT LIVER, SIGNAL = 3.5; EXPRESSED IN FETAL LIVER, SIGNAL =   4; EXPRESSED IN HEART, SIGNAL = 4.5; EXPRESSED IN PLACENTA, SIGNAL = 3.3; EXPRESSED IN BRAIN, SIGNAL = 3.5; EXPRESSED IN BONE MARROW, SIGNAL = 3.2; EXPRESSED IN HELA, SIGNAL = 4.6; EXPRESSED IN LUNG, SIGNAL = 4.9
aggggaatgaaggtgaggacaaggacaatgtagctcccatggggtggctgagccgaggtcgtcagggccaggccctgctggaggtgacagtgccttctgcgcgtgcttctgtagagctgcgggtggaggtgctcgggaacgaacccacacccggcatgccagagaagttccaattcaggtggaatttaagccacgatgcaggaccagttcagttctgggcaaagaaaaccctgctgctgagtgctctgaggctcgttttgtgggtttttttctgttgtgcttcctgcggtctccacagaagcagcttccctggagaacagcaagctcgtcagctgccacaacagctatgccaccaccctagcatggcctgggggctgccttgccatcagaacactgctggtgccaacccacacctcttcctggggtgctactcaacctccagcctacaggtaactctcctgggggtgctccgggttggggttggagcctaggctggctgggctgcagtccacggaggacagcagaggcaccaggcaagacgctggctcaaaccaccaagcacctgatgtctattttggggcgtg

SEQ ID NO: 8740 - DNA, 513 bp, Homo sapiens
  MAP TO AC018720.2; EXPRESSED IN BONE MARROW, SIGNAL = 2.5; EXPRESSED IN HELA, SIGNAL = 2.8; EXPRESSED IN HEART, SIGNAL = 2.4; EXPRESSED IN LUNG, SIGNAL = 2.7; EXPRESSED IN BRAIN, SIGNAL = 2.5; EXPRESSED IN PLACENTA, SIGNAL = 1.7; EXPRESSED IN ADULT LIVER, SIGNAL = 2.2; EXPRESSED IN FETAL LIVER, SIGNAL = 3.3
gacatttgtgctctgcaacgtacagctgagagagcacaaaacttgtctgactcagcacagtctaggaagtcaagcagctcaatcttgaacaggacagtggtgtttggggggatcaagggaggggagcccagcgttccataggcgtagttcggtttgaacagaaacctggccagctctcctctctgcatgctcagaaggcccagctccatgccccacaatgtaatatctgtaagaagggacaaagaaggtgggtgaagcttgctcagtatcctgcttaatgctatcagtttcttccccctctaagtcagcagtactctggcctccatgtctccctcacacagttccctcttcctgcaatgtcttcctcctgagcctgtgcccagcttctagtgatagaaattttattcaaacttccgggctcagttcaaatgccccctcttccaggaagccttccctgaacttcccagctagaattaatcatgccttcattaagcacacccacaacactgcttt

SEQ ID NO: 8741 - DNA, 534 bp, Homo sapiens
  MAP TO AP001328.1; EXPRESSED IN BONE MARROW, SIGNAL = 5.8; EXPRESSED IN FETAL LIVER, SIGNAL = 4.1; EXPRESSED IN LUNG, SIGNAL = 7.4; EXPRESSED IN PLACENTA, SIGNAL = 4.4; EXPRESSED IN ADULT LIVER, SIGNAL = 2.7; EXPRESSED IN HEART, SIGNAL = 3.6; EXPRESSED IN BRAIN, SIGNAL = 3.4; EXPRESSED IN HELA, SIGNAL = 3.8
ctcatttccagggactcagctttgtcaatgggcaccagagttcaacataggaagtttttctccacctccagatttttccctgctcctacatcctttcctggctagtctctgtgtgctcatggctctctgtacttatgaccgctgtggcacatggtatactgaaattgtaactgagccgctttaaggtagggaccatgctctttacgtttttattgtcctgcattacttgtagcaggtgctcagtatttctgcaatgaatgaatggatgaggtgacaatgataattagctgaaacaagaagcctggtgtcatgtaatcaaaataagctggtggttagaatccatcatttatagagcacatgtaactcagattcttacatatgttatctcatttagtgctcttaacaatcctatagggaaagtatttttttcctccttccctccacaaatatttattgtcttctaagtgccaggcactgtgttaggtaatggagataaaaccgtggacaagacagacacaatgtctgccctctgag

SEQ ID NO: 8742 - DNA, 532 bp, Homo sapiens
  MAP TO AL135744.2; EXPRESSED IN ADULT LIVER, SIGNAL = 3.3; EXPRESSED IN HEART, SIGNAL = 2.3; EXPRESSED IN BRAIN, SIGNAL =   3; EXPRESSED IN PLACENTA, SIGNAL = 3.4; EXPRESSED IN BONE MARROW, SIGNAL = 3.9; EXPRESSED IN LUNG, SIGNAL = 4.7; EXPRESSED IN FETAL LIVER, SIGNAL = 6.1; EXPRESSED IN HELA, SIGNAL = 3.9
cctttttctttcctttcccgtggttttcacctggtcatccccccgatcttcattatcatcatcatccagtaggtccccctcctcagcagagtcatctgcacccccctcagactccatcttcacattagtctcatctttcttcacggagctgctgctctgctcctcttctgacttatcattcttcatctctactgcggatgagaaggacaagtctgtctaggggcagtaatgtccacaggacgtagacaatccccactaaggatcacagaactgcagcacaaatctaaatcctcccacacaaatacccttcccaattcacactccccaagtttcatattacattgctttatattccactattccaacatgtactttcaagtgccttatgtaactaacccaactgtataccaagggcaagcagaaaacccatttacctgcttgtttgctctgttccttttcaattttttccaggttttccaggagagaatccactttttgttttatctgggtcagctccttcttaatggcctga

SEQ ID NO: 8743 - DNA, 557 bp, Homo sapiens
  MAP TO AC002039.1; EXPRESSED IN HELA, SIGNAL = 5.3; EXPRESSED IN HEART, SIGNAL = 6.5; EXPRESSED IN LUNG, SIGNAL =  17; EXPRESSED IN BRAIN, SIGNAL =  11; EXPRESSED IN PLACENTA, SIGNAL = 4.1; EXPRESSED IN ADULT LIVER, SIGNAL = 3.5; EXPRESSED IN BONE MARROW, SIGNAL = 7.6; EXPRESSED IN FETAL LIVER, SIGNAL = 5.4
cttcctggtcaatgactggctttcggtggagacggaggccaacgggggcctggtggagaaggaggtgctggccgcgagtaaggcctcgttccgtgttcccactccgtgggaggttgggcagggtggtcctgccccgtggcctcctgcagtgcggccctccctgccttctaggtcacgcagccctgttgcgcttccggcgcctgctggtggctggctgcagcgtggcttctttgacaagcacatctggctctccatatgggaccggccgcctcggagctgtttcactcgcatccagagggccacctgctgcgttctcctcatctgtctcttcctgggcgccaacgccgtgtggtacggggctgttggagactctgcctacaggtgggtgccgtaggggtcgggacagcctcttcctgcccagcccttcctgcccctcagcctcacctgtgtggcctcctctcctccacacagcacggggcgtgtgtccaggctgaacccgctgagcgtcgacacagtcgctgttggcctggtgtccagcgtggttgtctatcccgtct

SEQ ID NO: 8744 - DNA, 599 bp, Homo sapiens
  MAP TO AC011467.3; EXPRESSED IN BRAIN, SIGNAL = 2.5; EXPRESSED IN PLACENTA, SIGNAL = 1.9; EXPRESSED IN FETAL LIVER, SIGNAL =   2; EXPRESSED IN HELA, SIGNAL = 2.1; EXPRESSED IN HEART, SIGNAL =   2; EXPRESSED IN BONE MARROW, SIGNAL = 1.9; EXPRESSED IN LUNG, SIGNAL = 2.5; EXPRESSED IN ADULT LIVER, SIGNAL = 2.7
aactgtcatttcctgggtgccttgggtgtttatggcaggccctgtacttggcattaacctaaaaacaacaataacaaatctcatttaagcttcacaagtgtaagtcaaacaataccacccctattttacagatgtgaaaagagaggcccaaagagatcaagtaatttgccctacatcatatccttagcagctggagaggtaggattaaaacacagaattcttaaccaggacccaacagttcttccacaatctaaacaactaccctctactgcccttgggccccctgtccccaggagcctggccagccaagactcacatccccaggtgagtggcaaccaccagaagtggttgtctcagggttactgccattttaaattttctctttcgctcctctaggaacaccaaggctgttcctccactgatagtttcttatctgtggaaaagaagagcaggaattctcatgagaagtccctgcagtcgcatctgactttacagtttttactgaggcaaaaatttaaaaataataataagtactacgtttatttacttcaagaaaagtaaaagctaaggcccagaatgtggcaaggcaagggttaaaa

SEQ ID NO: 8745 - DNA, 503 bp, Homo sapiens
  MAP TO AL133211.1; EXPRESSED IN BRAIN, SIGNAL = 2.5; EXPRESSED IN HELA, SIGNAL = 2.6; EXPRESSED IN ADULT LIVER, SIGNAL = 1.8; EXPRESSED IN FETAL LIVER, SIGNAL = 2.2; EXPRESSED IN BONE MARROW, SIGNAL = 1.7; EXPRESSED IN HEART, SIGNAL = 2.6; EXPRESSED IN LUNG, SIGNAL = 2.9; EXPRESSED IN PLACENTA, SIGNAL = 1.9
tggcttaatgctaactattgggttagatcacatacttattttgacctagcatgaacacagaattggcttggttaaggaattcaggatcagagggcaggggattgggagtggggactgttgacctaccacttcttaaggaacttttaaagtttgaaatgatttatgctttccaaataaaagccaaggcattaaacacaagatagattccaaagcactaaaagtataaaactattctgagaaagtcatcatggatggttagaaaaatatctagcttgttcttttccctacaacctacctctgaccagtccacgaggttgatgagcctgctacactctaggtgcagtttgtatgctatgcagatgtctggggcgatattcggaatgcagccttcttcgcttttcagtgcttcattctaacaattaacagtaaactaagatgactaacttttataaattattaggaataaaatcagacattaatgaagcccccaacctaaactgagt

SEQ ID NO: 8746 - DNA, 501 bp, Homo sapiens
  MAP TO AL157996.1; EXPRESSED IN HEART, SIGNAL = 3.7; EXPRESSED IN LUNG, SIGNAL = 4.6; EXPRESSED IN BONE MARROW, SIGNAL = 2.9; EXPRESSED IN PLACENTA, SIGNAL =   4; EXPRESSED IN BRAIN, SIGNAL = 4.2; EXPRESSED IN HELA, SIGNAL =   4; EXPRESSED IN ADULT LIVER, SIGNAL = 4.6; EXPRESSED IN FETAL LIVER, SIGNAL = 3.8
aactcacacattgctggtggcagcataaaatggtacaaccactttggaaaattagcagtcccttataaagttaaactagcattcccctttttcatttccccaaaagaaatgaaaacatatgtccacaaaaaacttgtacaagaatattcatagaagctacatcaagaatagccacaatctggatcagatgtccattgacaggagaatggataaacaaattgtggtatatttaaacaatggaataccacttggtaataaaaaggaataaactgcggctacatacagcacataaatgaacaaatctcataaacattttcctgatgtttgagtgaaagaagctttacacaaaggagtatatactgtatgaataaatgtatatgaagtttaaaaacaggccaaactaatctataaagattgaaatcagaacagtgactgcctctggtgaccagtgatgagagggtggccacacagtggggattcactggaaagtggcatcaggtt

SEQ ID NO: 8747 - DNA, 579 bp, Homo sapiens
  MAP TO AC008102.16; EXPRESSED IN ADULT LIVER, SIGNAL = 1.6; EXPRESSED IN BONE MARROW, SIGNAL = 2.1; EXPRESSED IN HEART, SIGNAL = 2.7; EXPRESSED IN LUNG, SIGNAL = 6.2; EXPRESSED IN PLACENTA, SIGNAL = 3.7; EXPRESSED IN FETAL LIVER, SIGNAL = 3.9; EXPRESSED IN HELA, SIGNAL = 3.8; EXPRESSED IN BRAIN, SIGNAL = 2.9
aaaggacccaaacccaaatcacccacacctccttcaaagaactccttttcacctccctggctccccaggtggtctcccagctgggctccagggcctgcaggatcctctcaggtcttacctgcttgagttcagccacagtgaagcggttcattcggcgcaacttcttcttggacagcttgggggcttctggcttcttttcctagaacagaacaatcagcccttttaagcaggactcagatgtgaatgaaactgcccaacccaccccaaccttaagccaccaaagctctgtaagagttcaccatggtccctctctggatgcatctcagccacctgtgcccagagtccctgcttcccaccaggagggctgggcctgacctgctcgtcatcactgctgtcatcatcactgtccttgtgctcctcttcaaatcccttcttcttgggggctgcagagttctccagtttgtcaagtttctctggctccttctctttctccttcttcacatcatcagtgagctaaggaggcagacaaggtgaaacccctgccctctgagccccttcccagttcctaaggccagcact

SEQ ID NO: 8748 - DNA, 502 bp, Homo sapiens
  MAP TO AC024006.2; EXPRESSED IN BRAIN, SIGNAL = 2.3; EXPRESSED IN BONE MARROW, SIGNAL = 1.9; EXPRESSED IN FETAL LIVER, SIGNAL = 2.7; EXPRESSED IN ADULT LIVER, SIGNAL = 2.3; EXPRESSED IN HELA, SIGNAL = 3.1; EXPRESSED IN LUNG, SIGNAL = 1.9; EXPRESSED IN HEART, SIGNAL = 2.9; EXPRESSED IN PLACENTA, SIGNAL = 1.5
ttgactgttgaacaacatgggtttgaattgtatgggtccacttatacatgaattttcttcacttctgccacccctgaggcaacaagaccaacccttcctcattctcctccttctcaacatgaagacaaggatgagcaccttgatgatgatccatctccacttaatgaagagtaaatatatttccccttccttatgattttcttaatgacattttcttttctgtagatcactttatcatatgaatacagtatatagtccatatagcatacaaaatacatgttaatattgttcgtgttatcagtaaggctgacatgaatcaatacggtttatgttatcagtattgtgttaatattgtttatcttatcagtaggataacataagtaagttattaagttataacataaataaggctattagtagttatgtttctggagagtcaaatgttattaatatatatgattttcagcttcacatgaggttcagtgcccctaacatccatgtt

SEQ ID NO: 8749 - DNA, 533 bp, Homo sapiens
  MAP TO AL034380.25; EXPRESSED IN BONE MARROW, SIGNAL = 1.8; EXPRESSED IN LUNG, SIGNAL = 2.5; EXPRESSED IN ADULT LIVER, SIGNAL = 1.4; EXPRESSED IN FETAL LIVER, SIGNAL = 1.6; EXPRESSED IN HELA, SIGNAL = 1.7; EXPRESSED IN HEART, SIGNAL = 1.7; EXPRESSED IN BRAIN, SIGNAL = 1.5
gttgagaattatcgggctggagacgtgttggtcaggggccaaatatgtgctgcttcttggagaaatctgaaggaatggcgctgaggctagccacacatgcctcctgtgccctgagcttccctccctcggggcatgaggtcaggaagctcaggcaaatcacctctccctgccttttaggacgatgaccggggtgaggaatgggaacggcatgaagcgctgcatgaggacgtgaccgggcaggagcggaccactgagcagctctttgaggaggagattgagctcaagtgggagaagggtggctctggcctggtgttttatactgatgcccagttctggcaggaggaagaaggaggtaatgctggtacccaggcaaaggcaggggtgacccctgctgcattcttttggggttccctgttccacacggtagattctgtagtggtgagcccaaacaaaaggctagggaacaggctgacctctattgtatacgagagaccaatcatcctttttaagagtggggatcagtgagatggaga

SEQ ID NO: 8750 - DNA, 571 bp, Homo sapiens
  MAP TO AC010620.3; EXPRESSED IN BRAIN, SIGNAL = 1.5; EXPRESSED IN PLACENTA, SIGNAL = 1.5; EXPRESSED IN FETAL LIVER, SIGNAL = 3.3; EXPRESSED IN HELA, SIGNAL =   4; EXPRESSED IN HEART, SIGNAL = 1.8
tttagttatccccacctgcgcagttcccttattaggccaagacattttaacaaaattatccactaccctgactattcctggaatacagccgcatctcattgctgcccttcttcccaacccaaagcctgttttgcatcctccccttgtaactctccaccttaatccgcaagtatgggatacctctactccctctttggcaactgaccatgcaccccttaccattccattaaaacctaatcacccttaccccactcaatgccagtatctcatcccacagcaggctttaaagggactgaagcctgttatcactcgcctgctacagcatgggcttctaaagcctacaaattctccttacaattcccccattttacttgtccaaaaaccggacgagtcttacaggttagttcaggatctgtgccttatcaaattgttttgcctatccaccctgtggtgcccaacccgtacactcttttgtcctcaataccttcctccacagctcactattccattcttgatcttaaagatgcccttttcactattcccttgcacccctcatcccagcctctctttg

SEQ ID NO: 8751 - DNA, 524 bp, Homo sapiens
  MAP TO AC019205.2; EXPRESSED IN PLACENTA, SIGNAL = 2.4; EXPRESSED IN BRAIN, SIGNAL = 1.9; EXPRESSED IN BONE MARROW, SIGNAL = 1.6; EXPRESSED IN FETAL LIVER, SIGNAL =   2; EXPRESSED IN HELA, SIGNAL = 2.1; EXPRESSED IN ADULT LIVER, SIGNAL = 2.4; EXPRESSED IN LUNG, SIGNAL = 1.7; EXPRESSED IN HEART, SIGNAL = 2.3
attgttggaaggggttaggggcttagggaactttttatgttttttagggaaattttaagtctcacctctttttccccttgtacctagataatacaagaacaaccagaatcattagtcaaaatttttggcagcaaggcaatgcaaacgaaagcaaaagcagtgatagacaattttgttaaaaagctagaagaaaattacaattcagaatgcggaattggtaagtaattttctcccactgaacccctttaaaagtttttaatttcattcagtgttataagccattatacctgatttcactttctgattcaaagcattaggctgccataaatgcagtcttaatgattttttactatgaatgaaagcccagaatatttttcctcaaattaaaataccagagctctatgttcatgcctagcagttttacttttagccacaggtaagtgaaaatgaaataaccctttatttttatttatttattttttgtctttgtattaatctagttctcacaagcagggaaataaccc

SEQ ID NO: 8752 - DNA, 569 bp, Homo sapiens
  MAP TO AC009565.7; EXPRESSED IN BRAIN, SIGNAL = 4.4; EXPRESSED IN ADULT LIVER, SIGNAL = 5.2; EXPRESSED IN BONE MARROW, SIGNAL = 2.6; EXPRESSED IN HELA, SIGNAL = 3.5; EXPRESSED IN LUNG, SIGNAL = 2.7; EXPRESSED IN HEART, SIGNAL = 4.9; EXPRESSED IN PLACENTA, SIGNAL = 3.1; EXPRESSED IN FETAL LIVER, SIGNAL = 3.8
gcaaccaagcagaccctaagcagcagtattatggtaactgctaggttggtttgcttccatagatttggatggtaaggagaaaataaactcaaatgactttagaaagcttattacttaggcagatagcaaaagcaagatcaaactggtgtccgctcccaatgtcctggtggcatcacagtacaattgagaaccagtgcagatcacatgagcagagagtcacttaccattgaggaaccaaccgtaaattcacaccagacagttttgcggtttgtagctgtacccaaaaggaagacagggtagaaagtcccatacatcaccagaaacagacaagcttcatagcagccttctacaaggtaggtttctcctgtaagttagggacacaggtgaaaagtggtcatgtgatggatttgcacaagctgcttatctcctcatgttcttgagagtgttacagagttggatagtgatggagccttccttttttttagaccgtgatacacacaagaccaccacagcaccagattaccacattccccagcaatttatcaatatccctactcccccataacacc

SEQ ID NO: 8753 - DNA, 595 bp, Homo sapiens
  MAP TO AL117694.3; EXPRESSED IN HELA, SIGNAL = 2.3; EXPRESSED IN BONE MARROW, SIGNAL = 3.5; EXPRESSED IN FETAL LIVER, SIGNAL = 1.7; EXPRESSED IN LUNG, SIGNAL = 4.2; EXPRESSED IN HEART, SIGNAL = 2.6
ttgcagatctgtgaaatggccactagagggtgctaggggagcaaagtggaggacggggttagcgcccctcctggtccttcctcccagccgctatttccccaccctttcagattaacaacccaagagccaggtgggttttccaatatacttccccatggcagccttgggctttcccaaagtggggagtttccctgaggccaacatgcctatgagaatcagaatggcaaacagttcttttttctacattgactggaggagaaggctgatgcccaataaatgagcaagaagcccaggacatggcccctgatcaacgtccgttgccctgggtatgggagttctccaggctaagcccagggagggagacgagatggtgatggcgggatggaacaaagcagaaacccaccttccacggagatgtcctggatggcaaagcgcaggatgatggtccagatcatgcccagggtcatcttcacattcccatccacgatttctacagaaacagcagcagcacacatcagaaagggcctcagcggggacagaattaacactccctcagcacccacagcactccatgccccacgctaggaatcaaaag

SEQ ID NO: 8754 - DNA, 516 bp, Homo sapiens
  MAP TO AC007221.2; EXPRESSED IN PLACENTA, SIGNAL = 2.7; EXPRESSED IN FETAL LIVER, SIGNAL = 3.4; EXPRESSED IN ADULT LIVER, SIGNAL = 3.4; EXPRESSED IN HEART, SIGNAL = 3.7; EXPRESSED IN BRAIN, SIGNAL = 3.6; EXPRESSED IN LUNG, SIGNAL = 2.9; EXPRESSED IN HELA, SIGNAL = 3.5; EXPRESSED IN BONE MARROW, SIGNAL = 3.2
gggcaatatgacccaatcagtgtccttgaacttgaccaactcctccttgagccagaaggatgggacgcttcattgcccatcactgtgacttgaaatgcatagcagtcgcaggaaccagaacctccttagaagccagcataaacgctcaggcattctcttcagagctattattcgtttttttaaaagcccatagattcagaattcctacaggtattgttaaactagatgtcagttccaggtcaacccctctgactattacagtcataattctgataccgagagggagcaaaatcaggtaaagagtcaccccccgccccttgcagaatctgatttaacaaggcttatttatgtctcagcataccacaggttacaatataatcatctttcacctacataaataatgcataaatttgtgtttagtcattgtgtctgcttttcagtccttggggaagcagaaggacaaaagattcagccttgcacagagatttagaggataccacctctacccttcttgca

SEQ ID NO: 8755 - DNA, 542 bp, Homo sapiens
  MAP TO AC022377.1; EXPRESSED IN BRAIN, SIGNAL =   2; EXPRESSED IN PLACENTA, SIGNAL = 1.7; EXPRESSED IN ADULT LIVER, SIGNAL =   2; EXPRESSED IN BONE MARROW, SIGNAL = 1.8; EXPRESSED IN FETAL LIVER, SIGNAL = 2.3; EXPRESSED IN HELA, SIGNAL = 2.2; EXPRESSED IN LUNG, SIGNAL = 1.8; EXPRESSED IN HEART, SIGNAL = 2.1
gagagcacctgacccttctgggcctccactgggaattcagggaagatcaatagttgagttcaattgttacctccccaggcaagggatacatttcgatggaccatggacacagactgaaccagctgcaggccacacactgagagaggagcccagcaagtgctcctaagcttgtggctgtggctgcggttttgttcggtggtgatcatgaccatttgttggagccacacctgggcaaacgctattgcaccgagagcccccctcctctccaccttgcttctggtttactgcagtttaataacaatgctccacaagtcaaccagcccaagaatctacctccatctctgcctgtgggtggaccccaggctgcgatgtgtagtctggtccacagtatacactgtctttcccagaggtgagcctggcatggtccccgtcgttcctgaaggccccagggagttggaaaggtgtggtcaatccccgacccccacctcccagggcatctctgaggaacctgtgaaaaatgcacattctcgggtctacccaga

SEQ ID NO: 8756 - DNA, 530 bp, Homo sapiens
  MAP TO AC025251.1; EXPRESSED IN BRAIN, SIGNAL = 5.2; EXPRESSED IN ADULT LIVER, SIGNAL = 3.9; EXPRESSED IN HELA, SIGNAL =   3; EXPRESSED IN BONE MARROW, SIGNAL = 3.4; EXPRESSED IN PLACENTA, SIGNAL = 3.7; EXPRESSED IN LUNG, SIGNAL = 3.8; EXPRESSED IN HEART, SIGNAL = 2.9; EXPRESSED IN FETAL LIVER, SIGNAL = 3.2
cacttagagcctgtggtgggggggctgaacctgatgaaatagtaaggtataggttttgacttaaaacataagattgttttattagacacaccaaccatgttaattcttctattactccgaggaatggggtttctaaataaggtggaatttatcagagatatagtcatgcctgtgtcaattaaggcatttgtaagctcatggtttattattatactaacctctcccagtttgtttgtcagggtagaatatttggaaaggtgaaacccctgtacttcctcagagcatgcctagtcttcctgagtttcattctcctgccttttcttttgtttcaacctagggccatctgttttaaggtgtcctggtcttttacagtagtagcagactgggagggaagggttctcagaccgagggagcctaaaatctatctgacgctgagcggttgagaagttaattgctttagctttaaatgcataactcgagcaatcttctgttttttcttttttattgtagtgcaggataattggtcagct

SEQ ID NO: 8757 - DNA, 596 bp, Homo sapiens
  MAP TO AP001347.1; EXPRESSED IN HEART, SIGNAL = 1.7; EXPRESSED IN PLACENTA, SIGNAL = 1.4; EXPRESSED IN FETAL LIVER, SIGNAL = 1.9; EXPRESSED IN HELA, SIGNAL =   2; EXPRESSED IN LUNG, SIGNAL = 1.9
tcaccatcatcatcatccatcaccatcactatcaccaccatcatcatcaacatcaccatcactatcaccaccatcatcaccatcaccatcactatcaccaccatcatcatcaccatcaccatcatcacatcaccatcaacactatcatcaccaccatcaccatcaccatcatcacatcaccatcaacactatcaccaccatcaccatcactgtcactaccattattaccatcaccatcattaccatcgctatcaccatcataccaccatcaccatcatcaccatcactatcaccaccatcaccaatcatcaccatcactatcaccaccatcaccaccatcaccataatcatcagcaccatcaccatcacccatcaccatcaccaccatcactatcaccaccatcatcttcaccaccaccatcatcataccatcaccattatcattgccaccaccaccatcatcagcatcaccatcacatcatcatcaccatgttaagtaagcactttgcctatgttaactgatttaattctcgtaacaacttcataatgtaggggcaattattatcccagttttacaagtgagaaagtgggacctc

SEQ ID NO: 8758 - DNA, 596 bp, Homo sapiens
  MAP TO AC023128.2; EXPRESSED IN ADULT LIVER, SIGNAL = 3.9; EXPRESSED IN BONE MARROW, SIGNAL = 3.1; EXPRESSED IN LUNG, SIGNAL = 3.3; EXPRESSED IN BRAIN, SIGNAL =   4; EXPRESSED IN PLACENTA, SIGNAL = 8.9; EXPRESSED IN FETAL LIVER, SIGNAL = 4.3; EXPRESSED IN HELA, SIGNAL = 4.6; EXPRESSED IN HEART, SIGNAL =   4
tagtacagagcctggcccacagcaatagcactggtctgatatcagacatcacctgctttcttcttctccaactgctcctcctccacatcatcatcattatcatcatcatcacttttagaccaatactctctatataattttatgtctttaaaaatggaaaaccatgcagttaggagtcataaaaaaataataagacatatcaatatatgctaatagagaaagatgctcattatactttatttgaatagtgaatgttccggaaaaaatctatggcataattctatttttgtatcatctatagtatgattatacatgtgtgcataatatgtgtttatacataattaaaatagaaaatttccagaatgatacataaaaactgttaaaagtagctatattcgggatatctgaattaggggaaggatttttatgaatcactttatactcttttatactgtttgaattttttaacatcatcatttatccatttatcactttcataatttaaattgttaattcatttaaagttattttttcatttttagtctttgaagttattaatgttcaccaacttcaggactcgtccttctttggcacat

SEQ ID NO: 8759 - DNA, 553 bp, Homo sapiens
  MAP TO AC018839.3; EXPRESSED IN PLACENTA, SIGNAL = 2.4; EXPRESSED IN FETAL LIVER, SIGNAL = 2.9; EXPRESSED IN HELA, SIGNAL = 2.9; EXPRESSED IN HEART, SIGNAL = 3.8; EXPRESSED IN BRAIN, SIGNAL = 2.7; EXPRESSED IN LUNG, SIGNAL = 2.8; EXPRESSED IN BONE MARROW, SIGNAL =   2; EXPRESSED IN ADULT LIVER, SIGNAL = 2.5
ctcaggcttcacctctgaccatggagggctggggcctagggagctgtctctgggaatgaagtgctgatggatggacggaggtcagtgctggggagggattggatagctgaggtcagggaacctgataactacaggccccctctctccccagcaggttgactaacctaggctgggagtgagaactgcccacgtggtcctggtgctgaaagacagtacccctggggaggacaaagctggcagtggggaactggcttccctgggagctgtcctcaagggcacagtgctgattagggaggtggaggtgggtgttaaggacaacatgtgaaggagctgtccacacactgaggtgctgacacagagcaggatgttattaagtgcccctaggaactctccaggacagcaatgctgaccaatgaagagtggggttgggaaagccaagagaaaggtgcaacccccttccaacacctagggtgctgggtgtaggcgctggggaaggcactgggccttttccatgagttctgtgagcaagcatggggagctgaccccatatttt

SEQ ID NO: 8760 - DNA, 522 bp, Homo sapiens
  MAP TO AC011475.2; EXPRESSED IN BRAIN, SIGNAL = 5.3; EXPRESSED IN PLACENTA, SIGNAL = 8.2; EXPRESSED IN HELA, SIGNAL = 5.9; EXPRESSED IN HEART, SIGNAL = 5.9; EXPRESSED IN BONE MARROW, SIGNAL = 8.4; EXPRESSED IN FETAL LIVER, SIGNAL =   6; EXPRESSED IN LUNG, SIGNAL =  13; EXPRESSED IN ADULT LIVER, SIGNAL = 7.7
ccccttccctcctgacttacatgataatcagtaccaagagacggtgtaatcttcaaatatgcgcatggcgagttgcccgcctctaggactccattggctttcctgggggaaggaggacaaggctcggtcagaccctcttccatgatcaggccaaccacaggggattgcctgtccccccagcaaagtgagaccctggcgcggtgcgccaatatcctcacttggcgcctccaccaggtctgtgatgtttttccgggagccatgcccatcctcatagtcgtctcattgcccaccatcaggacacccttgtaggcgtggatagcgggaagcatctccgggccactgcatggagcagaggatggcaccagtcaggcgagcctctgcagagcctccccgtcaccacctgagcctcctgggatccccgactcacagggtttgctggggatgaggacagcagggcagtcaccatcttaagcacctcagccactccctgccaagagagatggagggaggtgagtcccaagt

SEQ ID NO: 8761 - DNA, 546 bp, Homo sapiens
  MAP TO AC009242.2; EXPRESSED IN BONE MARROW, SIGNAL = 2.4; EXPRESSED IN FETAL LIVER, SIGNAL =   3; EXPRESSED IN HEART, SIGNAL = 2.7; EXPRESSED IN LUNG, SIGNAL = 2.2; EXPRESSED IN BRAIN, SIGNAL = 3.8; EXPRESSED IN PLACENTA, SIGNAL = 2.5; EXPRESSED IN HELA, SIGNAL = 3.2; EXPRESSED IN ADULT LIVER, SIGNAL = 2.9
cacttccttcctccttgctgcagaccccattgccgcagggggaccccaaacccagagagaaggggcgggggacagggcaggccccacctgtgtgcgtgtcgcggggtccttcttgatccacttgatgactgtctcgtacaccagctcctcagccttggtgttgaggctgtcgttggagacgtaggcgatgaagtcgtccttggagatgctgaggatctcctcctgggcggccacctcggggaagatctgcagcgcgaaggccttggccatgtggtagagctcgctgcactgcatggcctcggccatggccagcacgcccaggcagttgctggccgtcagctgcttctctgggggcgacagcgcaggaccactgacccaaaggcccgggaagcagttgccacctgttcccattgctgtcaccctagatccttctctgaacccacatcccgggggaccctgactgcagtgtccagagtccctgcaggcccccttcctgggtgtctggaggcttcgatccttctcctgggttctcccctaccccatttc

SEQ ID NO: 8762 - DNA, 590 bp, Homo sapiens
  MAP TO AC025289.1; EXPRESSED IN BRAIN, SIGNAL = 2.8; EXPRESSED IN PLACENTA, SIGNAL = 2.7; EXPRESSED IN HELA, SIGNAL = 4.8; EXPRESSED IN ADULT LIVER, SIGNAL = 2.5; EXPRESSED IN FETAL LIVER, SIGNAL = 4.8; EXPRESSED IN HEART, SIGNAL = 4.2; EXPRESSED IN BONE MARROW, SIGNAL = 2.3; EXPRESSED IN LUNG, SIGNAL =   3
aaaaatagccaggcacgatggctcacgcctggagtctcagctacgtgcaggttgaggtaggaggattacttgagtccaggagttagagggtgcagtgaggtaggattgcaccactgtgctccggcctggacaacagggcaagaccacatctctggaggggaaaaaaaaggaaaagaaatgttcttagtagcgcagtgacctatgctggtaagaaagcaggatttctctaatggggagctggacaaagtagataagctgacataatgcaggaagcttcagataccagatcctgagtgtggagctccatgaagaatccaccttcacattcatcaccttcctaggtacctggggggtgagacgaagtcatcagaccatcccactgaggcctagaaaccatccaggataacgcacctcccttaaatctaggacaggtgccttcttttgacaataatggccttttctctcctcagcagggtgactgaactctttcttcatctccaggagggactggaaaaaaaaaaaaaaacagatttagggcttcttgctgatataaaccaacttgacggaaaacccattgttcagccttgttt

SEQ ID NO: 8763 - DNA, 518 bp, Homo sapiens
  MAP TO AC010278.3; EXPRESSED IN BRAIN, SIGNAL =  14; EXPRESSED IN PLACENTA, SIGNAL = 8.3; EXPRESSED IN BONE MARROW, SIGNAL =  36; EXPRESSED IN FETAL LIVER, SIGNAL =  19; EXPRESSED IN LUNG, SIGNAL =  52; EXPRESSED IN ADULT LIVER, SIGNAL = 6.9; EXPRESSED IN HELA, SIGNAL =  18; EXPRESSED IN HEART, SIGNAL =  14
aaggactctggcacttacggaatcattttcagaggatccggcaagatggcagaggtagaggagaagaagcagcggatcttccgcaagttcacctaccgcggtgtggacctgggccagctgctggacatgtcctttgagcagctgaggcagctgtacggcgcgcgccagctgcggcggctgaaccacggcctgtggcggaatgctgaggctcaagccgcattcgctgctgaggcgcctatgctaggccaagaaggaggcgccgaccatagagaagcaggaagtggtgaagacgcacctgcgggatatgatcatccctcccaagatggtgggcagcagggtgggcgtctacaacggcaagaccttcaaccaggtggagatcaagctggagatgatcggccacgacctgggcgagttctccatcacctacaagcccgtgaagcacggccggcctggcattgggtccacccactcctcccgcttcatctccctcaagtagtggctccgctaataaaggcaca

SEQ ID NO: 8764 - DNA, 547 bp, Homo sapiens
  MAP TO AC010093.2; EXPRESSED IN ADULT LIVER, SIGNAL = 2.1; EXPRESSED IN FETAL LIVER, SIGNAL = 2.4; EXPRESSED IN HEART, SIGNAL = 2.2; EXPRESSED IN PLACENTA, SIGNAL = 2.1; EXPRESSED IN BONE MARROW, SIGNAL = 2.4; EXPRESSED IN LUNG, SIGNAL = 2.7; EXPRESSED IN BRAIN, SIGNAL = 2.4; EXPRESSED IN HELA, SIGNAL = 2.4
caggagtggaggaaagcaaggctgagtggctactgacaaacccagttgaagacacactcccttttgctcagcgcctggacagaaaagccctaagagggaggctggacctaaagcgtcacttttctctggatatggggaaaggtacattcccagctttctaaatgtaaaggactgttacatttaaaattgcctatgcgtccattagtattttcaaccaatcacatggaactgatgggcatggaaatactaaaatcctattggttttaacagttacttacctatgctccatcaccaggataaagaaagtgattggattctgaagatacaattggatcctgttttcagtgctcccaagggggaatgacaagatgtcaacaaagacaagacagcagtccttacagagaatgtcacagaatgtcagggcagagacgcgaaataaagggttatgcagagcaaaaaggagacacagtgctacagatgctcggagcaaaaggatattacttctcacctagagaaaaggagaggcacagagaaaggctggaccaag

SEQ ID NO: 8765 - DNA, 561 bp, Homo sapiens
  MAP TO AC005323.1; EXPRESSED IN ADULT LIVER, SIGNAL = 3.7; EXPRESSED IN FETAL LIVER, SIGNAL = 4.1; EXPRESSED IN BRAIN, SIGNAL = 2.8; EXPRESSED IN PLACENTA, SIGNAL = 3.1; EXPRESSED IN BONE MARROW, SIGNAL = 5.5; EXPRESSED IN HELA, SIGNAL = 3.9; EXPRESSED IN HEART, SIGNAL =  49; EXPRESSED IN LUNG, SIGNAL = 2.6
aggtgcaagtagatggtgccattattttaaaacaactcatgattttcttgaaaactataggcctggaagatatgaaaacactggtcacctggtaagtgagttccttcactcttctctcatgtttgcgaagacccttgacagcctcaacattgtgcttctgttcactttccacctcactttcaagctctctcacctggaagggaacaaagacgtttaccagtttggctgtaactggccacaaggaattgagtgaagttgtggagacctaccctggcctccagtttctggatctgcttcttcccacccttcagcgccagctgctcagcctcatccagacggagctgcagatccttcacggtctgctccatgttcttcttcatccgctccaggtgggcgctggtgtcctgttccttcttcagctcctcagccatcatggcagcctagttagcaaataaattttgaaaataatgaattctgatgatagcaggcagcatgcatgtgtcagtaagacaaatgctcatcttgcttacatcagtgatggccttcttggccttctcctct

SEQ ID NO: 8766 - DNA, 571 bp, Homo sapiens
  MAP TO AC011625.2; EXPRESSED IN BRAIN, SIGNAL = 5.3; EXPRESSED IN PLACENTA, SIGNAL = 4.3; EXPRESSED IN ADULT LIVER, SIGNAL = 5.8; EXPRESSED IN BONE MARROW, SIGNAL = 4.4; EXPRESSED IN FETAL LIVER, SIGNAL = 5.5; EXPRESSED IN HELA, SIGNAL =   6; EXPRESSED IN LUNG, SIGNAL = 7.4; EXPRESSED IN HEART, SIGNAL = 5.5
cagttgagtaggcagaggggggaaattagaaacaaaagtgcctgacatgctaacaccaggctaaggattcacagaaggaaaagttgatgatcccagtccctagagatggatgaaccagtgtcagcccatcaatgaaagcatgttcagcacctactaggtgccattactatgcaactattccaagctgggtcttgaaaccaggctggtctgcccaccactgcgcagccttgcctgactccaaggacgcttcccgcctttggttgcccttcctttccgttcctatttcctcagtttctgacactttgcttttgtctctccttctctctccccagtgccctcactggcatcagatttggcactccggtgctggctttccaagctctcttttggccacagtgtgcacccagctcccggttccatggttttctggccaccgtagtgtacccacattgctgtccctggggcccagctcaccttatccatcttggttggcatctctgccatgcctgtcccagctgcccagggtgggaggcaaggagggcagagaggtaggtgaacactctgtgcatgc

SEQ ID NO: 8767 - DNA, 519 bp, Homo sapiens
  MAP TO AC008686.3; EXPRESSED IN BONE MARROW, SIGNAL = 2.1; EXPRESSED IN HEART, SIGNAL = 1.9; EXPRESSED IN LUNG, SIGNAL = 4.3; EXPRESSED IN BRAIN, SIGNAL =   3; EXPRESSED IN PLACENTA, SIGNAL = 2.2; EXPRESSED IN ADULT LIVER, SIGNAL = 2.2; EXPRESSED IN FETAL LIVER, SIGNAL = 2.3; EXPRESSED IN HELA, SIGNAL = 3.3
acctgcatatcacctgcctccatgaagtgcccaggagctggggtgtcccctttctgagggggcagcttaccaggtgctgcaatccggaccccattaacatcggtcagctcctggcccggtcgctcttcaataatgatctccttgccggtctccagacggaggtcacatgaagagctgggggcagccacgtagaagggaatgccatggtgcttggcgacaatggccagctggtaggtgcccaccttgttggctgtgtcgccgttggcaaccacgcggtcagctcccacgaccacagctggggagggggcgtatgagaagttgggggtcattacctggccccatgctccagagccccgcccccagggcttaccgtctgcttacctgacacgcccctatgggccatggcagcagccaccatgctgtcggtgataagggtggcggggatctgctcatagaccagctcaaaggccgtcagccgggctccctggttgtagggccgggtctctgtgcagaaggcat

SEQ ID NO: 8768 - DNA, 520 bp, Homo sapiens
  MAP TO AC017025.3; EXPRESSED IN BRAIN, SIGNAL = 1.5; EXPRESSED IN BONE MARROW, SIGNAL = 1.7; EXPRESSED IN HELA, SIGNAL = 1.7; EXPRESSED IN LUNG, SIGNAL = 1.8; EXPRESSED IN ADULT LIVER, SIGNAL = 1.8; EXPRESSED IN HEART, SIGNAL = 2.2; EXPRESSED IN PLACENTA, SIGNAL = 1.6
ttttccctgaccacttttggctgtattagttgccctcctctttgtttcctttttatttatccactaaaaaatttatgtacaactattaaatatcactcttatgctagttatttgagatacaaggagaacaaagatatcatttgtgctgtaaaggcattaatagactagggtgggagacattcaagaaaatcagcaagtatgaggcagtgtacatatgactttctctgatactgttatgcccatgagctaaaggagacaatgaaagggcttcaaaaatacctacatcatactaattacctggttgaatatttattaaacatattctatatttcagtctattgttaatgacagtaatattgttattctgttcctttagtgaggcagtgcacagaattattttacaaataaaattgtattttatttttcttgagagcattcgaggcaggagaatgatttgagatacggcattagatatcagaaatagtaagcgagctccctgtgctaggggagagctgtgaga

SEQ ID NO: 8769 - DNA, 511 bp, Homo sapiens
  MAP TO AC017067.2; EXPRESSED IN BRAIN, SIGNAL = 3.1; EXPRESSED IN HELA, SIGNAL =   3; EXPRESSED IN FETAL LIVER, SIGNAL = 3.8; EXPRESSED IN HEART, SIGNAL = 2.7; EXPRESSED IN PLACENTA, SIGNAL = 2.3; EXPRESSED IN LUNG, SIGNAL = 2.2; EXPRESSED IN BONE MARROW, SIGNAL = 2.3; EXPRESSED IN ADULT LIVER, SIGNAL = 5.1
taagcatagcacaacagccgctctcatggattggagttgggtagatgtgggctcttctaggctggcattgcatgctggtggctctataattgtgggttctttgaggtagcctcacctgcacatctccaaaaggcttttctcttgtggagaccctcttcagtggtcttagccccatggtgtcaccttactgggagctttctgtggcatttgtctgcctggtccccaaggctcttcaaggcatcttttaaaatcaaggtggaggcagccatgctttcatagttcatacactctgtgtgcatgcagagttagcagcacatggacgtctccaaggtttaccacctggggccatctaagctacagctggagaggccaaggagtgctgtgccagaatgtatggagcagaaccttgaggcgatgctaggcagtgacctctgaggtcccatgggcaacatgagcctctctcataaaaccatcctgccctcaagggcctggcactctgggtctgtgatga

SEQ ID NO: 8770 - DNA, 513 bp, Homo sapiens
  MAP TO AP001330.1; EXPRESSED IN PLACENTA, SIGNAL = 2.5; EXPRESSED IN BRAIN, SIGNAL = 2.6; EXPRESSED IN BONE MARROW, SIGNAL =   3; EXPRESSED IN FETAL LIVER, SIGNAL = 2.7; EXPRESSED IN HELA, SIGNAL = 2.4; EXPRESSED IN ADULT LIVER, SIGNAL = 2.5; EXPRESSED IN LUNG, SIGNAL = 4.5; EXPRESSED IN HEART, SIGNAL = 2.4
agtgatttccctccaggctcaagaaagagtagggagcctcttacctctctggggcctggaagagaacaagatgttggcttcctcagcatggagagggcactggcccactctgcaggtcaaatctgatgaaaacagagtaaacacagggcctctgatcagactggtgatggagtaggagcagggactcttgggttttaatacctctgtctcctgatctttagaatattctaaaacattcagctttacttccaaccattcacaggtggatcactacaggactagccaggcttacatgaataacgcattggggtgaattgtgtggttggagccagaatattctggattcgaccttcatctgtgcaggtagctgctgtgtcccacaactcacactcctcaactctggagcatccctctccttcactttatgtctgcctgcatctggtccccaatccccacctccaggcagttctgttggtcctgcatccctctaggactgcatcatagggtcccact

SEQ ID NO: 8771 - DNA, 550 bp, Homo sapiens
  MAP TO AC007182.3; EXPRESSED IN BRAIN, SIGNAL = 3.3; EXPRESSED IN HELA, SIGNAL = 3.5; EXPRESSED IN HEART, SIGNAL = 3.3; EXPRESSED IN ADULT LIVER, SIGNAL =   3; EXPRESSED IN BONE MARROW, SIGNAL = 2.8; EXPRESSED IN FETAL LIVER, SIGNAL = 3.6; EXPRESSED IN LUNG, SIGNAL = 2.6; EXPRESSED IN PLACENTA, SIGNAL = 3.5
tttcctgtttgtttcctggctgggaaggcattgcatcatggcagctcagttcttcctcatgagttagttgactgggcccttgtttcctatcttctttatgcctttccaggtatttgggatcatctttaccatctcccagggccagattattgacaactatggaaccaagcctgggaacatcttcctgtgtgtgttccttactcttggagcagccctcactggtgagttggagcctgagggcaagatgaggctcaggttggccatttgggaccctagtgtctcgatggagcaacagatagggagtacgtacgtagggggacagatggaagggtttgttggggaatctgttgggaggcagcacattgttttggtagaatgagcatgggttttggagccagaagactcatgttggaatcccagactgtgacaatgacttccatagctattgaccttggataagtggaccaacctctgggaacctcagtttttaatctgtaaaatgaggattgttgtgatgattagagcaatgtgtgcaaagtccctgatccat

SEQ ID NO: 8772 - DNA, 594 bp, Homo sapiens
  MAP TO AC002039.1; EXPRESSED IN BRAIN, SIGNAL =  10; EXPRESSED IN FETAL LIVER, SIGNAL = 3.5; EXPRESSED IN HELA, SIGNAL = 2.9; EXPRESSED IN ADULT LIVER, SIGNAL = 1.8; EXPRESSED IN HEART, SIGNAL = 2.8; EXPRESSED IN PLACENTA, SIGNAL = 3.6; EXPRESSED IN LUNG, SIGNAL =  16; EXPRESSED IN BONE MARROW, SIGNAL =   5
gaggccaaagctgagatgacttgcctgggatgccacacgtgttgggcagcagaccgagcctcccacccctccctcttgccctccaggtaccacggcccacgtgggcatcatgctgtatggggtggacagccggagcggccaccggcacctggacggcgacagagccttccaccgcaacagtctggacatcttccagatcgccaccccgcacagcctgggtagcgtgtggaagatccgagtgtggcacgacaacaaaggtctgtatggaccctgccaagctctgcccctctgcccctgcattggggcgccctgcgaacctgacctccctcccgcgcctctgcagggctcagccctgcctggttcctgcagcacatcatcgtcagggacctgcagacggcacgcagcaccttcttcctggtcaatgactggctttcggtggagacggaggccaacgggggcctggtggagaaggaggtgctggctgcgagtaaggcctcgttccatgttcccactccgtgggaggttgggcagggtggtcctgccccgtggcctcctgcagtgcggccctccctgccttctaggtcacgcagccct

SEQ ID NO: 8773 - DNA, 581 bp, Homo sapiens
  MAP TO AL136294.1; EXPRESSED IN BRAIN, SIGNAL = 2.7; EXPRESSED IN HELA, SIGNAL = 3.1; EXPRESSED IN ADULT LIVER, SIGNAL =   3; EXPRESSED IN BONE MARROW, SIGNAL = 2.3; EXPRESSED IN FETAL LIVER, SIGNAL =   4; EXPRESSED IN LUNG, SIGNAL = 3.2; EXPRESSED IN HEART, SIGNAL = 3.1; EXPRESSED IN PLACENTA, SIGNAL = 2.5
ctcttgccctcattgctttccttattctctttcttcctcttgtctccttctcacctccagctcctaccacagcagacaggttggggcagacaccgtcatggttggggagcaggaggacagcatggggaaaaccactccaggcctttctctcaaaccttagtgatgaaaggactcaatggacctgaacaatttctcacaggaaagttccggtctctgtctccttaaaagcaaggcattcagtaacccttaacagagccaggattaaaacttgaatttctgacttatcccaggcctctgtttggatagaaaggctaggtcactgtcatatatggcaattaggatcacttcagatacaaaagtaacatttttaaagctgtgccttaagcagagagaccatttttagtacaaaaaggaaaaaaagattaactgtgccttcagagctgatgaaaggcagagcctcgtcactttgaaagcattggatttagtgccaggcgggttggtgagtagactcagcacccacattctcttcttgcgtctctctctggccacccagattatccaggggctgctgtttacttgag

SEQ ID NO: 8774 - DNA, 534 bp, Homo sapiens
  MAP TO AL121838.2; EXPRESSED IN PLACENTA, SIGNAL = 2.5; EXPRESSED IN BRAIN, SIGNAL = 3.3; EXPRESSED IN BONE MARROW, SIGNAL = 2.8; EXPRESSED IN HEART, SIGNAL = 3.3; EXPRESSED IN ADULT LIVER, SIGNAL = 4.2; EXPRESSED IN HELA, SIGNAL = 3.7; EXPRESSED IN LUNG, SIGNAL = 2.6; EXPRESSED IN FETAL LIVER, SIGNAL = 7.5
ctttgtaggctgtccttggcagtgaaaatgggccatataaattatacattgaaataatagaggctgctgcaatctgccagaaggtctacaaagttggagatgatgaacttgtcggtgaactgtgggctgtgccaagggcacctggagaattcaagatagcagggacattgagtcagcaaggacacgtgctttcatctgtgtttaagcttgccggcatttgacaaaggactaacgtgctcggggtttcgggtcttgggtatgaaaagaagaatgaaatgcggtccagttaatgagcgacagcgttagctctggtgaatctgagaatgtccagggtggaggggtgcagctgagggtctgaacacctggctcctctgctgaacaactagggaagcagaggcctatggccaggaacatttggccaaagccactcgtttattatgggcagtgttggggccagggtgtgggctctgaattgcagtctcaagttcatcacctggcttcacctctgagccttctcctggaccagctcttgtc

SEQ ID NO: 8775 - DNA, 512 bp, Homo sapiens
  MAP TO AC025286.1; EXPRESSED IN ADULT LIVER, SIGNAL = 3.4; EXPRESSED IN HEART, SIGNAL = 1.9; EXPRESSED IN BRAIN, SIGNAL = 2.6; EXPRESSED IN BONE MARROW, SIGNAL = 4.1; EXPRESSED IN FETAL LIVER, SIGNAL =   3; EXPRESSED IN HELA, SIGNAL = 3.6; EXPRESSED IN LUNG, SIGNAL = 3.8; EXPRESSED IN PLACENTA, SIGNAL = 2.6
tgagcaaaagcaaaacatgctgcagaaattttagagttttcctgacgtctcctccccacccccgtgccccaagccagctcatggcagctctcccatcacaagcgtctcagtttctcttcttccgagaggggtctgacctcatggtcaaaggggtgttggttctcagcggccacatcagcgtgtactttccaagctgcgttctccaatgggcagccgggacctgtagcctgggccatctctgtctgctcccatgaatgctgacctacatcctttgcttccaggcggcacgtggccgaaacgtgcatccagggcagatatggcaagagcagggtcctgcgtgagtggcacccatgggtgggaagagaacatcacagccaggagcacagctcagaccgcagcttccaggaagctactgctacccttggaaatagcactgtggaccccaagacagggcctgccactgtccccgattgctcatcccccaagaaagagctgccccattacccagtcta

SEQ ID NO: 8776 - DNA, 539 bp, Homo sapiens
  MAP TO AL157817.3; EXPRESSED IN BRAIN, SIGNAL = 2.5; EXPRESSED IN LUNG, SIGNAL = 2.3; EXPRESSED IN PLACENTA, SIGNAL = 2.1; EXPRESSED IN HEART, SIGNAL = 2.1; EXPRESSED IN HELA, SIGNAL = 2.7; EXPRESSED IN FETAL LIVER, SIGNAL = 2.9; EXPRESSED IN BONE MARROW, SIGNAL = 2.1; EXPRESSED IN ADULT LIVER, SIGNAL = 2.7
caggagagggcagaaaaatgaaatgtgagagagactcagcacaccattgctgactttcaagacagaggaaggggccagaagccaagaaatgcaggtagccccaaaagctggaaaaggaaaaaaaaaagaaaaaacaaacaaacaaacaaacaaaaactcagattcttccctagagcctctagaaggaactgaaccctgcggacaccttgatttttagcccagtgagacctgtgttggacatctaacctagagaacttcatattgctttaagccactaagttggtgatgatttgttccagcagtaataggaaatcaatataagcaccttctatgaccaggcactgaccctgccaatgcaaatatgcccggcattccagagacacatagtccagtagggagagaaaattctgcacatgcaggtaaagcaacatgctatgcactaaacatgcatgtaccaagccctgagggagcactgagctgatggtgctcccctttgcctgggggagccaaggaaggcttcctggagcagaggagacatt

SEQ ID NO: 8777 - DNA, 553 bp, Homo sapiens
  MAP TO AC002122.1; EXPRESSED IN PLACENTA, SIGNAL = 2.9; EXPRESSED IN BRAIN, SIGNAL = 2.8; EXPRESSED IN FETAL LIVER, SIGNAL = 3.8; EXPRESSED IN HELA, SIGNAL = 3.9; EXPRESSED IN HEART, SIGNAL = 3.5; EXPRESSED IN BONE MARROW, SIGNAL = 2.2; EXPRESSED IN ADULT LIVER, SIGNAL = 2.5
gcaaagttctccagaggctgtatatgctctgaatcagcgtccaatatatggtactgtttctcccatagccaggattcacacgtccaaaaatcaaggggtgcaccatcacacctagtgatccactagcaaaatttttgcttcctgttcccttgatataacattcggctgacctagaggttttagttccagagggagaaatgctaccaccaagagaaacaacaaggtttccattaaactggaaattaaaattgctacctggacactttgggcttctcctacctttaatccaacaggctaagaagggagtgacagtgttggctggggtaattgacctggactatcaagatgaaatcagtctactactccacagtggaggtaagaagagtatgcatggaatacacgagatccattagggcatctcttagtcttaccatgccctgtgattaaggtcaatgagaaactacaacagcccaatccaggcagggctacaaatggcccagacccttcaggaatgaaagcctgggtcactccaccaggaaaaacaccacgacct

SEQ ID NO: 8778 - DNA, 533 bp, Homo sapiens
  MAP TO AL109628.2; EXPRESSED IN BRAIN, SIGNAL = 3.3; EXPRESSED IN PLACENTA, SIGNAL = 6.4; EXPRESSED IN HEART, SIGNAL =  21; EXPRESSED IN BONE MARROW, SIGNAL =  20; EXPRESSED IN ADULT LIVER, SIGNAL = 8.2; EXPRESSED IN HELA, SIGNAL =  19; EXPRESSED IN LUNG, SIGNAL = 6.6; EXPRESSED IN FETAL LIVER, SIGNAL =  16
tgaagagtcatgctgaaggctaagagagagcaactgcagaatattagcttgtttcttttttttttcttaagagttcagcttttttattgaacatgttataaaagaggtttagtcaaaaagaccaaagtccatgtcatcatcatactcctcaggttcttctttctttgtttccactttcttttcctcagctggggcagcagtggtggtgggggcaggaccttctgcaggtgcagcaccaactgttggagcaggtccaccagcccctacattgcagatgaagctcctgatgttgacattggccagtcctttgcaaacaaatcaggccagaaaggttcaacatttatatcagctgctttaacaagggcattgatctaatccactgtgatggtcacctcattgtcgtgcagaatgaggtccaaggagatacagaagaacttgagatggaggccatgatgtgggcgagtgcagggctggtgctgcctgacatggtgctagtcacctgatgaagtgagggtctcaccccagtgtggtct

SEQ ID NO: 8779 - DNA, 573 bp, Homo sapiens
  MAP TO AC003692.1; EXPRESSED IN BRAIN, SIGNAL = 2.6; EXPRESSED IN FETAL LIVER, SIGNAL = 2.1; EXPRESSED IN HELA, SIGNAL = 2.3; EXPRESSED IN ADULT LIVER, SIGNAL = 2.3; EXPRESSED IN HEART, SIGNAL = 1.8; EXPRESSED IN BONE MARROW, SIGNAL = 2.2; EXPRESSED IN LUNG, SIGNAL = 2.4; EXPRESSED IN PLACENTA, SIGNAL = 3.8
atgggaactgtagggcactgccccgagacactcacccacaacttcaagctggactgttccctgtgccttcagaggggtgaccaccacctcacatcggtactctcctgcttcctccagctggattccaggcagccgcagtgaggcgtccccactcttcagcctccatggagacacaatggctccaggtcggaatgcctcttggtgatctccaaaaaattcaaagactttgacttctttgtcaaacgtcagactcttccaaaaccaggtgatacccatagacgtgatgttgaggggttgggaataaaagatattgcagaatatggtgacattgtcattcaggggtgtgatctgagtcccccctgccatcatctctactttcagatcacctgtggcaataagaggacacaatgttcagtttaccaatgtatgaacatctttttgagatgtgctatggactgaatgcttgagtcctccaaaattcatatggaggcctgacccccagtgtgatggtatctggaggcagggcctttgggaagcgattaggtcataagaggaaagtcctcacgaatggga

SEQ ID NO: 8780 - DNA, 513 bp, Homo sapiens
  MAP TO Z97197.2; EXPRESSED IN PLACENTA, SIGNAL = 1.7; EXPRESSED IN BONE MARROW, SIGNAL = 3.1; EXPRESSED IN FETAL LIVER, SIGNAL = 2.4; EXPRESSED IN LUNG, SIGNAL = 2.7; EXPRESSED IN HEART, SIGNAL = 2.1; EXPRESSED IN BRAIN, SIGNAL = 1.9; EXPRESSED IN HELA, SIGNAL = 2.5; EXPRESSED IN ADULT LIVER, SIGNAL = 1.9
cctatgagcacggctttttctactttctagttaaatctaaagcttttgcagcactctgctgttctgtagaccagaggctatttctgctacttctggtcttttctctggacccgggttcaatcacagcaatctctttattgtggcttatttgctgcttttaagggtctctcttacttaaatgctgtgggtcttaacagtgttttcttccttgtgttagatgtaccaaagcttcagcctcatccgggattggagaagaaagaagaggaagaagaagaagaagaatatgatgaagggtctaatctcaaaaaacagaccaataagaaccgggtgcagtcaggcccccgcacacccaacccctatgcctcggacaacagcagcctcatgtttcccatcctggtggccttcggagtcttcattccaaccctcttctgcctctgccggttgtgagaacaaatgactatcctgaacagggtggaggggtgtgggaaagaaaccagccatattggttttggt

SEQ ID NO: 8781 - DNA, 511 bp, Homo sapiens
  MAP TO AL121603.2; EXPRESSED IN ADULT LIVER, SIGNAL =   5; EXPRESSED IN HELA, SIGNAL = 6.3; EXPRESSED IN BRAIN, SIGNAL = 5.8; EXPRESSED IN PLACENTA, SIGNAL = 4.9; EXPRESSED IN HEART, SIGNAL = 5.2; EXPRESSED IN BONE MARROW, SIGNAL = 4.6; EXPRESSED IN FETAL LIVER, SIGNAL = 6.1; EXPRESSED IN LUNG, SIGNAL = 4.6
agatgagtcacgctgccacggagaaaagagtgtatccttgggttaaatagtgtatacaaacaaatgcttcctggaaactagactctcccttcgggttaatgatcaagagttttccatagtcattgtcttttttaaaaatcaggtatttattgagcatatgttgtatgccctcaacattttaagaactgtacttggacgtgcacgcaccctgtccctcaaccaccgctgccgcctccttcttctgtcactcctggtgctgcactgtgttcgttcagtgagaagctggtacctcttttgtgaagcggcagctgagaagactctggcatttgccatggccgaggaaaagcccaaggcattgtcaatggggcagatcagattccgatttgacagtcagccaatcaatgaaacagacacacctgtacaggtggaaatggaggatatagatataattgatgtgttccaccagcagataggaggtgtctactgaaaagggaacctgcttctttactcc

SEQ ID NO: 8782 - DNA, 542 bp, Homo sapiens
  MAP TO AL079304.2; EXPRESSED IN ADULT LIVER, SIGNAL = 2.4; EXPRESSED IN HELA, SIGNAL = 2.8; EXPRESSED IN LUNG, SIGNAL = 2.8; EXPRESSED IN BRAIN, SIGNAL = 2.5; EXPRESSED IN PLACENTA, SIGNAL = 2.3; EXPRESSED IN BONE MARROW, SIGNAL = 2.5; EXPRESSED IN FETAL LIVER, SIGNAL = 2.9; EXPRESSED IN HEART, SIGNAL = 2.5
tcctgggtctttttaagggcttttgttcttagtagtcaatgtagtagtcaaaaatggaatttgaactccagaaggatagttccttatccttattattcctcacccattttggtagaccctgccaggatgttccccccgccaccgactccccctcacccaggtaagaaagtgtttgttctaatacacgtttactttcttttatttatagaataagaatgttagttactatttgctgtgcaccaacaatggcaggctccatattgggaactttaaatgtatctttaaccttcgcattgagtgaggtaagcataatattttcctccttttccagattcagaacccggagctctgagagagtaagtgattttcctaaaatcatatgggtggtaagaacctaggtgttactaactccaaacaccacacttactctttatatattaaatttatatttaaaattaaatttaaacaaatggtactccaacttccacagctggaggccttgctagcagttcttcacatcctcctctccctggcaatttcta

SEQ ID NO: 8783 - DNA, 585 bp, Homo sapiens
  MAP TO AL109759.3; EXPRESSED IN PLACENTA, SIGNAL = 2.5; EXPRESSED IN BRAIN, SIGNAL = 2.6; EXPRESSED IN BONE MARROW, SIGNAL =   2; EXPRESSED IN HEART, SIGNAL = 2.1; EXPRESSED IN LUNG, SIGNAL = 2.3; EXPRESSED IN ADULT LIVER, SIGNAL = 2.1; EXPRESSED IN FETAL LIVER, SIGNAL = 2.2; EXPRESSED IN HELA, SIGNAL = 2.4
aacgggttagggagaaatccctcctcttcaattttttagaacagtttcaagaagattggtaccagctcttctttgtacatgtactaaaatttgtctgtgaatccttctggtactaggctttttgttgttgttggaaaaattttcattactgtttcaattttattactcattacaggtctgatcagggtttctatttcttcgtggttcaatctggggaggttgtatgtttccaggaatatatccatttcctctaggttttctagtttgtgtgcacagaggcactcagtatttctgatgatcttttgtacttttttgatatcagttgtattgtcaccattatcatttctgattttacttatgtgaatcttctctcttttgttattggttattctagctagtcgtttatcaattttgtttttcttttcaaataaccaactcttcattttgttgattctttgattcatttttttcatctcagtgtcatttagttctgctctgagctttgttatttcttttcttctgctagctttggatttagtttcttcttgtttttctagttcctaggggtgaggtgtggcattaggt

SEQ ID NO: 8784 - DNA, 598 bp, Homo sapiens
  MAP TO AL049872.3; EXPRESSED IN PLACENTA, SIGNAL =   2; EXPRESSED IN BONE MARROW, SIGNAL = 3.7; EXPRESSED IN BRAIN, SIGNAL = 4.7; EXPRESSED IN LUNG, SIGNAL =   4; EXPRESSED IN HEART, SIGNAL =   4; EXPRESSED IN HELA, SIGNAL =   4; EXPRESSED IN FETAL LIVER, SIGNAL =   4; EXPRESSED IN ADULT LIVER, SIGNAL =   4
aaaagtctcctccacccccaacttccttctacaatactccatccagaacacacctgttctttctctttcaatagctgttcaaaagcaagagccttctccttcattgagtggcactcaaactctttttctcgcagcatcatagaaaacttcatgttagtctcttgtaacgcttgatattctgtttcctttcccctgtatgtttccactattttttcattttctccttttagtttgccaatgtccatctctagaattaatattctctccttcaggtttgttactgcctgcctcaaaagttcgttttcatttactttgttagtgaaattttcattggaagaaagtagttgatcacttttggctttgattaagaggtctttttccttaagtaacttttgcaaaacatcttgtttctcctttagctgcttgatttctgaatcggtttgttcgtgttcttttctttctagctctgaggtggcagcaatcgaatcagacaatctgtggttattttcctggagagttctaattgttgcatctttttcctgtagtgattttcttagctcttctaactcttgctgaagcaattcagaagattcactca

SEQ ID NO: 8785 - DNA, 506 bp, Homo sapiens
  MAP TO AC010253.2; EXPRESSED IN HELA, SIGNAL = 1.9; EXPRESSED IN HEART, SIGNAL = 1.8; EXPRESSED IN BRAIN, SIGNAL = 1.8; EXPRESSED IN ADULT LIVER, SIGNAL =   2; EXPRESSED IN BONE MARROW, SIGNAL = 1.6; EXPRESSED IN FETAL LIVER, SIGNAL = 1.9; EXPRESSED IN LUNG, SIGNAL = 2.3; EXPRESSED IN PLACENTA, SIGNAL = 1.8
caaagtagaccgaaggctgctacctctgctgagtgaggaaggcacagagtcaggagagcgtgcacctgtgtctgcaggtcctcctttcctagcgaaacaagaaggttccagccatctctgctgcaaagggtcttgatgcctacaagacgagtgaggacatcctggaacactatggggatggcagggcaagctcccctatacagccagagcagcagaagctggtctttcccttgcttcttccttccacaacttctgtgagtgcatctaatcggcaggctctaactcacatccaaaactctaaccatgaacatgtagggttagctgtctagaccctccaatccacaaaagacctaccagagggaagattaaggatgctgttgccgaccacctctatctaccacattaagccatgtttaagatgatatctaccataacttaatgcaatcatttccttcgctgtgatttatcatatgcgtcatttgtttgcaacctcagtaccactggag

SEQ ID NO: 8786 - DNA, 575 bp, Homo sapiens
  MAP TO AL034347.23; EXPRESSED IN ADULT LIVER, SIGNAL = 2.8; EXPRESSED IN FETAL LIVER, SIGNAL = 3.8; EXPRESSED IN HELA, SIGNAL = 4.5; EXPRESSED IN BRAIN, SIGNAL = 2.5; EXPRESSED IN PLACENTA, SIGNAL = 3.6; EXPRESSED IN HEART, SIGNAL = 4.2; EXPRESSED IN BONE MARROW, SIGNAL = 4.6; EXPRESSED IN LUNG, SIGNAL = 2.2
ttcagggtacagcctccatcctggctgctttcatgggctggtgttgagtatctgcagcttttccaggcacctggtacaagctgtaagtcgatctaccattctggggtctggaggacagtggtcctcttctcacagctccactaggcggtgtcccagtagggactctgtgagggggctccaaccccacatttcccttctgcactgccctagccgaggttctccatgagagccccgcccctgcagcaaacttctgcctgggcatccaggcatttccatacatcttctgaaatctagacagaggttcccaaaccccatttcttgacttctgtgcacccacatgctcaacatcacatggaagttgccaaggcttaaggctttcaccctctgaagccatggcctgagcttcatgttggcccctttcagccatggccggagtggctaggaaacagggcaccaagtccttagactgcacacagcacaaggaccctaggccttgcccacaaaaccatttttaccattttttcttcctagacctccaggtctgtgatagaagaggctgccacaaatgtctctga

SEQ ID NO: 8787 - DNA, 523 bp, Homo sapiens
  MAP TO AL121595.3; EXPRESSED IN PLACENTA, SIGNAL = 1.9; EXPRESSED IN BRAIN, SIGNAL = 1.9; EXPRESSED IN HEART, SIGNAL = 4.8; EXPRESSED IN ADULT LIVER, SIGNAL = 2.1; EXPRESSED IN BONE MARROW, SIGNAL = 1.8; EXPRESSED IN FETAL LIVER, SIGNAL = 4.4; EXPRESSED IN HELA, SIGNAL = 4.8
gaaaatgtgggatggtttggaacctcctagagacttgttgaatggctttgacaaaaatgctgatagtgatatggacaataaagtccaggctgaggtggtctcaaatggagatgagggacctgttggaactgaagcaaaggtaactcttgttatgttttagcaaagagaatggcagcattttgtccctgcccttgagatttgtggaactttgaacttgagagagatgattgagggtatctggtagaagaaatttctaagcagcaaagcattcaaaaggtgacttgggtgctgttaaaagcattccatttttaaaaggaaacagagcataaaacttagaaaacttgcagcctgatgatgcagtagaaaagaaaaacccattttttgaggagaagttcaagctggctgcagaaatttgcacaagaaggagctgaatgctaatccccaagacaatggggaaaatctctccagagcatgtcataggtcttcatggcagcccctctcatcacagacccagaagcctagg

SEQ ID NO: 8788 - DNA, 580 bp, Homo sapiens
  MAP TO AC007225.2; EXPRESSED IN HEART, SIGNAL = 2.2
aagagccttgcttaggctggtgcctgcctctccctttgctctggcagcgtggacgggggtgagctcttcgaccggatcacagatgagaagtaccacctgactgagctggatgtggtcctgttcaccaggcagatctgtgagggtgtgcattacctgcaccagcactacatcctgcacctggacctcaaggtgggttctgccctgggcatgcggtaggggcccctggtgtcctagctcctggcgtgctctcaccattgagagctctatccacagacagtcccagcttccattcctggctctctgtcattttgtagttctggagtctgggacaggccactcttgctgcctcttggggctgtagttcttccatctggataatggtacctctttaagtattatttgaagattaagtgaaacaatgagcttttcttctttaaaaatatctttaagattactttttttaaaagttcaaaagggaacataggcttttggtaacaactatagacaacagagtagtgtgtaaaatacacagtgaaagttcctcccgccagccctccgtgcggaagggacttctctgtga

SEQ ID NO: 8789 - DNA, 590 bp, Homo sapiens
  MAP TO AC018765.4; EXPRESSED IN BRAIN, SIGNAL = 2.1; EXPRESSED IN PLACENTA, SIGNAL =   2; EXPRESSED IN ADULT LIVER, SIGNAL = 1.7; EXPRESSED IN BONE MARROW, SIGNAL = 1.5; EXPRESSED IN FETAL LIVER, SIGNAL = 1.9; EXPRESSED IN LUNG, SIGNAL = 3.1; EXPRESSED IN HEART, SIGNAL = 3.4
cccagcccttcagtcactcttttgtgctttgtaacttatacacatgtcatatatatatgtcaaatatctcaaaataagaacataaaactaaaaagaaatacattggttttagagcctaatataaaataaaatactgtttcataaactaacctgagtacaaaggtaccccaatgtctaaatccttgtctctcagggagccatatgttcctaaagtttctgaaagtttcctcttccttcttcttttacctccccttctttctctctccttctcttcttcttcctttttatcctccttcttagttattgtcctgaaaaagttttaagtatacgcatctacttcaattataggtttaaacaattagtactagtctgttctgcatccttccaatgactaacttaggactacagagtcaattataactataatggctgcattatagtatgagttcagtaaatggatttacctttatgtttatgattcattgaattaacaaatcattttactcttttatgttttcaggttaaggtggaaaaaacagaggccaacaaataattaaataatatattgttgctacaccaagaccatggaa

SEQ ID NO: 8790 - DNA, 574 bp, Homo sapiens
  MAP TO AC018801.2; EXPRESSED IN BRAIN, SIGNAL = 1.9; EXPRESSED IN ADULT LIVER, SIGNAL = 2.5; EXPRESSED IN BONE MARROW, SIGNAL = 1.6; EXPRESSED IN FETAL LIVER, SIGNAL = 2.3; EXPRESSED IN HELA, SIGNAL = 1.9; EXPRESSED IN HEART, SIGNAL = 1.8; EXPRESSED IN PLACENTA, SIGNAL = 1.7
gcagctagcttcccacagagtaagtgatgagagagagagagagagcacccaagatgaaatatggaaggtgcagaccttttataacctaatcgcaggagtgacattgggtttttctttcgaatttttctgatttgtttccctgtggtgtcgatttatcttgtttcttgtctttttcttataaactttaaaattagatttagaagcttaattaactttatgttaagcctttttgccaagaatatttcatatgtagtatattgaattttatgtttccttttattagtgaagcaactttcccagaagcaccacagtggacttgttctcaagtctaattggccagatcagggaaatatgcactgtcctggaccagtcactggtgatgaaagggtaacacccaccaccggggttctgctactacacaggatgaagaaaggtaatttcagagagtaaaaaccaaagttgcatgaattggttagagttcttagggccagaggacaaggtgctttaccttgggtttaaacaaaaacattaacttggagtcacaaaggcaagtggccagagttgaggcagaaag

SEQ ID NO: 8791 - DNA, 591 bp, Homo sapiens
  MAP TO AC004506.1; EXPRESSED IN HELA, SIGNAL = 1.7; EXPRESSED IN ADULT LIVER, SIGNAL = 2.7; EXPRESSED IN HEART, SIGNAL = 1.8
tttccaggtagtgggcaaacaggaagttaccccaggctacccacctcccagctgcaaaagtaagtagggcattccttcttcccctgcctgtggagtctgtacgccagattcaccccctccccagagttctggccaggagacttctcgattggttcaaattgttacaaagttcagctggaggtttccttctccctgtggccttttcccagtgcctctggcagccctcctcaaggacacctgtgaggcgaggcagaaagggccttctaggggatccagcaagcccgcagggattttcctgctgcttcctgtacccctgtatttctctcagttctctaaactgacccagctccaagtaaggtaagaatcttctcctgtcatctagaccttcagggttccccagtgggggtgtgtgtttgggggcagacgatctccctttcccacttccacagtttgggcactcacagtatttggggtgtttcctgggtcctttaggagcagtcggcttccttcagaggctctgtaggttctcttggctttcctaacgtattcctgcaatcgttctgaagcaaaagttcatgatgtgagcctcca

SEQ ID NO: 8792 - DNA, 531 bp, Homo sapiens
  MAP TO AL078594.36; EXPRESSED IN BRAIN, SIGNAL = 2.5; EXPRESSED IN ADULT LIVER, SIGNAL = 2.6; EXPRESSED IN BONE MARROW, SIGNAL = 1.9; EXPRESSED IN FETAL LIVER, SIGNAL = 2.6; EXPRESSED IN HELA, SIGNAL = 2.6; EXPRESSED IN HEART, SIGNAL = 2.2; EXPRESSED IN PLACENTA, SIGNAL = 2.1
aatggtggtcatgcttctcctccccttcctccccgtctcccttcctcacctcctccctttcttcctgctcctcttcctgctcctcttcctcctcttcttcctcctcccccttcccgcttctcccccttccttctttctcccacctcctccttcctcctcctccttactttcttcttctttcttttctttcttcttcacttgccctacatagtgattttaagagctatagtgccttctcagcctgaatccaaagtgattcctgtagtaaaggtaactgccggttcatgaacaacctgctcaatgttaacctcttcttgttcctaaaatgtagagtcaggggagcccctgaaactgagaatacaaaccaaaactgttctggaagagcagcacagttttttcaactcagaaatgtaaaattgtcttgcttatcatgacctcttctgaaaagtattctaaaaatgaaacaaaaaacgtatcctaaaatgctgaaatgtgatcttgggagcatagggacagtggcacaaggatgaa

SEQ ID NO: 8793 - DNA, 547 bp, Homo sapiens
  MAP TO AC022211.2; EXPRESSED IN ADULT LIVER, SIGNAL = 5.4; EXPRESSED IN BONE MARROW, SIGNAL = 4.3; EXPRESSED IN HEART, SIGNAL = 4.4; EXPRESSED IN LUNG, SIGNAL = 4.5; EXPRESSED IN BRAIN, SIGNAL = 3.6; EXPRESSED IN PLACENTA, SIGNAL = 4.7; EXPRESSED IN HELA, SIGNAL = 5.5; EXPRESSED IN FETAL LIVER, SIGNAL = 6.1
ggaagggaaaagtctttgggtgaggcagagactccactgccagctttagaggtgggtagaagaaaggccagtgctggtgaggaagccctgatctggaggcctagtcggagacttcgctgtagtaatacttgtgggcagctggcgttgtcttccagccggccgcccggaactcaatgatctccagcagcagcagctgggccagggagctgaggccagttgggagcaggaagccatcccggatcagcacaaagagctcatccatgcgctgcccattcattttctccagctgctccccaacccggtgcagctgcagcaccaaacagtccacctgcaggcgacagtgtgggtaacacaagtgaactggggcagtgccagcctctcacacagcatttgccaagtgccaggtgctgtgctttgcctttacactcattcccttgctccctccttaccatccagtgggtacttccacatcttacacagaaagaaatgagttccgggacttgcctgaggtccctcatctggccaggctccactcaagcctgtctcc

SEQ ID NO: 8794 - DNA, 518 bp, Homo sapiens
  MAP TO AC023302.2; EXPRESSED IN PLACENTA, SIGNAL = 3.4; EXPRESSED IN BRAIN, SIGNAL = 1.8; EXPRESSED IN ADULT LIVER, SIGNAL = 1.8; EXPRESSED IN HELA, SIGNAL = 2.5; EXPRESSED IN FETAL LIVER, SIGNAL = 2.3; EXPRESSED IN HEART, SIGNAL = 2.1; EXPRESSED IN BONE MARROW, SIGNAL = 1.7
gcacatgtgtgaaaacccagaaataaatgtcatttaaaaaactattaataaaaataaaaatataactagggaaatatttttaagtaagctttcaatgaatggaatcttccctataacaagtctatcatcctgctcaaagcaatattttcagaaatgcttttcagataatagcaggctatttgttcatctttaagcctcattaactggcgagatgaggtcatgggggaacagacccactgcactgcccctcgtcagaccatacctgcactacgggcctgtctcagaaattctgctcaacagggatgcgttcggagagaaggacatggatggtgaagaatttggaaataccttatacaaagaatggtcaagggaactgggaacattccggctgcaaaagagattaagtaagagaataatttaatctacttcacccaggatttattgaggctccacttcacgttaggttctgtagggaattcaaatatgaacaagacgccacttctgccttcatggagctt

SEQ ID NO: 8795 - DNA, 550 bp, Homo sapiens
  MAP TO AC012578.5; EXPRESSED IN ADULT LIVER, SIGNAL = 1.7; EXPRESSED IN HELA, SIGNAL =   2; EXPRESSED IN HEART, SIGNAL = 1.7; EXPRESSED IN BRAIN, SIGNAL = 1.7; EXPRESSED IN PLACENTA, SIGNAL = 1.5; EXPRESSED IN FETAL LIVER, SIGNAL = 2.1
gtccagccaaagaaaactgctaagccagctcagagataagccagaaatgctatcccacaaggatggcttataaaaatcaatattttaagcaaaacagtaattaaccatgtgcttcccttgagggcaggttgaggagagggtgcggagccaacatctccagaaaacccacatgtgcttgatgcccagccccgcatggctgctgccgttgctggcgtttgcattgttattgccactcctaccttcttctctgattatcaaacttgcaaaagagttttggttgcatgttttttttcaaacacttcctttaatatccacatgcaggcaaatgtccattgtccctgtgtgtcgtgggagatatcaggcttggcgaggtttgtcgaacctgcacaaaggcccgcggtgatgatggtgccgacgttcctgttccagtgtatctggcctgaatcccaccctgccaggctggggccaggccccctccccacactggctgaagtcgtgcctcatccatctgacgcatctgagaggaacagggcttcccagagactctcct

SEQ ID NO: 8796 - DNA, 568 bp, Homo sapiens
  MAP TO AC008430.3; EXPRESSED IN BRAIN, SIGNAL = 2.3; EXPRESSED IN ADULT LIVER, SIGNAL = 2.5; EXPRESSED IN BONE MARROW, SIGNAL = 1.7; EXPRESSED IN FETAL LIVER, SIGNAL = 2.2; EXPRESSED IN HELA, SIGNAL = 2.4; EXPRESSED IN HEART, SIGNAL = 2.3; EXPRESSED IN PLACENTA, SIGNAL = 1.5
ttgggtgtaatttgatcctccacttctgaactttataaaccgatttggctgacttaccttatcttttctttgcttttcatcctggtatacagtccagtgttctccatcattgctgtaagccagtttgtaggagccaacaaactgtacatgaccaaaatctttagctccttgtgtaatgatgccagtcactttggttggaacaagaagatccaccttaaaaaaaagaaaaatacaggctttaaatgcgacaaccaagttgtaaacttccaagtcttttgatgtcaagagaataaaactatatatatcctaaaatcaaaaatctgtctagttatttgtattttgaaaccaatgactgagtctattattggcttataattttgatattgccactgggttaatgtagtgcaagactccttgaacaaccatttttaccattttgaagtcaaatcatggtgatttcagtccaccaattaattttatattaggtggattcatctatttgtgcaggtttttttttttttttttgtaactgagatagaacagatgtggttggggtgaccttcttgag

SEQ ID NO: 8797 - DNA, 568 bp, Homo sapiens
  MAP TO AC019224.2; EXPRESSED IN PLACENTA, SIGNAL = 6.4; EXPRESSED IN BRAIN, SIGNAL = 1.9; EXPRESSED IN HELA, SIGNAL = 3.9; EXPRESSED IN FETAL LIVER, SIGNAL = 9.9; EXPRESSED IN BONE MARROW, SIGNAL = 5.8; EXPRESSED IN HEART, SIGNAL = 1.9; EXPRESSED IN LUNG, SIGNAL =   9
gctcgtagttcgccttcaacatgccggagccagcgaagtccgctcccgcgcccaagaagggctcgaagaaagccgtgactaaggcgcagaagaaggacggcaggaagcgcaagcgcagccgcaaggagagctactccgtatacgtgtacaaggtgctgaagcaggtccaccccgacaccggcatctcctctaaggccatgggaatcatgaactccttcgtcaacgacatcttcgaacgcatcgcaggtgaggcttcccgcctgccgcattacaacaagcgctcgaccatcacctccagggagatccagacggccgtgcgcctgctgctgcccggggagttggccaagcacgccgtgtccgagggcaccaaggccgtcaccaagtacaccagcgctaagtaaacttgccaaattgatgcctgcagctcctggggaaagtggaagtcagataactcctttatgaaaaggcagcattcaaaaactataaaaaatataaatccaacattattaaaattttgcacatccaaagatatcacgaacagttaaaaacaaacccacaaggtgacaga

SEQ ID NO: 8798 - DNA, 565 bp, Homo sapiens
  MAP TO AC020647.9; EXPRESSED IN BONE MARROW, SIGNAL = 1.5; EXPRESSED IN FETAL LIVER, SIGNAL = 1.8; EXPRESSED IN HEART, SIGNAL =   2; EXPRESSED IN PLACENTA, SIGNAL = 2.5; EXPRESSED IN BRAIN, SIGNAL = 1.7; EXPRESSED IN HELA, SIGNAL =   2; EXPRESSED IN ADULT LIVER, SIGNAL = 1.4
catttgcggattatgggaactacaattcaacatgagatttgggtggggacacagccaaaccatatcactttgtaaaagagtttatgacatcatcctcataacttaccgagtgtgatattctgcagtgtggtgggctacatgtggctcttttgtatttgctaatgaagattcaatatttggaataggtatactttttcttgacaatccattaaggaccaatttcatgtctctgaagttactctgaattagtatactttctttgttaaaagagagattaaagtagtaaagatgtatgttaacaacatgattactgagttcaggctttctccatgtatactcagatgaattgttaaagtattgaaaagcagagagctctggggcctgtgtgtgagtgtgtctgtgtgcctggtggcaatcaagagttgtcaaaggcattttgttaggggatttaataaaatgagtatttgccttttcagtaattttcaaagttattttctcctgtgtatgaaaaagaaattctgcattatcctttgctttcatacatgaggaggacaagagcttttcc

SEQ ID NO: 8799 - DNA, 517 bp, Homo sapiens
  MAP TO AC017079.2; EXPRESSED IN ADULT LIVER, SIGNAL = 3.9; EXPRESSED IN BONE MARROW, SIGNAL = 7.3; EXPRESSED IN LUNG, SIGNAL = 6.9; EXPRESSED IN HEART, SIGNAL =  11; EXPRESSED IN BRAIN, SIGNAL =  11; EXPRESSED IN PLACENTA, SIGNAL = 7.2; EXPRESSED IN HELA, SIGNAL =  12; EXPRESSED IN FETAL LIVER, SIGNAL =  15
atttctttgggggagaggacaccacactcttactcaatgaagagaaatattttcacagtccagaagtcttttattttgttaacacctatgatgccatgaatccacagggaataggttccagcagctcaggctccttcccattggttggttctcacacagtgtgcttctccgggtggaacaggctggcgcttcagttgaacccaggcacctttctctttggcttctttgtttttctgatcatttcaggaagttcatgcatttcaggaagttatctcggctcttagagtgcttactgtgctcaatatgcacactaattctcttggcaagaatcttgccctgaacttgtttgtttacaacaatgccaacagcatgctgagtaacattgtaaactcttccagttttgccatggtaacacttgtgggcactcctttttgaagagtacccattcccttgatgtctacaatatcacctttcttatagattcacatatacgtgaccaaaggaaaaacggcatgtt

SEQ ID NO: 8800 - DNA, 500 bp, Homo sapiens
  MAP TO AC016289.3; EXPRESSED IN BRAIN, SIGNAL = 6.2; EXPRESSED IN PLACENTA, SIGNAL = 4.5; EXPRESSED IN HELA, SIGNAL =   8; EXPRESSED IN ADULT LIVER, SIGNAL = 5.5; EXPRESSED IN HEART, SIGNAL = 8.3; EXPRESSED IN LUNG, SIGNAL = 5.8; EXPRESSED IN BONE MARROW, SIGNAL = 5.1; EXPRESSED IN FETAL LIVER, SIGNAL = 9.3
accacatactgaacaaacacacacatttataacttgataaaggtatacgtatataaaatacagaatagaatacaactgatgttaaccttggagtaacttccaaatctgtaataggtttcaagtatgagttaggaaatcaataacaaaaagatataaaaaaaaaaaaagaaaaaaatacgacctatataaaagatacttacggattccagtgttctttggaaattttgtacaaactggcaaacataattggcagaattttatcaatgttctcctcaatcaaactaagaatatattcgttattccagaagtacaatgccctttctgcaacctaaaaaaagacatttagagaaatgtcaaaactaaaataggaaagaaatactagtgtaaagtaaaggcttcactgaaaacatcatacctgaaaatgagaactggatacacacttggatatctgcttgaaaagtggctcttcaatttttttgaactgtgttggttcaatgaca

SEQ ID NO: 8801 - DNA, 518 bp, Homo sapiens
  MAP TO AL158075.2; EXPRESSED IN PLACENTA, SIGNAL = 2.2; EXPRESSED IN BRAIN, SIGNAL = 1.5; EXPRESSED IN FETAL LIVER, SIGNAL = 2.4; EXPRESSED IN HELA, SIGNAL = 2.2; EXPRESSED IN BONE MARROW, SIGNAL = 1.7; EXPRESSED IN HEART, SIGNAL = 1.9; EXPRESSED IN LUNG, SIGNAL = 4.5; EXPRESSED IN ADULT LIVER, SIGNAL = 2.2
ttctcctgaaccacagacccatctatccaaatgtctattgtcaatgtctaccaggataaataacccataggctccatcaatttcaacatgtcaaactgaacctattattttctctttgaatcctctttctcctgtgttcttcactcaggttccaggtaccaccaactctcatcccccaagccagagatccccaaagactcctcctgggctcccactttaccacccttcccaacagtcccctcgaataatatagtcaatcaccaggacattttcattctctctcaaatatccctagatcaagctcaaggcatctaatcaccctataatcctagactattatgactgctcctctctcttcctggaatttaatttcctaatccactcaaaaatcctgtttgattccccttttcaactttttagcatacattaatagcaccaaattacagaaataaacaaatccaacaattgaaaagctactttttgcaaccttatttcctcgaaacaccccaaagcttgaa

SEQ ID NO: 8802 - DNA, 597 bp, Homo sapiens
  MAP TO AC011489.3; EXPRESSED IN ADULT LIVER, SIGNAL = 3.3; EXPRESSED IN FETAL LIVER, SIGNAL = 3.3; EXPRESSED IN BRAIN, SIGNAL = 3.5; EXPRESSED IN PLACENTA, SIGNAL = 2.9; EXPRESSED IN HEART, SIGNAL = 2.8; EXPRESSED IN BONE MARROW, SIGNAL =   3; EXPRESSED IN HELA, SIGNAL = 3.3; EXPRESSED IN LUNG, SIGNAL = 5.2
gccctagagctcagatgtggaggaagagggaggagctgggtgtgggcaggagcagagggtcctaggctgagggagagcctgaggggagggggccgtggcactcgagactggtgtgtggggctagcctggggccctcatctccactgggcacggccctggcttaccagctcccctttctcaggctggcagagaagaaggcttccatcggttatacctacgaggacagcacggtggccaaggtagagaaggcggcagaaaagccagaggaggaggagtcagcggccgaggaggagagcaactcggacgaagatgaggtcatccccgacatcggtggggtcccctctctgccctccccacctgcagtccctgggcatcgtttctgtgtctcgtccctcaccctctgtggggcaccccgtgcttacgaaccgtgtctctctccctaccccgccccagggcacaccagcctcctgctgcccctgtctcactcctgtcctcctccgttccggccttcctctgcctcactcatctctcatttctagggtgctatttctatgatcttttcccctcctaggtgttggctccattctcctccacttg

SEQ ID NO: 8803 - DNA, 510 bp, Homo sapiens
  MAP TO AC002041.1; EXPRESSED IN BRAIN, SIGNAL = 2.5; EXPRESSED IN FETAL LIVER, SIGNAL = 2.4; EXPRESSED IN ADULT LIVER, SIGNAL = 1.8; EXPRESSED IN HELA, SIGNAL = 2.2; EXPRESSED IN HEART, SIGNAL =   2; EXPRESSED IN BONE MARROW, SIGNAL = 1.9; EXPRESSED IN LUNG, SIGNAL = 2.7; EXPRESSED IN PLACENTA, SIGNAL =   2
gaattggctcctctagcgtggtgaggcgtgtggtctgctgacaggtcatagcctttcctcctttctggcttctcctttatgtaggtctcatgacctcaacacaagtggtccagagaggacaagcaatgcccatgaggtcgcatggcacatcggggtgtagcacagatatatatcaggactgtgcagccacaagtggtccatggggttcctgagatgctggcattgtgggagccaccctaaattgtcctctgttgtctccctgcagtccttggatagctggggcacctctgaagatgctgacgctccttctaagcgacactcaacctctgacctctcagatgcgaccttcagcaatatcaggagagaaggctggttgtattataagcagattctcaccaagaaggggaaggtaagatgggtggaggaatgaggtggaagctggctccagcagaaccctccagcctctcctaggcctaccctgacagcctctggagccagagagaaccagtg

SEQ ID NO: 8804 - DNA, 590 bp, Homo sapiens
  MAP TO AC023553.2; EXPRESSED IN BRAIN, SIGNAL = 1.7; EXPRESSED IN BONE MARROW, SIGNAL =   2; EXPRESSED IN FETAL LIVER, SIGNAL = 2.5; EXPRESSED IN HELA, SIGNAL =   2; EXPRESSED IN HEART, SIGNAL =   2
tttcactgatgctttgtccctaaagtcaggaagtaccttgccaaaaagggactgccttttaaagttctttttttattgaacaatgttgctggccacccagaaccccataagttcaacaccgaaggtgtcaaagtggtcaacttgcccccaaacacaacatctgtaattcagtctctagatcaggtgtcattaagacctttaaggctcattaaacatagtcctctatggtaaagattgtcaatgatatggaagagaacctccatagagagaacattataaaggtttggaagaattacaccattgaatatgccatcattgttatagaaaaaatcctgagagccatcaagcctcaaacagtaaattcctgctggagaaaactgtgcccagatgttgtacatgacttcacggaatttatgacagagctaatcaaggaaatgatgaaagatattatggatatagcaaaaaagatggagggtaaagcatttcaagatatagatcttggagaaattcaatagctaatagccaccatgccagagaaactaacagaagaggacttgatggagatgagcacttccaaaccagtgccagat

SEQ ID NO: 8805 - DNA, 596 bp, Homo sapiens
  MAP TO AC021876.2; EXPRESSED IN PLACENTA, SIGNAL = 5.7; EXPRESSED IN BRAIN, SIGNAL =   4; EXPRESSED IN ADULT LIVER, SIGNAL = 3.9; EXPRESSED IN FETAL LIVER, SIGNAL = 4.9; EXPRESSED IN HELA, SIGNAL = 4.8; EXPRESSED IN BONE MARROW, SIGNAL = 3.5; EXPRESSED IN LUNG, SIGNAL = 3.6; EXPRESSED IN HEART, SIGNAL = 4.3
gagacttggagggaagagccctgagcacctgagacttagatttctgagccatgggagctccttggctatggctggcgcctgggatgtggggaggagagaggagttatacatcttgttcagagtgtccagaggagctagaggctgtaaccaactgctgattcagtgacgccggctgacagacagggacctgcggatgcggtgatgccgactgacggacgggacctgcggatgcagtgatgccgactgacggagggggacctgcggatgcggtgatgccgactgacggagggggacctgcggatgcggtgatgccggctgacggagggggacctgcggatgcggtgatgccgactgatggagggggactggcgatgcggtgatgccgactgatggacgggacctgcggatgcggtgaagccgatgaacggggacctgcggatgtggtgatgctgactgacgtacagggacttggtgatgcggtgatgccgactgatgggtagggacctggtgatgcgttgatgccgactgacggacgggacctggtgttgcagtgaagccgactgacggacgggacctgctgatgtggtgaagctgac

SEQ ID NO: 8806 - DNA, 530 bp, Homo sapiens
  MAP TO AC002039.1; EXPRESSED IN ADULT LIVER, SIGNAL =   2; EXPRESSED IN LUNG, SIGNAL = 6.5; EXPRESSED IN BRAIN, SIGNAL = 5.5; EXPRESSED IN BONE MARROW, SIGNAL =   3; EXPRESSED IN FETAL LIVER, SIGNAL = 2.3; EXPRESSED IN HELA, SIGNAL = 2.2; EXPRESSED IN HEART, SIGNAL = 2.4; EXPRESSED IN PLACENTA, SIGNAL = 2.2
acaccttcttcatttccccggggtgagctctgcgggccggcctggcagggcagggcagggcatcatgggtcagcattgcccgggttacgggccccgtggggacggcaggcagcgaggggactggaccgggtatgggctctgggactccgacatccaacctggcggagcctgggctcacgtccactgccccttcccttcccaggaccagagacccagtggggagttaccgtctgaacctctccagccacttccgctggtcggcgctggaggtgtccgtgggcttgtacacgtccctgtgccagtacttcagcgaggaggacgtggtgtggcggacagaggggctgctgcccctggaggagacctcgccccgccaggccgtctgcctcacccgccacctcaccgccttcggcaccagcctcttcgtgcccccaagccatatccgctttgtgtttcctgtgagtgaccctgtgctcctgggagcctctgcagagtcgaggagggcctgggtgggctcggctctatcctgagaa

SEQ ID NO: 8807 - DNA, 538 bp, Homo sapiens
  MAP TO AC008381.5; EXPRESSED IN BRAIN, SIGNAL = 3.4; EXPRESSED IN PLACENTA, SIGNAL = 2.7; EXPRESSED IN HEART, SIGNAL = 3.6; EXPRESSED IN ADULT LIVER, SIGNAL = 3.3; EXPRESSED IN BONE MARROW, SIGNAL = 2.7; EXPRESSED IN FETAL LIVER, SIGNAL = 4.2; EXPRESSED IN HELA, SIGNAL = 4.2; EXPRESSED IN LUNG, SIGNAL = 1.7
tgaatccaccacctctcctcaagtttcaatataatttgaatcccaaatgtaattctaatgattttgaccaggtggaaccaatttttctcacctattctctgctgtgggttagcaaccaagtgaaagcccacgttttgagactcactctgtggcaggcatcctcccacacagcccccaatgatctctttctcctggtattcccacccttgaatgccccatagtgctatggttagtctgtgtgaccactgcaagtggcaaaggtgatggcatgtcacttcagagactaggtcataaaagactgtggcttccgtcttggggactggctttctgtctctgagactgcttactctgggggaagcatgcatgcctatggagaggcctggggggcaaggcacccagcagcgagtgaggaagacccagtgaagaatggtattgcctgaaataaatcatgtgagtgaacttgaaagcaaattccacgcctcagttgagtcttcagatgactacagcccagactgacagcttcactgcaacctcatga

SEQ ID NO: 8808 - DNA, 551 bp, Homo sapiens
  MAP TO AC016993.2; EXPRESSED IN BONE MARROW, SIGNAL =   3; EXPRESSED IN FETAL LIVER, SIGNAL = 5.2; EXPRESSED IN HEART, SIGNAL = 4.1; EXPRESSED IN LUNG, SIGNAL =   3; EXPRESSED IN PLACENTA, SIGNAL = 3.9; EXPRESSED IN BRAIN, SIGNAL = 3.5; EXPRESSED IN HELA, SIGNAL =   5; EXPRESSED IN ADULT LIVER, SIGNAL = 4.1
aaatatcccccaactcctggtcagctccagtctgtgaaaagtcatctgatcatggcaagcatgagggattgctgagaactctctttgccaactcattcgaccccagatcccctgccagggtgtcaggactttaaaatatattagggagagggaagctggaaaccggatcaaggtggactcacagaccacttagaattgttaagtccctgagttcacggtcttaagagtttcttccaggcccctgctccacactctcaagttcatcttgcaaaagtcgaaggacctgaaggaccacagggctccagggctgatgcatcacagtttggtctaggaaccagctggagtttagtgtttgactcccaaggcgtttatgttgacccctaccccatctttgacattcactgggcctttagagccctgggaatttcagaggaaaagcaaactgctcctgcccctcaaggagtaaagaagacacaccgaggggatctgctggagctcgaaatgtgaagtggaagtctaagggagggagggcttcatctggtcccaggaga

SEQ ID NO: 8809 - DNA, 550 bp, Homo sapiens
  MAP TO AC022845.2; EXPRESSED IN ADULT LIVER, SIGNAL = 3.6; EXPRESSED IN LUNG, SIGNAL = 1.9; EXPRESSED IN BRAIN, SIGNAL = 3.6; EXPRESSED IN BONE MARROW, SIGNAL = 2.5; EXPRESSED IN FETAL LIVER, SIGNAL = 3.8; EXPRESSED IN HELA, SIGNAL = 3.6; EXPRESSED IN HEART, SIGNAL = 3.3; EXPRESSED IN PLACENTA, SIGNAL = 2.7
gagagagatggcggagtttgccattgagttctctctccttgcttaaaagatccaagctgtgctttttgaaggcttcagactgcagcctgagttcatcgtaggccttctggatcccatctactttgcgctgaagctccctgactctcaagttgctgtccacagccactgcctcttgctcaaaccgctccagcgcatgcttcctgtcttcatttgctatctccaacttttcctcaagctggcagatctctgcctgtttgttctgaagcactttgcccctttcaatggacagctgcagcaactcctctttctctctagtgacggtctgcagcctggcctgcagctcctggctcaggctgctgtgtgtctcctctgccttagctatctgctccacagcctgctggtgctgctgcttgagggtctgcagctggctgcgcagctgttctgtctccttggtgtgggtgcaggcctgctggctctgtagctccagcagctccttctcgcgcgcctgtgcctggcaggcatcctgagcacacctctccttcagcgtttc

SEQ ID NO: 8810 - DNA, 552 bp, Homo sapiens
  MAP TO AC011510.3; EXPRESSED IN BONE MARROW, SIGNAL = 2.1; EXPRESSED IN LUNG, SIGNAL = 5.1; EXPRESSED IN HEART, SIGNAL =   2; EXPRESSED IN BRAIN, SIGNAL =   2; EXPRESSED IN PLACENTA, SIGNAL = 1.9; EXPRESSED IN HELA, SIGNAL = 2.2; EXPRESSED IN ADULT LIVER, SIGNAL = 1.5; EXPRESSED IN FETAL LIVER, SIGNAL = 2.3
gggaatctttactcagcccctctaggttagtgcaaatgtccccagcaagcacgaggctatggatatagaaacctaccagagcaagggtgactgctgcctcatacacccacctcctatcctctcggtgctcaaagtacccccgtccccggttttcttcataaggcctctttcgactctggaattgctgcctgtctggcttgagttgagaagcttcaggcgggaggaagctggtgggtgctccttgcttcatctctgtcttcatttctattgtcaagacaaattcagatggtcaagacactcgcaagctccccagctatcacttttctggtcccttttcccttgagagatgtgagcaggatcctcactacagtgatgaagggctgggcacaggcagcttgctgagttcaacagaagcctgctgagccagccaagaaggccatactggagaacagggttaggatctgagataccatgaccctaaattctccaatttctcttcccaaagaacctctctgccttagttcttacaaagcttcttcagtctggcaaggg

SEQ ID NO: 8811 - DNA, 570 bp, Homo sapiens
  MAP TO AC002038.1; EXPRESSED IN BRAIN, SIGNAL = 4.8; EXPRESSED IN FETAL LIVER, SIGNAL = 5.1; EXPRESSED IN BONE MARROW, SIGNAL = 3.7; EXPRESSED IN HELA, SIGNAL = 5.4; EXPRESSED IN HEART, SIGNAL = 4.6; EXPRESSED IN ADULT LIVER, SIGNAL = 3.9; EXPRESSED IN LUNG, SIGNAL = 3.6; EXPRESSED IN PLACENTA, SIGNAL = 3.5
ggaatagagggagaggctgcaacctgtgctcagcccaacattttaaacaacgtctgtataaaattttagccagcactaaacaatgcatggaaagttttatcaccattaaattgcattcactcaaatttgaaattcttctaaacaatgtttgttataaatttattataaactacttgtacttataaaacactacttgattaaaaagatgcttttaaattaattttcattcttctttcagttttgttctaggtgctgtctctcctgctgttgttgttctttacacgatggtgttgcaagaaaatggatatggtgttgaggaagacattccaaccttactaatggctgctagcagtatggatgacattctggctctcactggattcaatacatgcttgagcatagtcttctcctcgggtaaacaagaaaatataacaaccaccagatcattcatgaccttttttgttagttctttaaacagggtttctggctttgcttcttcatttattaaccaagactgttcaatttaacatctttttaatctccatagaaagctcattccagaccaaggaa

SEQ ID NO: 8812 - DNA, 541 bp, Homo sapiens
  MAP TO AC019224.2; EXPRESSED IN BRAIN, SIGNAL =  66; EXPRESSED IN BONE MARROW, SIGNAL =  32; EXPRESSED IN HELA, SIGNAL =  26; EXPRESSED IN ADULT LIVER, SIGNAL =  53; EXPRESSED IN FETAL LIVER, SIGNAL =  31; EXPRESSED IN HEART, SIGNAL =  94; EXPRESSED IN LUNG, SIGNAL =  52; EXPRESSED IN PLACENTA, SIGNAL =  31
tacttgagcccagggatgtcaaggctgcagggttgtgacggtgccagccactgcactctggcctgcgtgacagagcaggaccctgtctcaaaaaaaaaaaaaaaaaaagagaatttttttttataaagaggcaaatatattgaggtttagacaaggccacatagcaccaggcagcgaccctcaatcagaaacctggggatgaccagcttgagaagtaaaaccacagagtccagggtcaccagggtggaaagaaagggaagaagatacctagaaaggagggtttcagaacaagggagcactaaaatgtgcatgaaaaccctccaaggtcctggcctctaaatggcacaagtgtgaggcagagaaagagggagagctgcaaggcagaggaatgaggcacagctctgctgcagaccacatccagagagccagagctcaggtatgagtcaggcaaagctgacagccagctaggacacacataattcccttcaggaaaagataacagagtccagagcccccacaacctaccttctgccacctccag

SEQ ID NO: 8813 - DNA, 558 bp, Homo sapiens
  MAP TO AC018507.2; EXPRESSED IN PLACENTA, SIGNAL = 1.5; EXPRESSED IN BONE MARROW, SIGNAL = 1.6; EXPRESSED IN HELA, SIGNAL = 1.6; EXPRESSED IN LUNG, SIGNAL = 2.2; EXPRESSED IN ADULT LIVER, SIGNAL = 1.4; EXPRESSED IN HEART, SIGNAL =   3; EXPRESSED IN BRAIN, SIGNAL = 1.8
agacacaatgcctcctccagtttctctttgacacaaaccataatactagcatttgaacttcagaagttgtttttatatccataatcatatttgatctttatgatcatcttgagagagaagttgaacaaatattatgatctaccatcatgggcaagaggacagacacggaaatgtgacagaaaagacaaggaatgaactggatcatcctgtcttccagtaccacctctttctgggacttcatacagagggaggacaaaacacgcatgaagccaggagtggggtcattatccctggaagacgtgggagccccctccccctccaatgggtcatgcaggtcacagatgtgcaatggccagaggatgtacccattcagcccagccatgactattacagggaaactcaatggcacgtgccctgctgcctgcctgagtaaacaattgacagacaatggacacaggtattattatcacaaaacaggctggccttttgcatggattgaagtaggcaaagttgtgagcagaggccataataataaaggcactggagccacagatctga

SEQ ID NO: 8814 - DNA, 571 bp, Homo sapiens
  MAP TO AC022047.4; EXPRESSED IN BRAIN, SIGNAL = 3.6; EXPRESSED IN PLACENTA, SIGNAL = 3.2; EXPRESSED IN HELA, SIGNAL = 4.7; EXPRESSED IN LUNG, SIGNAL =   3; EXPRESSED IN ADULT LIVER, SIGNAL = 3.9; EXPRESSED IN BONE MARROW, SIGNAL = 3.3; EXPRESSED IN FETAL LIVER, SIGNAL = 4.4; EXPRESSED IN HEART, SIGNAL =   4
gtttacagcaagctccagccagttccaactggcagacatattgcttcagccaggacggtctacacattagaatttaagtgatcctctcacttgatgacctgcccagtttctgtgggatttttttacctggcatatttttgtgtttacacgcctggccctattctgggggaagatgttgctaagaggagaaacagtggtgaaaccctataggaggagtgaggcctggaccaaaaaatccacgataaggtcagaagccaggaaggcagagaacaggactgagcatgggtgaggtgagtggaccaggccaaggtgtgcagaaccagcctccagacgcactgtgctggctccacagagccattcacagctcatcacaaccatccttaaccactgggccactctgggcaagtgacttcctccctccagtgcctctagttttctcatgatgaaagatgtgggtaaacgacatcacgacggtcactttctgaattctgatttcaattacacagctccctagatgcaagacagaaagattttgtcagaggagagagtatgtcttcatccatcgacccac

SEQ ID NO: 8815 - DNA, 504 bp, Homo sapiens
  MAP TO AC009144.4; EXPRESSED IN BRAIN, SIGNAL = 7.8; EXPRESSED IN PLACENTA, SIGNAL = 6.3; EXPRESSED IN BONE MARROW, SIGNAL = 5.1; EXPRESSED IN FETAL LIVER, SIGNAL = 7.8; EXPRESSED IN HELA, SIGNAL = 6.7; EXPRESSED IN LUNG, SIGNAL = 7.9; EXPRESSED IN ADULT LIVER, SIGNAL = 7.7; EXPRESSED IN HEART, SIGNAL = 7.3
accaaagagactgcacaccccagaatgcaacacgcgcctccgcgaagaagacctactcatagcaagtacttcacagcctacaattcccaagatgcaacgcgacctccttcccacagcaacgaaagactgcgactccccggactatcaggccgggagagtccacttccagctcacctcggagctccgggagcctttcagcacctgcttggtgagcgcgattacgtcagtaccacaggtggtcaccttctccgtgagaagccccttcacggactgaccgaaccgcgcttgagactctggcgttccagtcgccatcatttcagttagcgaacggttgcgcactgacgatggtgagtcgccggggccaaaagacaagcaaagcggaaggaaaagaggcgtctcttcctccatgggaaaaggaagggacgcatgcgcctgatggaggttgacctttgctcactaaactcatgaactattcattgatatcctgaggaaaacagggtccag

SEQ ID NO: 8816 - DNA, 580 bp, Homo sapiens
  MAP TO AC023490.4; EXPRESSED IN HEART, SIGNAL = 4.2; EXPRESSED IN PLACENTA, SIGNAL = 3.5; EXPRESSED IN BRAIN, SIGNAL = 3.9; EXPRESSED IN ADULT LIVER, SIGNAL = 4.3; EXPRESSED IN BONE MARROW, SIGNAL = 3.2; EXPRESSED IN FETAL LIVER, SIGNAL = 5.1; EXPRESSED IN HELA, SIGNAL = 4.6; EXPRESSED IN LUNG, SIGNAL = 3.7
gactccctttctcccacctctgggggcccaaagctctggatgccaccctagccctcagctggcctcacctgtctcctcatagccccacagcttgatggtgtctgtgtgggcagcgcctcaacgtgccaggtcaggctgaggttgcctgaggtgttggcggtgccgtagtattgccaatgcatctcgttcatcaactcactcttctccttcatcaacactttgttggggtgcactgggcaggggaggtgaggggtgagtgagggctgggcccagggaagcagggaggaggccctgaggcttcaagggctgtgggagcctccagggccaatgcatggcagcagctgggtgatggtctctccggccctcatggcagaaaaggacgctgaggccggagaggcaggggcctgccctccctccactgcccacgcctctagcctccacctggcttctcccctgccctggtgtggcggagctcagtggataggcactggcccacctctctagggacccctgcagctcccactcactctgggctgggaccgtggtctggatgccagggagtggaaaggagctgaaggaa

SEQ ID NO: 8817 - DNA, 570 bp, Homo sapiens
  MAP TO AC023109.2; EXPRESSED IN FETAL LIVER, SIGNAL = 6.6; EXPRESSED IN PLACENTA, SIGNAL = 2.3; EXPRESSED IN BRAIN, SIGNAL = 2.5; EXPRESSED IN ADULT LIVER, SIGNAL = 2.7; EXPRESSED IN BONE MARROW, SIGNAL =   2; EXPRESSED IN HELA, SIGNAL = 6.3; EXPRESSED IN HEART, SIGNAL = 6.3
cctgaaaatgtgcaagcaactttctaactggataacaggcagagtttggaatagtttggagagctcagaagacaggaagatatgggaaactttggaacttcctagagacttgttgaatagctttgatcaaaatgctgatagtaatatggacaatgaagtcctggctgaggtgaattcagatggagatgggaaatttgttgggaactggagtaaaggtgactcttgctatgctttagcaaagagactggcagctttttgcccctaccctagagatctgtggaactttgaacttgagagagatgatttaggatatctggtggaagaaatttctaagcagcaaagcattcaagatatgacagagcataaaagtttggaaaatttgcagcctgatgatgaagtagaaaataaaaacccattttctgtagagaaattcaagcctgctgcagcaatttgcagaaataataaggaactgaatggtaatcactaatacaatggggaaaatatctccagagcatatcaagaccttcccggcagtccctcccatcacaggcccagaggcctagaaggaaa

SEQ ID NO: 8818 - DNA, 552 bp, Homo sapiens
  MAP TO AC009044.3; EXPRESSED IN HEART, SIGNAL = 1.9; EXPRESSED IN BRAIN, SIGNAL = 1.9; EXPRESSED IN PLACENTA, SIGNAL = 2.1; EXPRESSED IN HELA, SIGNAL = 2.1; EXPRESSED IN ADULT LIVER, SIGNAL =   2; EXPRESSED IN BONE MARROW, SIGNAL = 2.9; EXPRESSED IN FETAL LIVER, SIGNAL =   2; EXPRESSED IN LUNG, SIGNAL = 2.1
acatgggaggccaaagaaacgcaatttccaactcaagaaactatcacacaaaatcccaacatgttctagacaccactggataagaaatttgagggagtaccccgaataaacaaacattcacaatcattcacaatcattcagcattacctcccattctacagggggataatccattttaaattaattctgaattcatcaaaatacagttcacagaataattatactggtaatgattcaggagacactttaaaagagtattatagctttattgtgatatatatagttcaaatacattttgcccatttaaaacgtacaatgtttggtaagtttcagtacaatcgcagatatatgcaaaccgtcaccacagtcgagagaagtcaagataaaacaagagaacaggaagagaaagaaaaacaaagagaaggagagaaggaaaagagaagagatttggaggtacatattccagggtgagttcttggggtctttattgttttaggacttctcagtattcgtcgtggtaacagagctttatctgcctggttgccaaataat

SEQ ID NO: 8819 - DNA, 574 bp, Homo sapiens
  MAP TO AC016910.2; EXPRESSED IN BRAIN, SIGNAL = 1.3; EXPRESSED IN HELA, SIGNAL = 1.8; EXPRESSED IN ADULT LIVER, SIGNAL = 1.6; EXPRESSED IN FETAL LIVER, SIGNAL = 1.8; EXPRESSED IN HEART, SIGNAL = 1.7; EXPRESSED IN PLACENTA, SIGNAL = 1.4
caagaggtgaaaaagctgccaaagataatgaagaacaaatagatgtgcaggtggaagtggagagatgatacccttagattttcagagaaggtcagcagatggttctctaaggggaagggtactccttgagtgcaagaccaaaaatccttccttagcagagaatcaacagggattgcaggttgctggtgctaagagtttccctgtgcctgtgatatggacaggaggcagggaaatactgggtagaataggatggtgtccctgtcaaggggctccaccctcaagcctggacctgtggcccaaagtaagaactacccctgttttcccacctgaatgttgccttttggctcaccctgctccctatcctgtgcccctaagaaccccagaccctaaactcagtggacacacacacacagaagggagaagtgtctgaacatcgagaggagaagcagcagctggacgttggagactatggtcagagaggagtttggctggggatggctgagctccagggagagattaccttccttttccacccactttccagctccccttcccactgagagccacttccaca

SEQ ID NO: 8820 - DNA, 503 bp, Homo sapiens
  MAP TO AC025251.1; EXPRESSED IN BRAIN, SIGNAL = 3.2; EXPRESSED IN BONE MARROW, SIGNAL = 3.4; EXPRESSED IN HELA, SIGNAL = 3.4; EXPRESSED IN LUNG, SIGNAL = 3.8; EXPRESSED IN PLACENTA, SIGNAL = 2.9; EXPRESSED IN HEART, SIGNAL = 2.8; EXPRESSED IN FETAL LIVER, SIGNAL = 3.5; EXPRESSED IN ADULT LIVER, SIGNAL = 3.6
agggctagttctctcctgcctcaagaccttccttttcagtgttttcctagccattcttctgtgtttatttttctatatgaactttacaatcaacttgtctatgcctcataaaaaagtagcgaaattttaactacctcaacgtgcagcggtggagagagaacaaaattattgcaataaaatttctcatttggattatgagacaatgggaaataacactctatggtcctcagtccataaaacatgacacacttctggactggaataggatgtattgccctagcaataggaatgagaccctcagtcacccaacctgtgagcctctggttttgctaccttggagtatgttcattgtcctccatggccacatctgagataggcatttggattatcttaataaagctgctctcattagcagcctgctttctctcggtgcctctaggaactagagattgacttaggccagtggttctcgaagtgtagcccctggacaagcagcaccagta

SEQ ID NO: 8821 - DNA, 538 bp, Homo sapiens
  MAP TO AL158137.1; EXPRESSED IN HEART, SIGNAL = 1.9; EXPRESSED IN FETAL LIVER, SIGNAL =   2; EXPRESSED IN HELA, SIGNAL = 2.2
gtaaactaatgggcttggcgaggtagcgcacacctgcaatcccagcactttggcacttggggaggccaaggtgggaggattgcttgaggtcaggagttggagaccagtctgggtaatacatggagaccctgcctctccaaataaaataaaataaaatgatgtattcataaagaacagaagagagtaaagaacttctctgaaatcctgtcttgtgttacgttggtattaaaggacgacccagggtgagtttaactcatatcatcaaaattaaactatattcaataggattacatttctaaataatgctgtaatttaaatttttctaatacagatgaagaactagcactggatggcagttttgatccagacctaaaaaactatcacaaactccattgggaaacagaattcaaacctgtggcacagcagcttctaaaccgaattcagagacatcacaccttcctggaacccctgcccattccctctttctaacatgatgcagattaacagtagaaacgagaactcacgtctccctcattct

SEQ ID NO: 8822 - DNA, 533 bp, Homo sapiens
  MAP TO AL157912.1; EXPRESSED IN ADULT LIVER, SIGNAL =  16; EXPRESSED IN BRAIN, SIGNAL =  10; EXPRESSED IN BONE MARROW, SIGNAL =  35; EXPRESSED IN FETAL LIVER, SIGNAL =  36; EXPRESSED IN HELA, SIGNAL =  35; EXPRESSED IN HEART, SIGNAL =  15; EXPRESSED IN LUNG, SIGNAL =  70; EXPRESSED IN PLACENTA, SIGNAL =  19
accagcacagagttgcagtggtctgtcaccttgcaaggaatgccgtggggcttgccagtgttgtctcctgagatgcctctctgcaccgggacagtggagagcttgacaaagatgatgactccttggatggtagtaggtaccgtcttggagcatttaacacccagaccgacatggatattttagtccccaatggcaacaagtgccttgaatctggaccactggccagtgcaagtctccatttttactggcataatcttaaactcattcttgagggttgcccccaggaaaaagtcgatgatctcagcctccttgatgggcagggagaggagatagagcttcagggacttaatcttcatgtccttgactatgctgcccagtttgatgatggggacctactccttggccttggccttgccaccaccagctccgtggccccagccttagccctggatgccactgctgtggcttcccattttggggcctctaggccctcccactgcactggtctcattcgccatttggtgttttcttgg

SEQ ID NO: 8823 - DNA, 565 bp, Homo sapiens
  MAP TO AC012576.3; EXPRESSED IN BRAIN, SIGNAL = 2.6; EXPRESSED IN BONE MARROW, SIGNAL = 2.3; EXPRESSED IN FETAL LIVER, SIGNAL =   2; EXPRESSED IN LUNG, SIGNAL = 3.4; EXPRESSED IN HEART, SIGNAL =   2; EXPRESSED IN PLACENTA, SIGNAL = 2.1; EXPRESSED IN HELA, SIGNAL = 2.4; EXPRESSED IN ADULT LIVER, SIGNAL = 2.2
ggaatgtccagtcaggcatcctttaactgacatagtatgagagttaaaaaacaaaacaaaacactttattagaaataatagagatagggcatgttagtagaaacttgttaaatcttacccttatagtcactattacctgaaggagggtgatgttctcaggaataaaaagaacaggaacaaggtatttttcaggtttctgcagaacatccatcagactatctgtgttagaacccttgaggacataagattaaaagacatgtgggagaggaaaaatggttaaaatgtgtgttttgcttaattaattgtagcatgatagtcattattatcaatttgacaaagatacattgtttgttggttgcatctgaacaagaaaacataaataatctattatagatcaggtctagggtcattaccttgatttaaactcagcatggacagatgtagatgatagatagatgatggatagatgatagatagacagacaataatagatggatagatagatagatagatagatagataattagtttaaaacagacagcaggcttctgcttgctgtgactct

SEQ ID NO: 8824 - DNA, 501 bp, Homo sapiens
  MAP TO AC018573.2; EXPRESSED IN FETAL LIVER, SIGNAL = 7.6; EXPRESSED IN HEART, SIGNAL = 7.2; EXPRESSED IN BRAIN, SIGNAL = 7.5; EXPRESSED IN PLACENTA, SIGNAL = 8.1; EXPRESSED IN BONE MARROW, SIGNAL = 4.8; EXPRESSED IN ADULT LIVER, SIGNAL = 2.4; EXPRESSED IN HELA, SIGNAL = 7.8; EXPRESSED IN LUNG, SIGNAL =   7
aagaaagattccgcctcctctcataagcaagcgcctaatggtaattgtagagtttactaagtcaaacacttactactcagcattgagagaagctgctgctgctaatgctgctgctgctgctgccgccgccgccgctgctgctgctgctgttggtctgaggctgcagtaggtttctgtgcagcattgcagaatccacacctagagaacagaagacacagacacgtacgtctactacccttgttagaaggaagctttggatcttcggtgggtaaggagatctatctagctattttgtccagaaactgtgagaaaaggaatgatcatggaaaagactgttcatcagacatgcttaaaatggattatgttaatttgtcttcctttggtggtggtgggggtgtccagatttgcgactagcaaaatatagtgaggactatattctgataggtgcccttaggatactttttttgctattcataaaaaggctaaccttgatgcatgcaa

SEQ ID NO: 8825 - DNA, 555 bp, Homo sapiens
  MAP TO AL138849.5; EXPRESSED IN BRAIN, SIGNAL = 3.5; EXPRESSED IN HELA, SIGNAL = 4.5; EXPRESSED IN ADULT LIVER, SIGNAL = 5.1; EXPRESSED IN BONE MARROW, SIGNAL = 4.4; EXPRESSED IN FETAL LIVER, SIGNAL = 4.8; EXPRESSED IN HEART, SIGNAL = 3.4; EXPRESSED IN LUNG, SIGNAL = 7.9; EXPRESSED IN PLACENTA, SIGNAL = 3.9
aagaatgatgcactgtgggctaattaacagtactacaagaatctctatcaccttttcaaagctttttttaaaaaatgacatatttaggcaggaaactctttaaatagtaaaaatgaaaactggaacaacagtacttaccctaagtttccaggaaaaaaagtataaagcataagacatgtaaactgaagttatataattaagttttctaaaaacctgccatttatttgatgctttcaatagtgcatgtgccttaaatactgcaacctagataaaatgcaacagatgtatatttacatagaatgaagaaatactgcttattgggaggggaaaatggggaggtgttggtcaaagggtacaaagtttcatttgtgcaaaataaataagttctggagatctgtacaaagtagttctggagatctgtacagattaataatactgtattatattcttaaatttgctaataaggtacctcttaagttctctaacaacaaaaggaaaagaagaggagggtacttttggagctgatggatggataggtttgtggcattgacagtg

SEQ ID NO: 8826 - DNA, 595 bp, Homo sapiens
  MAP TO AC011463.3; EXPRESSED IN BRAIN, SIGNAL = 3.2; EXPRESSED IN PLACENTA, SIGNAL = 2.7; EXPRESSED IN BONE MARROW, SIGNAL = 2.6; EXPRESSED IN HELA, SIGNAL = 3.1; EXPRESSED IN LUNG, SIGNAL = 3.9; EXPRESSED IN ADULT LIVER, SIGNAL = 3.5; EXPRESSED IN FETAL LIVER, SIGNAL = 3.1; EXPRESSED IN HEART, SIGNAL = 2.8
tgggacttgagaagactgggcttctgggccttttttatgtcttgactttcctggaaagtccctgagaaaggcctggagcaccctttttgagtgtgagcactattccagctcttttcccaggccatgggaaaccaaagccaggacattcaaaatgagacaccccatagttattcttctttcttttggggaaaaaaaaacacatcgctctccttttgtgccactgcaaacattgcgacgtttttggcgggaaggggaagttattttgtgtatgtgtgaactagaattttgatagacaggataagttgtaatccaattctaaactatagattttcaagcagattgatgcaacaaattgttagcaaatagcagtttgcaatttgatgctaattagacataaggcaaatatgtgccatgacaaattagcagcgaaccatactgcagaggattagcgagagctggcacagctcgcgcccggcttcgcacacctccctgtcgccgtcgtcagcgtcaccgtcggggcctgagccagcctcgcctctctgtgagcaggaagctggagaggagaccaggagcctcccaggacaagtctcagagc

SEQ ID NO: 8827 - DNA, 593 bp, Homo sapiens
  MAP TO AL138829.2; EXPRESSED IN ADULT LIVER, SIGNAL = 7.6; EXPRESSED IN HEART, SIGNAL =  10; EXPRESSED IN LUNG, SIGNAL = 1.3e+02; EXPRESSED IN PLACENTA, SIGNAL =  18; EXPRESSED IN BRAIN, SIGNAL =  14; EXPRESSED IN FETAL LIVER, SIGNAL =  37; EXPRESSED IN BONE MARROW, SIGNAL =  14; EXPRESSED IN HELA, SIGNAL =  26
cagcatgacaaggtcattggtcacttcaccatagtggacaaagccacccagaggattggtgctcttgtcagacaggtcagagtcagtggaggcattgttcttgatcagcttgccatccttgataaggtagccctggccaatcttatagatcttcttgttgatctcagtgcggtgacggtagcctttctccccagcacgtgccacagagaaggccacacgagcaggatgccatgccccaatacaggccaccttgcacaggcctcggtgggtcttgcagggcagcttcttggtgtgccaacgactggtgacccctttgtagcctttgcccttggtcaccccaatgacgtcgatcatctcatcctgcccaaacacttggttcacatttacctgctgctcgagcctctcgcagacccagtccagcttctcagccacggtgcctccgttcacctggatctccatcaggtgggccttcttctggcgcagaggaagcaggcgcatctgggtgtgggcaatgacgcggatgacgtggcagtatttcttcatgctgctgaagtccttctccagctgcttcttgacatcctcatcctgccatt

SEQ ID NO: 8828 - DNA, 503 bp, Homo sapiens
  MAP TO AL138741.2; EXPRESSED IN ADULT LIVER, SIGNAL = 4.7; EXPRESSED IN BRAIN, SIGNAL = 6.5; EXPRESSED IN PLACENTA, SIGNAL = 7.7; EXPRESSED IN BONE MARROW, SIGNAL = 6.4; EXPRESSED IN FETAL LIVER, SIGNAL = 9.6; EXPRESSED IN HELA, SIGNAL = 8.7; EXPRESSED IN HEART, SIGNAL =  11; EXPRESSED IN LUNG, SIGNAL = 9.1
agaatgaaggtccatggcaggagctgttgggagtgtcccactatgtggaaaacctggccaaaccagctgagctaccagccacagacctgggtccacaaacccataaatagcctcatgtgcaatctgctgatcagccacaccagctctaagtcccacaagtaccgagactatgacccttgtaccctgtggttcagtgttctccaaagttagcaagtgccagaagcaccaggaggagctgctaaagcagagcttgcagggccccacacccagagtgtctgattcaggatttctgagataggacttgaaatttttcattttccacaggatgcagatactgctggtccagaggccacacttggagaaccactggtgtagtgcaacctgctgatagcatgcctggagcccctgcacccacgcgggtgcacccatccctcagctactgtggatattggctgctaatggctcccagctgcccctctgctggggtctcaccatctgctgat

SEQ ID NO: 8829 - DNA, 501 bp, Homo sapiens
  MAP TO AL138761.3; EXPRESSED IN PLACENTA, SIGNAL = 2.4; EXPRESSED IN BRAIN, SIGNAL = 2.1; EXPRESSED IN BONE MARROW, SIGNAL = 1.9; EXPRESSED IN FETAL LIVER, SIGNAL = 2.2; EXPRESSED IN HELA, SIGNAL = 2.3; EXPRESSED IN ADULT LIVER, SIGNAL = 2.4; EXPRESSED IN LUNG, SIGNAL = 2.8; EXPRESSED IN HEART, SIGNAL = 1.8
ttgaggaacagggtaccagccaactggtgctggtgttatgaagggttatgatgaggttagttctgtgagtgttggaaaaactacaaactgtattcaacagctgctacagaaagaaactgctgatgctggagcaaaaaaaaaaaaaacctctacaagggtgatggtcaaagtaacaagcagacaggaagttcacaggaaacaagacaaaggtgtaagtcatttcttcctccttctccttgcagcctccctctagtgccctatacttttgaaacagaaatgagctgctagcaaggcagaaatgtgatctgcagtctttgaaccagcatcacaaagcatagaagggcgtatttggaactgagattaagaactggcataatccttcaaaacctatgagcaacacagatgggagagctaaggtacagagtagagtaaacgtttgggtaataaatatccaaagttccaaaaagctattaagtgaagagagaggaaaccgcactgaag

SEQ ID NO: 8830 - DNA, 574 bp, Homo sapiens
  MAP TO AL133549.2; EXPRESSED IN ADULT LIVER, SIGNAL = 2.8; EXPRESSED IN FETAL LIVER, SIGNAL = 2.7; EXPRESSED IN PLACENTA, SIGNAL = 2.9; EXPRESSED IN BONE MARROW, SIGNAL = 2.1; EXPRESSED IN HELA, SIGNAL = 2.3; EXPRESSED IN HEART, SIGNAL = 2.8; EXPRESSED IN LUNG, SIGNAL = 2.6; EXPRESSED IN BRAIN, SIGNAL = 3.2
tagaagcagcagacttgcccatgatagtagaatgactttttccattaagactatctatcttgaataaggatcaagtctccgtgaggattacctctttatcattctatttaaatgagttgcaactgcgttcaataatgaaatgctttcatggcaggttttatactataccaaccatatagactcccagcttgacttttttttaagaggaaaaataggtagaatgctaattcttgtcactaatgttagctgcatatttgtcttttctcttggaacagctcaatggttattcgggacttaaccttacgcagtgctgctagctttggctccttccacctgatccgtctactctacgacgaatatatgttttacttagtagaacatcgtgttgctcaggcaacaggagagactcctatagcagtcatgggcgaggtaagagaggctgaaagagctgtgacccactgggttattaaaaataagccagaattacacttcagtctaaatacattattgattaaaaccatggttcctaaccaagtcagcctcagagccaggagggactgtggagttattgcaa

SEQ ID NO: 8831 - DNA, 560 bp, Homo sapiens
  MAP TO AC018843.2; EXPRESSED IN HEART, SIGNAL =   2; EXPRESSED IN PLACENTA, SIGNAL = 2.4; EXPRESSED IN ADULT LIVER, SIGNAL = 2.6; EXPRESSED IN BONE MARROW, SIGNAL = 2.6; EXPRESSED IN FETAL LIVER, SIGNAL = 2.5; EXPRESSED IN HELA, SIGNAL = 1.9; EXPRESSED IN LUNG, SIGNAL = 5.6; EXPRESSED IN BRAIN, SIGNAL = 3.4
tctttttgacgtttgggtcctgtttccctgtgtctttttggggcgccctttctgtatgtcacacgctgctctgctttgcggaaggtcaggggaaatgccgcactggcttcgccgcaggccctgccccgcgtgatgcatgccctgaatgcagacgccctgcctcggtcttgcatgcgctgggctagcaaggtggttctaggccaagctcttaccggcttccgagaggtcccgcagggagctgctgagggcgctgcgcttgaggccctcaccgctggcatagctgtcgtccaggcaggcccggctcagtgttccgttgcccgactcctttttgaggctagagcactgggacatgctgggccgcacgacgcctttctgcttctcgagctccgctggaacagagagggtgagggtcctggtgagaggagcacagcctagagtgggcaggagacggggccttctgcttggagctagcactgtcctgagccaccatctgcttggaatggggaagggttgtttctgggaaagagggtgtgatggccaccctggacaaaagagcagaa

SEQ ID NO: 8832 - DNA, 577 bp, Homo sapiens
  MAP TO AC011510.3; EXPRESSED IN BRAIN, SIGNAL =   2; EXPRESSED IN ADULT LIVER, SIGNAL = 1.9; EXPRESSED IN HEART, SIGNAL = 1.9; EXPRESSED IN LUNG, SIGNAL = 2.4; EXPRESSED IN PLACENTA, SIGNAL = 1.7; EXPRESSED IN HELA, SIGNAL = 2.4; EXPRESSED IN FETAL LIVER, SIGNAL =   2; EXPRESSED IN BONE MARROW, SIGNAL = 1.7
attgctggtgtaggaccctgggcatggggcctgaacacaagggccgaggtgggagggagaaagaggagagatgctggagagacagacagcccggcacaaatgcccaggtcgggggcgggagaggcagtgagagcaacgccctgaaagggacagacagatgtgcagagaagggatgcacacacatgcacagagacactcatactcacagagacatgcagagagagaaagagagaggaacccaattgaggtccccagggacacctggctggggacctgccaggtcaccatgcccattcagagagggggtccctgcacccttcccacacctgtgccatcttcagcaggaaggcatcgacaaggtcacgtgcggggcccgaagcatccaggttcccctggtgctgctgcacctgccggactgtgaaggcagccaaggtgctgacgtggtggaggagctgcttgtgggggcctggcaggggccgcaggaaccaggagaacatctcgtaggtctgtggggagaagggcagctagttctcatgggaccttggcaggaaccttcagggaaggtagttggagaggg

SEQ ID NO: 8833 - DNA, 593 bp, Homo sapiens
  MAP TO AC019246.4; EXPRESSED IN FETAL LIVER, SIGNAL = 2.6; EXPRESSED IN LUNG, SIGNAL = 2.2; EXPRESSED IN BRAIN, SIGNAL = 3.1; EXPRESSED IN ADULT LIVER, SIGNAL = 2.8; EXPRESSED IN BONE MARROW, SIGNAL = 3.5; EXPRESSED IN HELA, SIGNAL = 2.3; EXPRESSED IN HEART, SIGNAL = 2.7; EXPRESSED IN PLACENTA, SIGNAL = 3.5
attttaatttggcccatccctttgtttcccttaagggatacttttagttaatttaatatctatagaaacaatgctaatgactggtttgctgttaataaatatgtgggtaaatctctgttcggggctctcagctctgaaggctgtgagacccctgatttcccacttcacacctctatatttccgtgtgtctttaattcctctagtgccgctgggctagggtctccccgaccgagctggtctcggcaggaatcatcccagatgccctctctctaatccctaggtaattaatcaatcagcaattgttataatatattcttctaaatgtcatccaaatctttttattttctgctccacttttaccgttaagctgttgtggatttagatgatcaccaacccttgtttgaattactgcttcctaagtaatctctattcagtagtatctctctctctttatctctttctctctctcatccattccattattgtagccagagtgtacttttaagacagcaaaccctttaaggttccctttgttcttagtggactttccactctttatctcaatacaggtatcatttccaggctctccatct

SEQ ID NO: 8834 - DNA, 585 bp, Homo sapiens
  MAP TO AC021876.2; EXPRESSED IN HEART, SIGNAL = 2.9; EXPRESSED IN LUNG, SIGNAL =  11; EXPRESSED IN PLACENTA, SIGNAL = 6.3
cctgaggatgcagagaaaggcatagctcagcgcacaggcttgcttaagagcagattataagactaacaattcagcatcttatagtttgagtaacaatgaggtggaattcaatttcatagaaatgtaatgactttccctttgtaaaatggatctgaccttcctctctccccttctctgtgccctgtgcgccctcgcccacctcccctgtcgcagcattcccacggaggtctgtaccatcatttctgaccccacctgcgagatcacccagaacacagtctgcagccctgtggatgtggatgagatgtgtctgctgactgtgagacgaaccttcaatgggtctgggacgtactgtgtgaacctcaccctgggggatgacacaagcctggctctcacgagcaccctgatttctgttcctgacagaggtgagttttgttttatggccatatgagcatttcatactgcaagtaaagtgtgtatcccatactaaagctatttaggcctttgttttcaatgtttaattctatttcagtacaaaattcattgaactcttattaataaggatctgaggactggcattacaatcca

SEQ ID NO: 8835 - DNA, 547 bp, Homo sapiens
  MAP TO AC020912.3; EXPRESSED IN BRAIN, SIGNAL = 2.3; EXPRESSED IN PLACENTA, SIGNAL =   3; EXPRESSED IN BONE MARROW, SIGNAL = 2.7; EXPRESSED IN ADULT LIVER, SIGNAL = 2.6; EXPRESSED IN HELA, SIGNAL =   4; EXPRESSED IN FETAL LIVER, SIGNAL =   4; EXPRESSED IN HEART, SIGNAL = 3.3
aatgtgaatctgaggccaggtttaggagtactgggaaaggttttaatggaaccaagctcaagcactgtgcacagaagctggggtgaggagagggggacaattggggggcaggcctttgtagcctcttttgaaaggagactgcctgtggcctgctctgcaggagccccctccagaatcactcttgatgatcatcagggctctttattgacaaaaactcagcccaaactcacataaaagaaaacagaatctactggtttatttggttggaaagttcaagggattcctttggacagattcataaacaaagtgtctcttcctttctcagttctgctgcttctgtgctggtttcactctcaggcaggttttcctctgatgtgttggtggtcagatcgcagaggccaaggttctgcatccactgctggaggaaagagatgcggtcagcctcacccaacccacgtggagtgaagatagacaaagagccctctgcaaaggaaaattggagtgcagctgccagacgcaggagtgatcctgggcaagtgaaaatgat

SEQ ID NO: 8836 - DNA, 588 bp, Homo sapiens
  MAP TO AL159191.1; EXPRESSED IN PLACENTA, SIGNAL = 9.6; EXPRESSED IN BONE MARROW, SIGNAL =  10; EXPRESSED IN FETAL LIVER, SIGNAL =  14; EXPRESSED IN HELA, SIGNAL =  16; EXPRESSED IN LUNG, SIGNAL = 6.7; EXPRESSED IN ADULT LIVER, SIGNAL =  11; EXPRESSED IN HEART, SIGNAL =  12; EXPRESSED IN BRAIN, SIGNAL = 9.1
cagggtctcactctatcgcccaggatggaatgtagtggtgcgatcaaggctcactgcagccagctgtttcacttttaagtggacacacaagagaaatgagtgtacgtgtccattaaaatatatgcacaagaatgcttatggctgctttaaacacaaaagctaaaaattacaaacaaccaaaatgtctatcagtgggagaatggataaattgtgatgtatttatctgatggaatactacagagcaacgaaaaagaacaaactactgttattgctacatgcaacaacatagatgcatttcacagacataatgctgatcaaattaaaccagacacaaaaacctatagactggataattccatgtataggaatgtcaacaacagtgacagaggtcagagtggtggttatgtatgaggactgactgggagcctcatcttgatctgaatgatggttatatgggcgcatatatatgtaaacatttattgagctgtatatttcagacctgtgcactttacacaccatgttgcaataacattttaaacaatatgatcactatctatatgtagttttagtgctccatttggactggtc

SEQ ID NO: 8837 - DNA, 575 bp, Homo sapiens
  MAP TO AC007227.3; EXPRESSED IN BRAIN, SIGNAL = 1.8; EXPRESSED IN ADULT LIVER, SIGNAL =   2; EXPRESSED IN HELA, SIGNAL = 3.9; EXPRESSED IN HEART, SIGNAL =   3; EXPRESSED IN PLACENTA, SIGNAL = 4.6; EXPRESSED IN LUNG, SIGNAL =  11; EXPRESSED IN FETAL LIVER, SIGNAL = 2.2; EXPRESSED IN BONE MARROW, SIGNAL = 2.5
agtttgcgctttttggtgacgctgcccccaccctgtgtctgggatgagtgagaggaagcacggccacggctgcgctgcgaggtagggctgggggacaggcgtagcctggggagagggagaccaagtgggggtctagtcaaggccagttgccggccagaggacactgccagcacctccccgacgtctccccagcccacctctcctcctcgccctccaagagcttgcggtaggcgtggatctccatgtccagggccagcttgatgtccagaagctcctggtactcgtccagctgctgctgcatccttgcccgcatctcggccatctcccgctccttttccgccagcagccgccggctggtgtcccgctcacgggccagtgagtcctccaggtctcgaagcttcgcctccttggctgccagctgaaggggggtgggagggtttggtgagctcccaagggccctaagtatggggaaggagggacgtgggtcggtgtaggagacacctggctactctctccaggatctgcaatcagagcttccccagagccctcatcagagccagctctgaacatcacaa

SEQ ID NO: 8838 - DNA, 553 bp, Homo sapiens
  MAP TO AC007341.3; EXPRESSED IN BRAIN, SIGNAL = 3.8; EXPRESSED IN PLACENTA, SIGNAL = 2.7; EXPRESSED IN ADULT LIVER, SIGNAL = 3.2; EXPRESSED IN BONE MARROW, SIGNAL = 2.8; EXPRESSED IN HELA, SIGNAL = 2.7; EXPRESSED IN LUNG, SIGNAL = 5.3; EXPRESSED IN FETAL LIVER, SIGNAL = 2.8; EXPRESSED IN HEART, SIGNAL = 2.7
aggggttaaaatctgagggctctctgcaggcagcactcccagcattttacagctgtctcagttaagggagtcaccttgctctaggccatactcccttttcagagcagccttattcaataactgatggatgtgcacgtgcaaaatcccagctctgtcacttgaatttgagggttgtagctgtacagttccatatacagttgactgaggactttgttgagactatattacagtccaacttttcctgttcagtaccactttattcacatcccttccataagtgttgattccaaaagcttcctgtacactagtctccatttcaaattctgctttctggggaataagatctgcaacagttggtattagaagtagttggagaaagcagatgctgagatgggattttggagctggatcacttgctgctgtccaagtggcaaggaggactcgttggtggtaagaatacagatagttcctggcatgaggtggcaatgcaattattagagtttttactgctggttaactaggatagcatactagcagaagggaattcacaagc

SEQ ID NO: 8839 - DNA, 560 bp, Homo sapiens
  MAP TO AC011912.3; EXPRESSED IN HEART, SIGNAL = 2.8; EXPRESSED IN BRAIN, SIGNAL = 2.6; EXPRESSED IN PLACENTA, SIGNAL =   2; EXPRESSED IN ADULT LIVER, SIGNAL = 2.7; EXPRESSED IN BONE MARROW, SIGNAL = 2.1; EXPRESSED IN FETAL LIVER, SIGNAL =   3; EXPRESSED IN HELA, SIGNAL = 3.1; EXPRESSED IN LUNG, SIGNAL = 1.7
acagcatttgcagtgacctggatgagattagagactattattctatgtcaagtaactcaggaatggaaaaccaaacatcgtatgttctcaccgatatgtgggaggtaagctatgaggacgcaaaggcataagaatgatacaatggactttgggagacttgaggggaagagtgggagggggtgaggaataaaagactacaaatatggtacagtgtatactgctcaggtgatggctgcaccaaaatctcacaatcaccactaaagaacttacccatgtaaccgaataccacctgtaccccaaaaacttatggaaaatttaaaaaaaaattaaaaataaaagctatggtcctaccccaccctgctagcacaggccaagtaggcagcctagacttctaacctcacaaggctgtaataaggtgtcccaacatctctgacagagtggtatccagcgagggagctgagactatctttcctgacagctggtaatgaggcctccccgcaatattggtggaaatcatatgaggagcctggacttccaactcactcagcagcaaggaaaca

SEQ ID NO: 8840 - DNA, 541 bp, Homo sapiens
  MAP TO AL096814.26; EXPRESSED IN FETAL LIVER, SIGNAL = 2.5; EXPRESSED IN BONE MARROW, SIGNAL =   2; EXPRESSED IN HELA, SIGNAL = 2.5; EXPRESSED IN ADULT LIVER, SIGNAL =   9; EXPRESSED IN HEART, SIGNAL = 2.3; EXPRESSED IN LUNG, SIGNAL = 2.9; EXPRESSED IN BRAIN, SIGNAL = 2.1; EXPRESSED IN PLACENTA, SIGNAL = 2.7
aggaggtcctagaagccgagcagccagggactttgtcagaccacacacccccattccccgtaggacacctggatttccaagaactcagatctccttctaaattctacacacctctctttctttatttttagagtcttcttcaagatcaaaagccgaaatgcacacatgaaaactcacaggcagcaggaggaacaacagaggcaaaaggctcagaaggcggcttttgcagctgagatggcagccacgattgagaggactacggggcccgtgggggcgccggggctgctgcccctggaccagctgagtctgatcaaacccatcaaggatgtggacatcctcgacgacgacgtcgtccagcagttgggaggtgtcatggaagaggctgaagttgtggacaccgatcttctcttggatgatcaagattcagtcttgcttcagggtgacgcagaactataaagccctgtgtgtcacttagagacagtgaaaacccacggcctccatcttcattaatcaggaaacctggactgcctgcttgttttgt

SEQ ID NO: 8841 - DNA, 569 bp, Homo sapiens
  MAP TO AL138970.2; EXPRESSED IN ADULT LIVER, SIGNAL = 1.8; EXPRESSED IN HEART, SIGNAL = 1.9; EXPRESSED IN BRAIN, SIGNAL = 1.6; EXPRESSED IN PLACENTA, SIGNAL = 1.4; EXPRESSED IN BONE MARROW, SIGNAL = 1.5; EXPRESSED IN HELA, SIGNAL = 1.7
atcaaaacgaaagtgacgggctaatctcattcatgaacatagataccaaagtcctagacaaaatattggcaagctgaatccagccatgtataaacaaagataatgcataaaaccaagttgggtttatcccaagaatgtaatactagaaaattgattaatgaaatccactccatttacagattaaaggagaaaaaaaacatgatcatttcagtaaacacagagaaaagtattcaataaaatgtaacattaactcatgttttttttaaaacaaaagtcttcttaaactaggaatgagagggaacttccacacccaatcatgggcaacctcaaaaatgaaagaaaggaaaaacaaaaaactaccacaaacatcattctttatggtgaaatgttgaaaatgttgccttcaagacaaggaaggggacaagaatgctcactattaacgtacctattcaacttggtactgaaggcatcaatcagagaagtataacctcaaaaagactggaaacaaaacaaaaactgtcattatttgcagatgacttaattacttacctggaaaacatgccaaatga

SEQ ID NO: 8842 - DNA, 565 bp, Homo sapiens
  MAP TO AL133474.7; EXPRESSED IN BRAIN, SIGNAL = 1.6; EXPRESSED IN PLACENTA, SIGNAL = 1.4; EXPRESSED IN HELA, SIGNAL =   2; EXPRESSED IN FETAL LIVER, SIGNAL = 1.8; EXPRESSED IN ADULT LIVER, SIGNAL = 1.7; EXPRESSED IN HEART, SIGNAL =   2
aagaaagcaaggaagctggcaaagacgccaagtaacatgtcaaagagcctgaagatcaaattgaaaaagttaccactggccagatataggataatttgaggaccaataaaaataataacatatcaaataagttaaaatgcatgagttcataaagatactaaaaaacaagcacttcatttgtcacttttggaagctgttggggcaccaacttattttggaaactgataaataaagggaaaaaatcaaacattttaacatttttgtgttatttttctgtttgaactatacctggggtaagcagataattggcaaagagaattctctttttaggtgtactgtagtcaagcttatgaactcaaaggaaataattaagaatgatcactttgcaacccctaacccgaaccctaacactaatcccaacttcagtggacctaggaaatttatcatcattggctgctaacaccacaaacagaaattcaatcagacattatgaatttttcattgtgcataatattttgaagtattttgctaaataaaatattaaaccttcatttgattgggcttc

SEQ ID NO: 8843 - DNA, 580 bp, Homo sapiens
  MAP TO AC010352.4; EXPRESSED IN HELA, SIGNAL = 4.5; EXPRESSED IN BRAIN, SIGNAL = 3.5; EXPRESSED IN ADULT LIVER, SIGNAL = 2.7; EXPRESSED IN BONE MARROW, SIGNAL = 2.4; EXPRESSED IN FETAL LIVER, SIGNAL = 3.8; EXPRESSED IN LUNG, SIGNAL = 7.2; EXPRESSED IN HEART, SIGNAL = 3.8; EXPRESSED IN PLACENTA, SIGNAL = 2.7
tgggcagagtgtaagtgacggtcctccaccccagcgcagcttgcagctctgtgtccaagcactgctgagcacagctcacttggaatgcaatttcacacgatgaacataccggcagctgatcagttatgtttgcttgttttctcttgaaaattcagattaacagctgattggcaggtgaaagagaatgagaaagaacttctggataggtcaaactctaggcagaagcctgctctgcagaaagtttttaatgctacggataggtcgaacatcattctggtgtttgcgccgctcaatgaaggaagtcagtctggacgtgtcgaggacgcccgtgcttctgccgttgccggcctgcagccactgctcctggagggccagcgcagccgagggacgcttggcggggtcctcctgcaggaggaagcacacgaactccttggccttctggctcactcctttaaagtagtcatctgggaagctaaagtctaagcggcaaatgttcaggcaggtctcttccacactgtcatccaggaagggggacacgccactaagaagtacgtatgtgagcactccaacactccacgta

SEQ ID NO: 8844 - DNA, 537 bp, Homo sapiens
  MAP TO AC011462.3; EXPRESSED IN PLACENTA, SIGNAL = 6.7; EXPRESSED IN BRAIN, SIGNAL = 2.1; EXPRESSED IN BONE MARROW, SIGNAL = 5.7; EXPRESSED IN LUNG, SIGNAL =  14; EXPRESSED IN ADULT LIVER, SIGNAL = 2.7; EXPRESSED IN FETAL LIVER, SIGNAL = 4.1; EXPRESSED IN HELA, SIGNAL = 3.4; EXPRESSED IN HEART, SIGNAL =   3
agccctccaagctaaaggagacagatgctcagcccaagcacagcagcagccaggtgtccaacctggagcacctggtcagcagatggcagtcatgcccccagcctggaaggcctccatccaggctacaaggctcacctgaagcaatagttggtgtccagggctcggcggtgccgggagctttgcagatgctgggccctctccagcggggtggccatgagaagcaggaaaggccggttcatgccatgaatggtggccaggtcacctcggcggccggtagtgaaccctgctttggtgtgggagtcaggggataggggacatacacacacactctcagagggatagataagtggggcgtggggcagatgggaacacacacacgcacacacgtcacaactgggcatggccggggaagcaggcctcaccgttgatgtccacttgcagtgtgttatccctgctgtcacaggagcagtgggcgctaaggcgaaagccctcaatttcccctgtaggagtggcgagagggaagccagtctgagagtg

SEQ ID NO: 8845 - DNA, 500 bp, Homo sapiens
  MAP TO AL133551.4; EXPRESSED IN PLACENTA, SIGNAL =  10; EXPRESSED IN BRAIN, SIGNAL =  11; EXPRESSED IN BONE MARROW, SIGNAL = 8.9; EXPRESSED IN FETAL LIVER, SIGNAL =  19; EXPRESSED IN HELA, SIGNAL =  20; EXPRESSED IN ADULT LIVER, SIGNAL =  11; EXPRESSED IN LUNG, SIGNAL = 7.1; EXPRESSED IN HEART, SIGNAL =  16
tacagccttgaactcctgggcttaaggggtccttctgcctcagccttccaagtaactgggactactaacatgtgtcaccatgcccagctaattattttatattttgtagagactgggtcttgctttgttgtccaggctggtcttattcctggtgatccgcttgcctcagcctcccaaagtgttgagattataggcgtgagtcactgcgcctggcatgactctttattttaaacactgatttttgtttcaggttgaacaaatcctggcagaatttaaagtcagagctctggaatgtcacccagacaagcatcctgaaaaccccaaagctggtaagaacttaataaaggctacttctcaagaaaatgagtagtatatagaaccaaaagccagtgaatagtaacttaattttctcaattttctcttgtctattatgctcaaccgtattctttctttgcactattggatgatagaaagggagagggctgtgcaggatcttttct

SEQ ID NO: 8846 - DNA, 500 bp, Homo sapiens
  MAP TO AC012178.2; EXPRESSED IN BRAIN, SIGNAL = 7.3; EXPRESSED IN ADULT LIVER, SIGNAL = 5.8; EXPRESSED IN BONE MARROW, SIGNAL = 5.2; EXPRESSED IN HELA, SIGNAL = 6.3; EXPRESSED IN HEART, SIGNAL = 5.6; EXPRESSED IN PLACENTA, SIGNAL = 5.6; EXPRESSED IN LUNG, SIGNAL = 7.5; EXPRESSED IN FETAL LIVER, SIGNAL = 6.9
ttagggtcaagggaccacagggcagtatggagcagtcatctagaatttgacagactgagcttgagtcccggacctactcttcactagctgtgtggctttgaacaaaacctttggcctctctaacattccctttgtagctagtagatggggttgttatgaactgagttatatgaaaggatgaggtcaattgtaaggcctactgttggggtggtggttgttaatttctttctcctcctcttcttctttctcttttttctcctcctcttctttttcctcctcctcttcctcattggcttgaataacagtagggaggaaggtgggagattggaggtatagcatgaataagacagggtgcacctagtgactcagagggctccagcctcttccaaggaggggccatgtgtttgaagtttctgggggacatatttagatgacaactctgccacttgctagctgttttcacctttcttgagggcatgggccaaagggaagtttgatga

SEQ ID NO: 8847 - DNA, 537 bp, Homo sapiens
  MAP TO AL160008.1; EXPRESSED IN ADULT LIVER, SIGNAL = 1.6; EXPRESSED IN HEART, SIGNAL = 1.7; EXPRESSED IN BRAIN, SIGNAL = 1.6; EXPRESSED IN BONE MARROW, SIGNAL = 1.5; EXPRESSED IN FETAL LIVER, SIGNAL = 1.7; EXPRESSED IN HELA, SIGNAL = 1.7; EXPRESSED IN LUNG, SIGNAL = 3.5
tttttcctttggccttttcctagactggaaatgtgactaacaatatatgttagaaacattggtgccatctagaatttaacacaaatatagcagtagattgggatttttcaatgctgaaactaggtggaagttattctatgctcctctagtcttaaacaatgagcagaagtactaggaaggggacttacgaggcccgttgacctggatgcctcctgaaagagttttagttttggaattactaaagatgtaggaacagaagtctgctacttgttgcacaaattcggggtccagctcttcatcttgtagtttctcgagctgggcaagcttcctgcggtgaacgggccgatcaaagacaaagcattttttctttgggaagaatttccggatacagagtctgggcaggttaaaagtttcatctttttgactggtacctagaaaaacatttaaaaaattataaaattgcctaatataagtgtttctgtaaagggccaaatagtaaatattttaggctcttcaggctggatggtctcttttcca

SEQ ID NO: 8848 - DNA, 571 bp, Homo sapiens
  MAP TO AC008407.3; EXPRESSED IN BRAIN, SIGNAL = 2.2; EXPRESSED IN PLACENTA, SIGNAL = 1.4; EXPRESSED IN HELA, SIGNAL = 1.8; EXPRESSED IN ADULT LIVER, SIGNAL = 1.9; EXPRESSED IN BONE MARROW, SIGNAL = 1.6; EXPRESSED IN FETAL LIVER, SIGNAL = 1.6; EXPRESSED IN LUNG, SIGNAL = 1.6; EXPRESSED IN HEART, SIGNAL = 1.9
ccctactccccttcatctcctcagaatacaatttggctttaagcgaaatctatgtctcttcaattgcaattgctaagaccccaacaaatgccttgtgttactgcattgcaatctggtcttttgtctcttcttagttgacactgttaaatttaatttgcataaagtttttgttttgacagatggtgtcagaagtgggattcaaagtagaacttccaacaacttccaggcacatggagttatcaaaagaggtacataccaagcccattatgtccattgctctcttacagcaactagagattgtaggtaagttgtctcacagattcaaaagctctatgaatttgtattttgagctatctgactttgtttgagcaaatattggatctaaactgggtttggaagtcacaacagaaactggactgggtccagaatcagactgagtccaggatcagattggttccaacagttaactggactggatccgtttagaggcctcagatgtctgattgagtcagacagaagctggcagggatagatgaaggaggcagataagggagagggtccccagagaatc

SEQ ID NO: 8849 - DNA, 581 bp, Homo sapiens
  MAP TO AC008513.4; EXPRESSED IN ADULT LIVER, SIGNAL = 2.8; EXPRESSED IN PLACENTA, SIGNAL = 1.7; EXPRESSED IN BONE MARROW, SIGNAL = 2.2; EXPRESSED IN FETAL LIVER, SIGNAL = 2.2; EXPRESSED IN HELA, SIGNAL = 2.2; EXPRESSED IN LUNG, SIGNAL = 2.2; EXPRESSED IN HEART, SIGNAL = 2.3; EXPRESSED IN BRAIN, SIGNAL = 2.2
tcccactattcagagatttccactgtttacatttacatcttttcagttatgtgcatatccatgtgtaacttacccacttccttctgtaattacactgtctgtaatattttgcaattggtgcctgtcactcaacttctttttgttttaataactatagaactataccaccatttctaacaggttagtggtaagattttagcacagtgtatttaacaaatctcttattaatagacattctgactatttccaatttttactcctataaataactgtatgataaatattcttatttctatatctttgtatactttttgttgtctccttaggaataatttcatgaaatcgaatttcgatgtctgtgtctctttctccatacctatgccaattgtggatgctatcatcagctattttggagcatttaaaaatggctttaaggtttaataactgacaaaacttggaataagttatttaggcacaagtgtatttttcactaaggggcagaatactgtagtagatacgagcatcagctctggagccaaaccatctggatttgaatcctggctctgccaccttctacctgc

SEQ ID NO: 8850 - DNA, 580 bp, Homo sapiens
  MAP TO AC007221.2; EXPRESSED IN BRAIN, SIGNAL = 2.3; EXPRESSED IN PLACENTA, SIGNAL = 2.4; EXPRESSED IN BONE MARROW, SIGNAL = 1.9; EXPRESSED IN LUNG, SIGNAL = 2.1; EXPRESSED IN ADULT LIVER, SIGNAL = 2.4; EXPRESSED IN FETAL LIVER, SIGNAL = 2.3; EXPRESSED IN HELA, SIGNAL = 2.7; EXPRESSED IN HEART, SIGNAL = 2.2
tgcaagctggactaatgctgtaatgcaaagtaatgagtaatctctggaagagcaaagctatcacagaactaagcatgctgattaatgctagaaaggacatgctgatcaatgctagtatgggtatgctggtcaatgttggtatgggcatgctgatcaatgacagtatgggcatgctgatcaaagctaatataagtatgctgatcaatgctagcatgggcatgctgatcaatgctagtatgggggttcttatcaatgctagtataagcctgccgatcaatgctagtacggacgtgcttaccaatactagtatgggtgtgctgatcaatgctagtataaacctgctgatgaacgctagtatgagcatgctaaacaatgctaatatgggcatgccagtcaatgctagcataggtgtgctgatcaataagcaaagagaacacatgctgaagtcaagggctttaacaataacttttgtaaatactaccctttaatcccctgttaagtttactaccttcatcctaacccaagacgtaaattttcaaggagaaggagaaggagaggaaggaaggagaagaggaggcag

SEQ ID NO: 8851 - DNA, 513 bp, Homo sapiens
  MAP TO AC007857.2; EXPRESSED IN HEART, SIGNAL = 3.2; EXPRESSED IN PLACENTA, SIGNAL = 1.7; EXPRESSED IN BRAIN, SIGNAL = 2.3; EXPRESSED IN ADULT LIVER, SIGNAL = 2.3; EXPRESSED IN BONE MARROW, SIGNAL =   2; EXPRESSED IN FETAL LIVER, SIGNAL = 3.4; EXPRESSED IN HELA, SIGNAL = 3.3
tgaactctgctgcaatttggagacagggagaaggggctttgttctgagggcagaagaccaacattagatttttgcacggtggcccttttgtttgtttgtttcttcttcttcttcttcttcttcttcttcttcttcttcttcttcttcttcttcttcttcttcttcttcttcttcttcttcttctcttcttcttcttcctcttcttcttcttcttcctcttcttcttcttcttctttcttcttcttcttcttcctcttctcctcctcctcctcttcttcttcttcctttcttcttcttctttttcttcagaaacagggtgtcactctgtcacccaggttggagtacagtggcactatcctagctcactgcaagctctgactcctgggctcaggagatcctcctgcctcagtctccgaagtagctgggactacaggcacatgtcaccacactggctaatttattttattttttgtagaggtaggggtcttgttgtgttactcagggtggcctcaa

SEQ ID NO: 8852 - DNA, 587 bp, Homo sapiens
  MAP TO AC007869.2; EXPRESSED IN PLACENTA, SIGNAL = 2.5; EXPRESSED IN BONE MARROW, SIGNAL = 3.1; EXPRESSED IN LUNG, SIGNAL =   5; EXPRESSED IN HEART, SIGNAL = 6.3; EXPRESSED IN BRAIN, SIGNAL = 3.5; EXPRESSED IN HELA, SIGNAL = 3.3; EXPRESSED IN FETAL LIVER, SIGNAL = 5.1; EXPRESSED IN ADULT LIVER, SIGNAL = 4.6
acaccttccacagggatctgtaaactctcggcacaggcacaactaatgctccatgtgactgggctaaagttagctcccacagggagggagctggctgtgtagtagcgtctccaccgtcagcgtgtggcggctggcaccgctcccttgctggcgggcagttaggtggagagaggagggcagcatgccctctacactcggaagagaatcaacattggctgagtgcacagtgggcacccaggcctctgccagagccgtgcaacctcgtatcatgacttaccccggaggggaccggctctttctccttgtttcaccaacaaggaaagaggcacagaaagggtccctcacttgcccaaggtcacacagggcacaagcaaccacatcgagtttggaactgggcctgactgggaagccacgttcatcccgcagaccaagggggctttagagatcgtctggggaaagccagggattccggtgatggagaagctggggatgctgggcgtgtgcttcaggcacaggctcatgcgatggagggagagtcctcagacccggggtccaggcttcgctttggctcttcacctgtgctgaca

SEQ ID NO: 8853 - DNA, 500 bp, Homo sapiens
  MAP TO AP001255.1; EXPRESSED IN HELA, SIGNAL = 2.5; EXPRESSED IN HEART, SIGNAL =   2; EXPRESSED IN BRAIN, SIGNAL = 1.8; EXPRESSED IN PLACENTA, SIGNAL =   2; EXPRESSED IN ADULT LIVER, SIGNAL = 2.2; EXPRESSED IN BONE MARROW, SIGNAL =   2; EXPRESSED IN FETAL LIVER, SIGNAL = 2.6
caagttgtccctggtgatccatacctttttattagcatgataattagctgataacaacttcactacttgaaaacagtggggacacaggcctttgtctatctcaaggttacacttatgtttgcctgctgcattagcacatatcagcacagatagtgtgtctttggcatttttaacttctgtcagggatatctcactagctgtaatcagtgtctttctagagcaataacaccaaaacagtgatgttccatcagtattgcaactttgttctagtatcagattttcatcagtgatgatcttatcaaactcatcaatgaatttctttgttgcttcatgatcaacagatgctttatcactataaaatttaaaaaatgtaatatgtcctttcttaaatttatgtaattagcctatagaataaatttcccctcctttttcagtttcttgtgatagatctttgctgtttcatgattagcataccatttggtggcatgtattcactgtgg

SEQ ID NO: 8854 - DNA, 596 bp, Homo sapiens
  MAP TO AC011609.9; EXPRESSED IN ADULT LIVER, SIGNAL = 4.2; EXPRESSED IN BONE MARROW, SIGNAL = 3.6; EXPRESSED IN FETAL LIVER, SIGNAL = 5.1; EXPRESSED IN HEART, SIGNAL = 4.9; EXPRESSED IN PLACENTA, SIGNAL = 3.5; EXPRESSED IN LUNG, SIGNAL = 3.4; EXPRESSED IN BRAIN, SIGNAL =   5; EXPRESSED IN HELA, SIGNAL = 5.7
tcagaccatagcagccactgtggacatcaacaggttgaatcccacatgtcctacagaagctaagctgctcaattttaaagagaagcacaaatgttgtgaataatgaaaaattgtttggtggaaattgcttatgactttgtagacatgtgtttacagacttcgtaaacttggtaaacatttgtggtagtatcatgtgggctttactatctgtcttcaatgctaacacaaatgtcctgaaaattataaaatcttttatcacttatgactgtgttgctttacatgaatattaatattagattttgttgagctatttttgtttgtttgttttctagtgacagtgatgaaaagcctctcaaaggaagccttcggtcccttaatagggatatgcagcctactgaaagtgctgacagcttagtcgaatacggagagggagaccatggtctcttcagtgaagatggatcatttattggtgcctacgctggatctaaggagaagggatctgttgaaagcaatggaagttctacagcaacttttccccttcgggcataaacacaacatatgtaagcaacgctactggttcaccccaaccttccata

SEQ ID NO: 8855 - DNA, 580 bp, Homo sapiens
  MAP TO AC018558.2; EXPRESSED IN FETAL LIVER, SIGNAL = 1.6; EXPRESSED IN HEART, SIGNAL =   2; EXPRESSED IN BRAIN, SIGNAL = 2.2
tgctcacatagcctccagtggtatactgagttggtcatgaccctcattctttcagcctccaacatctccccctttctgcttttgatttaattgaataaaggtaattgcaggctgttcagctctcaattgctggttggtgttccagttgattttacagactatgaacaaaaaacagaaacatagtaacattattccaataattatgaaaaagatattgaggtgctgttagaattttactttgtaaatcattaatatcaaaagtaacattggatgtaacagctccctgtaaatgggcctttacaaggttccatggatattcactttgattatattcctaattggttacacaaatatgagtatggttaaaatgacaacgcaattgctactgcaactgcaagctttgtacttgttcttctagccacagaacagtagtctttaacattgccacttctgtttgtatctcagtgttagttttattttgaaacatccatgcctggtcagctgtatgcatccaattttctgcatattgagctgtttgagtggagctgtccagtgctactgaggacaccacaacagaggg

SEQ ID NO: 8856 - DNA, 515 bp, Homo sapiens
  MAP TO AC018790.3; EXPRESSED IN ADULT LIVER, SIGNAL = 2.2; EXPRESSED IN BONE MARROW, SIGNAL =   2; EXPRESSED IN FETAL LIVER, SIGNAL = 3.1; EXPRESSED IN HEART, SIGNAL = 2.6; EXPRESSED IN PLACENTA, SIGNAL = 1.8; EXPRESSED IN LUNG, SIGNAL = 2.6; EXPRESSED IN BRAIN, SIGNAL = 2.2; EXPRESSED IN HELA, SIGNAL = 2.7
tgctccatttttgtcagtggcacagatgttgtgtgatgaaagtttccattttaagatgttctttctttttcagcgatttgacgatggagatgaacagattccggctgattgggccactttcccactccatcctaactgaagcaataaaagctgcttctgtccacactgtaagagtaaaagtgactgtagtgttttattctaatcatgtttttcctgtcaaatttgtgaaacctaatatataatttggtaacattttgggccatggcttttagatgtttatttccctacttattatgcttattatcaaagattttgttatctttcacttctcctagaagaccacaactaagtggatatgatcagtaaactgactgttcttacttaaatacagactgctcttgcatctgtgagtcttgtagagggtcttaacttctgcttcataggtagggagtctctaaaatccctgaaattgtgtgccagattttgtgatgtgtgcgtgtgccatgtaggttttc

SEQ ID NO: 8857 - DNA, 584 bp, Homo sapiens
  MAP TO AL160006.1; EXPRESSED IN BRAIN, SIGNAL = 1.9; EXPRESSED IN ADULT LIVER, SIGNAL = 2.3; EXPRESSED IN HEART, SIGNAL =   2; EXPRESSED IN PLACENTA, SIGNAL = 2.5; EXPRESSED IN LUNG, SIGNAL = 2.2; EXPRESSED IN HELA, SIGNAL = 2.2; EXPRESSED IN FETAL LIVER, SIGNAL = 1.9; EXPRESSED IN BONE MARROW, SIGNAL = 1.8
ggaatgtccttgctgctctctaaatattagagggatactgctttcctcaaagactttgccacttgtttcttccttaagagtttggaggttgctggtaaagggagggaggatatttctgagtccaagccacagaaaggttcagccacctctgcccttcatgggtatgatagtcgtgttccagaaaagcgagccagcaggaactgttgtttttgagcactcactttataagttatctcatgtaattcgcaccacatcctataacatactgcttttatccccattttacagatgaggacgaggacgctcagagtccgtgtgagaacctgggtcatccaatcctaaagtccatgctcttcccaaggtgcccggccatggagtgtggcagacagtgtgctcaaaaggaggaggcaggagggaaggctggtgctgaggacagagccgaagaaagggcagtctagaggagcagggagaaatgcattttgttattttaatgaacaggtaacacatgcacacagtcaagaaaaagaaatcaaacaaaattaaaataagtccaatactaagtttcccttctcagcgtcgtctag

SEQ ID NO: 8858 - DNA, 548 bp, Homo sapiens
  MAP TO AL136316.2; EXPRESSED IN BRAIN, SIGNAL = 2.1; EXPRESSED IN PLACENTA, SIGNAL = 2.3; EXPRESSED IN ADULT LIVER, SIGNAL = 1.8; EXPRESSED IN BONE MARROW, SIGNAL = 1.6; EXPRESSED IN HEART, SIGNAL = 1.7; EXPRESSED IN LUNG, SIGNAL = 2.8
ttgctttctggattccaagggaatggtggttagggatagaagtgactggagcaaagaaatttgctgtcagttgtttttgtctctaggtggtgcataataataaagtcagcgtagtttctaacaaagagcagagaagaggatgtggtagcctcatctggctctcatgctacctcatgtgctatcacaggaaccccatacccgtcagattccaacaggaaatagatggcacatccaaagtaagaaaattagacaggtatttacttaaaaatgagtgatttatcctctgtagctgtaggaaaaattcatgggatactgcagtaacctgggctgattgtagctgcactattatcacacctaggtgggaagggatgtgcggagggatggtttcttggaatctgaaaggacagactcatgtgaattacgaggccttgagagaagcagtggctttcagtggggtgacacaattatctccaagataacttacgagatagggccaagggaataaattccatggccttgctttgccctctccctctgatctcctgctg

SEQ ID NO: 8859 - DNA, 593 bp, Homo sapiens
  MAP TO AC011447.2; EXPRESSED IN HEART, SIGNAL =   2; EXPRESSED IN PLACENTA, SIGNAL = 1.8; EXPRESSED IN BRAIN, SIGNAL = 2.4; EXPRESSED IN ADULT LIVER, SIGNAL = 1.4; EXPRESSED IN BONE MARROW, SIGNAL = 1.7; EXPRESSED IN FETAL LIVER, SIGNAL = 1.8
tttgaggtgccttctaactcatcttttccttttgaaaaatattcacaactcatttcatatgatgaaatagcactcaaaaatgtacgtttatgcctttaattttatactttattatctagaaaaatatcacatatgaactgatgttgtgtatcttatgctgctgttttttctcagagttagagaatacattaaataatatttctgtgatgaaaattattttattggataattttagtgagtcttataagtcagaaccatttgtcttttatctttcatttcaccttaagtcaaattaaaaattccacctatggccacttggtaaaaatgtgtgtgtgtgtgttttccagggaccattgcagtttagagacgtggccatagaattctctctggaggagtggcattgcctggacactgcacagcggaatttatatagggatgtgaagtttcagaactacagaaacttggtcttcctttgtgagtataactttaatacataattcataatataccctaaaagttttatttcccttttttgtggaatgtttctgggtactttattctttgcataaaagtgtttcagatgccccttttcc

SEQ ID NO: 8860 - DNA, 540 bp, Homo sapiens
  MAP TO AC012153.10; EXPRESSED IN BRAIN, SIGNAL =   6; EXPRESSED IN ADULT LIVER, SIGNAL = 7.2; EXPRESSED IN BONE MARROW, SIGNAL = 5.7; EXPRESSED IN HELA, SIGNAL =   7; EXPRESSED IN LUNG, SIGNAL =   5; EXPRESSED IN HEART, SIGNAL = 6.1; EXPRESSED IN PLACENTA, SIGNAL = 6.9; EXPRESSED IN FETAL LIVER, SIGNAL = 6.8
agaggctcgagagtgagtggggcctggggaggtgggtccctcccaggactggacctttgagtctgacccaccgtgatccatgactgacctccaaggtggtgggactcgagtggctctgggggaggccctaccttggccacgattgtggaggtgaagatgctgcggtcatagacccagccatccacacacggctccgtgtcggcctcgctccagctggtggccgtggcattggggtccaagagctgccactgtggctggcggaagcggcggcactggtggggcctctggttggggcccggcgggatggaaatagccaggagggcctcaggactcaagctccctaggatgctggcctgagccgtgctgttgtccaggaggggtgcccagcagcggtggctgggcacggcggccgagaagttctccagcatgctctgggtacacagccacatgatggagaccatcagagccatcgtctggagaacctggaacctgcccaggccacccacgaggtccaggagttcagaaaatgccatggaacct

SEQ ID NO: 8861 - DNA, 533 bp, Homo sapiens
  MAP TO AL139289.4; EXPRESSED IN FETAL LIVER, SIGNAL = 3.8; EXPRESSED IN HEART, SIGNAL = 3.2; EXPRESSED IN BRAIN, SIGNAL = 2.9; EXPRESSED IN PLACENTA, SIGNAL = 2.8; EXPRESSED IN ADULT LIVER, SIGNAL =   3; EXPRESSED IN BONE MARROW, SIGNAL = 3.4; EXPRESSED IN HELA, SIGNAL = 3.7; EXPRESSED IN LUNG, SIGNAL = 3.9
aaccctggcactcatactggtcttccagctgccacgttcagtcctgcatcagaagcatacttcaggatccccattactttttcttcaggtctccggccgaacaagcagacctttaaccctacagacactaatgccttggtggcagctgttgcctttgggaaaggactatctaattggagaccttcaggcagcagtggtcctggccaggcaggccagccaggagctgggacgatccttgcaggaacctcaggattacagcaggtgcagatggcaggagctccaagccagcagcagccaatgctcagtggggtacaaatggctcaggcaggtcaaccaggtaaggtggcaggggttgaaatgaagctgactttgagcaggagtgggagggaataagctagattatctgggcctccagcatctctagacctagaggttttctctatttctccttttcactgtgacccaggaaataattttcagaagtaaaaaaatctcatctgagactctgcaacaggcaccagagagtgaggaag

SEQ ID NO: 8862 - DNA, 508 bp, Homo sapiens
  MAP TO AL121953.10; EXPRESSED IN BRAIN, SIGNAL = 1.6; EXPRESSED IN ADULT LIVER, SIGNAL =   2; EXPRESSED IN BONE MARROW, SIGNAL = 1.6; EXPRESSED IN FETAL LIVER, SIGNAL = 2.3; EXPRESSED IN HELA, SIGNAL = 2.2; EXPRESSED IN HEART, SIGNAL = 2.2; EXPRESSED IN PLACENTA, SIGNAL = 2.6
gatctgcaacatggaaacccagccaggatctcttctcgtttgctggcactgacattatcaaacattgggtaatggtccacagatgcaaattcacttgctgcacattcataatacgtgcctgtcagcagggtcaccgccagccaagttaaaggagcaataactgccctcccagtgatgctgaagaacctaaggcaagccagcttgcactctagggggctgattctcctgtatggaggggcacagctgcagcagtattcaccggtaattgtccacatttggcttctcagagcaaagccagcaacgagaaggatcaaggcaggaatgacaagaaaagcagaaccataatagaaattttttccaacctgacaaggacagctgaatgtagaagaggagaagagttgttgcccaccaatagtcaaggctgcaattaaagaattgataaatattccatttctctgcagagaagacacaatattgttgagagttgggcacatcttgggaagctgtt

SEQ ID NO: 8863 - DNA, 581 bp, Homo sapiens
  MAP TO AC024171.1; EXPRESSED IN BRAIN, SIGNAL = 2.5; EXPRESSED IN PLACENTA, SIGNAL = 2.1; EXPRESSED IN HELA, SIGNAL = 2.4; EXPRESSED IN BONE MARROW, SIGNAL = 2.1; EXPRESSED IN FETAL LIVER, SIGNAL = 2.4; EXPRESSED IN HEART, SIGNAL = 2.1; EXPRESSED IN LUNG, SIGNAL = 2.1; EXPRESSED IN ADULT LIVER, SIGNAL = 2.6
cagaaagcttacaggcccagagagaatgggatgatatatttaaagtactgaaagataaataaaaacaaaagtggcaagacaagaatattataccaagcaaagttatccttcagaaatgaagggaaaataaattttttcacagatgagcaaaaacaaaagaaattaatcatgactaaatcagccttataagaaatgctcaaaagattctttcatctggaagtgataagatggtaaccaccatcataaaaacatgtaaaactataaaactcactggtagaactgatacacaaaaagaagaaagagaaagaatccttatcactacagaaaaccacccaactgcaaaaataaacaagaagataggacttaaggaaaaaatgatatacctaaacaaccagaaaacagtcaataaaacaccaggagtaagtcctcacctatcaataataaccttgaatgtaagcggattacactcttcatttaaaagatataaattggctgaatagataaaaaaacataactatatgttacctataaaaaactaaccttacctgtaaagacacacagattgaaagtgaagggatgga

SEQ ID NO: 8864 - DNA, 575 bp, Homo sapiens
  MAP TO AP001208.1; EXPRESSED IN BRAIN, SIGNAL = 1.6; EXPRESSED IN PLACENTA, SIGNAL = 2.7; EXPRESSED IN ADULT LIVER, SIGNAL = 1.9; EXPRESSED IN FETAL LIVER, SIGNAL = 2.1; EXPRESSED IN HELA, SIGNAL = 2.5; EXPRESSED IN HEART, SIGNAL = 1.8
tccattccactctctcccacgatatctgcattctctggtgtgcattacatgcagaaggcagaagattgccagctaaatctctgtgtttttaccttggtctcaccatctggccattgcttgtctcctttcctcttctcccctctctctgcttctccttttcctcattctcttcctctttttctcctcccttctcctcctcttctttttcttcttcttcttcttcctcctcttcttcttctacgtcttcttcttcttcctcttcttcttctccttctcctcctccccttcctcctcctcctccttctccttcctgttcctcttctgtcattctctctcctttcctcccctcaaccccaccccacaccctccctgggaataggctctgattgattctctgtgggtcaaatggacatctgtagtccagtcgaccaggcccagggtgcagggtcatgactgcctctgccatgcggttgatgagcatgactgccaggagcccacttcttgtgaatgaatgtagggtgggaagttaagagggtgtcgcaaactgggcaaactccccagagcaatctcttctg

SEQ ID NO: 8865 - DNA, 511 bp, Homo sapiens
  MAP TO AC018739.2; EXPRESSED IN BRAIN, SIGNAL = 2.2; EXPRESSED IN HELA, SIGNAL = 2.6; EXPRESSED IN ADULT LIVER, SIGNAL = 2.2; EXPRESSED IN PLACENTA, SIGNAL = 1.8; EXPRESSED IN LUNG, SIGNAL = 2.2; EXPRESSED IN HEART, SIGNAL = 2.5; EXPRESSED IN FETAL LIVER, SIGNAL = 2.7; EXPRESSED IN BONE MARROW, SIGNAL = 1.8
cccacatcatacagcaagacctaagaaaataataactttaagtctacagacaaacaacatttcgaaatatttttttggcaaactgaaaaactcaatgaaaactgttttaactccagggaaaaaaatacaaaatgcattcattcaccttcacaattacacttttaactctgtaatttacctctaccaatgtgtctgtaaccattctgatgatctggcctcttcgccactgatttttatcttggatcttaacagcacagtgcatatcattttcccatttaacaggttcccattttgagttttcataagcagctatcatcttttcttctaaactatagagataaaaaatatttaactttccaaaccttttcttatataattctctggctacatgtttcctacaatctccgcttgctcattccgctccagccaagctgggcaccttgttcttccttgaatgtacaagtgtatttcttcctcaggtttttgaactagctcttccttctgcctgaga

SEQ ID NO: 8866 - DNA, 551 bp, Homo sapiens
  MAP TO AL121975.3; EXPRESSED IN ADULT LIVER, SIGNAL = 3.7; EXPRESSED IN BONE MARROW, SIGNAL =   3; EXPRESSED IN HELA, SIGNAL = 4.7; EXPRESSED IN LUNG, SIGNAL = 4.2; EXPRESSED IN BRAIN, SIGNAL = 3.6; EXPRESSED IN PLACENTA, SIGNAL = 3.1; EXPRESSED IN FETAL LIVER, SIGNAL = 5.5; EXPRESSED IN HEART, SIGNAL = 4.5
attgggcatgagacaagagccctggtgttcttccactcatcgaagccatatcacaatgattggcacatttatgctcaccaacacgtatccaaagtggggaaaaaaaaggaatatttgtgcctgcttcccacaaagggggagagtaacatcattaaagatcacgagcataaaaattacagatacaggtacattggcttagaattctgtgaccttggataagttacccaaccttcccaagtttccctctctgcaaaattcatgcaaataaccatctcataacgttgccaacagggttaaattgagaacacatataatacatctaattgtgtctggtacacagtatgtgcttattaaaaaattagaaacctgccttcaccaccactaccaccaccatcatcatccagcaagccaattctttaactaatcagttcagaggctcttgacctcaaaagaatgatttaatgccacatgaaattgaaggagaaaatacacagtttcaaattctctttttctccctgctcttcaccccatgtgggtgtgccactgtgtac

SEQ ID NO: 8867 - DNA, 506 bp, Homo sapiens
  MAP TO AL121985.13; EXPRESSED IN FETAL LIVER, SIGNAL = 2.6; EXPRESSED IN BRAIN, SIGNAL = 2.6; EXPRESSED IN PLACENTA, SIGNAL = 2.5; EXPRESSED IN ADULT LIVER, SIGNAL = 2.6; EXPRESSED IN BONE MARROW, SIGNAL = 2.8; EXPRESSED IN HELA, SIGNAL = 2.4; EXPRESSED IN HEART, SIGNAL =   2; EXPRESSED IN LUNG, SIGNAL = 3.2
aacagaaacttcggcaccagtatctactaggccctcaaacttttttccttgaatgtgtatgatgcaggtgggccgttgtttagaaattacattaatccagtaagtggccttttcaccgccggagcctatcccagggccacatgtcttatcgcctttgtttaaaatgatattaggtagtaaaagcagttgagcaactgactcaccagacgcaatggaaataggaaacttggcagacacaattaatttaatctcatcaacagaatcagaattaatgagaccagtatgaatggtgaatcctttagcagaggtggatgctctacctaacaccaggcccactgaaccttgaggtaaagggccagtgacccccgtggggacaatcaaaggcaaagaatcaggaagtaaatttagaggaatagtactaaagagatcaaccaccccgcctcctactgtggaggaggacaagcattgtactgagacagaagtagaggctgggacctatttggttt

SEQ ID NO: 8868 - DNA, 555 bp, Homo sapiens
  MAP TO AC017016.3; EXPRESSED IN BRAIN, SIGNAL = 1.8; EXPRESSED IN PLACENTA, SIGNAL = 2.1; EXPRESSED IN LUNG, SIGNAL = 2.1; EXPRESSED IN HEART, SIGNAL =   2; EXPRESSED IN HELA, SIGNAL = 1.9; EXPRESSED IN FETAL LIVER, SIGNAL =   2; EXPRESSED IN BONE MARROW, SIGNAL = 2.1; EXPRESSED IN ADULT LIVER, SIGNAL = 2.1
cacaattggcagagatggtgccagaacacaacagtaaactttctgaggccaaccttctatttgatatccaggttgactatcagcacaatctatccaacttttatttttgtcatcagtcacagttctctactatatttgtaaaaggatgctttatcttggcatagctgcagcccatttctgtgttaagatttttacattacatagtattattgctattttctcacactgtgtaccttcctgtgcaaatctccctcccaaacgctgacaatcagcagcttatcttcttgatacctagattcctactggccaacacctctcaattcctctctcagctacttttgttttcctttgtcctacactgtttaccaaccctttctcttcctcattttctccttctgcaaataaaaacctaaaaaagaaacagaaattccttactttctatcctccctaatctagtgtttctcaatgcatgatcttctgatgctcttaattaaaatcactagagggcttttaaaaacactatacaggttcccaggccccacctagatcaactga

SEQ ID NO: 8869 - DNA, 580 bp, Homo sapiens
  MAP TO AL133257.2; EXPRESSED IN PLACENTA, SIGNAL = 3.2; EXPRESSED IN ADULT LIVER, SIGNAL = 2.2; EXPRESSED IN BRAIN, SIGNAL = 3.2; EXPRESSED IN LUNG, SIGNAL =   3; EXPRESSED IN HEART, SIGNAL = 3.4; EXPRESSED IN HELA, SIGNAL =   3; EXPRESSED IN FETAL LIVER, SIGNAL = 3.8; EXPRESSED IN BONE MARROW, SIGNAL = 2.7
tcctcactatgcaagggtcctccatcattaatgcctctttaataaaaatgcttctcaaagccactttacttccaaaggaagctggagtcattcactgcaaaggccatcaaaaggcatcagatcccatcactcaggacaacgcttatcctgataaggtagctaaaaaagcagccatcaaaagggctcagatcccatcgctcaggacaatgcttatgctgataaggtaattaaaaaagcagctagcattccaacttctatccctcgtgcagattttctccttctcatctggccactctcacccactccctcactgaaacttccatctatcaatctcttcccacacaaggcaaatggttcttggaccaaagaaaatatccccttccagcctcacaggcccattctattctgtcatcatttcataacctcttccatgtaggttacaagccactagtccgccttttagaacctctcatttcctttccatcgtggaaatctatcctcaaggaaataacttctcagtgttccatctgctattctactactcctcagggattgttcaggcctcctccctttcctacac

SEQ ID NO: 8870 - DNA, 530 bp, Homo sapiens
  MAP TO AC005323.1; EXPRESSED IN BRAIN, SIGNAL =   2; EXPRESSED IN BONE MARROW, SIGNAL = 2.8; EXPRESSED IN HELA, SIGNAL = 2.3; EXPRESSED IN HEART, SIGNAL = 2.1; EXPRESSED IN PLACENTA, SIGNAL = 1.9; EXPRESSED IN LUNG, SIGNAL = 3.5; EXPRESSED IN FETAL LIVER, SIGNAL =   2; EXPRESSED IN ADULT LIVER, SIGNAL = 2.5
tcctgggattctactcaccgctcctccctcagtcttcaccgtcacttttcctccttctctgctctggatggtccctttgacaaaggattctttgggctccgccacaaagacagatgttttggcatcaaagggcctattctgggcctcaatgcgctccctttcagactttcggaggaaaggagcagcctccccaaaaacagccaattctgagtctgaactcatggctgctgaactcagaggtcctaaaggagataaaactttcacattagagagtctggattgccatgtataccaataaatcttaatatttattgtatttcataggcccagttggaaattccactagacaggtctactgttcaccatactatagttactgagacaaacataatcacaagaacgaaaatgcatcaggtggtctctgtgtacccaatgccgtatttagggctttgcatccactgtcttatttcatcctccaggactcacattctcattgggaactgaattacagtccagtgctgctgtcaagt

SEQ ID NO: 8871 - DNA, 560 bp, Homo sapiens
  MAP TO AC007955.4; EXPRESSED IN BRAIN, SIGNAL =   4; EXPRESSED IN PLACENTA, SIGNAL = 3.8; EXPRESSED IN FETAL LIVER, SIGNAL = 2.7; EXPRESSED IN HELA, SIGNAL = 2.2; EXPRESSED IN BONE MARROW, SIGNAL = 2.4; EXPRESSED IN ADULT LIVER, SIGNAL = 2.8; EXPRESSED IN HEART, SIGNAL = 2.6; EXPRESSED IN LUNG, SIGNAL = 3.1
gtctgctcctggaacctgtcccttggaatcaaggattctgaagatccaggcctcttaggcttatctccactcccccagtggccctctgctgcccccacttgccgcaagttcacactaaccacagaagtcctgcaggcctgcaccacagggctcaaaacacactgtttttgctctgtgcctggtattgtattgccttaggtcatctgatttatagtcattgcagtcctcagttaagtatgatttccattctacagatgagaaaactgagtctcaagataggtagggcccagagcttgaagaggcagtgctaagtttaaactcagtataatgctacatgtgggctgcctctcttaactcttttggttccagaggaaacagcagttactgtgaataaaatgagaaatgatcttggaataatgcaaattaaccactaagtccttagaaagtgattgcagtgagacttgatcattcaggatgcaggactgttacatctgttaacctatttatgcctggggttgcaattttttgaatttttgcaatcagaccttggcaatgacctt

SEQ ID NO: 8872 - DNA, 583 bp, Homo sapiens
  MAP TO AC005212.1; EXPRESSED IN ADULT LIVER, SIGNAL = 1.4; EXPRESSED IN FETAL LIVER, SIGNAL =   2; EXPRESSED IN LUNG, SIGNAL = 6.6; EXPRESSED IN PLACENTA, SIGNAL = 1.6; EXPRESSED IN BRAIN, SIGNAL =   2; EXPRESSED IN HEART, SIGNAL = 2.2; EXPRESSED IN BONE MARROW, SIGNAL = 1.8; EXPRESSED IN HELA, SIGNAL = 2.3
catcaccatccttggaggactcaagccggctccgcgaacccctcgatggggcctaccgcaaggccagcctgggcccggggtgtggctctaccagcgtcgcgagactgtgtctctccctccaggtgctgatactggacgagcccacctcgggcatggacgccatctccaggagggccatctgggatcttcttcagcggcagaaaagtgaccgcaccatcgtgctgaccacccacttcatggacgaggctgacctgctgggagaccgcatcgccatcatggccaagggggagctgcagtgctgcgggtcctcgctgttcctcaagcagaaatacggtgagcggtggggccagcccgcgacagggtcggtgtcctggctgccgtgctgagggaatggctgctaccttcatgaagggccctcagatcaggcaggggtggccttttctagacttcctgtctgttgcctctgggtggagagcccaaccaggcaggggggcttgtgagagggaagaggcaggaaatggagctgaaagtctcaatttggttaggatgtggttcagccatgaccagaagaacagaggccaag

SEQ ID NO: 8873 - DNA, 557 bp, Homo sapiens
  MAP TO AC009263.6; EXPRESSED IN FETAL LIVER, SIGNAL = 3.6; EXPRESSED IN BONE MARROW, SIGNAL = 2.3; EXPRESSED IN HELA, SIGNAL = 4.1; EXPRESSED IN HEART, SIGNAL = 3.7; EXPRESSED IN LUNG, SIGNAL = 3.4; EXPRESSED IN ADULT LIVER, SIGNAL = 3.3; EXPRESSED IN BRAIN, SIGNAL = 4.3; EXPRESSED IN PLACENTA, SIGNAL =   8
agacccaagaaaccaggtcctgtaactgccagagtctgggttcttatttaacataaaactctaaagttccctggacagagccactggtagagacaccattctcccaccacgttaacctacatttaaaagtaaataatgaatgaccatgataaaccaatcactctcttgacccctaattctcaccaggctgacctttttataagtggttacagatacgctactacttcatcattagaaaccccctgaaatccttgcccatttccatcttcaatgagtacagtaagaatccatccaacaggtatagaaaaagcacgtgttcacagacagtttctctaaggagcaagcagcaaagccctggtggattgaagctggtcgcatcctggtttggtaagcaccacaggatgggggagggcgaagatggcagtcttatgattagttcttcagcacggccacctcactcctctccccttaatccccacacgccaaacttacacgtccggttcagaaatactcatggagtctagaaatatgtgtgagggcacttggcattttcactt

SEQ ID NO: 8874 - DNA, 571 bp, Homo sapiens
  MAP TO AL117692.1; EXPRESSED IN BRAIN, SIGNAL = 2.6; EXPRESSED IN PLACENTA, SIGNAL = 1.7; EXPRESSED IN FETAL LIVER, SIGNAL = 2.2; EXPRESSED IN HELA, SIGNAL = 2.3; EXPRESSED IN ADULT LIVER, SIGNAL = 1.8; EXPRESSED IN LUNG, SIGNAL = 2.8; EXPRESSED IN HEART, SIGNAL = 1.8
cacggtattgtgactgtggggaaaatgttcgcattcttaggcaatacatgcagaaatatgtaggggagaagtgtcatggcatcagcaacttattttcaaatggttcagaaaaaacacacatacatgaatatatagggaaaaagagaacataactgtcactaaatgctaataactggtgaatctaggtgaagggtatgtaggtattcactgaattattctgtcaacttctttgtagttggatttttttaaaacaaaaagttggagaacatggaaaagaatcctggtggcctgtgaaggatggatgggggcagggggtggacctggtttggggacagctgtactgggagctctgtcccctcaggaagtctctctccaccactcatcatggcttctccctgcagcatgtcccctcgctgctgcaggcaggctttgccaggctgcagatgcatggccacaggcccctctggattcccagccttccagcaagcatctagagagaaaagagcctgctgcagctagaaaaaccctgggatctaatgagctcagcttgggtcatgtgctcctcccaact

SEQ ID NO: 8875 - DNA, 589 bp, Homo sapiens
  MAP TO AC000085.5; EXPRESSED IN ADULT LIVER, SIGNAL = 1.6; EXPRESSED IN FETAL LIVER, SIGNAL = 2.2; EXPRESSED IN PLACENTA, SIGNAL = 2.4; EXPRESSED IN BRAIN, SIGNAL = 1.7; EXPRESSED IN HEART, SIGNAL = 1.8; EXPRESSED IN BONE MARROW, SIGNAL = 2.4; EXPRESSED IN HELA, SIGNAL = 2.2; EXPRESSED IN LUNG, SIGNAL = 2.1
gggaggaggaagagaaccactgctacaagatgccctcactgattagcagcactgccaagttgtggtgcagggcaggagccagaacatagaatctgctccttcagaccatgtctttccacccaggcatctattcctccgtcctgctgcctgtcctgctgcttctctgcgggaacaccctcagggtcactctattcagagcctcagagcctataaggggctgggtgcctgctgagctgccttgactgcagctcaggctgggaggtagaggctgctgggccatcacatcttttccctgatttcacagggactaagtgaggcctgggaggatggaggggcagaaggagaaggctgctcagggctgccaggagcctcaccttcgtttacgaggtaccgtgcgtagacgaggagccaatggcggtactcgtggctggactgcagggtgagtgctgctgccacctggttctctaggtaggccagggtggtctcttgctgcaccacatgaggcacggagaagagccgggcagcctgccttcccgagctgcagagaccaggagagtttccatgatggggcagcaggcactacacagag

SEQ ID NO: 8876 - DNA, 547 bp, Homo sapiens
  MAP TO AC009989.6; EXPRESSED IN PLACENTA, SIGNAL = 1.6; EXPRESSED IN FETAL LIVER, SIGNAL = 2.5; EXPRESSED IN ADULT LIVER, SIGNAL = 1.9; EXPRESSED IN HEART, SIGNAL = 2.6; EXPRESSED IN BRAIN, SIGNAL = 2.3; EXPRESSED IN LUNG, SIGNAL = 2.1; EXPRESSED IN HELA, SIGNAL = 2.9; EXPRESSED IN BONE MARROW, SIGNAL = 1.5
ttttccacagatcaggagggtggggagatggtttcaggatgaaactgttccaccttagatcaacaggtattaaattctcataaggagtgtgcaacctagatccctcccatgcacagttcacagtagggctcgcgctcctatgagaatttaatgctgccactgatctgataggaggcggagctcaggtggtaatgctcacctacctgccattcacctcctgctgtgccgcccagttcctcacagaccacggaccagtactggtctgtgactcaggggtgggggacccctggtctaaagctcaaggaggtggaacataacattccactccagtgtgcaccttacccggtggcttccttctcaggagcacagtatgtaagcagggaaaggagtaacctgctttgcagcagagaggcctggcaaacactcctcagcaggcagttaatgtcaacatcaacagccatgagtcatgttgatagaatgtaccctagacacggtatgatgagaatagcaccttacctcccccaaacccataaccctaccctgagca

SEQ ID NO: 8877 - DNA, 580 bp, Homo sapiens
  MAP TO AC004025.1; EXPRESSED IN ADULT LIVER, SIGNAL = 2.3; EXPRESSED IN BRAIN, SIGNAL = 2.4; EXPRESSED IN BONE MARROW, SIGNAL = 2.3; EXPRESSED IN FETAL LIVER, SIGNAL = 2.7; EXPRESSED IN HELA, SIGNAL = 2.8; EXPRESSED IN HEART, SIGNAL = 2.3; EXPRESSED IN LUNG, SIGNAL =   2; EXPRESSED IN PLACENTA, SIGNAL = 5.4
tctctctgggccacagtttcccactctataaaatgggtaaataagacttagtctcatagggttgctttaaggaataaatgaataaacctatataaagtactagaacagtccctggtacaagataatcattcaataaatgatatagaagttgacaatgatgctaatgatggagatagagatgctgggtattgtgggtacaattacgtagaggcaacagcctttgctatccagtagctaatgggggagtatagacaaagagacaatttcagtgcagtaagttctgagacagggtgagtacacagggtatccagttttgtcctagagggcatattagttagtgtaaagttgctgtaacagagacctcaaatacagtgacataaagactatagaagtgtatttctctttcacctaatatttccgaagtgaatagttatgttagtaatgtagactgactcctgtaacaaacaattcccaaatctgagagactgaagacaataaaatgcttatttcttgatcacatcatggtctcatcaggtgattagataagtgtccttccttgtggtcatttaggaacccaggc

SEQ ID NO: 8878 - DNA, 596 bp, Homo sapiens
  MAP TO AL157789.1; EXPRESSED IN BRAIN, SIGNAL = 4.8; EXPRESSED IN ADULT LIVER, SIGNAL = 4.6; EXPRESSED IN HELA, SIGNAL = 4.3; EXPRESSED IN HEART, SIGNAL = 2.6; EXPRESSED IN PLACENTA, SIGNAL = 3.7; EXPRESSED IN LUNG, SIGNAL = 8.9; EXPRESSED IN FETAL LIVER, SIGNAL = 3.4; EXPRESSED IN BONE MARROW, SIGNAL = 4.2
aagtgctcaaaaatggtggcggctgctattattattatcatgcctgtttctctgtgtgtttattctaattcatcctttgtcttttcctcctccactccaggcgtgaccagggggtatctggggaccaggtctccatcatggtggatggagtccaggttgcactaccatcatacgaggaggctgtatatggcagttctggtcactgtgtgccacctgctgaccccagagtacagattgtgctgtcagaagggtctgggcccagtgggaggagcgtgccaagggagcaacagctgccggaccaaggggcctgctcctctgcaggtggagaagatgaggccccaggccagtctggactatgtgaagcctggggctctcgggcctcagagactgtgatggtgcatcaggcaaccacctcttcctgggtggccggctcagggaaccgccaactggcacacaaagaaactgcagattcagagaacagtgacatacaaagccttttatccctcacgtcagaggagtacacagatggtgagtggtccaagctgaacatgaattattagctgcttagggtccttgctgggagtgaggaaggactg

SEQ ID NO: 8879 - DNA, 564 bp, Homo sapiens
  MAP TO AL136092.7; EXPRESSED IN BONE MARROW, SIGNAL = 4.9; EXPRESSED IN FETAL LIVER, SIGNAL =  13; EXPRESSED IN LUNG, SIGNAL = 3.8; EXPRESSED IN PLACENTA, SIGNAL = 7.8; EXPRESSED IN BRAIN, SIGNAL = 6.6; EXPRESSED IN HELA, SIGNAL =  10; EXPRESSED IN ADULT LIVER, SIGNAL = 6.6; EXPRESSED IN HEART, SIGNAL =  11
ccgagactgggaagaaaatgatgtttaactggacttacagttccatatggctgggagacttcagaatcatggtgggaggtgaaaggcacttcttatatggcagcagcaagagaaaatgaggaagatgcaaaagcagaaacccctgatgaaaccatcatatcccaagagacttattcactaccatgagaacagtgtgggggaaaccatccccatgattcaaattatctcacactgggtccctcccacacaattatgggagtacaattcaagatgagatttgggtggagacacagagccaaaccatatcattctgcccctgggccctcaaaatctcatgtcttctcatttcaaaaccaatcatgcattctcagcagttccccaaagtcttaactcatttcagcatcaacccaaaagtccacagtccaaagtctcattttagacaaggcaagtcccttctgcctatgagcctgtaaaatcaaaagcaagctaattacttcctagatacaatgggggtacaggtattggtggccctcttctcacagctccattaggcagtgtcccagt

SEQ ID NO: 8880 - DNA, 541 bp, Homo sapiens
  MAP TO AL133233.2; EXPRESSED IN BONE MARROW, SIGNAL =   2; EXPRESSED IN HEART, SIGNAL = 2.6; EXPRESSED IN BRAIN, SIGNAL =   2; EXPRESSED IN PLACENTA, SIGNAL = 2.6; EXPRESSED IN FETAL LIVER, SIGNAL = 2.4; EXPRESSED IN ADULT LIVER, SIGNAL =   2; EXPRESSED IN HELA, SIGNAL = 2.8
ggtcatggtttgtttcctggtggagtgacccaaacctccattcctgaggtgtctgggtcatttgtaatcctgcctggattgggctattgtagtttcccattgaccttaatactaagaaatgccctaatggatctcctgtattccatgtatgctcttccttacctccattatggaatagtagactgatttcatcttgatagtctgggtcaatcaccacagccaacactgtaactcccttcttagcctgttgacttaaaggtagaaggagcccaaagtgtccaggtggcagtcttaacatccagtttaatggaatcattgttgtgtctcctggtggcagtgttcctccctctggaactaagacctctaggccagcagaacgtaatgtcatgggaacaggaagcaaaaatgttgctactggatcactaggggtgatggtgaatggtgtcacttccaccccttgattcttggacccatcctggctatcagagaaatagtaccatatactggatgctgattcaaagcatacccagccttctggaga

SEQ ID NO: 8881 - DNA, 558 bp, Homo sapiens
  MAP TO AC024019.2; EXPRESSED IN ADULT LIVER, SIGNAL = 2.4; EXPRESSED IN HEART, SIGNAL =   2; EXPRESSED IN BRAIN, SIGNAL = 2.6; EXPRESSED IN PLACENTA, SIGNAL = 1.9; EXPRESSED IN BONE MARROW, SIGNAL = 2.2; EXPRESSED IN FETAL LIVER, SIGNAL =   2; EXPRESSED IN HELA, SIGNAL = 1.9
tgaaaaagcaaactgcatgggtggcttgtcttcttaaccacatcaccagcctcgctctccaccttagagcactataatcacttgactagcaaacacatatacagtataaatatttaagaaaaagtaaattctattaagccactgtgtgatagatgcagtggtaggtacttatctttgaaatattaaactctagacatttatatccatacaaaaaagagtttcctgccatttgatgagaattatgtgcctggcactaataaaatattaaactccaatttaaaagataagtatcttatccacttttttcataataaaacattttacagtgctcaagaaagccaatatgcatcagaatttccatacaatactgtatttacaaactttcataaaagttttgtgtctgcatttatcagtggctggtttcacactagcatcctgatcattctccctaatgatacggtgcatttcaataatgcatgatggaaggtgtacaaacagcgctttgtttttgtgtatggtaattccatatttttggttagtggttctccctggcaatta

SEQ ID NO: 8882 - DNA, 588 bp, Homo sapiens
  MAP TO AC005410.1; EXPRESSED IN BRAIN, SIGNAL = 1.4; EXPRESSED IN PLACENTA, SIGNAL = 1.5; EXPRESSED IN HEART, SIGNAL = 2.1; EXPRESSED IN HELA, SIGNAL = 2.9
aatcattgcagggacacctctctgattatacactcacatttcaagggtgtcagaccacacagggacgcctgccttggtccttcacccttagtggcaagtcccgcttttctggggaagggtcaagtaccccaaccccttctcttgtctctaccccttctctgcttttctggggcaggggcaagtacccctcaaccccttctccttcacccttagcggcaagtcccgctttcctagggggcaagaaccccccaatcccttatttccacaccccaacctcttatctctgcgccccagtcccttatttccacgccccaacctcttgtctctgcgccccaatcccttatctctgcgccccaatcccttatttccacaccccaacctcttatctctgcgccccagtcccttatttccacgccccaacctcttatctctgcgtcccaatcccttatttccacgccccaacctcttatctctgcgccccaatcccttatctctgcgccccaatgccttatttccgcgccccgacccccccctcccgcttttctggaaggtaagaacccccgaaccccttccctccgtgtctctacg

SEQ ID NO: 8883 - DNA, 537 bp, Homo sapiens
  MAP TO AC002059.3; EXPRESSED IN PLACENTA, SIGNAL = 4.4; EXPRESSED IN BONE MARROW, SIGNAL =   5; EXPRESSED IN ADULT LIVER, SIGNAL = 6.4; EXPRESSED IN LUNG, SIGNAL = 5.1; EXPRESSED IN BRAIN, SIGNAL = 5.9; EXPRESSED IN HEART, SIGNAL = 5.5; EXPRESSED IN HELA, SIGNAL = 7.5; EXPRESSED IN FETAL LIVER, SIGNAL = 7.4
ggactgcctggtgaagagtcaagccaatgtcttcccaagcaacccaggaggtggtggaggtagcacggtgggtggcagtggcttaccatggggttagagtcggagatgaggtctttaagggtgtccaggaagccctggtcctccaccagctgggcgttgatgtcgtggagcttggccacgcacacagctgctgtcttgcgcacatatggatcctcgtccttcaggcacttccggagtggctcgcacaggtactctgtgatcttgtcaacgcggatgcagcccatggtccgcactgccagggctcggatgagggggttggggtcctcacagtcctggggggaaccagccatcggccagggcaggggtgggatgagccatctgtggcttcatattctccctggcctgcagctctgagccctgctaggctgagcgacatcagatggctgctgtggatcttcaccaactacagccaacaacagcaaaagtaaatgctatataaccagcacccatgccagctctgcacaccatctcctctga

SEQ ID NO: 8884 - DNA, 518 bp, Homo sapiens
  MAP TO AC011501.2; EXPRESSED IN BRAIN, SIGNAL =   3; EXPRESSED IN PLACENTA, SIGNAL = 1.9; EXPRESSED IN BONE MARROW, SIGNAL =   2; EXPRESSED IN FETAL LIVER, SIGNAL = 2.5; EXPRESSED IN HELA, SIGNAL = 2.6; EXPRESSED IN HEART, SIGNAL = 2.3; EXPRESSED IN ADULT LIVER, SIGNAL = 2.8; EXPRESSED IN LUNG, SIGNAL = 2.3
aaaggatccaggactcccagggctcaatattagataagagagtgttggccatgaacctcctcaaagatttccactgagtggaggacagacaccctcatttcctcactctctcctgtctcatgttctaggaaacccttcaaatagttggccttcaccactgaaccaagctccaaaaccggtgagtacagaaccctcttatatccgttttggaaccctggggaggtgggaaccttggattcaggcgttgactcagatctcacagctctgacattgtacacttgtcttccaccatctccgaactcagatactcctacagcgaaagggatctgggcccaacacagggctcagtgaatctcttcatctctcattttatggagctgagacctcctacaagctagaaaatgattgccaatctgacatccttctcaggaaaaatgcaatgtttgttcacctgcattcctaactggaggataaattcctggagacttgagagagggagggaagggaacatctgatga

SEQ ID NO: 8885 - DNA, 557 bp, Homo sapiens
  MAP TO AL158219.1; EXPRESSED IN BRAIN, SIGNAL = 2.3; EXPRESSED IN PLACENTA, SIGNAL =  27; EXPRESSED IN BONE MARROW, SIGNAL =   2; EXPRESSED IN ADULT LIVER, SIGNAL = 5.5; EXPRESSED IN FETAL LIVER, SIGNAL =  13; EXPRESSED IN HELA, SIGNAL =  18; EXPRESSED IN HEART, SIGNAL =   2; EXPRESSED IN LUNG, SIGNAL =  14
atctcagcagctccaacctcggtggactgtgtggtgaccactggggtgctctcctcaatctgctgagacgagtacttgtccagctcccctagttcttctgagccaactgtcatattgggccagaatgtctgccatgatcttggtgaggtcctgagatctgggggcatctggctccacagtcaacccagagctggcagtctgggcttgcagaccttttacttcctcttcatggttcttcttcatgaaaagaagctcctccttgagagcctcaatctctgtctccagctgcagccgagtgacattagtgtcatcaatgaccctgcggagtttatggatgtcactctccacagactggtgcatggccagctctgtctcatacttgactctaaagtcatcagcagcaagacgggcattgtcgatctgcagaatgatgtgggcgttgtccacagtatttgtgaagatctgagcccttaagtcctcgatggtcttgaagtaatggctccagtctctgacctggggtcccttcttctccaagtgctcccagattttgctctcca

SEQ ID NO: 8886 - DNA, 551 bp, Homo sapiens
  MAP TO AP001341.1; EXPRESSED IN PLACENTA, SIGNAL = 1.5; EXPRESSED IN BRAIN, SIGNAL = 1.6; EXPRESSED IN LUNG, SIGNAL = 3.6; EXPRESSED IN HEART, SIGNAL = 1.8; EXPRESSED IN HELA, SIGNAL = 1.9; EXPRESSED IN FETAL LIVER, SIGNAL = 1.7; EXPRESSED IN BONE MARROW, SIGNAL = 2.7; EXPRESSED IN ADULT LIVER, SIGNAL = 2.8
aatgtggtccttcatcagccaaaatgttatgtggcacatgactgtaataccttttcttacactccaagagaatgccagaagaaactcatttaaaaatctgaatttttaaaagcaatttgaagtcagatttccttttactttaggatgctaacatgttaattctttcaggattagaatagaaactacataattttacatcaatagactctacaccttgttgcttaatattgatttaagaaattcaaagcaaatataaaagaactaaaaaggttagtatgtgtaggcaacagaaagctgatatttgtaacagacatgatttgctatctctgaaaggctttcccccatgtctccctagctggcggaggtgcagtgtaggtaaagtgaccaccttcaaccttctacttggccatgccaagggaggttaccctatcctcagtcgtgataaagctcatcttggcaattgcattgctcttgagaataattaacctactaatagacgtgtgactttttttgctatttaaagaactaaaaccaagcagccctttgattaa

SEQ ID NO: 8887 - DNA, 582 bp, Homo sapiens
  MAP TO AC021107.2; EXPRESSED IN BRAIN, SIGNAL = 1.8; EXPRESSED IN PLACENTA, SIGNAL = 2.5; EXPRESSED IN FETAL LIVER, SIGNAL = 1.9; EXPRESSED IN BONE MARROW, SIGNAL = 1.9; EXPRESSED IN HELA, SIGNAL = 2.6; EXPRESSED IN HEART, SIGNAL = 2.3; EXPRESSED IN LUNG, SIGNAL = 1.9
ctcactaaggctgacctggctatggcctctgatgagtgcccaatttgccagcagcagagaccaacactgagcccatgttatgggacaatttctcagggtgatcagacagctacatgatggcaggttgaatatattggacctcttccatcatggaaagggcaaaggtttgtcctcactggaataaatttttacatttctcatggctttgcctattctgcatgcaatgcgtccacgaagactaccatcagtggactcacaaaatgctttattcatcatcatgttattccacgctgcatttcctctgaacaaggcactcactttaaagctaaagaagtgtggcagttggcttctcctcattaaattctctggtgttaccatgctttttatcatcctgaagcagctagataaatagaatggtaaaatggctctttgaagttacaattacaatgccaattatgagagaatactttgaagggcctgtggcaaagttctccagaagaccatgtgtgctgtgaatcagcatccaatatgttgtactgtttctctcacagcaagaattcatgggtccaaaaatcaagggtt

SEQ ID NO: 8888 - DNA, 549 bp, Homo sapiens
  MAP TO AC021881.2; EXPRESSED IN HEART, SIGNAL =   2; EXPRESSED IN BRAIN, SIGNAL = 1.4
cagtgtggcaagcagaagagtggccagaacggtgcagaggtttgagctgtggcacccggcgtgacctctcattcccggccgggtcccggtgacagatccgccgcctccactctgcaactcctcgccgcagtgagacgctgccccgctgctggccggcccgagccccctccccagcgccggcctcaccttttcatagttctgcatgaggcggctgatactctcgcgctcgacctgccattcgggtttcttcagttgcttcctcaactgcttctttttgttctgcctatggctgtgttttttcttccagcgattgaagctccgcaccgggtcgggtcgggctcccgaacccggagagttggccgttttgcccattgcggcggcggcggcgacagctcggatcaaccccagacacgagacacctaaggccagactcacggaaccagcatgggacaaacgcacagaggcgcatgcgcgaactcagaagcccgcccccgagcttttgaaaccggggcacgcgccaatgacgtcaggaaaaggagggctgtgatt

SEQ ID NO: 8889 - DNA, 587 bp, Homo sapiens
  MAP TO AP001328.1; EXPRESSED IN BONE MARROW, SIGNAL = 6.3; EXPRESSED IN HEART, SIGNAL = 4.7; EXPRESSED IN LUNG, SIGNAL =  12; EXPRESSED IN BRAIN, SIGNAL = 5.9; EXPRESSED IN PLACENTA, SIGNAL =   6; EXPRESSED IN ADULT LIVER, SIGNAL =   6; EXPRESSED IN FETAL LIVER, SIGNAL = 4.2; EXPRESSED IN HELA, SIGNAL = 4.8
aggaaagagagaagggcaggaaaaacagggcttgggagaatacgacaggggaagtctgtttgctagatgtgattcagtttagttctttattctctacctgctcccacttttgtggggtgcctgcttcctgctgcaggatagtgaggtgtgttactgcaataatatctggaatggactctggggctacaaattccagagggtataaatgatactgctgaggctgccccacaggtgtatgtttaactttctgaatctggcttacattctcccattcttcaaaaattacgttttctgtggtagcaagaggcagttatgatgattcagaaagataatgcctactggtgctttactagattctcttcctggaaagtccttgctaaaattatgtcaaggtcatataaggacagttttgtgtgtgtgtgtgtgtgtgtgtgtttgggacaagactgattctgtatcactttaaaagtatacagttgaaggatgagtaaacaacaacagcaaggttaagtgtttgagtaacattgtttcagtgataactgatctgagtttgatatcttgacacaggctgccactttggattcagt

SEQ ID NO: 8890 - DNA, 553 bp, Homo sapiens
  MAP TO AC005201.1; EXPRESSED IN BRAIN, SIGNAL = 3.5; EXPRESSED IN PLACENTA, SIGNAL = 3.4; EXPRESSED IN HELA, SIGNAL = 4.6; EXPRESSED IN BONE MARROW, SIGNAL = 3.2; EXPRESSED IN FETAL LIVER, SIGNAL = 3.9; EXPRESSED IN HEART, SIGNAL = 4.4; EXPRESSED IN LUNG, SIGNAL = 4.4; EXPRESSED IN ADULT LIVER, SIGNAL = 3.7
caggggagtgagccagttaccttggacatgatagaaagatgactggaagagaaacgctgtttctttccagccccatagaaattgaattgttaccgttgtacaagtcctgtgtaagggtggcttccctcatagagcttgcagatgtgaggaggaatgttcctgagagataagaagctgttgaatggtttatgtttgtcatttgtgccaaccaagaaaaggacttttgtttcagttctgaggggtgaaggaggtgggcataaggagtggggctagtgcctacagccagaggagactggtacttaagcgagagcctgttgctctgtgctccccaggcaccacagaagcagcagaggcttttctgtaggtactaccatggcaagagggctccacagcttctcatcactcacttggaagaggatgatgagtgggacatcatcaggtattataatgtcatgtctgaggaggaaatcaaaaggatgaaggagattgtgaagcccaaagtaagtttctcagttggttctcaccacattttccctctgccacttcctgagac

SEQ ID NO: 8891 - DNA, 578 bp, Homo sapiens
  MAP TO AC004554.1; EXPRESSED IN ADULT LIVER, SIGNAL = 2.9; EXPRESSED IN BONE MARROW, SIGNAL = 2.7; EXPRESSED IN LUNG, SIGNAL = 2.8; EXPRESSED IN PLACENTA, SIGNAL = 3.3; EXPRESSED IN BRAIN, SIGNAL = 2.8; EXPRESSED IN FETAL LIVER, SIGNAL = 3.4; EXPRESSED IN HELA, SIGNAL = 3.7; EXPRESSED IN HEART, SIGNAL = 3.2
ggtgtccagcattctgtgtgtggggagagagccaggcatccagccgcagctgggctggggaccgggagacagggtcatgttcaatcaacagcagaagtgtctggctcatctggctaattgcatcctccaactcctctacttggagtgtgtgggtgggggttccactgatctccaggatgtggtccctggggtggatggcattgcagctgttgggactgatgtgcatctggttgacctcttttacttgcacggtggtaacatagttggagcaggcattctccacggacacggagaagctccgcctgccctctgtgatggccagcatggacatgagcatgacagagtagggcagctggtcctgaatggactctgtggagagtatctcaaatatgggtgccagcaccacctcatttgtggcactttccacagtatagggtgacacgcagcaccagggcgtatgcatccccatcctcaatggtcaccttatagctcacacaggcaaagcattctggatggtacttgaactccctattagcagcagcaaatctgcatgggtctgcagcaacctcaattcttcc

SEQ ID NO: 8892 - DNA, 585 bp, Homo sapiens
  MAP TO AC012558.6; EXPRESSED IN FETAL LIVER, SIGNAL = 5.8; EXPRESSED IN HELA, SIGNAL = 6.3; EXPRESSED IN HEART, SIGNAL = 4.5; EXPRESSED IN LUNG, SIGNAL = 2.4; EXPRESSED IN PLACENTA, SIGNAL = 2.8; EXPRESSED IN ADULT LIVER, SIGNAL = 2.6; EXPRESSED IN BONE MARROW, SIGNAL = 3.3; EXPRESSED IN BRAIN, SIGNAL = 3.1
ggttgacatggtggtcacacaggtttgggaggacctgggatgtctcaaggcagtgaggaaggctgcagaggggtttgttgctatgtaagtgtgttgggggtgggcagggtatgagttcccagctgaggttgaatttagaactcacccacctaggatgatggtttcgtttggttccacagtcttcagtgcctctgtctgcaaaggtggtcctttggggcagaggatacagctggcctctgaacctccctcacatggtccagaggggctatgattactaatatgcattggtttctcagggcatcttagcagcaggaaacaaagcttgcatatttttgggagcaggaagtaaacagcgtaccttcccctgcagggtaattagaaaagcaaagagtttgtgctgggaaataaggtagggagccagttgttcagaaaatactcaaaacagccacttgacaggggtcccctggaggacccttgaggtgtgtggaactggggcagttcaggtggaaaaattccccttcctccttggaaaaggggtaaccttaagacaaaatgttctaagcagctcttggttccttctgccag

SEQ ID NO: 8893 - DNA, 599 bp, Homo sapiens
  MAP TO AC018719.2; EXPRESSED IN BRAIN, SIGNAL = 6.6; EXPRESSED IN HELA, SIGNAL = 8.9; EXPRESSED IN BONE MARROW, SIGNAL = 5.8; EXPRESSED IN FETAL LIVER, SIGNAL = 8.7; EXPRESSED IN HEART, SIGNAL = 7.2; EXPRESSED IN LUNG, SIGNAL = 5.3; EXPRESSED IN ADULT LIVER, SIGNAL = 7.2; EXPRESSED IN PLACENTA, SIGNAL = 5.8
cttagcctcccaaagcactggtattagaggtgttagccaccatatccagcctgtcttctcttttattatttagctttattatctcttttccttgggtttatcctgtttctcttttattaactttttaagttcaatgcttagctcattacttttcattttagcttatttcacaattttaactttttatttctaagtaatcgtagttcacagaaagttgtgaaaataataaagagaattgctatgtacccttcacccagtttctcccggtggttacatcttaggtaaccatcgtacaatatcaaatccaggaaactgacattggtacaatgtgtatgtataattttatgccatttatcacgtgcattgatttgtgtaacctcaccatcacaatcaagacacagaacagttccatcattaccaagatctccctcctacctatcgttcatagtcacatccattcccttcccatccaccatgcctaactcctggtaactacaaatctgctcagcatctctatggttttatcattttgagaatgttatataaatgaaatcatacagtatgtgacctttgagattgacctttttcacttggcaaaa

SEQ ID NO: 8894 - DNA, 584 bp, Homo sapiens
  MAP TO AC004460.1; EXPRESSED IN PLACENTA, SIGNAL = 1.9; EXPRESSED IN BRAIN, SIGNAL =   2; EXPRESSED IN HEART, SIGNAL = 2.7; EXPRESSED IN HELA, SIGNAL = 4.1; EXPRESSED IN BONE MARROW, SIGNAL = 2.6; EXPRESSED IN FETAL LIVER, SIGNAL = 2.1; EXPRESSED IN LUNG, SIGNAL = 4.5; EXPRESSED IN ADULT LIVER, SIGNAL = 1.8
aagtggctttgaagactggctaccatccggctgtgaggaatcattagcagtgaggccaagtttggggagcctgagaggagctgtgtaccaagaggacggtttttgttttgttttgttttgtttgagaatccagaagcccttattgtctgcttcctttctcagctgaacccctgcctccagagcccccagcagtgccctctgaggtggagccgcagcacctgaggaaggaactagatagagtggcaggagagctccaggtccaggtcaaaaacaatcagcgcataagtctcctgaactggggacaagacgagaggattcgagagcaggaagagaggcttcggaagcaggaggagaggttttaggagcagcataagaggcttcagcagctggccgagccacagagcatcttcaaggagctggtgcgttgcccctcctggggagcctgccctcccaagccctctgggcctttgtttccccacctctaaaatggggcagtgtagccctcatgtgaaaggttacttctaaaggcacctgtgagccaggtggctgtgggagagaggggatgatttttctaaccggcctcc

SEQ ID NO: 8895 - DNA, 599 bp, Homo sapiens
  MAP TO AC021036.3; EXPRESSED IN BRAIN, SIGNAL = 3.2; EXPRESSED IN PLACENTA, SIGNAL = 2.3; EXPRESSED IN FETAL LIVER, SIGNAL = 3.1; EXPRESSED IN HELA, SIGNAL = 2.6; EXPRESSED IN BONE MARROW, SIGNAL = 2.1; EXPRESSED IN HEART, SIGNAL = 2.7; EXPRESSED IN LUNG, SIGNAL = 3.5; EXPRESSED IN ADULT LIVER, SIGNAL = 5.1
tttttcacaggtccccattccttaagcggtaattctattaaaacaagataccatcctttggtaatggtgtctgaattatacctgtagaaatactttaaacattcttaagttttactaaatcttacatagcatttaacatgatagcaaaagaggtaactatgaacagaatacagtttatttccttaaaaactgcttttgtaaaagaggtcatactttgcttttttcataaaatctccctttgaatatgttaaggctggaaaaataatgccaaaaaaacttgttgcacataaacaaattaagagaccaacagtacagtaaaacataaattttaatgtttctctacatttagaaaagtaggatccaacttaccttggctactaatgaggccaacattatccccaccatccaggctcaaaattcaggcggcatcatctctttccaacatctagtcacacatcggtgtcccttcttctgccgcaatacctttatcattgagtctttcttttctatttccacaatcaccaccctgattgaattctgatcagcttatgcctaactagtgccacaatctcctcactcggctccctacctcctcactt

SEQ ID NO: 8896 - DNA, 565 bp, Homo sapiens
  MAP TO AC005323.1; EXPRESSED IN BONE MARROW, SIGNAL = 2.4; EXPRESSED IN HEART, SIGNAL =  63
tgccatctaatgtttgtgtaatttggctaaaaatagtcatatataaacttggtcattttgaattgttgcaaataaagatgaaaagggcacaagttaatgaagaccttggctttggagacagtctccatgttactagcaaggtcattgatctccatcttcagctcactcttttccttctccagcttctgcttgacccgctgaaggctgtcaatctgctccccaagctcagccacactatctgcgtgcttcttccgaagagcagctgccgtggcttcgtgctgcagggtggactcttccaggtccctgcgcattttctggaactcagcctcccgcttcttgttcatctcaatctgggctgaagtggccccaccggcttcttccagcctctcactgatctcctccagctcccgggagaggtcagagcgctgcttctctgctttggcccgggaggcccgctctgcctcgatttcctcctccagctcctcaatgcgggcctggttgtgatatgtcaacattaatgtgaatttatgtcagttttgtttcctgtaatgcccagaaaaggtgg

SEQ ID NO: 8897 - DNA, 584 bp, Homo sapiens
  MAP TO AC016025.11; EXPRESSED IN BRAIN, SIGNAL = 3.3; EXPRESSED IN PLACENTA, SIGNAL = 2.4; EXPRESSED IN FETAL LIVER, SIGNAL = 3.9; EXPRESSED IN HELA, SIGNAL = 3.4; EXPRESSED IN BONE MARROW, SIGNAL = 3.2; EXPRESSED IN HEART, SIGNAL = 3.1; EXPRESSED IN LUNG, SIGNAL = 2.1; EXPRESSED IN ADULT LIVER, SIGNAL = 3.1
ttcatcttgacaccaggcacttcccatgagcccatgggtcagtctttgagcaagatcagatggcagcagctggccctgctcctggccgcctcctcccagttcgtccatttcacagagagcctgcctgtcagcagaggcaccctgctcccctctgccacactagagtgaggaagtaagaggatactccttttcttcatccccagctcacaatttaaacgctgaacctgcaggctataaagagacggaagttcccccatccagagactagacgaagatttgtggatgtttgagaaggcagagtggccactgcacccccggggctggtcctgcagcttcaaggtcctgaaccaataggacttcctgggccgtggggccagagatgcctcaggcactcccttgcattctctgtgcccaactatgctgagcgcagccgcgcaggttccctggatggaatggcaggaatgagcgcaccacattctccagggcttccctgccaggagcagcagtcacgagcacagggccctgccagccactccccggagtctgctccacgtcggctggtcacataccctgagcctctccag

SEQ ID NO: 8898 - DNA, 561 bp, Homo sapiens
  MAP TO AC002401.1; EXPRESSED IN BRAIN, SIGNAL = 3.3; EXPRESSED IN PLACENTA, SIGNAL = 1.5; EXPRESSED IN BONE MARROW, SIGNAL = 2.8; EXPRESSED IN FETAL LIVER, SIGNAL = 1.9; EXPRESSED IN LUNG, SIGNAL = 4.3; EXPRESSED IN ADULT LIVER, SIGNAL = 1.6; EXPRESSED IN HEART, SIGNAL = 2.5; EXPRESSED IN HELA, SIGNAL = 1.8
atggactccacaacggtaggaatcccctggcgactctggccccagtgctaggatgggggtaccctttggctcctgctggcccccaccaacccagggccgtgcctttctctctcagctgcagagcctggagcaggagaaggggcgctggcgggtggagaaggcgcagttggagcagagtgtggaggagaacaaggagcgcatggagaaactggaaggctactggggtgaggcccagagcctgtgccaggctgtggacgagcacctgcgggagactcaggcgcagtaccaggccctggagcgcaagtacagcaaggccaagcgcctcatcaaggactaccagcagaagtacgtggctgggggctgggcgggctgggcccagggagcattgagaggcttttggggacagtccctccccatccctccagctgagtagggaggcacagaagttggagggccccatggtggggacacccggtccggaatgaccaggcatcagagccagcacagagccagacccccagaggctttgggaaaacctggggcctcctgacctgagaacag

SEQ ID NO: 8899 - DNA, 527 bp, Homo sapiens
  MAP TO AL158841.1; EXPRESSED IN BRAIN, SIGNAL = 3.2; EXPRESSED IN PLACENTA, SIGNAL = 1.5; EXPRESSED IN BONE MARROW, SIGNAL = 1.8; EXPRESSED IN ADULT LIVER, SIGNAL = 3.7; EXPRESSED IN HELA, SIGNAL = 1.7; EXPRESSED IN HEART, SIGNAL = 3.2; EXPRESSED IN LUNG, SIGNAL = 1.7
ggacccaaaagggaagaaagactaaaaagcaaggagatcttgaggtaagaaagagaggaaaatcttagagaataggcctcagcattctagttggcagggcaggacagatcacctttgaaggtgtgcctggcacaataggtgtagcaaacctgtgcttgtagagggaagaaccaaaaattggaatatcttttggaagtgttgtctgagtcagctcggggtgccataacaaaataccataaactgggcttaaataacagaaattagttttctcacagttctggagggtggatgtccaagaccagggtcctagcaagtttggattcgagtgagggctctcttcttgacttgtagacagctgtctgaaagacactatcttcctcattcgcttcacgtatttgtgtttcctgtgttgagaaggagctgtgacttaactgagcataattaaaaacttattttacagcagatggttttatcaatgcaacacataactacatcactttttttttgcatccttctttggcttgctc

SEQ ID NO: 8900 - DNA, 541 bp, Homo sapiens
  MAP TO AC004551.1; EXPRESSED IN HEART, SIGNAL = 4.1
attgaccgtttgtccctcaggtactacaaatataacttctaggaaggaatccgttctaggaagagtgttttcccatctctgctctgcaatctagaaagtggggagagtgagtgatcccaggtttgaaattctggaacattgggggtagacctgaacctgggcttctgaagctgctgtttcaggaagtctccaacagtcttgtccttggcgttgtagttgatggtccagtagatacagagctggcggtactgggtgaccagctccaggaccgtgcggaagccctcagccatgttgaactgggagtccttcccgccctgctcccaggcatacacagtcaggagttccagcccgtgctgtgggggtagggagcctctccccttggagatcttggtacactggagaacgagaagaaagatatgttggttcatattggcactgatgaggtacagaagggattattctggacttggcaaagcaaccccaaaacttttattgagcacctacatgtgccagatgccttgccatgcattatcccatcaca

SEQ ID NO: 8901 - DNA, 533 bp, Homo sapiens
  MAP TO AC022374.1; EXPRESSED IN BRAIN, SIGNAL =  18; EXPRESSED IN HELA, SIGNAL =  52; EXPRESSED IN HEART, SIGNAL = 1e+02; EXPRESSED IN ADULT LIVER, SIGNAL =  16; EXPRESSED IN FETAL LIVER, SIGNAL =  34; EXPRESSED IN BONE MARROW, SIGNAL =  68; EXPRESSED IN LUNG, SIGNAL =  72; EXPRESSED IN PLACENTA, SIGNAL =  29
gacttcgaacaggagatggccaccgccgcatcctcctcctctctggagaagagctaggagctgcctgacagcctggtcatcaccattggcaacaagtggtcctggtgtctggaggcgctgttatagctttccttcctgggcatggaatcttgtggcatccatgagaccaccttcaactccatcatgaagtgtgatgtggacatctgcaaagacctacatgccaacaaggtgctgtccagcggcactaccatgtacccgggcatcaccaacaggatgcagaaggcaatcactgccctggcacccagcaccatgaagatcaagatcatcgtgcccccagagcgcaagtactctgtgtggatctgcagctccatcctggcctcactgtccatcttccagcagatgtggattaacaagcaggagtacaacaagttggcccctccatcgtccaccgcaaatgcttctaaatggaccgtaagcagatgtgtagcatttgctgcatgggttaattcagaagtataaattgcccctggcaa

SEQ ID NO: 8902 - DNA, 556 bp, Homo sapiens
  MAP TO AC002400.1; EXPRESSED IN PLACENTA, SIGNAL = 2.1; EXPRESSED IN FETAL LIVER, SIGNAL = 2.5; EXPRESSED IN ADULT LIVER, SIGNAL = 2.5; EXPRESSED IN HELA, SIGNAL = 2.4; EXPRESSED IN HEART, SIGNAL = 3.3; EXPRESSED IN BRAIN, SIGNAL = 2.2; EXPRESSED IN LUNG, SIGNAL = 2.2; EXPRESSED IN BONE MARROW, SIGNAL = 2.4
tcctgtccatcaacctttccatcaacagtactcatgctgctctgctccccatcaggtatgacaatcggtgcaggaacatgagccaggagcaggtggcccagaagctggccaaggaccccaagcctgcgatccgcttccgcctggagcaggtggtgccagccttccaggacctggtctatggctggaataggcatgaagtggccagcgtggagggagacccagtcatcatgaagagcgacggcttccccacataccacctggcctgcgtggtggacgaccaccacatgggcatcagccacgtgctgcgaggctctgagtggctcgtctccactgccaagcacctgctcctctaccaggccctgggctggcagccaccccacttcgcccacctgcccctgctcctcaacagggatggcagcaagctctccaagaggcaaggggacgttttcctggagcactttgctgctgatggcttcctgcccgattccttgttggacatcatcaccaactgtggctcaggttttgcaggtacgtgcccacctgaatagtcctggca

SEQ ID NO: 8903 - DNA, 579 bp, Homo sapiens
  MAP TO AC024006.2; EXPRESSED IN BRAIN, SIGNAL =  45; EXPRESSED IN PLACENTA, SIGNAL =  65; EXPRESSED IN ADULT LIVER, SIGNAL =  38; EXPRESSED IN BONE MARROW, SIGNAL = 1.6e+02; EXPRESSED IN FETAL LIVER, SIGNAL = 1.2e+02; EXPRESSED IN HELA, SIGNAL =  96; EXPRESSED IN HEART, SIGNAL =  38; EXPRESSED IN LUNG, SIGNAL = 2.8e+02
ccacccagaggtggatagtctgataaactctcaacacaaatgtgcttgccaggaaccacatcaatgatggcagcatcaccagacttcaagaatttagggccatcttccagctttttaccagaacggcgatcaatcttttccttcagctcagcaaacttgcatgcaacgtgaaccatgtggctatccagtgcaggggcacagccagcgctgatttggcctggatggttcaggataatcaccggagcagtgaagccagctgcttccactggtgggtcgtttttgctatcactagcaacattgccacaacaaacgtccttgacagacacattgttgacactgaagcccacactgtccccaggaaaagcttcactcaaagcttcatggtgcattttgacagattttacttcagttgtaatattgactggagcaaaggtgaccactataccaggtttgagaacaccagtctccactcggccaacaggaacagtaccaataccaccaattttgtagacatcctggggaggcaggcacaagagcttgttagttggacgatttggtggtaggatgcagtccagagcc

SEQ ID NO: 8904 - DNA, 586 bp, Homo sapiens
  MAP TO AC005301.22; EXPRESSED IN HEART, SIGNAL = 2.9; EXPRESSED IN LUNG, SIGNAL =  19; EXPRESSED IN PLACENTA, SIGNAL = 1.6
gatgtcccctttggactgtgcctcgctgaaggggtactccacggtcaccatgtaggagtactgcagcaccgtgacgtggatgctgtcctggcccacatccatccgctgaatcacctcctccatgaactccttgctcctgttgaagttggcttcaccaattttgtccgatccttccaggacaaatgccacatccagaaccatggagttcctcttgggccccagggtcgaaagccccaagagccccgggcccacagtgacttgtgccatgtgggggggcagagtaggaggaggggcgtcaggggcaaggtcacagaggtagctaacgatctcttccctttgctgctccagctcatccacaccgctcagcacgaaggccttgttctcaggggcctgcttctcaatgaggcggatctgcttgaggttggcatggggcccaatgcccaccgggatcacgatgaccttcttcttcttcaggccctggacgtagcggacaaagttccgggacatccgttggggctcctggctggccatcaggagcagggcgatgcggaaggcttcagggcggtcgatcttgctgatgatttgg

SEQ ID NO: 8905 - DNA, 522 bp, Homo sapiens
  MAP TO AC019205.2; EXPRESSED IN PLACENTA, SIGNAL =   2; EXPRESSED IN BONE MARROW, SIGNAL = 5.5; EXPRESSED IN LUNG, SIGNAL = 4.6; EXPRESSED IN HEART, SIGNAL = 4.8; EXPRESSED IN BRAIN, SIGNAL = 2.8; EXPRESSED IN HELA, SIGNAL = 6.7; EXPRESSED IN FETAL LIVER, SIGNAL = 6.2; EXPRESSED IN ADULT LIVER, SIGNAL = 2.5
tgagttgcccagttaggagcctctgacctgctattgtcattaagtttcttctcaatattcatggccaaaatctagcttctaaaagaaaggcttttggtcttttcaatcacttgctgatagggtgagagtacattgttaccataaccacatgacctaatttagaatcaatcttggcatccagtcttgcatttctaatcacatttacaatccacctttcagtttcatctggagtcatgttcaatttgtctgccaacatgttaatgctgatacactggtggatgtgacagaaagtctcaaatatgaagagatgggcattgtcaatgaaatccttaagacaagccaccaagaagtcgttcacaagcactgattcacattctctcagctttttcttagccccatctaagtcaaagttaatctataagcattcaacaaattctgtaattgggtctttatatgtgtaagactcctgttgagtaactttacctagatcttttagcacctgccaacgttttcgaacatcct

SEQ ID NO: 8906 - DNA, 590 bp, Homo sapiens
  MAP TO AC017025.3; EXPRESSED IN BRAIN, SIGNAL = 2.2; EXPRESSED IN PLACENTA, SIGNAL = 1.6; EXPRESSED IN FETAL LIVER, SIGNAL = 2.3; EXPRESSED IN ADULT LIVER, SIGNAL = 2.2; EXPRESSED IN HELA, SIGNAL = 2.5; EXPRESSED IN HEART, SIGNAL = 2.4
tcagcactagggaaaatggctaacctgccaggttatcacactgctgcttcagatgttcatcacagttttgaagcaatgtcatggacatgaatcagtatcccttctgttcaaaatgcttagtgagttcacccataatgccctgcaggacatagcacagttttatggcaatgaatgtgcctggtttataatccattggattgttcttcccaagcatcatctgcccgtgttcacctccttcagcacctgctagacgtgcacttcaccagccatgggaagaacgttcagtctgttaagtcaatgtagtgctatttgtgtttcttctcgcatgtcataaaaatgatatgtccatgaatctgacacccttctattcagatgtctgacatctgactcgttacattccactggatgtacttcaccagcactgagaagaatggacagtaaatcatgtcattgtggtgctatttctgttgtacctcacaggtcagaatgaatgttatgcccatggatctgaatcccttctgttcagatgtttgacatctgtcttgttaaacactccattgaatgcagcctggcttgatggcaatgaaaat

SEQ ID NO: 8907 - DNA, 550 bp, Homo sapiens
  MAP TO AC021012.2; EXPRESSED IN BRAIN, SIGNAL = 3.5; EXPRESSED IN PLACENTA, SIGNAL = 2.9; EXPRESSED IN HELA, SIGNAL = 3.9; EXPRESSED IN ADULT LIVER, SIGNAL =   4; EXPRESSED IN BONE MARROW, SIGNAL = 3.7; EXPRESSED IN FETAL LIVER, SIGNAL = 3.9; EXPRESSED IN LUNG, SIGNAL =   3; EXPRESSED IN HEART, SIGNAL = 3.7
tgactgacaccaagacccaggaccctgcatcactttgtctctcctttcagatgaccaggacctggatgagctccagctggagatggaggactcaaagccacaccccagtgtccagtgtagccctactccaggtgaggtggtgtctggggaatggggacgagggggaatggagaaagggcacccaaccacctagttgaggtattagttcagcctggcatgtctgcagccacattctttgcctgactcccagcctgctgcaagagggccctcctttcgtaattcctggggaaggaactggagttctttcccttgggtggctgcttgaggggagtagcatgaatggaggcgaagtcaagcaatcagccaattagcatttatgcatccaggataaaactactgttacacaggagagaagcaggaaagaatgccttgaccccattgctcagggtggcacgtgggactgcttttgagtaatccctcagtctaagacccataccacagaatcctagagccaggtgggactccaacaggtcaccttctccatccctcc

SEQ ID NO: 8908 - DNA, 503 bp, Homo sapiens
  MAP TO AP001331.1; EXPRESSED IN BRAIN, SIGNAL = 7.3; EXPRESSED IN PLACENTA, SIGNAL = 7.8; EXPRESSED IN BONE MARROW, SIGNAL =  12; EXPRESSED IN FETAL LIVER, SIGNAL = 7.7; EXPRESSED IN LUNG, SIGNAL =  24; EXPRESSED IN ADULT LIVER, SIGNAL =  11; EXPRESSED IN HELA, SIGNAL =  10; EXPRESSED IN HEART, SIGNAL = 5.8
acatggttgctaaaccccagacagaatagaagatgtgtggttcttacctctgacctgctattctgattaagtttcttctcaatattcatggccaacatctggcttctaaaggaaaggcttttggtcttttcaatcacttgctgatagggtgagactgcattgttacccataaccacatgaccctaaaaggaaacacagggaaattgatcctataatgttaatgactgagtttctcaggtaagtaaaaagcatgacatacctttgcgcatattttaatgcactgtatagagatgacaatatttaccaaggaagaaaaaaaataggaggcttctgttgccttcaaagaactgttttacattaaaacaaaataaattattaaaggaggtaataaaatgtcctagttaagaattcccaaaagtataatcaggaactgatagtatgtagcatagctaacataatactcactaatttagaatcaatcttggcatccagtcttgcatttc

SEQ ID NO: 8909 - DNA, 532 bp, Homo sapiens
  MAP TO AL157996.1; EXPRESSED IN ADULT LIVER, SIGNAL =   4; EXPRESSED IN HEART, SIGNAL = 2.8; EXPRESSED IN BRAIN, SIGNAL = 4.6; EXPRESSED IN PLACENTA, SIGNAL = 4.7; EXPRESSED IN BONE MARROW, SIGNAL =   3; EXPRESSED IN FETAL LIVER, SIGNAL = 3.3; EXPRESSED IN HELA, SIGNAL = 3.1
ggaattgacagtgggggtcccggggttgggggcatctttggctagagatggagtttctgcctcccctcagtctggcctgatctgacctagctgggatcccaccccgaccacggtctcttctgcccacacccaacattcccactcgagggtcaggttcattccatagagaatttgccaccgccccagggcaggggccccatctccattctcccggcccagactatggtccacattttcctgcgggagccagtgtagagtgaaaaggggtgacgccaaggtcacacaggaaagcagaggcacgacggcgactggagggggtgggaggggtaacgacgcccaggctctctccccggcggtctccttggggcgcgggggcgcactcaccgccgggaccacttggccgacggcctgccgaaaggcctcttccacagcacgccgtagagctgcactttggtgctgatatccagggcgtccgagtcagcctgctccagggacggcgagggcgacaccgagttggacttggacgtgaaca

SEQ ID NO: 8910 - DNA, 543 bp, Homo sapiens
  MAP TO AL157817.3; EXPRESSED IN BRAIN, SIGNAL = 4.3; EXPRESSED IN PLACENTA, SIGNAL = 5.6; EXPRESSED IN HELA, SIGNAL =  12; EXPRESSED IN ADULT LIVER, SIGNAL = 3.4; EXPRESSED IN BONE MARROW, SIGNAL = 9.8; EXPRESSED IN FETAL LIVER, SIGNAL =  11; EXPRESSED IN LUNG, SIGNAL =  10; EXPRESSED IN HEART, SIGNAL = 5.8
aaaggttggcctgacaaatgatgctgcagcatgttgtactggcctgctgctggcatgcaggcttctcagtaggtttggcatggacaagatctataaaggccaagtggaggtaaccagagatgaatacaacgtgggaagcactgatggtcagccaggtgcctttacctgctgtttggatgcaggccttgccagaaccaccactgacaataaagtttttggggctctgagagtgctgtggatggaggtttctctatccctcacagtgcctaacgattccctggttatggttctgaaatcaaggagcttaatgctgaaatgcatcagaagcacatcatgggtcagaatgttgcagattctgcaacgtgcattacctaatggaagatgcttgcaaggcaagaacctttattgtagtttccatgggaaggaatggatgaggcaaggtaagcaagcttaggatcgactagttagaataatttcagcaggccctgggatgtaggggctttcctgaattgtctgacacctggtcctgggatgattaggcaa

SEQ ID NO: 8911 - DNA, 552 bp, Homo sapiens
  MAP TO AC025286.1; EXPRESSED IN ADULT LIVER, SIGNAL = 8.7; EXPRESSED IN HELA, SIGNAL =  19; EXPRESSED IN HEART, SIGNAL = 9.8; EXPRESSED IN BRAIN, SIGNAL = 9.7; EXPRESSED IN PLACENTA, SIGNAL = 7.8; EXPRESSED IN BONE MARROW, SIGNAL =  35; EXPRESSED IN FETAL LIVER, SIGNAL =  18; EXPRESSED IN LUNG, SIGNAL =  32
ttagcacagtgggagaagccatgagcagcaaagtctctcgcgacaccctgtacgaggcagtgtgggaagtcctacgtgggaaccagcacaagcaccgcaagttcctagagacagtggagtcacagatcagcttgaagaactatgacccccagaaggacaagcgcttctcaggcaccatcaggctgaagtccactccccggcccaagttctccgtgtgtgtcctggaggaccagcagcactgtgacgaggccaaggccatgggtatcccccacatggacatcacatggacatcgaggcgctgaaaaaactcaacgagaataaaaaactggtcaagaagctggccaagaagtatgatgcatttttggcctcggggtctctgatcaagcagatttcacgaatccttggcccaggcctaaataaggcgggaaacttcccttccctgctcacacacaacaaaaacacggtggccaaagtggatgaggcgaagtccacaatcaattccgaatgaagaaggtgttatatctggctgtggctgtgggtcacgtgaagatg

SEQ ID NO: 8912 - DNA, 540 bp, Homo sapiens
  MAP TO AC013827.4; EXPRESSED IN PLACENTA, SIGNAL = 3.1; EXPRESSED IN BRAIN, SIGNAL = 3.8; EXPRESSED IN HELA, SIGNAL =   5; EXPRESSED IN ADULT LIVER, SIGNAL = 3.3; EXPRESSED IN FETAL LIVER, SIGNAL = 6.2; EXPRESSED IN LUNG, SIGNAL = 3.7; EXPRESSED IN BONE MARROW, SIGNAL = 3.1; EXPRESSED IN HEART, SIGNAL = 4.8
ccacacaaaaacctgcacacaatgtttatagtgttatttataattgccaaaacataaaagcaacctagatgttcttcagtaagagaatgcataaataaactgtggtacatgcagacaacggcatgttattcagtgctataaagaaatgatctatcaaggcaggaaaacacataaaggaaacataaatgcatattactaatttaaagagggcaaacggtaaaggctacacactacatgattccaactatatggcaacttgggaaaagcaaatctatggagacagtaaaaagatcagtgagtgccaagtgttagtgggaagtatgggaaggatggataggttgagcacagagaaattttacggcagtggaactactctgtatgatgctatcgtggtgaatatatgtcattacacgtttgcacaaacctataaaatgtacaatatcaagagcgagccctgttgtaaactctggactctggatgatgatatgtcattgtaggttcatgaattgtaacaaatgtaccactttgttggaggctgtt

SEQ ID NO: 8913 - DNA, 576 bp, Homo sapiens
  MAP TO AC020558.2; EXPRESSED IN ADULT LIVER, SIGNAL = 1.9; EXPRESSED IN BONE MARROW, SIGNAL = 1.5; EXPRESSED IN FETAL LIVER, SIGNAL =   2; EXPRESSED IN HEART, SIGNAL =   2; EXPRESSED IN BRAIN, SIGNAL = 1.8; EXPRESSED IN PLACENTA, SIGNAL = 1.8; EXPRESSED IN HELA, SIGNAL = 1.9
gcagacgaaggaaaggacagtgtggagtgctcagcagagtccccatggtcgcacttgggaagaacgccctggcagtggacggtcagtggtcacatgcacatgcgaggccctcaggactctgtaggacacgacgtggcttctccacagtcctggggatcggaagcagatgcagaatgtggccgagtggcccgggccagggcctgagagtctgcattctgacatgcttccccggtggtgctgctggtctgggaaccacactgggtttaagtaactgatttaagtaactgatgcgaggaggccatgctctgggggaaggcagctggagaggagaagaatgatgtccccatgccccttccagcctcagagtcctctagacccggcagtgtgcaggaacggcagcttcactgcccatcccctggggtactccctgcagccttgggccctgctcctgcaacggtggccgaacggtgcaaaggagggggcggcccagtccctgcaggctgccctcaacctgggtttgctcatctgtgagatgggatcacatgtataatcctggctacttcacagagcccaggc

SEQ ID NO: 8914 - DNA, 508 bp, Homo sapiens
  MAP TO AC000134.14; EXPRESSED IN HEART, SIGNAL = 2.1; EXPRESSED IN BRAIN, SIGNAL = 1.4; EXPRESSED IN BONE MARROW, SIGNAL = 2.2; EXPRESSED IN FETAL LIVER, SIGNAL = 1.6
tctccctcagattgtcccagcaccccttgtgcctggcacccctggattctccacccccaagaacctagagtgacgaggggcagccacttaagtcaagatcgccagctccctggcagcgccttcagcccatacccccaccccaggctccccagcagcaccttggggtccttctcatagtagtgctgctgcgtgcggatccagcgccccacgaggtggtcgcgcacggtatgggccagagcaaagtagtagtctcgtggggtggccacattgcggtcctttacgagtgtgaaatgcaggtgccggttgaagttctttttcagctcagtcacgttctccacgccggccaggccacgcacactgatttgctttcttttctcttggtctgacaggggccgggacatggctgcaggagggcgggccggactggactgatggtagaggggacggcggcctcagcactgcctccagccaaggagtggagctccccagcctcaaggggatttaaagc

SEQ ID NO: 8915 - DNA, 598 bp, Homo sapiens
  MAP TO AL133223.1; EXPRESSED IN BRAIN, SIGNAL =  14; EXPRESSED IN FETAL LIVER, SIGNAL =  19; EXPRESSED IN HELA, SIGNAL = 9.2; EXPRESSED IN BONE MARROW, SIGNAL =  13; EXPRESSED IN HEART, SIGNAL = 6.3; EXPRESSED IN LUNG, SIGNAL =  50; EXPRESSED IN PLACENTA, SIGNAL = 7.3; EXPRESSED IN ADULT LIVER, SIGNAL = 2.7
aacctgtgctctttggatacctaatgcgacatttaagttgtatttgacagtagatagtattttggatctattgaaatttgggttctacagatttcatttcacaatgaaagtttaggaattaatctttctaggttcctagtcatcactttttgattacaggtggttgtgtcaaaccgattggtgacatctccatgctgtattgtcacaagcacatatggctggacagcaaacatggagagaatcatgaaagctcaagccctaagagacaactcaacaatgggttacatggcagcaaagaaacacctggagataaaccctgaccattccattattgagaccttaaggcaaaaggcagaggctgataagaacgacaagtctgtgaaggatctggtcatcttgctttatgaaactgcgctcctgtcttctggcttcagtctggaagatccccagacacatgctaacaggatctacaggatgatcaaacttggtctgggtaagccttatactatgtaatgttaaaaagaaaataaacacacgtgacattgaagaaaatggtgaactttcagttatccaaacttggagcaccttgtcctgcttg

SEQ ID NO: 8916 - DNA, 557 bp, Homo sapiens
  MAP TO AL035705.22; EXPRESSED IN ADULT LIVER, SIGNAL = 1.5; EXPRESSED IN HEART, SIGNAL = 1.9; EXPRESSED IN HELA, SIGNAL = 1.7
ccttccattcaaaatccagctgcttcatagctcggtaaacttcagccataatgtcatacggtttgctctgacttcggattccaagatgccacttggcttttttcacagctaaagatttgggcttagtcgtattcagtgcatccaatggacatcttgctttggggctgtctgctataagaggtggcatcctttctggatgaggtttcaggcctgggggaatatgcatggcactatcatccataaaagaaccagatggaggactagaggcgaggtagaactcactggcttggttcattattctccgattgtcaatgataagatgataagccactgcaagctggtcttgagggtcaccactatataaactgttcattacttctgattctgtacattcaaatttttcacacacttctttcacagcctcatcatcaatgacgttagcatcataggaagggtcttcaggaaataagtaactgggcaaatcttgtttaaaccattcatgctctctaggaaaaacaccacaatacattattgtaagacatggtttggcaagtcca

SEQ ID NO: 8917 - DNA, 594 bp, Homo sapiens
  MAP TO AF223391.1; EXPRESSED IN PLACENTA, SIGNAL = 2.9; EXPRESSED IN FETAL LIVER, SIGNAL = 3.1; EXPRESSED IN HELA, SIGNAL =   3; EXPRESSED IN ADULT LIVER, SIGNAL = 2.8; EXPRESSED IN HEART, SIGNAL = 2.3; EXPRESSED IN LUNG, SIGNAL = 2.5; EXPRESSED IN BRAIN, SIGNAL = 2.7; EXPRESSED IN BONE MARROW, SIGNAL = 2.2
catgtgtcctgccctctcacatggcccctgtggccaccctccctgcctgcagcttctgggctctgaccgcggccctgccctttccccttggcaggagggagcggaggcgccggcaccacatgtccgtgtgggagcagcgtaccagccagctgaggaagcacatgcagatgtccagccaggaggccctcaacagagaggaggcgccgaccatgaacccgctcaaccccctcaacccgctcagctccctcaacccgctcaatgcccaccccagcctttatcggcgacccagggccattgagggcctggccctgggcctggccctggagaagttcgaggaggagcgcatcagccgtggggggtccctcaagggggatggaggggaccgatccagtgccctggacaaccagaggacccctttgtccctgggccagcgggagccaccatggctggccaggccctgtcatggaaactgtgacccgactcagcaggaggcagggggaggagaggctgtggtgacctttgaggaccgggccaggcacaggcagagccaacggcgcagccggcatcgccgcgtcaggacagaaggcaaggagt

SEQ ID NO: 8918 - DNA, 540 bp, Homo sapiens
  MAP TO AC002087.1; EXPRESSED IN ADULT LIVER, SIGNAL = 2.1; EXPRESSED IN HEART, SIGNAL =   3; EXPRESSED IN BRAIN, SIGNAL = 1.8
ctcttgtttttggggtttggcaagggtacgtttacctaggttgacggtaaagtcacagattggggaaaggggaatttgcggatttaattggaaatagttcttgaaattgagcatgcctgtatgtgtgagcatctattgattaattcttatgtctttcaagcatgaattaattaacaccttatggttattatgccagcctggaatattcaatacaagctcagcttctacaattgatttggcaggaatcaaatccgaattcgtccacagaggattggtcagggaccaggccgtccgcgatgctgtgatagcatcccccgaagttataaataccaactgcatgatggtgctcctgtgactggttaatagtgtggtagtcattagcccatcgacatgtcttatttaaggggaacgtgtgggcgatcttagttctatggccctgaagtaagaaccagatgccaggtatagtttcagtatagtcacccccaagtgtcatgggcccggagcgaggagagtagtactcccgagtgggatgatgatttc

SEQ ID NO: 8919 - DNA, 598 bp, Homo sapiens
  MAP TO AL133371.2; EXPRESSED IN BONE MARROW, SIGNAL =   4; EXPRESSED IN HEART, SIGNAL = 5.7; EXPRESSED IN LUNG, SIGNAL =  68; EXPRESSED IN BRAIN, SIGNAL = 5.6; EXPRESSED IN PLACENTA, SIGNAL =  11
gggtatctcgctgctctgaccttaggtagagtcctccacagaagcatcaaagtggactggcacatatgggctcccttcacaggccacaatgatgtgtctctccttcgggctggtccggtatgcacagttggggtacctggagccgtttgtcaggcggcagtctgtgatgtgcatgctggagttgctcttgtagcagttgccctgcccgttcttgcaggtgaccttttcctggaaacagacattctggacatctaccaggggctcgtgcacaaaggtgttcactggtttgcaccgcccctgtgtcatattccggcgcctcatcatttggttacagtaggtggagctgctgctgggggaactgtctgagtccatatgctgccgctggaatttcttggcccgggattccttgcccagggaaggctggacccagcccagcaccagcagtatcaggacaagcagaaggagccggacaagagacttctccagagccatggtggcctcactttcccagaaaagcctaattgagaaaaggagagagaaggaaaagagccctcttagaaaaagaactccagctcccacctatggcttgcctggttta

SEQ ID NO: 8920 - DNA, 535 bp, Homo sapiens
  MAP TO AL049836.2; EXPRESSED IN HELA, SIGNAL = 3.6; EXPRESSED IN ADULT LIVER, SIGNAL = 3.1; EXPRESSED IN BRAIN, SIGNAL = 2.6; EXPRESSED IN PLACENTA, SIGNAL = 2.5; EXPRESSED IN LUNG, SIGNAL = 3.2; EXPRESSED IN HEART, SIGNAL = 2.7; EXPRESSED IN FETAL LIVER, SIGNAL = 3.9; EXPRESSED IN BONE MARROW, SIGNAL = 4.1
aatcacactagcctgcccactgccaatcaataaagattaggaaatcgattgctaacttactcttgggttagataataaaattgtttgaaacatgcacctggaggaatttatctgtgaagagtcctttcagagtttgtttcaagctttgcaagtctctcatggctctgaggtcggggaggctgtgagggatcctccacgcccagcagacgtggaaggagccgacgttcttacgggagatggacagacggtcagcatgtgaatagtcccctgcatgcaggtgaggactggggcagtgcagagccgcagcagggatgggctatgcctgggagccgccagctctggatcaggtggccagggacggtcatgctgaagaggaaggctccagtgaagctctggaagaatgttctggtgcctgtatgtacaaaggcccccctaattcaggacctggccctgtacagatgaggagcaggaaggagccagtgtaactgaggccagtgtggctgcagcaaggggctggaggcgtgagaagaaacag

SEQ ID NO: 8921 - DNA, 584 bp, Homo sapiens
  MAP TO AC022035.2; EXPRESSED IN PLACENTA, SIGNAL = 2.4; EXPRESSED IN FETAL LIVER, SIGNAL = 5.8; EXPRESSED IN HELA, SIGNAL =   6; EXPRESSED IN BRAIN, SIGNAL = 3.3; EXPRESSED IN LUNG, SIGNAL =   2; EXPRESSED IN HEART, SIGNAL = 5.3; EXPRESSED IN BONE MARROW, SIGNAL = 2.6; EXPRESSED IN ADULT LIVER, SIGNAL = 2.8
ccttccgccatgattgtaagtttcctgcggtcttcccagctatgcagaattgtgagtcaattaaacctcttttctttataaattacccagtctcaggtatttcctcatcgcagcaagagaacagtctaatacagtaaactggtaccaatagagtggagtgctgctataaggatacctgaaaatgtggaagcgacattggaactgggtaacaggcagaggttggaacaatttggaggacacaaaagaagacaggaaaatgtgggaaagtttggaacttcctagagacttgaagggtttagaagacaggaagatgtgggaaagtttggaactttctagaaatttgttgaatggctttgaccaaaatgctgatagtgatacggaaaatgaaatccaggctgaggtggtctcagatggagaagaggaacttgttgggaactggaataaaggtaattcttgctatgttttagcaaagagactggcagcattttgcccctgcgctaaagatctgtggaactttgaacttgaaagagacaatttagggtatctggtggaagaaatttctaaggagcaaagcaatcaagagg

SEQ ID NO: 8922 - DNA, 563 bp, Homo sapiens
  MAP TO AL049832.2; EXPRESSED IN BRAIN, SIGNAL = 2.8; EXPRESSED IN PLACENTA, SIGNAL = 2.4; EXPRESSED IN FETAL LIVER, SIGNAL = 4.5; EXPRESSED IN HELA, SIGNAL = 4.6; EXPRESSED IN BONE MARROW, SIGNAL = 2.3; EXPRESSED IN HEART, SIGNAL = 3.9; EXPRESSED IN ADULT LIVER, SIGNAL = 2.9
gaactctcagcaaaccagggatagaagggaatttcctcaatgtgataaaggacatcaatgaagaactcatggccaatatcatacttaatggtgaaagactgaaagtgttccccaaagatcaggaaaaaggcaggaaagaccactctcaccacttcttttcaatatttcactggagggcctacctggtgcaattaggcaaaaaagaagtaaaaggcaattaaattagaaaggaaggagtaaaaccgtttttatgcatagaaaacatgattgtttatgtagacaacccaatggaatctacagaaatctacaaggactaataagccacatgcaaaatatatgaaaatcaatcgtatttccataggatagcaatgaacaatcagttactaaaattttaaaaatgttccaggtaggggaaaaacacttcacacccctcccagataattcacagggttttcaaaagcctcttatcccaagaactgaataaatgtggcatttcatacagacttcacaggggtcacattctagggcacatttcccactgtcctcagattatcctgccctgc

SEQ ID NO: 8923 - DNA, 592 bp, Homo sapiens
  MAP TO AL159165.1; EXPRESSED IN FETAL LIVER, SIGNAL = 8.5; EXPRESSED IN HEART, SIGNAL =   8; EXPRESSED IN BRAIN, SIGNAL = 8.5; EXPRESSED IN PLACENTA, SIGNAL = 6.9; EXPRESSED IN BONE MARROW, SIGNAL = 8.1; EXPRESSED IN ADULT LIVER, SIGNAL = 8.2; EXPRESSED IN HELA, SIGNAL = 9.6; EXPRESSED IN LUNG, SIGNAL = 7.7
gagacagagagcaaggagggaactgccaaacacttttaaactatcagatcttgtgggaactcactcactatcacaagaacaacatggggaacccccacttccccgatgatccaatcacttcccaccaggtccttccctggacacgtgaggattataattcgagatgagatttgggtggagacacagagccaaaccatatcagaggcaatcctctcaaatcctgccactgctgtatcgcctaaatttatgtaatatactgatccttccattattgtcatttcatcaatgttcacagtgtctttactggtggtagattccatcgcaagaaaccactttttttgctcatcctaagaagcaactttgcatcccttcatgttttatcatgagatttcaacaattcagtcacatcttcagggcctacttctaattgtagttctcttgctatttccatcatatctgcagcgactttctccactgaagtcctgaacctctaagtcatccataagagttggaatcagcttcttccaaactccttgcacttttatgttatgaagatggcttctttccttaaacctcatgaaccaacctctgc

SEQ ID NO: 8924 - DNA, 548 bp, Homo sapiens
  MAP TO AL135744.2; EXPRESSED IN ADULT LIVER, SIGNAL = 2.8; EXPRESSED IN FETAL LIVER, SIGNAL = 4.4; EXPRESSED IN PLACENTA, SIGNAL =   5; EXPRESSED IN BONE MARROW, SIGNAL = 4.8; EXPRESSED IN HEART, SIGNAL = 3.2; EXPRESSED IN LUNG, SIGNAL = 7.7; EXPRESSED IN BRAIN, SIGNAL = 1.4; EXPRESSED IN HELA, SIGNAL =   4
tgtgaagtgtcattcccagctccccctactcacgattgtagtagagttgtcctagctctactacacaaaatggtacaatgaagaatatcctttacttagccaattataactataagcctaatgtatttttattaggctaaacagtcgcaatatccagaatatctcatgctgtcagttttacagacataaagacaaaaaaaaaacgtgaatagaaaaactcaggcctgaattacatcatcaatgaaaaaattcacttacctaaaacctggccagcaatcattctgccatcctctcctgctacagcagcccgggcatttctctcattaacatactgaacgaaggcaaagcccttatgaacagagcagcccacaattttgccatacttcgaaaagattgcctccacatcagatttcttgaccacaagagtgttgagattcccaatgaatacacgggagttcatggagcgaggatctgtcttgttggtaacgttgctggccatcgtgtttgatggtaaggtttctcacaaagccgaaaactgtaaagcaaaa

SEQ ID NO: 8925 - DNA, 583 bp, Homo sapiens
  MAP TO AL049778.2; EXPRESSED IN PLACENTA, SIGNAL = 7.4; EXPRESSED IN HELA, SIGNAL =  10; EXPRESSED IN ADULT LIVER, SIGNAL = 6.6; EXPRESSED IN HEART, SIGNAL = 7.6; EXPRESSED IN BRAIN, SIGNAL =  11; EXPRESSED IN LUNG, SIGNAL = 7.4; EXPRESSED IN FETAL LIVER, SIGNAL = 9.9; EXPRESSED IN BONE MARROW, SIGNAL =  12
accacccaaaagctgaggagtgcgggtgcacggcggcggactggcaggcagctccatctgcagccccggtgcgggatccgctgggtgaagccagctgggcttctgagtctggtggggacgtggagaacctttacgtctagctcagggattgtaaatacaccaatcagcaccctgtgtctagctcggggtttgtgagtgcaccaatcgacactctgtatctagctactctggtggggccttgcagaacctttgtgtagatattctgtatctaactaatctggtggggacgtggggaacctttgtgtctagctcagggattgtaaacgcaccaatcagcgccctgtcaaaacagaccactgggctctaccaatcagcaggatgtgagtggggccggataagagaataaaagcaggctgcccgagccaacagtggtaacccgctggggtacccttccacactggggaaaatttggtcttttgctctttgccgtaaatattgttactgctcactctttgggtccgcactgcttttacgagctgtaacactgtaacactcaccatgaaggtctgcagcttcacttgtg

SEQ ID NO: 8926 - DNA, 522 bp, Homo sapiens
  MAP TO AL122010.2; EXPRESSED IN BRAIN, SIGNAL = 5.2; EXPRESSED IN ADULT LIVER, SIGNAL = 5.9; EXPRESSED IN BONE MARROW, SIGNAL = 4.3; EXPRESSED IN HELA, SIGNAL = 6.7; EXPRESSED IN HEART, SIGNAL = 5.6; EXPRESSED IN PLACENTA, SIGNAL = 4.1; EXPRESSED IN LUNG, SIGNAL = 3.4; EXPRESSED IN FETAL LIVER, SIGNAL = 6.1
cactattgcagtggtggcagagggttcaggacacagggcccccagcccagataggcctgggttcaaggctaggattcccttcacgggggtgacagcaggtagaaggggagcagccctccaccctagatggactggcttgctagaaagtgagtcaggaacaggggccagggacccacaactgagcacaaagtgaggtgttggacttgaccgtggtggagtctctgaccagagctgggctcagaagggcagctggccctctaattcctaaaggctgttctctcatgccatgtgctccaaaggtgctgtcatcagacatcagagacagtgtgaggaagccctagaggattggcctggtcttggccctgacctggagttgactggagtcctacactttccaacttggggctgaatccacaggcctcgccagcctttgtgcctgctgcctgctggccttcaccccacctggctccaggtcctccaggtcctccaggtcctccaggttggtactgagctggaagctgg

SEQ ID NO: 8927 - DNA, 579 bp, Homo sapiens
  MAP TO AC024019.2; EXPRESSED IN FETAL LIVER, SIGNAL = 2.6; EXPRESSED IN HEART, SIGNAL = 2.5; EXPRESSED IN PLACENTA, SIGNAL = 1.9; EXPRESSED IN BRAIN, SIGNAL = 2.5; EXPRESSED IN BONE MARROW, SIGNAL = 1.9; EXPRESSED IN LUNG, SIGNAL = 2.2; EXPRESSED IN ADULT LIVER, SIGNAL = 2.2; EXPRESSED IN HELA, SIGNAL = 2.5
gtctcttggctgtttggctcctctgtgggaatccaggggcccacagccttgccctgtagcttggcttatctggggcccacagccttaccctatagcttggcttgtctcggctctgacagcccaggttctttctccttccaaatgaagccccagggcaccaggcagagattgggtggtgatagtggctagcatgggcctgacaccatgtggttcccagaaacacatgcccacatgtgtggggcctgtgttccaacacagcgtggactggcccccctttcttttcactgacatggacagcatggtgtcctgccgcagggctgagggccgcacatgcagaggggtgcctgtgaagagacctttccataccacctgcccctcttgcaagtggtggggcatcattcggaagcttctgagaccctgtgaggcagaaagaacagagtgtggagtgtccccagaggcggcctctttcccctcccccaaaacacggaaccctgagcagatcacacggctaggtggaggttcagggggctcctctccattctgccgtggttggcagggtctgtgtgggatgaagtggtg

SEQ ID NO: 8928 - DNA, 599 bp, Homo sapiens
  MAP TO AC015788.3; EXPRESSED IN PLACENTA, SIGNAL = 2.1; EXPRESSED IN BRAIN, SIGNAL = 1.9; EXPRESSED IN HEART, SIGNAL = 2.3; EXPRESSED IN ADULT LIVER, SIGNAL = 2.1; EXPRESSED IN BONE MARROW, SIGNAL = 2.2; EXPRESSED IN FETAL LIVER, SIGNAL = 1.6; EXPRESSED IN LUNG, SIGNAL = 3.1
gcaaatgaaatacgggaaggtgaaataaatctctggcaaattgtctagtgtcttcacattaaaattaaatcattacttagaacctcctgacttctcttaagttcaagttttaatgagcttctgattatttataacttggggataattaaagacttacagggaagtgccatgctaggcaaaaaaaaacacttcccaaccttttatgctactgaccatcagaagcatttataagcagattctctagcttctgctttgcgtatttcttaccttagctccttctaaaggcaaatcatggcgtctgtgtttccgcataagcactgggtcagagcccactctactgtgccttccattgacatttgaactcgctgtgattccaggttttggagagccctcccctaggagtcgacatcccacaagctgattagtcccaaacacatcccgagggcaccatgcttcaagaggcattggcgggtctctggaaggcacgctttccacatgatggatgtgtctactcagtctattgtctggtgggattggtggaggtctttcaggtggcggtggaggaggatctcttaagggaggaggtggtgctgggagtg

SEQ ID NO: 8929 - DNA, 515 bp, Homo sapiens
  MAP TO AL158153.2; EXPRESSED IN BRAIN, SIGNAL = 2.2; EXPRESSED IN PLACENTA, SIGNAL = 1.7; EXPRESSED IN BONE MARROW, SIGNAL = 1.7; EXPRESSED IN LUNG, SIGNAL = 4.2; EXPRESSED IN ADULT LIVER, SIGNAL = 2.2; EXPRESSED IN HELA, SIGNAL = 3.1; EXPRESSED IN FETAL LIVER, SIGNAL = 2.5; EXPRESSED IN HEART, SIGNAL = 2.8
ctaggccacaggtgaaggagaacttttaatggaatggccttccccttagctacagagctcacagctgcagtttgtctctacctcactgtagatccttccctactcttctgtcacacctcctggttcctacttagttcctactcaccctcctccctcctctcttccctgttgacagaagccacagctaggtcagtgcaggaagtgggaggagacagcagaaaaatttatcctgggaaaaggactctatttgatcccagctcacccagttcactcttgaaggtgtgatcctgtgggagaatggagtggacattccgaatacttcctcctccaacaaaccagttcacattgggattccagcggttcacaaagccacagagatgattttcttcaaagtcacattctggggaagggaaacaaaaacacttcatggagacacagtcacacctgggtacacgcatcctactacagagtttgctcttagatattcagaagtttctctcttcctttgcccactg

SEQ ID NO: 8930 - DNA, 547 bp, Homo sapiens
  MAP TO AC010931.5; EXPRESSED IN PLACENTA, SIGNAL = 2.2; EXPRESSED IN BRAIN, SIGNAL = 1.5; EXPRESSED IN HEART, SIGNAL = 1.9; EXPRESSED IN HELA, SIGNAL = 2.1; EXPRESSED IN BONE MARROW, SIGNAL =   2; EXPRESSED IN FETAL LIVER, SIGNAL = 1.6; EXPRESSED IN LUNG, SIGNAL = 2.3; EXPRESSED IN ADULT LIVER, SIGNAL = 1.8
acatgagatttgaggctggggaaggaggtatggggttctaggcaagggaggaagcctcttaggcctggagcaagggaccagggtcctgggcaggtgacagagccccacggtgccctcgctaccctattaatgggcccagaatctggaagccagccgccatgtgccctcatgcccagggtcttcctgcaggtggagctgaagagccaagagtctcagagtctgcagcagcagcaagactagtacctgggtcacctgcagcagtacatggccacctatcagcagctgacctctgagaaggaggcgctgcacaggcagttactgctgcagacccagttcgtggaccagctgcagcagcaggaagcttggggcaaagcggtggctgagatggccggacaaaagttgcaggagacccaggggagggagttgctgaggacggggccccgagggggatgacctggcaacctccgtgccttctcactctgtttcccgtccccttaggagcacctagaagctgccagccaccagaaccaacagctagagacccagc

SEQ ID NO: 8931 - DNA, 583 bp, Homo sapiens
  MAP TO AC019155.2; EXPRESSED IN BRAIN, SIGNAL = 2.2; EXPRESSED IN PLACENTA, SIGNAL =   2; EXPRESSED IN ADULT LIVER, SIGNAL = 1.6; EXPRESSED IN FETAL LIVER, SIGNAL = 1.6; EXPRESSED IN HEART, SIGNAL = 3.1
tctgatgaatgccagtgctcattaaaggttccctactaagcactctctcttggtttcttgggtctctattcagtaccattgaaatagtacactaaatttggagaaaattgaacttcttctctatatttttgcttctaacttgagtttcctcaaaggcagagccatagacaaaggcttgcaaggcaagaaatgtaatcccaagaggttgagggtgagaagaggttagcaggaaaatagaaaaagcaaatgaaaagttgccttgtttcattacccattaggctgagacgtggtatttgatcttgccagatattgtgaagtttatgaaatgcatgtcagaacttgcaacccagaggacaacagggaagaaattttttcctgtaacttctgtcccctactcatcaaagatagcaccatcggcattgaagccccactcctagctgtctatccgtgagtgtccatcagacccctctaggaatactaagctgtgtcttcaaaaatgacaaaaaaaaagggccgaaagcaagaaaaagcccttgcacaagatgagacactgtcagattgcacctgtgaggttgagggacat

SEQ ID NO: 8932 - DNA, 525 bp, Homo sapiens
  MAP TO AL133467.1; EXPRESSED IN ADULT LIVER, SIGNAL =   2; EXPRESSED IN BONE MARROW, SIGNAL = 1.9; EXPRESSED IN BRAIN, SIGNAL =   2; EXPRESSED IN PLACENTA, SIGNAL = 2.2; EXPRESSED IN FETAL LIVER, SIGNAL = 5.9; EXPRESSED IN HELA, SIGNAL = 6.1; EXPRESSED IN HEART, SIGNAL =   5
cattttccccattgtcttggggattaacattcagctccgtattacttatgcaactttctgcagctggcttgaatttcttcttagaaaatgggtttttcttttctatcacattgtcaggctgcaaattttccaaactcttatgctctgcttcccgtataaaactgaatgcctttaacagcacccaagtcacctcttgaatgctttgctgcttagaagtgtcttccgccagatacccttaatcatctctctcaagttcaaagttccacaaatctctagggcaggagcaaaatgccaccagtctgtttgctaaaacataacaagagtcacctttgctccagttcccaaaaagttcctcacctccatctgagaccacctgagcctggaccttattgttcatatcactatcagcatttttgtctaagcaattcacgaagtctctaggaagtttcaaattttcccacattttcctgtcctattctgagccctccaaacgattccaacctctgcctgttacccagttccaaa

SEQ ID NO: 8933 - DNA, 571 bp, Homo sapiens
  MAP TO AC020904.3; EXPRESSED IN PLACENTA, SIGNAL = 1.6; EXPRESSED IN HEART, SIGNAL = 6.1; EXPRESSED IN HELA, SIGNAL = 2.3; EXPRESSED IN BONE MARROW, SIGNAL = 3.5; EXPRESSED IN FETAL LIVER, SIGNAL = 1.8; EXPRESSED IN LUNG, SIGNAL =   4
gccagaaactgctacccaaggctaagggtggggaagaacccctgcctgagggcttattttggctgctggtaactggatgtatcccaacagaggaacaggtatcttggctctcaaaagagtgggcaaagagggcagctctgccttcccatgtggtcaccatgctggacaactttcccaccaatctacaccccatgtctcagctcagtgcagctgttacagccctcaacagtgaaagtaactttgcccaagcatatgcacggggtatcagccgaaccaagtactgggagttgatttatgaagactctgtggatctaatcacaaagctaccttgtgtcgcagcaaagatctaccgaaatctctatggagaaggcagtggtattggggccattgactctaacctggactggtctcacagtttcaccaacatgttaggctatactgatcatcagttccctgagctcatgcacctgtacctcactatccacagtgaccatgagggcggcaatgtaagtgcccataccagccacttggtgggcagtggcctttcagacccttacctgtcctttgcagc

SEQ ID NO: 8934 - DNA, 567 bp, Homo sapiens
  MAP TO AC002060.3; EXPRESSED IN BONE MARROW, SIGNAL =  34; EXPRESSED IN FETAL LIVER, SIGNAL =   3; EXPRESSED IN LUNG, SIGNAL =  51; EXPRESSED IN PLACENTA, SIGNAL = 3.4; EXPRESSED IN BRAIN, SIGNAL = 2.5; EXPRESSED IN HEART, SIGNAL =   3; EXPRESSED IN ADULT LIVER, SIGNAL = 5.8; EXPRESSED IN HELA, SIGNAL = 3.1
gggagaatctggagaggaggctggagcagaagaggcctgattctcctcagtcctcagatgctgaggagtttcccatcaggaggtaagcgtccccgccaccgccaagttgacctcagtacagcaagggcccagcctgaggtccctatcctgggccttagtccttcacccacctgaaaactgaggccaggggctccccaggtggacaccaggactctgaccccctgcccctcatccaccccgcaggtcagcccaaggctgccccctcggtcactctgttcccgccctcctctgaggagcttcaagccaacaaggccacactggtgtgcctgatcagtgacttctacccgggagctgtaaaagtggcctggaaggcagatggcagccccgtcaacgcgggagtggagaccaccacaccctccaaacagagcaacaacaagtacgcggccagcagctagctacctgagcctgacgcctgagcagtggaagtcccacagaagctacagttgccaggtcacgcatgaagggagcaccgtggagaagacagtggcccctgcagaatgctcttag

SEQ ID NO: 8935 - DNA, 583 bp, Homo sapiens
  MAP TO AC023890.3; EXPRESSED IN PLACENTA, SIGNAL = 1.8; EXPRESSED IN BONE MARROW, SIGNAL = 2.2; EXPRESSED IN FETAL LIVER, SIGNAL = 1.9; EXPRESSED IN LUNG, SIGNAL = 2.2; EXPRESSED IN HEART, SIGNAL = 5.1; EXPRESSED IN BRAIN, SIGNAL = 1.4; EXPRESSED IN HELA, SIGNAL =   2; EXPRESSED IN ADULT LIVER, SIGNAL = 1.4
gtttctctccaaggtgccagatcagtctaactctgtgcacccttcagagtctatggaccaagttctaagaagcaaaaccactgccagtgggaaatgatacctgggatacccctctactctagttatttcttggtctgggaaagaaggtcttttctctagggcataaagacaactcctccaaggccaaagctgccactttcatcatttattttccttagtaaggcaactgatgtggaaaatgattttcaaaattatcttgtttgtatccccggggcgcaaaaaaaggcaaactgcagcttggcggcatgctgctatagaaaatgaaggaaagatcgaagaggtggcctcctgatgatatgtgaaaggctcccatttcctgtgggatactagacttcagtcagaagcatcaacatcatcaatcaagcgacactctctgaaacagggaagggacttacaaatcggctggagttgttgttccggacggtcttggcgttcccgaaggcctccagcagcgggttggactgcaggataatgtccttcacgtgctgtcccagcaaatagaccggaggttaggaaggtgtga

SEQ ID NO: 8936 - DNA, 545 bp, Homo sapiens
  MAP TO AL133368.1; EXPRESSED IN BRAIN, SIGNAL = 4.8; EXPRESSED IN FETAL LIVER, SIGNAL =  20; EXPRESSED IN BONE MARROW, SIGNAL =  20; EXPRESSED IN LUNG, SIGNAL =  31; EXPRESSED IN PLACENTA, SIGNAL = 8.8; EXPRESSED IN HEART, SIGNAL = 8.9; EXPRESSED IN HELA, SIGNAL =  27; EXPRESSED IN ADULT LIVER, SIGNAL = 8.4
ccaagaaaacaccaaatggcgaatgagaccagtgcagtgggagggcctagaggccccaaaatgggaagccacagcagtggcatccagggctaaggctggggccacggagctggtggtggcaaggccaaggccaaggccaaggccaaggagtaggtccccatcatcaaactgggcagcatagtcaaggacatgaagattaagtccctgaagctctatctcctctccctgcccatcaaggaggctgagatcatcgactttttcctgggggcaaccctcacgaatgagtttaagattatgccagtaaaaatggagacttgcactggccagtggtccagattcaaggcacttgttgccattggggactaaaatatccatgtcggtctgggtgttaaatgctccaagacggtacctactaccatccaaggagtcatcatctttgtcaagctctccactgtcccggtgcagagaggcatctcaggagacaacactggcaagccccacggcattccttgcaaggtgacagaccactgcaactctgtgctggt

SEQ ID NO: 8937 - DNA, 500 bp, Homo sapiens
  MAP TO AC019219.2; EXPRESSED IN PLACENTA, SIGNAL = 7.1; EXPRESSED IN BONE MARROW, SIGNAL = 7.8; EXPRESSED IN HELA, SIGNAL = 9.3; EXPRESSED IN LUNG, SIGNAL = 5.3; EXPRESSED IN HEART, SIGNAL = 7.7; EXPRESSED IN BRAIN, SIGNAL = 7.8; EXPRESSED IN FETAL LIVER, SIGNAL = 8.5; EXPRESSED IN ADULT LIVER, SIGNAL = 8.7
cagagaggtctcctgcaacccccaactagcaagaaggccctcaccagatacagcctgttggccttggacttctcaacctccataagtgtaagaaataagttcattttctttataaattacctagtttccagtattctgttatcagcaacagaacagggactaagacatggtctcaataataatctcaaaaactatttctgtcctcagaggtcataattgcgttgaagacttaggttccaagaagggacataccacaaagtgggacactacacataatagaagtaaaattgctcttctttcaaccacagaggcagagctcattaattctgactgtgaggaaggatttgaggtaggcttaataaaagagataatatttgagctaagccttgaaggagaagggtgatgttgacagaggagaagatggaagggcattttagagagagagaacaggtatgattaaagccataagctccatgaacagggatgagttgttggaagga

SEQ ID NO: 8938 - DNA, 542 bp, Homo sapiens
  MAP TO AL133246.1; EXPRESSED IN BRAIN, SIGNAL = 1.8; EXPRESSED IN PLACENTA, SIGNAL = 2.2; EXPRESSED IN FETAL LIVER, SIGNAL = 4.9; EXPRESSED IN ADULT LIVER, SIGNAL =   2; EXPRESSED IN HELA, SIGNAL = 5.5; EXPRESSED IN HEART, SIGNAL = 4.6; EXPRESSED IN BONE MARROW, SIGNAL = 1.9
taggctgcacacagaacagggaccctgggcccggcccacaaaaccactctttcctcctgggcctccggacctgttattggaggggctgctgtgaagacccctttcgccctggagacattttccccattgtcttggggattaacattcggctcctggttacttatgcaaatttctgcagctggcttgaatttctcctcagaaaatgggattttcttttctatcgcattggcaggctgcaaattttccgaacttttatgctctgcttcccttataaaacggaatgcctttaacagcatccaagtcacctcttgaatgctttgctgcttagaagtttcttccaccagataccctaaatcatctctctcaagttcaaagttccacacatctctagggcaggggcaaaatgcctctagtctctgtgctaaaacataacaagagtcacctttgctctagttcccaacaagttcctcatctccatctgagaccacctcagcctgagtttcattgtccatatcattatcagcattttggtcaaagccatt

SEQ ID NO: 8939 - DNA, 588 bp, Homo sapiens
  MAP TO AC018573.2; EXPRESSED IN ADULT LIVER, SIGNAL = 2.4; EXPRESSED IN FETAL LIVER, SIGNAL = 2.9; EXPRESSED IN LUNG, SIGNAL = 3.3; EXPRESSED IN PLACENTA, SIGNAL = 2.5; EXPRESSED IN BRAIN, SIGNAL = 2.3; EXPRESSED IN HEART, SIGNAL = 2.6; EXPRESSED IN BONE MARROW, SIGNAL = 2.6; EXPRESSED IN HELA, SIGNAL = 3.1
gatgctgattagaggtgcccaggtacatcagcagatcatattccaaatgatagttcaacatacataaaaggctcaatacaaaggaaatagtgatatcctcaaatggtgtgtttagaaaagagaggaggtggtgagcattttttccccaagaaaatgctatagaattattttcaaattaatactcctttcaatgtcttgatttcccagcttaccctttacatcagaggagagcacagcactgttgccacagtcctcacaaagtactatcaccgtgggtatgatacacaaagaatggagctaactctcaaacaggaagtcaccatctcgtcaatcagatggtacacattagaaatgaaaagatcagcaatatgtagaaagcaataaagaacatgtagaatcgagagaaggaattctgagatcttgccctttttcacaggcggctccacagtttatcaacagctgggaaatttcctgttcacaggaaaaggatgacttcttagttcacgttaaagtggaaatgacaaaaactgactgcatcacacagaaaaaaaggtgtttcctgaaaaaaggagagacagagtgctgcct

SEQ ID NO: 8940 - DNA, 538 bp, Homo sapiens
  MAP TO AC010931.5; EXPRESSED IN PLACENTA, SIGNAL = 2.5; EXPRESSED IN BRAIN, SIGNAL = 2.6; EXPRESSED IN HEART, SIGNAL = 2.7; EXPRESSED IN ADULT LIVER, SIGNAL = 2.7; EXPRESSED IN BONE MARROW, SIGNAL = 2.3; EXPRESSED IN HELA, SIGNAL = 2.6; EXPRESSED IN FETAL LIVER, SIGNAL = 2.5; EXPRESSED IN LUNG, SIGNAL = 3.3
cagatcagaaagggagcaggtcaggactcccgcaccgaccggtagtgggactgtgcctgggcaatatagcaagatcttggttcttaaaaggaaaaataaagaacagcagctcactcccctctggggagaggctggctcagggttacacagtcagggtggggacagaggtgggcccacagtacctcccttgttgggttgtctgaggacccctctggccacctccctacaggagatggaggacaacatctggacagtgaggaggaggaggcgcctcggcccacgccaaacatcccagaggacctggagagccgggaggccacggtgagcctgactttccctgccccgctttgccaccttcctctgtggtccctcccagacccccttatgctcttggttttcccaccttctgattgctctggcccctcaccccttccgggagccagtggtcagacactttgtcacctgtgaccaacaggtgcactctctgaggccccaagggaaggggttgttctccacctccctgcctcatttgttctgt

SEQ ID NO: 8941 - DNA, 576 bp, Homo sapiens
  MAP TO AC018836.2; EXPRESSED IN HEART, SIGNAL =   2
ccctcaggctgtactcaagctgatttgaatggcaaagaacctctgtggggaaactagccagtgcaaaagcccagaggtggagttaggaaatagctggtgagacagaagcctcaggagacctcgcagcagggatttatgttggggaagatgatggggcagagaggaagccaaagaccagtgaggaggcagtggtgtgggccaggctcaataaaggatggctgcttctgctgtttcctactttaggtcaaagctggttctgtgaagcaggagtttgaaaagcaagatgaactgaagcgctctgcaatgagggcagtggctgccctgctgaccatccccgaggtggggaaaagccccatcatggccgacttctcttcccaaatcagatccaaccctgaacttgctgccctctttgaaagcatccagaaggattccgcttcagcccccagcacagactcaatggagctcagctagtcccctcagcaccaaggtgggccctcgcttaagagaaaggagcccacccaagtccgaggcctccccatcccaccatcgcaggtctctacttttgcccttccacca

SEQ ID NO: 8942 - DNA, 539 bp, Homo sapiens
  MAP TO AC017079.2; EXPRESSED IN ADULT LIVER, SIGNAL = 3.1; EXPRESSED IN PLACENTA, SIGNAL = 3.6; EXPRESSED IN BONE MARROW, SIGNAL = 3.2; EXPRESSED IN FETAL LIVER, SIGNAL = 9.9; EXPRESSED IN HELA, SIGNAL =  11; EXPRESSED IN LUNG, SIGNAL = 3.7; EXPRESSED IN HEART, SIGNAL = 7.5; EXPRESSED IN BRAIN, SIGNAL = 3.3
aggacagcagccttttgaagcttcttaatttaattcttgatcattctgttcctcattttctttgccttcatgactaaaatgatcaaaatctatcattttggcttccccttctttggcttcactcttcttggcccattgtgtgcctgtccattttgtattgatggttgccttctgccaggcttcttggccatgcctctggggtgggcactgggtgggaacttgaggataaagtcagtgagctgcatgcatttaaatggcatggcctgtctccttacctgagtgcaagctccaccaaccaaagccctgttctcatcaacaacatctataatcgcaaccagctttccagcatgaggtccagagatgtaagccacttggccaacctccacaaagtgcctgaacaccatgttggtggcgcccatcaagaagctaaatcgtctgatagaagggtaagcagaagcagctgccaccactgccaagagggcaaactaaagcaggtgcctgtgctgcttcctcagggtacaccagaccagccaaaattt

SEQ ID NO: 8943 - DNA, 519 bp, Homo sapiens
  MAP TO AC020741.2; EXPRESSED IN BRAIN, SIGNAL = 3.5; EXPRESSED IN ADULT LIVER, SIGNAL = 3.7; EXPRESSED IN HEART, SIGNAL = 3.1; EXPRESSED IN PLACENTA, SIGNAL = 3.1; EXPRESSED IN LUNG, SIGNAL = 4.4; EXPRESSED IN HELA, SIGNAL = 3.6; EXPRESSED IN FETAL LIVER, SIGNAL = 3.6; EXPRESSED IN BONE MARROW, SIGNAL = 3.7
tcagccacaaaagtgaatgcagacagtaaacttacaagaagacacatttcgggcatttcctggggctgagctctcaggagcccctgcccagccacccccagccctctctccccaccgctggccgcaccttgcgctgcaatctgtgctccttgggcacctggaccgcgaactcctctggtagctccacggggcccttgtccacgatgagcagcggtgcgctctgcagctggctgtgaagcagatgtctgggtggaagagcgcctcctgggctgcgctcagcgtgtcgcaatggagcagcaagggcaggatgtcgttcactgtgcttgccacctgcggggacccaggcgcaccatcagacccctgctcacctcagtcccgcctcaggggagccctggtagaggctattcccaaggctgctctctgccgccggctataggcccaagactccagccaccccaggccctactcagacaaccctacagctgagaggattacatctcctggcccctagtataatgc

SEQ ID NO: 8944 - DNA, 590 bp, Homo sapiens
  MAP TO AC020559.2; EXPRESSED IN BRAIN, SIGNAL = 3.5; EXPRESSED IN HEART, SIGNAL = 3.2; EXPRESSED IN PLACENTA, SIGNAL = 3.7; EXPRESSED IN LUNG, SIGNAL = 3.4; EXPRESSED IN HELA, SIGNAL = 3.2; EXPRESSED IN FETAL LIVER, SIGNAL = 2.9; EXPRESSED IN BONE MARROW, SIGNAL = 2.8; EXPRESSED IN ADULT LIVER, SIGNAL = 3.4
gggaagaaggaaaacccttgagtctccacttggatgcttcaagtaaggtctcttcctagcagacctagaatttttccatttatgtatcttcatagactggtcaagcagcatcttcatagactggtcaactatttcacttctacagacccagagattaacttgccaccaccacatatttctcaggtcaaacagtcttattactttctaacactagagttgattatggttatttttcacacttcgtctctgacaaagcaccatccttggcctcttttacataggaatcttgtcattaccactgatatcagggaagccagctccattgtagcatccttcagcatcatctttagtacacagagaatggctactgcagagttcttccaggtgctgttgccttcacctattgtgttaaaggaatgcttggttaaggaaatagccttcaggaactctcagataggtatggttaagtgctagcagtggtataggaaaatactgagtcaacattgtacatttctaaggagagctagtgagcagttatacaagaaagttatacttgttatcagttttcaacctccttccactgcagagtt

SEQ ID NO: 8945 - DNA, 524 bp, Homo sapiens
  MAP TO AL133241.2; EXPRESSED IN PLACENTA, SIGNAL = 1.4; EXPRESSED IN BRAIN, SIGNAL = 1.3; EXPRESSED IN FETAL LIVER, SIGNAL = 3.4; EXPRESSED IN HELA, SIGNAL = 3.4; EXPRESSED IN HEART, SIGNAL = 2.9
atgaggtggccaatgaagtccaggctgaggtgatctcagatggagatgaggaacttcttggtaactggagcaaaggtcactcctgccttgctttagcaaagagactagtggcattttgcccctgccctagaaatctgtggaactttgaacttgagggagatgatctgaaattggaacttatgtttaaaagggaagcagagcataaaagtttggaaaatttgcagcctgacaatgtgatagaaaagaaaaatcaattttatggggagaaattgaagcccattgtagaaattttcataagtaatgaggagtggaatgtgaatagccaagacagtggggaaaaatgtcaccagggcatgtcagagatcttggtggccacccctcccatcacaggcccagtggcctaggaagaaaaaatggtttcgtgggctgggccctgagcccctctgctctgtgcagccttgggacatggtgccttgtgttccagctgcttcagctccagccatggctaaaaggggccaaggtac

SEQ ID NO: 8946 - DNA, 570 bp, Homo sapiens
  MAP TO AC020647.9; EXPRESSED IN ADULT LIVER, SIGNAL =   2; EXPRESSED IN BONE MARROW, SIGNAL = 2.2; EXPRESSED IN LUNG, SIGNAL = 2.6; EXPRESSED IN PLACENTA, SIGNAL = 1.9; EXPRESSED IN BRAIN, SIGNAL = 1.5; EXPRESSED IN HEART, SIGNAL = 1.9; EXPRESSED IN FETAL LIVER, SIGNAL = 2.1; EXPRESSED IN HELA, SIGNAL = 2.1
tcatggtttctgtgggtcaggagtccaggtatggcattgctggattcaatgcttcagggtcttaccagtctgcaactcacatgttggctgggtctgcagtctcatcagaggctcaactgggtaagaatttgtttctaagctcattcatgttattggcagaatttatttccttgaagtggtaggactgagatttctctcagctcctggaggttactatcagttcctgtagtgtccatttctacttgcttcgtcacagctgacaagggagaatctaaagctagtttgttagcaagacagtattatataacatagcatgaattgtgaagtgacatcctgtcacttttgctgttttctgctgactattatcaaatcaccggtctcacactcacactcaaaaagagggcattctataagactatagacaccaggtgttggtgttgggtatcttaggggcttacctaaagtctccccacaaagacttttggtgtgtggttcctatttgatcatgcgtgagtcttatctcagattctggtgtgagtattattctatgggcactctcctcccattttc

SEQ ID NO: 8947 - DNA, 585 bp, Homo sapiens
  MAP TO AC002041.1; EXPRESSED IN HEART, SIGNAL =   4; EXPRESSED IN BRAIN, SIGNAL = 3.6; EXPRESSED IN PLACENTA, SIGNAL = 2.8; EXPRESSED IN BONE MARROW, SIGNAL = 4.7; EXPRESSED IN FETAL LIVER, SIGNAL = 3.7; EXPRESSED IN HELA, SIGNAL = 4.7; EXPRESSED IN LUNG, SIGNAL = 2.9; EXPRESSED IN ADULT LIVER, SIGNAL = 2.2
tacatcatgcatctgggtggcagttgctgctctggcggcggggctgggggtagggccctacctgactctgccaccttggagatgtgcatgccctgctctgcagccatgaagcccaggatggagaagaccacgaagccagcaaagaagctggtcccactgttgatgacagccaggatgatggcgtcccggaggggtggaggggccagagtggatgggttaggctgctgggcagggcagggcgggacagggcacgggtggcagggcagcagtgcttacttgtagcagttgttgttgaagcggttgtagctgcccagggctgtgagggcccccaggccaatggcataagaaaagaaaatctgggtccccacatctatccatacctagaggagggctggagagcgcaggcatgaggggcctgcagggctcccccacaacatcctgctgcagcctccccacctccacctcacctgaggggaccccagctttgaccagtcaggcttgagatagtaaatgatgctgtccagggtgccaggcagcagcactccaagcacaagcagcacgaccaggaccacgtaggggaatgta

SEQ ID NO: 8948 - DNA, 592 bp, Homo sapiens
  MAP TO AC020912.3; EXPRESSED IN PLACENTA, SIGNAL = 2.8; EXPRESSED IN BRAIN, SIGNAL = 3.6; EXPRESSED IN HEART, SIGNAL = 4.8; EXPRESSED IN ADULT LIVER, SIGNAL = 3.7; EXPRESSED IN BONE MARROW, SIGNAL =   3; EXPRESSED IN FETAL LIVER, SIGNAL = 5.7; EXPRESSED IN HELA, SIGNAL = 6.7; EXPRESSED IN LUNG, SIGNAL =   2
ctgccttccttccttccttccttcctttcttccttccttccttccttccttccttccttccattctggttagcctccctctcttatctcttattccctttctccctccctccctccttccttccttttttttgcctcagtttcgtcacctgaaaaatcaattttataatatttgcacctgctgcaatacacctgttagaggattaatacagatgcacaagactacctgccatgcaattggtgttcaataaacattagccagagctattctgattgttgttaccctcagtatatctgcttccttcctttctctatactgagagttagtatagcttagagttaagagaacaacatttgtagccatacagccaggattcaaaacaaaatgtgtgaattatttaacattattaatctcatcttcatcatatctggttgctgtctttacttcttccttctgagtaaggcttgtcttgggcttgctgtggtcccagctcatcattggtatagaaagaggaaagaagccagggccttgggtgatcagcactctgccctagctcctcagcagtgcctggagttggtaggacattggacgg

SEQ ID NO: 8949 - DNA, 549 bp, Homo sapiens
  MAP TO AC022212.2; EXPRESSED IN PLACENTA, SIGNAL = 1.5; EXPRESSED IN BONE MARROW, SIGNAL = 1.7; EXPRESSED IN BRAIN, SIGNAL = 1.8; EXPRESSED IN HELA, SIGNAL = 1.6; EXPRESSED IN HEART, SIGNAL = 1.9; EXPRESSED IN ADULT LIVER, SIGNAL = 1.4; EXPRESSED IN FETAL LIVER, SIGNAL = 2.2; EXPRESSED IN LUNG, SIGNAL =   2
acatcttccccagcaaacagcccttcctcccaaccaaggtaggaattgaaagatgcgaaatcaagcccaaaggcttcttttctgttttcccagttggtctagaaaagagcagcttatttgtccaactggcggagaaggatgcatcgactttcctggagcaccagtctgcagagaacagcagcctgtgggaactggttcctcacgttgggggcttaagtccattcccagagcagccaggccatcggcataagcagcatgaagccccccagtcaagctacccaagtgccagaggattgggctttgccttctatcatgatgatcacgtcctccccttgcacatccctctgacctctcctcagcctgctgtagcctcagtgagactctgcataggggaatcccaaggatggctgctcacacaccttctctccctgctccagaatgctcacctcagagtgggatggtgagaagagctgctcagtcactctgtcatcacctttcagagctgttgctttgctatctggtagctcagcgggtgctttcctgtcttag

SEQ ID NO: 8950 - DNA, 599 bp, Homo sapiens
  MAP TO AC002044.1; EXPRESSED IN PLACENTA, SIGNAL =  15; EXPRESSED IN FETAL LIVER, SIGNAL =  11; EXPRESSED IN HELA, SIGNAL =  13; EXPRESSED IN ADULT LIVER, SIGNAL =  14; EXPRESSED IN HEART, SIGNAL =  18; EXPRESSED IN BRAIN, SIGNAL =  14; EXPRESSED IN LUNG, SIGNAL =  14; EXPRESSED IN BONE MARROW, SIGNAL =  11
ttccaggcacaccctatctccacctttctgtgagaataaataaacactttgaggctcccatgtctttattaaacatttcctctaaactgcatgctctggctctgtgcccacgtgcaccaagaaagctgcccaggagcagccaaaccccagagccctgcctgctggttcttcctataaataggcctttgaacaggcaggaggcacctgcatggactgccactcctcccctcctctctgcatcctggctttcccagctccccgggtctcaggctgggaggatgctgagcagcctccccagcccctgacagaatgagcagcagtatcggcggcggcggcggcggcggcagcagcagcagcagcagcagagaaaagaccaggagcgagttgcacgtgctccctccctccctccctccgctcaaggccaggagctgctgggacctgtggtctggcagtggggaaggcaggggagcctggtcagcagcagggtgggaaaacgtggaatggagactagaagaagagaagctgtacataaataaagaaagaaagcatgtttgaccaaacccccaacaccgaaatctcgaagctcagtggagcaggaa

SEQ ID NO: 8951 - DNA, 568 bp, Homo sapiens
  MAP TO AC008583.4; EXPRESSED IN HEART, SIGNAL = 3.3
taagccaagtcagcccaaactgagccattcctggaatttctggtgaaaataccatatttgattgccagttccaaagagatggatgtttaagatgtttcaaatgttgtactgttataaataatgctgagataatgaatatttttgtagccaagtcattgcacacatttttgaaagaactgtggactctccagggccattttaaagtaattacttttacaaaaaatcatgtaacatgtaattatgttattttcttagtccaagtgcctagaaggagaaattctgggtggaagaatagaaaagatctattgctaaatttcccctcaagaaagaatatgccaatttatactctcccatgctccaaacctctacctattattttatctcctctacttattattattgccactttggtaagtacaatcacacatatatttgagcaaagcttactgctatttgaccaagtagatacaagagtttggaattcattaagaaactatgacttcacagaaggaaggtgtgttttacaaagcagcttcttccatttgcagggttggttctctctccctcc

SEQ ID NO: 8952 - DNA, 543 bp, Homo sapiens
  MAP TO AC023075.2; EXPRESSED IN PLACENTA, SIGNAL = 2.9; EXPRESSED IN BRAIN, SIGNAL = 1.9; EXPRESSED IN HEART, SIGNAL =  10; EXPRESSED IN BONE MARROW, SIGNAL = 6.3; EXPRESSED IN FETAL LIVER, SIGNAL = 9.2; EXPRESSED IN HELA, SIGNAL = 9.9; EXPRESSED IN LUNG, SIGNAL = 1.6; EXPRESSED IN ADULT LIVER, SIGNAL = 4.6
gactttgcattgttggggagccctcaggagacttacgatcatggtggaaggcgaaggagaagcattcactttcctcacagggcagcaggagggaatgagtgcaagcaggggaaatgccaggcacttataaaaccatcagatctcatgagaactcactcgctatcttgagaccagcatagaggaactgcccccatgattcagtcccttcccacagggtccctcacactacatgggtggaattatgggaactacaattcaagatgagatttggggcagagccaaaccatatcatattaaattgtaaaaattcctgtgtatgaggaataaacagtctttagtgggctcagaccaggagtccaagggtcttgaggacctctgtgtgttggtcaattttcttctccaagttcttttcggcctgtttccgtagcctcatgagctgtttcttatggtagtggaatttggtcttctcatttctcttctcctccagggtagctgtcattgcctgatacttctagccaaccttgtgagccagatactcctggc

SEQ ID NO: 8953 - DNA, 555 bp, Homo sapiens
  MAP TO AC017093.2; EXPRESSED IN BRAIN, SIGNAL = 4.7; EXPRESSED IN BONE MARROW, SIGNAL = 3.7; EXPRESSED IN HEART, SIGNAL = 4.8; EXPRESSED IN ADULT LIVER, SIGNAL =   4; EXPRESSED IN FETAL LIVER, SIGNAL =   5; EXPRESSED IN HELA, SIGNAL = 5.6; EXPRESSED IN LUNG, SIGNAL = 6.8; EXPRESSED IN PLACENTA, SIGNAL = 4.4
catggaatggttgaatgacgaaccatcttcccacatttatatggtttcattccatgctgaaggagaataagagagatggttaaaactttcccctaaatatcatctatagagatattttgggaaaaaagaggaggaaccatctgaaagcagctgtataatttctatacatttaaaattttaggtgaatttgaacaggaagacacttagttggctaatgggaagagagactgttggtacaatatatagctatatttactttgcagtctagctatgcttcactgggcaactggaaattcagtggtggctgaggcgagggagggcagactcagaaaaggagggtcagaaagggaggtggcagccttggctgctctcttcaatgaggtaatccttcctccgtgctgccctgctgtccctgtgcctgctgccagtgcccatagagctccagatgcaattgatctcattatatatcagaacagaattggcttgaacagcctgttctatcctggtgattaggacatagcatatttttcttccccctctccctcagccctatct

SEQ ID NO: 8954 - DNA, 558 bp, Homo sapiens
  MAP TO AC002039.1; EXPRESSED IN FETAL LIVER, SIGNAL = 5.5; EXPRESSED IN BONE MARROW, SIGNAL = 7.3; EXPRESSED IN HELA, SIGNAL =   5; EXPRESSED IN LUNG, SIGNAL =  20; EXPRESSED IN HEART, SIGNAL = 6.5; EXPRESSED IN ADULT LIVER, SIGNAL = 3.4; EXPRESSED IN BRAIN, SIGNAL =  12; EXPRESSED IN PLACENTA, SIGNAL = 4.7
cttcctggtcaatgactggctttcggtggagacggaggccaacgggggcctggtggagaaggaggtgctggctgcgagtaaggcctcgttccatgttcccactccgtgggaggttgggcagggtggtcctgccccgtggcctcctgcagtgcggccctccctgccttctaggtcacgcagccctgttgcgcttccggcgcctgctggtggctgagctgcagcgtggcttctttgacaagcacatctggctctccatatgggaccggccacctcgtagctgtttcactcgcatccagagggccacctgctgcgttctcctcatctgcctcttcctgggcgccaacgccgtgtggtacggggctgttggtgactctgcctacaggtgggtgccgtaggggtcgggacagcctcttcctgcccagcccttcctgcccctcagcctcacctgtgtggcctcctctcctccacacagcacggggcatgtgtccaggctgagcccgctgagcgtcgacacagtcgctgttggcctggtgtccagcgtggttgtctatcccgtct

SEQ ID NO: 8955 - DNA, 562 bp, Homo sapiens
  MAP TO AC016939.8; EXPRESSED IN PLACENTA, SIGNAL = 1.6; EXPRESSED IN BRAIN, SIGNAL = 2.1; EXPRESSED IN BONE MARROW, SIGNAL = 1.6; EXPRESSED IN HELA, SIGNAL = 2.8; EXPRESSED IN HEART, SIGNAL = 2.2; EXPRESSED IN ADULT LIVER, SIGNAL = 1.9; EXPRESSED IN FETAL LIVER, SIGNAL = 2.3; EXPRESSED IN LUNG, SIGNAL = 2.5
acactccccagaacacaagggactccagagagcccagcctcaccttccctactgtcagtcctgcagcctcagcctctgctggccggctgtaccctgaggtgccctctcacttcctccttcaggttctcagcggacaggccggccaggaggtcagaagtcccaggaggccccagaggagcaccgaaggagaagatctgtaagtaggcctttgttagggcctccagggcgtggttcacaaatgaggcccctcacaagctccttctctccccagatctgtgggttcctccccatcgcccagctgctgcccgcactccagcctgctgccctgaccagagtcatcatgtcttctgagcagaggagtcagcactgcaagcctgaggatggccttgaggcccaaggacaggaggctctgggcctggtgggtgcgcaggctcccgccaccgaggagcacgaggctgcctcctccttcactctgattgaaggcaccctggaggaggtgcctgctgctgggtcccccagtcctcccctgagtctcagggttcctccttttccctgaccatca

SEQ ID NO: 8956 - DNA, 561 bp, Homo sapiens
  MAP TO AC010305.3; EXPRESSED IN ADULT LIVER, SIGNAL =   4; EXPRESSED IN FETAL LIVER, SIGNAL = 4.7; EXPRESSED IN PLACENTA, SIGNAL = 2.8; EXPRESSED IN BONE MARROW, SIGNAL = 3.4; EXPRESSED IN HELA, SIGNAL = 4.7; EXPRESSED IN HEART, SIGNAL = 4.8; EXPRESSED IN LUNG, SIGNAL = 2.9; EXPRESSED IN BRAIN, SIGNAL = 3.1
ccttctcctgctccactcagctatcagtgtctttggcaacaccaaggtattggtttctagatcataatttttgcctggataactaagggccagggcctgacttggttttttgtttttgttttgccaattaatagatacaggaccagtgccaccatagccttgcctcttgtgaacacttcagatgttctgaaaagtgatcggatgaatgatgttttgggcatcctgaaagaacatgatcgtcccaggctgggcttctagaggagtacctccatctgcccagtcaccaacagccctctggtgggaaatgagtagaagaaattggggaagattttaatttcttttctttctgtgttagtttgttcttgcactgctataaagaaatacccaagactgggtaatttataaagaaaagaggtttaattggctcacagttctgcaggctgtacaggaagcaggctggggaagcctcaggaaacttacaattgtggtggaaggcaaaggggaagcaggcacatctgacatggctggagcaggaggaagagagtgaaggaggaggtgctg

SEQ ID NO: 8957 - DNA, 597 bp, Homo sapiens
  MAP TO AC021735.4; EXPRESSED IN ADULT LIVER, SIGNAL = 1.4; EXPRESSED IN FETAL LIVER, SIGNAL = 1.8; EXPRESSED IN LUNG, SIGNAL = 1.7; EXPRESSED IN PLACENTA, SIGNAL = 2.8; EXPRESSED IN BONE MARROW, SIGNAL = 1.5; EXPRESSED IN HEART, SIGNAL = 1.8; EXPRESSED IN HELA, SIGNAL = 1.9
taaaaaggcaaggggaattgtgatcaacagtataactgccatatttaccaagactgacagacatactatggtcttttaatattcttgtaggctttattttgaaggtgtcttgtcatggtaatagagaagtagagaggaattgttttgatattaatgacaatataaattacaatattaattgctctcacttatcagcacctaccttctcctaggaactgtgctacttggtattctttgcatagattatttcatttaatcttttccccatgagacagtaaatataattcatctcaacttatagatgagaaaacaaagacttagaaaggtgaaataatttgctcaatatctctcacgtggaaaagaaaaaactgagttcaaacccaggcaatcagtttttagattatgagttcctaatgacttaccattctacttacctgtgaaataattgtgtttctccaggaagtcattggttttctcctctctgaaaggattggagtgttcagaaaaaagttcagggcccacactgactgcttgaagacttgtgtttccataagctgtggctgaatctatctctcagggtcagatcctggcagagag

SEQ ID NO: 8958 - DNA, 522 bp, Homo sapiens
  MAP TO AF236876.1; EXPRESSED IN BRAIN, SIGNAL = 4.7; EXPRESSED IN BONE MARROW, SIGNAL = 5.3; EXPRESSED IN HEART, SIGNAL =   5; EXPRESSED IN FETAL LIVER, SIGNAL = 5.4; EXPRESSED IN HELA, SIGNAL = 5.8; EXPRESSED IN ADULT LIVER, SIGNAL = 4.9; EXPRESSED IN LUNG, SIGNAL = 5.8; EXPRESSED IN PLACENTA, SIGNAL = 4.9
ccttggtgatgtgtctgctgacaagtcctttctgcatccccaggaggtgaggatggagctggagcagaaaccaccccagtggcagagcctactaagctggtgctcccgatgaaagtcaacccatattctgtcatcgacatcacgccattccaggaggaccagccgcccacccccgtgcccagcgctgaggaggagaatgtgggtctccatgtgccctgcgggtacttggtgcctgtaccctgcggctatgcggtgccctccaacctgcccctcctgctgcccgcctactccagcccggtcatcatctgcgccacgtccctggacgaagaaggtactgctaccctcctctccacgcccccgaagtggcctgtggttccctcctctccacgcccccgaagtggcctgtggttccctcctctgcatgccccggatgtggcctgtggttccgtagagtccgggcctgaccttcccccctcctcctcctctccatgcccccgatgtggcctgtggttccgtagagtc

SEQ ID NO: 8959 - DNA, 511 bp, Homo sapiens
  MAP TO AC023202.2; EXPRESSED IN PLACENTA, SIGNAL = 2.4; EXPRESSED IN FETAL LIVER, SIGNAL = 3.5; EXPRESSED IN BRAIN, SIGNAL = 2.8; EXPRESSED IN LUNG, SIGNAL = 1.9; EXPRESSED IN HEART, SIGNAL = 3.2; EXPRESSED IN HELA, SIGNAL = 3.5; EXPRESSED IN BONE MARROW, SIGNAL = 1.8; EXPRESSED IN ADULT LIVER, SIGNAL = 2.5
tctctgggagttggaggatgggaaacgtgcttgcttcctcctctctgagtctgcatgtatgtgcctcctgcatcatcatcattatcattatcatcatcatcatcaccatcaccatcatcatcatcatcatggcagctctcatttactggtccctggcaatatgccagttctggtgctaggagtttcatccatgttatttgagctaaacaacaagagatattccctattttatataatattattgatgaagaaatgtcaaattagagagatgaagtagcctgctcaaaattacttaaaaaatgttgctctcattgaattaatgaatagagcagtggtttctagagactgggaagtgttggtggggtgagggaatagtgacaggttggttatcagatacaaacttacacagctaaataagaggaacaagttttagtgttctgtagctctataggatgaactataattaacaatttgttgtatattttcaaatagctgcaagagcagagttcac

SEQ ID NO: 8960 - DNA, 597 bp, Homo sapiens
  MAP TO AC016313.5; EXPRESSED IN PLACENTA, SIGNAL = 1.5; EXPRESSED IN BRAIN, SIGNAL = 1.8; EXPRESSED IN BONE MARROW, SIGNAL = 1.5; EXPRESSED IN HELA, SIGNAL = 2.1; EXPRESSED IN HEART, SIGNAL = 1.9; EXPRESSED IN ADULT LIVER, SIGNAL = 1.7; EXPRESSED IN FETAL LIVER, SIGNAL = 2.3; EXPRESSED IN LUNG, SIGNAL = 2.1
ccctttaataggccaccctctatgttccttatagactgagggtgctccaaaaaacctacaggcgatctttcaatcttgtctcttaatcatttgggtgcaacccctgtcatgatcagaaaggagattctcactgtccttatcaacactggggcaatcctctgtatttgacactcatcagcctcaaccagttccttccttgaagtactgaaaaaaaatgcaaatggtaggagtttctaatatacctttaacagtttacaaatctttccccttgctttttcaattaggttctacaatcattctttttttttttttttttaaccagttctcttggccccagttcacttacttggaagggacttcttaggaaaacatcatgtggccattaccttttcccataagggtaagataattcttaaagctgatttacatccccatcacctttaactgacaacagtgaaaattcttcaacactcttgcctacttttgtctttaacctaaataatgaaaatgttgacagtttaattctttttaaaagagctttttgaggaagttttggataaatctacaacagacattggacaaatccactgggctctc

SEQ ID NO: 8961 - DNA, 542 bp, Homo sapiens; identical to SEQ ID NO: 8782
  MAP TO AL079304.2; EXPRESSED IN BONE MARROW, SIGNAL = 3.5; EXPRESSED IN HEART, SIGNAL = 2.6; EXPRESSED IN BRAIN, SIGNAL = 2.8; EXPRESSED IN ADULT LIVER, SIGNAL = 2.1; EXPRESSED IN FETAL LIVER, SIGNAL = 2.7; EXPRESSED IN HELA, SIGNAL = 2.8; EXPRESSED IN LUNG, SIGNAL = 3.3; EXPRESSED IN PLACENTA, SIGNAL = 2.2

SEQ ID NO: 8962 - DNA, 559 bp, Homo sapiens
  MAP TO AC023404.2; EXPRESSED IN HEART, SIGNAL =   2; EXPRESSED IN PLACENTA, SIGNAL = 1.4; EXPRESSED IN FETAL LIVER, SIGNAL = 2.6; EXPRESSED IN HELA, SIGNAL =   2
ttgtggttttggaccttgagttttaagtcattttaactaggctcaagcacatctttattaatcaaaataggaaccattacaataaacacatttttgccaacaagaaataagtttgtttattcctgtagtataaaagtccacgctttgggatttgacgaacacttgggaagtattttctgtgttctgcaggttgtggaagcgttttccttgcaaaaagttgtccagatacctgaagaagtggtagttggttggcaagaggtcaggtgaatgtggtggatgaggcaaaactttgtggcccaatttgtgcaacttttgaagcgttggttgtgcagtgcatggtctgtcgtcgtcgtggagaatgcagaccttactgttgaccaatgctggctgcaggcgttgcagttttcggtgcatctcatcgatttgcagagcatacttctcagatgtaatggtttcactgggattcagaaaactatagtggatctgactggcagcagaccaccaaacagtgaccatgagctttttttggtgcaagttaggctttgggaagtgttttgga

SEQ ID NO: 8963 - DNA, 522 bp, Homo sapiens
  MAP TO AC023929.2; EXPRESSED IN ADULT LIVER, SIGNAL = 2.3; EXPRESSED IN BRAIN, SIGNAL = 2.9; EXPRESSED IN PLACENTA, SIGNAL = 1.7; EXPRESSED IN BONE MARROW, SIGNAL = 4.3; EXPRESSED IN FETAL LIVER, SIGNAL = 3.3; EXPRESSED IN HELA, SIGNAL = 4.2; EXPRESSED IN LUNG, SIGNAL =   2; EXPRESSED IN HEART, SIGNAL = 2.6
gctagactgcacttccctggagcagagtacttccctgcaatgcagctacccctacattcttcaccctttgtgactgaggaggaaggagattacatcccatctgagaagctgaagcttctggctctgcagcggggagaggacccaggaaacttgaatgagtcagaagaggaggaggaggaagacaaccaaggtgatggtgatgaagggggagaaaatgaaggggagagtggttcggaaacggaggaaaaggcctggctggcagcaccggaggagcagagaacggaggggaagaagcccagggtgatagcaggacacgagaagctggagaagcagcagcagctggcccaggaggaggagagcgaggccaggcgcctggccactatgatgatgaagaagccggagaagtacctgtaccagaagatcatgtttgacaaaaggcgaaaaagccaagaggccaaaaagctaccagagtagcagaaagcccatgatgaggcagtgagatctgagaaggccgaaaaatca

SEQ ID NO: 8964 - DNA, 559 bp, Homo sapiens
  MAP TO AL158823.1; EXPRESSED IN ADULT LIVER, SIGNAL =  14; EXPRESSED IN PLACENTA, SIGNAL = 8.6; EXPRESSED IN BONE MARROW, SIGNAL =  57; EXPRESSED IN FETAL LIVER, SIGNAL =  23; EXPRESSED IN HELA, SIGNAL =  16; EXPRESSED IN LUNG, SIGNAL =  34; EXPRESSED IN HEART, SIGNAL =  20; EXPRESSED IN BRAIN, SIGNAL =  16
acctacgtccacacaaaggcttacatgtgactatccaaagcagcaactattcatagcaagaatacttactgccagaaggtagaaacaacctcaaaatccatcaacttgtgaaggaacaaaaaaaaaaaaagcctttcgggcggaacctccatcttccagtaattcgccaaaatgacgaacacaaagggaaagaggagaggctcccgacatatgttctctaggccttttagaaaacatggagttgttcctttggccacgtatatgcgaatctataagaaaggtgatattgtagacatcaagggaatgggtactgttcaaaaaggaatgccccacaagtgttaccatggcaaaactggaagagtctacaatgttacccagcatgctgttggtattgtaaacaaacaagttaagggcaagattcttgccaagagaattaatgtgcatattgagcacattaagcactctgagccgagatagcttcctgaaatgtgtgaaggaaaatgatcagaaaaagaaagaagccaaagagaaaggtacctgggttcaactgaagtgccag

SEQ ID NO: 8965 - DNA, 520 bp, Homo sapiens
  MAP TO AL121657.2; EXPRESSED IN PLACENTA, SIGNAL = 2.4; EXPRESSED IN HEART, SIGNAL =   2; EXPRESSED IN BONE MARROW, SIGNAL = 2.4; EXPRESSED IN LUNG, SIGNAL = 1.9
tttgcagctgtccttgagtggtttgccgagcgggttgaccgcatcattctgctcttcgatgcccacaaactggacatctctgatgagttctcagaagtcatcaaagccctcaagaaccacgaggacaagatgcgagtggtgctgaacaaagctgaccagatcgagacgcagcagctgatgcgggtgtacggggccctcatgtggtccttggggaagatcgtgaacaccccagaggtgatccgggtctacatcggctccttctggtcccaccccctcctcatccctgacaaccggaagctctttgaggctgaggaacaggacctattcagggacatccagagtctgccccgaaatgctgccctgcgcaagctcaacgacctcatcaaaagggccaggctggccaaggtgaggcagccccctgggaggtgggcagcttgggcaggggcccagagtttggggtcagctgcacgagctgagggttgctgcctccaacagccagtgcatcatgtgtgtgacacca

SEQ ID NO: 8966 - DNA, 522 bp, Homo sapiens
  MAP TO AC000003.1; EXPRESSED IN BRAIN, SIGNAL = 6.4; EXPRESSED IN PLACENTA, SIGNAL = 5.1; EXPRESSED IN ADULT LIVER, SIGNAL = 6.4; EXPRESSED IN BONE MARROW, SIGNAL = 4.8; EXPRESSED IN FETAL LIVER, SIGNAL =   8; EXPRESSED IN HELA, SIGNAL = 7.8; EXPRESSED IN HEART, SIGNAL =   6; EXPRESSED IN LUNG, SIGNAL = 2.9
tgagtccctgggcagattacataacctttctgtatctcagatttctcatctggaaataggaccattataatacatgtctcttagggttattttaaggatcaaatgagtaaatacaggtaaaactttaaaccactgctgtatatttaacccttagggtctccgacactgtcatgaaggctgcctctgaacaggagaggactgagtggaccagttttgggatgggagtgggaggaccagaagaatggtaccgccagggaagagaaaatgggagggaggccatggtctaaattgatccctgacatagcggtgggaaatgagccaaggaaactggcttgaactagcttctatttggaggctggccatttgctgcagagacagttatttgaagctcacgagtcattcacacattattacaaatacttttatgaggacctttggtttctgaatagggcagagctgggggtgagcctgaaaacatggctatcagaaggaagagtcttgggagaagggaagtggagggag

SEQ ID NO: 8967 - DNA, 570 bp, Homo sapiens
  MAP TO AC010745.2; EXPRESSED IN HELA, SIGNAL = 1.8; EXPRESSED IN HEART, SIGNAL = 1.9; EXPRESSED IN ADULT LIVER, SIGNAL = 1.5; EXPRESSED IN FETAL LIVER, SIGNAL = 2.1
cttccttcctccttgatcccagttctgctttccactgattggagagatgtcagacacaccactgctcccttgtgccacgttcctctgtgtcaataacccccaggagaagctggggcacgtgtccccaaagtcttctttcaaaggatttctctttctccaggtagcagaatcttacctgactgtcatagtccagctcagatctcatcttctagaaacttccctgatctccaagatccttattgtcagtctgcataatgaattcatcatggagcctttggggtttctcttctaccattgtcttgaagtattgggaaagtgtgggttgttgttttttgcctcccctcttcataactagggtgcagtggtatgatcatagcttactgcaacctcgaactcttgggcccaaatgatcctctcacctcagcctccctagtagctggaactagaggtgtgcatcaccatgcctgactaacttttaaaattttttgtagagatgaggttttgctatgtttcccaggctggtgtcgaactttggcctcaagcaatcatcccacacaacctcccaaattt

SEQ ID NO: 8968 - DNA, 535 bp, Homo sapiens
  MAP TO AC023392.2; EXPRESSED IN BRAIN, SIGNAL = 3.9; EXPRESSED IN PLACENTA, SIGNAL = 4.5; EXPRESSED IN ADULT LIVER, SIGNAL = 3.9; EXPRESSED IN FETAL LIVER, SIGNAL = 5.2; EXPRESSED IN BONE MARROW, SIGNAL = 2.9; EXPRESSED IN HELA, SIGNAL =   6; EXPRESSED IN LUNG, SIGNAL = 3.1; EXPRESSED IN HEART, SIGNAL = 4.4
ttaaggggacctatccccacacagttgaaaatcatctggatatgtgatttgacttccccaaaacttaactgctaatagcttactgttttccggaagccttaccgataacataaacagttgattaacatgttttgtatattatatgtatatatacagtattctcacaataaagtaagctagggaaaagaaacattaagaaaactataaggaaaatatatgtttactatttattatgtggaagtggatcattataaaggtcttcttccttgccttaaccttgcgtaggctgatgaggacaaggaggaagaggaaagggttgtcttgctgtctcagaggtgtcagaggcagagaaaatttgtgtataagtggacccatgcagttcaaacctgtgttgttcaagggtcaactgtattatattttaaaaatatatctattttcatatacattaatctagtttttattgctgtataaattgagtgaatgcacaataatttattattcattcccataaccaaggacactgctgcaatggata

SEQ ID NO: 8969 - DNA, 571 bp, Homo sapiens
  MAP TO AC013827.4; EXPRESSED IN BRAIN, SIGNAL =  12; EXPRESSED IN PLACENTA, SIGNAL =  61; EXPRESSED IN HEART, SIGNAL =  32; EXPRESSED IN BONE MARROW, SIGNAL =  60; EXPRESSED IN HELA, SIGNAL =  75; EXPRESSED IN FETAL LIVER, SIGNAL =  56; EXPRESSED IN LUNG, SIGNAL = 1.3e+02; EXPRESSED IN ADULT LIVER, SIGNAL =  31
cttagatgggaaagggctccttcaagtatgcttgggtcttggataaactgaaagctaaacatgaacctggtatcaccattggtatctccctgtagaaatttgagaccagtaagtactacgtgagtatcattgatgccccaggacacagagacttcatcaaaaacatgattacagggacatctcaggctgactgtgctgtcctgattgttgctgctggtgttggtgaatttgaagctggtatctccaagaatggacagacccatgagcatgcccttctggcttacacactaggtgtgaaacaactaattgttggtgttaacaaaatggattccactgagcaaccctacagccagaagacatatgaggaaatcgttaaagaagtcaacacttacattatgaaaattggctgcaaccttgacacagcagcatttgtgcttatttctggttgaaatggtgacaacatactgtagccaagtgctaacatgccttggtttaagggactgaaagtcacctgtaaggatggcaataccagtggaacctcactgcttgaggctctggactgcatcctacc

SEQ ID NO: 8970 - DNA, 600 bp, Homo sapiens
  MAP TO AC019191.2; EXPRESSED IN BRAIN, SIGNAL = 5.5; EXPRESSED IN PLACENTA, SIGNAL = 3.3; EXPRESSED IN ADULT LIVER, SIGNAL =   4; EXPRESSED IN FETAL LIVER, SIGNAL = 4.3; EXPRESSED IN BONE MARROW, SIGNAL =   4; EXPRESSED IN LUNG, SIGNAL = 3.5; EXPRESSED IN HELA, SIGNAL = 3.9; EXPRESSED IN HEART, SIGNAL = 4.2
atcagagtttcacaacgcccaggtctcatgtttggtcaaacttgataagttccttatacaaaacgaagatcagtacagagtatctttatataattgccctgaaatatgatatatggatttataataggagagaaaaaattccatctttagttatgtgctccttcccgtagaagtaaaaatcaagaaattgccatcaaccttatccttccagatggcacgcttcttcgtaatggttctcttaacaaacacaattccatagttttcatactctaaaagacaggagctctttaagagagccaccagcaggctataacagtaaagagaacaaaaacagatttcttgaaagaactgtaagtaaaatatggcacaacttaaatggtgtggaagcaaaagcaataaccagaaacaagaaaattcatggtaagggacctgcctttgggcacatctctcccacaggtggctggatgcctactaggtcagaggcatcctccctgtgctcacatcttgtggccaaggaaagaatggcaagtagtgccaaacctaatggtggataagatacagacatatgtagaaaaaaactggcagaaggggctaagttct

SEQ ID NO: 8971 - DNA, 562 bp, Homo sapiens
  MAP TO AC024049.2; EXPRESSED IN BRAIN, SIGNAL =   6; EXPRESSED IN PLACENTA, SIGNAL =   4; EXPRESSED IN BONE MARROW, SIGNAL = 6.1; EXPRESSED IN HELA, SIGNAL = 6.7; EXPRESSED IN HEART, SIGNAL = 6.7; EXPRESSED IN ADULT LIVER, SIGNAL = 6.7; EXPRESSED IN FETAL LIVER, SIGNAL = 5.7; EXPRESSED IN LUNG, SIGNAL = 5.3
tttccccagaatcaaacaggtgctgaatgcaggagctgatacctataaagacatttcccacccagaagccggagctccaaggctatgcagggactgcccaggtgggaggcggcgccgcccagcagacacagctgcgagcagtggtggagtttaccccatccagaagccacactgcaaaagaaacagtgactttgaccttaacaatatacttaatttcaactatttcaaccaaaatactgtcattcaacataatatgctaatgcgatggtatgcatcgttcttctcaaagcaggcgtgcgtatcacacccccagcacgtctccactgggagagctgcgcagctcgtggctgcgtacaggacacagcaggggtgacggctacaactgcagtgtggcccacttgtggccatgtgaccttggcccggttacttaacctttttgtacctcagtttcctcatctgaaaaatggacatagcagtacctacttcatagaggactgaccaaaagcaatgccagacacacagcaaacactcacttactgctggctgctcccagtaccctaca

SEQ ID NO: 8972 - DNA, 562 bp, Homo sapiens
  MAP TO AC007182.3; EXPRESSED IN BRAIN, SIGNAL = 1.9; EXPRESSED IN PLACENTA, SIGNAL = 2.3; EXPRESSED IN BONE MARROW, SIGNAL =   2; EXPRESSED IN HEART, SIGNAL = 1.9; EXPRESSED IN ADULT LIVER, SIGNAL = 1.9; EXPRESSED IN HELA, SIGNAL = 2.5; EXPRESSED IN FETAL LIVER, SIGNAL = 2.5
gtggtaggcaagagagcgagagagagagcgtctgaaggaggaactgtcaaacatttttctaaccatcaggtcttgtgagaactcactaccatgagaataccatgggagaaactgcccccatgatccagtcacctcccaccaggccccttccttggcacatggggattacaattcgagatgagattttggtggggacacagagccaaaccaaatcaatggctaagaacagtagctgaggggtttggacctgcttccttcctctgagagggctgacaccttgaagttctttaagcagggacggtggggtcaatgcaacgccaaggaccatgaatgtgagtacatcatgcaggtcgggcagaggagagatcacagttgcctgggagaaaggcagaaaggtccgaagtgggacagggcagattcaaagaggactttgcagaagggtttgggaggatctgagacgaagtgcatataagagggcagagtcaaagatgactaagataattgaggaaggacacgcagatggagccagagaaggaagtgaagcagaaccagggtaggatga

SEQ ID NO: 8973 - DNA, 590 bp, Homo sapiens
  MAP TO AC000065.1; EXPRESSED IN BONE MARROW, SIGNAL = 2.3; EXPRESSED IN FETAL LIVER, SIGNAL = 4.4; EXPRESSED IN PLACENTA, SIGNAL = 2.3; EXPRESSED IN BRAIN, SIGNAL = 2.4; EXPRESSED IN HELA, SIGNAL = 3.4; EXPRESSED IN ADULT LIVER, SIGNAL = 2.7; EXPRESSED IN HEART, SIGNAL = 3.4
aaacaaacctattgcgctgccagtcatattaaagtatagcacatataattatatacagtacataatatttgctaatacaagactctgttgctggtttatgtatttactatattatacttttatcattattttagagtgtactactacttataaaaagaagttaactgtacaacagtctcagccaggcccttcacgaggtatcctagaagaaggcattgttatcacaggggatgacagttccatgcatgttattgcccctgaagccctcctagtgggacaagaagtggacaggcaagacagtgatattgaccatcctgattctgtgtaggtctgggctaatctgtgtgtttcttagtttttaacaaaaaagtttaaaaagtaaaaaaataaaaaatttaaaaataaaaaagcttatagaatgaggatataaagaaaagattttgtatagatgtataatgtttttgtgtttatttatttattttttttagacacaaggttatctaggctagggtgtagtggcatgatcctagctcactgtcatcttgaactcctgggctccagtgatcctcccacttcagcctccggagtag

SEQ ID NO: 8974 - DNA, 587 bp, Homo sapiens
  MAP TO AC010620.3; EXPRESSED IN HEART, SIGNAL =   2; EXPRESSED IN BONE MARROW, SIGNAL = 1.6; EXPRESSED IN PLACENTA, SIGNAL = 1.5; EXPRESSED IN BRAIN, SIGNAL = 1.7; EXPRESSED IN ADULT LIVER, SIGNAL =   2; EXPRESSED IN FETAL LIVER, SIGNAL = 2.3; EXPRESSED IN HELA, SIGNAL = 2.3
caggctctctccacaggttctgtttattgttctaggtgaaagtattcacattgttttaattgtgtctcatgtgactctaaggtgaggacagaatcaagtgtgtggggttcaagatacattcataagagttaagtttctcctttacactaaaaggtggtcacagagtctgttctgtttgggtttgatagggagaggtcagtgtcacccatatttccattactgtagcagaaattgctggtgtttgtggcaagggcgagcacctgaagacaaaaataaagaaacatatttttatattcatggagcagctcattgttcctgaatctctgctgttataaaggacagaaatgggtgggctttttctacaggtcttagttcttttttctgtgggtgtgagactagcaggtaaacaggtggtgctgacaactttaaaggaattttctcaagatgcaggtgtaacttctccagagaatgtcatctggaaaggatttccaaagaagacaaaagaggaaaaatggctttttttcagctaaacatgtgtcagatgaagagctgtgtccactctgcctcctggagtgccatgcatttaa

SEQ ID NO: 8975 - DNA, 507 bp, Homo sapiens
  MAP TO AC012558.6; EXPRESSED IN HEART, SIGNAL = 1.8
cctccctggtgagagtcaagggaggctttgttctttgcaaggcattgcactacagctgacccttgaacaacatgggtttgaactgcaaggtccacgtatactctgatatttttcaataaaagttacaccgagtgtgcttacctctcctacatccccttccacctccaccacctctgcctctgtcacccaagacagcaaaaccaacccctcctcttcctcctccttctcagcctactcaacatgaagaccgtgaggctgaagatctttacaataatccacttccacttaatgaatagtaaatatattttctcttctttatgatttttagtaatattttcttttctcttgcttactttattgtaagaatacagtcataatatatataacatacaaaatatgttaattgactgcttatgttatcaataaggctttcggtcaacagtaggatattagtagttaagtttttagggagtcaaaagttatacatggattttgactctgcaggga

SEQ ID NO: 8976 - DNA, 592 bp, Homo sapiens
  MAP TO AC016025.11; EXPRESSED IN BRAIN, SIGNAL = 3.5; EXPRESSED IN PLACENTA, SIGNAL = 3.5; EXPRESSED IN ADULT LIVER, SIGNAL = 2.2; EXPRESSED IN FETAL LIVER, SIGNAL = 2.7; EXPRESSED IN BONE MARROW, SIGNAL = 2.6; EXPRESSED IN HELA, SIGNAL = 2.5; EXPRESSED IN LUNG, SIGNAL = 2.9; EXPRESSED IN HEART, SIGNAL = 2.8
attacttccactgccaaccgcctgctcaacgctacggtgtcctcccctctgccccccatgtcttatgtcaggaggggtggtccctgggctgtgcaggaggcacgtccgtgtgacgtcagccccagaaacctcttacactcacgcatgaaacagatcactttggggggcagggcagagttcggagcagagattttgttctgaccttcactggactcttcctcctcctcgtcatagtcctcctcctcctcctcttcatattcttcctcctcctcctcctcctcttcattcccaggcccaaagctctttgaggcctctagctcctcttcacttttccctttcagaagggcatggatccgcacggcctccttccacggaacaccacccaggtcagatgggggcaggcgaggctcctcctcctcctcctctccctcctcctccatctcagactcggaactactgtgaggaaataaccacatagccagagtgagggaatgaagaaaaactgagaaggggaaggggaagggccaccatcagaaacaatgcatgtcaggcaaagcagctgctgagcaggcggagagagacaggagggagg

SEQ ID NO: 8977 - DNA, 569 bp, Homo sapiens
  MAP TO AC010828.3; EXPRESSED IN BONE MARROW, SIGNAL = 1.6; EXPRESSED IN HEART, SIGNAL = 4.2; EXPRESSED IN PLACENTA, SIGNAL =   2; EXPRESSED IN BRAIN, SIGNAL = 1.9; EXPRESSED IN ADULT LIVER, SIGNAL = 1.7; EXPRESSED IN FETAL LIVER, SIGNAL = 4.5; EXPRESSED IN HELA, SIGNAL = 4.3
aggacatgagatttgcaggggccaggggcagaatgatatggttggcttgtgtcctctcccaaatctcaccttgaattgtactcccataattcccacatgttgtgggagggacccggtgggagatcatttgaatcatgggggtggtatcccccacactgttcacgtggtagtgaataactctcatgagatctgatggttttatcaggggtttctgcttttgcttcttcctcattttctcttgctgtcaccatgtaagaagtgcctgtcacctcccgccatgattctgaggccccacccagccatgtggaactataagtccaattaaacctctttttcttcccagtctcgggtgtgtctttatcaacagtgtgaaaacagactaatacaaatagcaaattaaagacaccacaagaagttgagagatcacagaagaaagaaaaagtttaacatgttagtaccattagtagaccttttctcttgctttttgaacaagggtctccacattctcattttacatgaggctctacaattcatgtagctggcttatacctcgacaccaggagaaaagc

SEQ ID NO: 8978 - DNA, 581 bp, Homo sapiens
  MAP TO AC022212.2; EXPRESSED IN HEART, SIGNAL = 1.7; EXPRESSED IN BRAIN, SIGNAL = 2.6; EXPRESSED IN ADULT LIVER, SIGNAL = 1.7; EXPRESSED IN BONE MARROW, SIGNAL = 1.5; EXPRESSED IN FETAL LIVER, SIGNAL = 1.7; EXPRESSED IN HELA, SIGNAL = 2.1; EXPRESSED IN LUNG, SIGNAL = 2.7; EXPRESSED IN PLACENTA, SIGNAL = 1.9
tgcagttgacaggagcagagagcaaaaacaatggtttctgccccaagggtccaaaatttggagagcttactactttcctattcccatttaagttgggttcacaaacgtttttatgcaaaaattactgagagcatttaattccaaaccaggtcactgcctcagactgttgactctctcaccccctctcttcacaccccctagaattttatgtgaatggaatttcaaaaaatttatttaagtataagatatatgcaaaaaagttcaaacataagtgtcagctcaacaatttttcacaagatgagcacacctgtgtaactagcgccttgcacccagatgaagaaaaagaacattatcatacctactactttaaatgaaatgttaaaattaattttacttgaaattacactgaaagaaatactgaactttagaaaacagactctttgctatggaatgtattagttcctaaaagatctctttaaattgagaaaaaatattttgtaaagttttaagatgtttgtgtctttagtttttaaatggcacaatttggttttaggcatcattgattgacctgctgcaatgaa

SEQ ID NO: 8979 - DNA, 593 bp, Homo sapiens
  MAP TO AP000960.2; EXPRESSED IN BRAIN, SIGNAL = 2.9; EXPRESSED IN BONE MARROW, SIGNAL = 3.2; EXPRESSED IN HELA, SIGNAL = 3.2; EXPRESSED IN HEART, SIGNAL = 2.8; EXPRESSED IN PLACENTA, SIGNAL = 3.5; EXPRESSED IN LUNG, SIGNAL = 3.1; EXPRESSED IN FETAL LIVER, SIGNAL = 2.8; EXPRESSED IN ADULT LIVER, SIGNAL = 3.1
cgtcagaagggagggtacagtgattatggtggaactgcattataaactccaggctttttggaaaaaccaagttcttagacaaaagaaaagctaatagacattaaaagagatagaagtcaagagagtattgattagagtaagggctgacgtgtaagcatggttggcagacccacccctaatatttaaggtgcccggggccagaatgttattagagctccttctattacttacctaaatatttgaaagtagtaaatcaagacaaattattaatgcaatgtgattgatgctactttgacaatttatccttataaaagcatgaaagagggaagttccacttcaatatgtggtggttcaggaagagccattccttagaccctgatgtccattcctctcatcccagcctcagctccatcccatgctgagggagatctgaccacacgtgtgtcacgcaggttcttgtgcccaacatcctttacaaccttctcaaatggcttgtgtctaaggacgtggataccacaaatgggtcctctgaggagaaaagagcttcataaaaaatctgtgcaggctacagaggcaggaacaaggccagttaa

SEQ ID NO: 8980 - DNA, 598 bp, Homo sapiens
  MAP TO AL138806.5; EXPRESSED IN BRAIN, SIGNAL = 1.9; EXPRESSED IN HEART, SIGNAL = 2.9; EXPRESSED IN LUNG, SIGNAL = 2.9; EXPRESSED IN PLACENTA, SIGNAL = 2.2; EXPRESSED IN HELA, SIGNAL =   3; EXPRESSED IN FETAL LIVER, SIGNAL = 2.9; EXPRESSED IN BONE MARROW, SIGNAL = 2.5; EXPRESSED IN ADULT LIVER, SIGNAL = 2.8
cccttcccactctcagtgacatacttcatgtctgtttgcaaagcccacaccccgtgtcctggggaccacgcgaaccctctggaacattatctttatgacctcgcagtagctgagctgtgtctggtaagtagtcctcaccccagtgctcccagtagattctgccctgtgcaatgcaggcttctttaggctgggactattgacagtcttgaaaatcaggcctccaggcgggtcccccacacttccatgtcacacgactgtgatttacatatgcaggtgtgaggggcagcacctgttagaaatatacacccggcaagttttccttttgcaccataaaaatggataaatctgccactcataaaagccttatttactgctaagggttcattatatatgcatgaaaaaccaactaatttaactgcctggcaacaacttcctgccagaggctggattcaggattggaattcaggtttaggttgggggcagccaaggtgagcttgagagggctggcacaggtggcaagggactgtaggtacaaggctggctcccaatcctggcctggcgtggctagcagtgtgatgctgggctcatgtaggctctc

SEQ ID NO: 8981 - DNA, 581 bp, Homo sapiens
  MAP TO AC005323.1; EXPRESSED IN HEART, SIGNAL =  36; EXPRESSED IN BONE MARROW, SIGNAL = 1.8
ccgtgtctggcctctagttatgttttatacattaggtaaaagattaattatattgataattacctgcttccgctcccgttgccccaacaaagaggagagccagagtcttcattgcagacttctggtacagccccaccacagtctcattcagggggtccttgttcttgtcaagccagccggcaatgttgtagtccacggtgccagcatagtgaatcaaagagaagtgggcctcaggcttgcctttggcaggcttgggcttctggaagttattggattttccaagatgttgttcatacagcttgttcttgaaggaggtgtctgtcgccttggggaacatgcactcctcttccaggatggagaagatgcccataggctggaagaatgaaaagaaataaatgccacttgaattctgtctgcttatagaaataacatttaacattaataattatcccatctgagtaaattcatcctttaattctacagagttaacgaaaactcgttcctttggtcagaagtcattaacttcacaaatatttattgggtgctgatcaggagccacgtgctgtatcaggctctgggat

SEQ ID NO: 8982 - DNA, 580 bp, Homo sapiens
  MAP TO AC005323.1; EXPRESSED IN BONE MARROW, SIGNAL = 1.7; EXPRESSED IN HEART, SIGNAL =  34
atcaggctgtgggctaaatgctccatagtgtcacttagctctgaaagtctgtgactgtaagactgtatcacagttattaaatacactttctttcattaggcatgtattggccagtgtttttgtgtcaggttttgctgtaactacatttgtctctgttgaacagtgtatatctattttgtgactcttgtaacatattagtgctattaaacatgacctgcttcagcagtttgtgccccagagaagaggaaagccagagtcttcattgcagacttctggtacagccccaccacagtctcattcagggggtccttgtttttgtccagccagccggcgatgttgtagtccacggtgccggcatagtgcaccagtgagaagtgagcctcaggcttgcctttggcaggcttgggcttctggaagttgttggattttccaagatgttgttcatacagcttgttcttgaaggaggtgtctgttgccttggggaacatgcactcctcttctaggatggagaagatgcccataggctaagaataggaaaaaagggatgataatgatgagtccctcagaaagttatgctcca

SEQ ID NO: 8983 - DNA, 588 bp, Homo sapiens
  MAP TO AC021863.3; EXPRESSED IN PLACENTA, SIGNAL = 1.5; EXPRESSED IN BRAIN, SIGNAL = 1.5; EXPRESSED IN HELA, SIGNAL = 1.7; EXPRESSED IN LUNG, SIGNAL = 1.7; EXPRESSED IN ADULT LIVER, SIGNAL = 1.8; EXPRESSED IN BONE MARROW, SIGNAL = 1.5; EXPRESSED IN FETAL LIVER, SIGNAL = 1.6; EXPRESSED IN HEART, SIGNAL = 1.9
gggcatttgtacaggagtggaatttctgggtcatctggcatagatatttatgtttagctttagtagagcctttctaatttttttccaaaatggtgtatcacttcttttcatagcctgtaagagataagtactataatctagagctctgtgaggttgcaagctctataccaattataataagttttgccccgttctccactgtggttcatagaacccggataaagaatctttttgaccagagccccttgttggcatgagctatttccacttctaggatgctctcctccattcagggaaggggaaggcaaaatctgctgagggttctgtggggtgtgttggcttcctggtcctttttcttgggggttttgattgagctgcacctcctcaatggttaccagtacctcttggactggatctgccctcagctcttgaaagaccaccagctccccttgcatgctctagacattatcagtgagagcctgggagtccctgtcctaactgaacagtgattctagaacttctacaggaacactccttacagataagctgcctgtttgttcagagaccccttgggagaaagcaggacac

SEQ ID NO: 8984 - DNA, 525 bp, Homo sapiens
  MAP TO AC013707.2; EXPRESSED IN ADULT LIVER, SIGNAL = 2.6; EXPRESSED IN HEART, SIGNAL = 2.5; EXPRESSED IN BRAIN, SIGNAL = 1.7; EXPRESSED IN HELA, SIGNAL = 2.5; EXPRESSED IN FETAL LIVER, SIGNAL = 2.5
tccagttcccaacaacttcctcatctctgatacaggagaggggcagggaagtgctggaaagaaaagggcagggtctctggagagggctccaccttctgggctgtgcccaccgacctaggtaagaacagagactcctgtttttgcacccaaatgttggattttccaagatcactctggcctaccatgcctgcatcctgtgcctgtaaaaaccccaagaccctcatgggcttggatacaagcagctggatgtggtgaagaacccattggcagagagcacacaggcggctggacatcaagaggagcagagtagcataggagcacactggaaggcaccagcagatgctgtcaggccattgaccagcagaaccacacagacaccgagggaaatttgcctggggcagttggaggtgagttcagctgctgagcagcccggctccagggaaaaaccctcttctggctcgtctatctggggagagctactgccaccatttaataaaagcttgcactcattctccaagcccacat

SEQ ID NO: 8985 - DNA, 565 bp, Homo sapiens
  MAP TO AP001242.1; EXPRESSED IN BRAIN, SIGNAL = 2.1; EXPRESSED IN PLACENTA, SIGNAL = 2.1; EXPRESSED IN BONE MARROW, SIGNAL = 2.6; EXPRESSED IN HEART, SIGNAL = 3.5; EXPRESSED IN FETAL LIVER, SIGNAL = 5.4; EXPRESSED IN HELA, SIGNAL = 3.1; EXPRESSED IN ADULT LIVER, SIGNAL =   2; EXPRESSED IN LUNG, SIGNAL = 2.8
gcagcactcacacattcaccattatcaagagtgacaggtctcttcaatacccagagactaaatgggctgtaccttattcttgttttgggcaacttatagtctaccttcttttctgccattgagtactattttccaaagtttatctctcttagtgagcatggccactgcacggagcatgtctctgccatgcaccatcaatgccactgtccgcttttacattttatcagtgagtggggacatcatcctgacccagacaccagcctccctgttaacatctttaggaaagagacactcaatcttttatcaagcaactgcccatgttcatggacaaatcagttggatccagatgaaattggacatggatttgcactcgttatatctcacatctctaatgtgcccaaaaatgtcccagcctggttcagtagcagggaaagtggatacaaccatatcagcatcagtgggctgcagcctagggctccacaaaattttactgatgcctgactaggggagccaaatcacagtgctgtagcttgtgcacaaatcttcctgctgctttataggctgc

SEQ ID NO: 8986 - DNA, 568 bp, Homo sapiens
  MAP TO AL138827.2; EXPRESSED IN BRAIN, SIGNAL = 1.8; EXPRESSED IN BONE MARROW, SIGNAL = 1.8; EXPRESSED IN HEART, SIGNAL = 2.5; EXPRESSED IN ADULT LIVER, SIGNAL = 1.7; EXPRESSED IN FETAL LIVER, SIGNAL = 2.9; EXPRESSED IN HELA, SIGNAL = 3.4
taccagtcagcaggatgtgggtgcggacaaataagggaataaaagctggccacccgagccagcagtggcaacctcctcgggtccccttccatactgtggacactttgttcttttgctcttcacaataaatcttgctgttgctcactctttgggtccacaccaccattaagagctgtaacactcgccaccaagtccatggcttcgctcctgaagtcagcaagaccacgaacccaccagaagtaagaaactccagacacatctgaacatctgaagtaacaaactccggacacaccatctttaagaactgtaacactcactgtgaaggtccatggcttcattcctgaagtcagggagaccaagaacctaccggaaggaataaattccgaacacactccagtgttgggtgcatatatatttacaattgttatatcctcttgctgaattgacccctttaatcattatataatgaccttctttgtctcttcttatagtttctgttttgaaatctattttgtctgatataactatagtgactcctcatcttttttggtttccattggcattgaat

SEQ ID NO: 8987 - DNA, 586 bp, Homo sapiens
  MAP TO AC005323.1; EXPRESSED IN HEART, SIGNAL =  32; EXPRESSED IN BONE MARROW, SIGNAL = 2.4
aaaaagtgccctgtgcaaactatgatgtgtccataatgcattattttcaataacaatttcccagaatttgtagtaccttggctttggagaccgtttctacattactagcaaggtcatcaatctccatcttcatctcactcttctccttctccagcttctgcttcactcgctgcaggttgtcaatctgctccccaagctcggccacactatctgcatgcttcttcctcagggtggccgctgtggcttcatgctgtagggtggcctcctccaggtccctgcgcattttctggaactcagcctcccgcttcttgttcatctcaatctgggctgaagtggccccaccggcttcttccagcctctcgctgatctcctccagctcccgggagaggtcagagcgctgcttctctgctttggcccgggaggcccgctctgcctcgatttcctcctccagctcctcaatgcgggcctgggaatggtggaaaatacaaactcagcttctttgtgtcataactgcctccgagccagactgatgaaaatcatgtacttacttgcaattctttaattttcttctgcaattgaatgccaa

SEQ ID NO: 8988 - DNA, 501 bp, Homo sapiens
  MAP TO AC012664.3; EXPRESSED IN PLACENTA, SIGNAL = 2.1; EXPRESSED IN ADULT LIVER, SIGNAL = 2.7; EXPRESSED IN BRAIN, SIGNAL =   3; EXPRESSED IN LUNG, SIGNAL = 2.3; EXPRESSED IN HEART, SIGNAL = 2.6; EXPRESSED IN HELA, SIGNAL = 2.9; EXPRESSED IN FETAL LIVER, SIGNAL = 2.9; EXPRESSED IN BONE MARROW, SIGNAL = 2.3
ctttgcaaactaaggctgggggaaatggaacagggatgaactgaggggaagaaaaacaaagtgggcttaggatgaagaacgtgggcagcatgctggcagctgagcatcctcagtgcatacccctctgctgagggctgctgtgagctggccaccctgatgggaagactgtctacgtctggcttcaggaactgtcccgatggacacaggattcccttgcctccgcagtgcatcttctcctatcaacaaaaggaagtaggaagaaagaaacaccaagaagaggcctgcaaaaaggtcttctaaaagttttatctatggcagccctgcactcttccttctttccggtgaatagaaaagagctcaaaaatccataccttcacatctcaggtgaattgttcatacatcaaattcttgtaacatccaaaggcgagggaagaacaaggtgagctggctcctgaagaagtattcatggaatattagagccgaaaggggccttgaaaagtc

SEQ ID NO: 8989 - DNA, 561 bp, Homo sapiens
  MAP TO AP001207.1; EXPRESSED IN PLACENTA, SIGNAL =   2; EXPRESSED IN BRAIN, SIGNAL =   2; EXPRESSED IN BONE MARROW, SIGNAL = 1.7; EXPRESSED IN FETAL LIVER, SIGNAL =   3; EXPRESSED IN HEART, SIGNAL = 3.6; EXPRESSED IN ADULT LIVER, SIGNAL = 2.2; EXPRESSED IN HELA, SIGNAL = 3.6
tgcttccccatctacaaagctcaactttatcacccatccagaggaagtactcattttgggataatattttttgtgttccttgttcacatgcataaatattatttgcatattattcttaccatattacaaatacttccttgttgctatgtttactttaggattattatttttgctgaatgaagtatattacattgagtggctttattagtccattttcacactgctgataaagacatactggagactgagaagaaaaagcggtttaattggacttacagttccacatggctggggaggcctcagaatcatggcaggaagcaaaaggcactccttacacggcagtggaaacagaaaatgaagaagatgcaaaagtggaaacccctgataaaaccatcagatcttgtgagacttattcgctatcacgagaacagtatgggggaaactgctcccacaattcaaattatctgccacagtgtccctcccacaacacatgggaattatgggagtacaattcaagatgagatttgggtgaggacacagagccaaaccatatcagtggct

SEQ ID NO: 8990 - DNA, 539 bp, Homo sapiens
  MAP TO AC019140.2; EXPRESSED IN PLACENTA, SIGNAL = 2.7; EXPRESSED IN BRAIN, SIGNAL = 2.5; EXPRESSED IN HELA, SIGNAL = 2.7; EXPRESSED IN ADULT LIVER, SIGNAL = 2.4; EXPRESSED IN FETAL LIVER, SIGNAL = 2.6; EXPRESSED IN HEART, SIGNAL = 3.5; EXPRESSED IN LUNG, SIGNAL = 2.7; EXPRESSED IN BONE MARROW, SIGNAL =   3
tctactgctgctgtgaaggctcaatgggtttgagaactcatgattcttctatctcgttgatccaccatatttaacactgtttctatcttgtgtttgaagttggctacatcagatcctgacaccatgttcccatttctccagtgggaaggagataagaaagaaatggtagaaaagatactcttttaaaaacaaaaccaaagttgccatatactgttcttactcatacccattagtcagaagtaagtcacaggatcccacttaactgcaaggaaggctggatcactagcttaaaattcactagcttaaaattatattactagagaagaaataaagatattggagaaagagctactagtctccattacagtctatactcactcgtaacactttcttctcctccaacccagacattatgtttttaggaatttgcactgtacctgtatgaggcgtctccatacctaggctttttggtatgcagtaggctccctgtatctgcaggttctgcagccacagattcgaccagccttgggttgaaaata

SEQ ID NO: 8991 - DNA, 569 bp, Homo sapiens
  MAP TO AC009575.4; EXPRESSED IN HEART, SIGNAL = 1.8; EXPRESSED IN PLACENTA, SIGNAL = 1.8; EXPRESSED IN FETAL LIVER, SIGNAL = 1.6; EXPRESSED IN HELA, SIGNAL = 2.1
tcaggcattttggggactactggacactggctctgagctgacattgattccaggggacccaaagagtcatttcggtcctccagttaaagcagttaaagtaggggcttacagaggtcaggtaattaatggagttttagcttaggtctgacttacactgggtccagtgggtccccagactcatcctgtggtcatttccccagtgccagaatgcataattggcatagacatacttagcagctggcagaacccccacattggctccctgactggtagggtgagaactatcatggtgggaaaggccaaatggaagccaatagagctacctttacttagaaaaatagtaaatcaaaaacagtatcacatccctggaggggttgcaaagattagtgccaccatcaaggacttgaaggacgtgggggtggtaattcccaccacatccccgttcaactctcccatctggcctgtgcagaagacagatggatcctggagaaagtggattatcgtaagcttaaccaagtggtgactccaattgcagctgctgtaccagatgtggtttcattgcttgagca

SEQ ID NO: 8992 - DNA, 574 bp, Homo sapiens
  MAP TO AC021097.3; EXPRESSED IN HEART, SIGNAL = 2.2
tcaccttgacccctatttgggctttgcttacatgctgaatgaaagacagacagaaggaaccaatctatgtgcacaggccacattccaaagcaaaccggagcacaggcccaggtctccctgtcccctcaccatggtggccctcctgctgcctgcagcccccataccttggggagggcccctggccagacacggacggcgccatggttgagcagagcccgaaccacgtgctcggggctctgggccagggctgcagctgggccctgcagagcacagtgcaggggcgtgtgtcccccatagtccatggtgttggcgctgacaccacaggacaggagcagctccacgacagctgcatggccacggcggcaggccaggtgcaggggtcgctgcttgtcctggtccgcagcatcagcgtctgctccagctgaaagcagcaagctgcacagctgcaggcagcgggcggtggtggcctcggcatcggtgatggactggcagcggacgtcacaggcagccagcagtggggtccagccttcggcattgcgggcatcaggacatgccccccgtcttagaagcagat

SEQ ID NO: 8993 - DNA, 588 bp, Homo sapiens
  MAP TO AC021735.4; EXPRESSED IN FETAL LIVER, SIGNAL = 1.8; EXPRESSED IN HEART, SIGNAL = 1.9
ttgacaagccttgacgtgaggactcttcacaaaaatgagcaatgctactgagggaagttggtggcatgttggcagaactgtgagtaaacaaaataggtagactgagcaaacttgaggacaaaggtagtgaaggctagaaagcatggtgagaatcaggtaaggtataccctttgtgaaccctgaacatctgagacagtctcagttaatttagagtttattttgccaaggttgaggatgcacacccatgacacagcctcaggcagtcctgatgacatgtgcccaaggtggtcggggctcagcttggtttaatacattttagggagaaatgagacatcaatcagtatatgtaagaagtacattggttccatccagaaaggtgggaacaactcaaagcaagaaggggacttccaggtcacaggtaggtgagagacaagtggttgccttcctttgagtttctgctaagtccttccaaggaggcaatcagagatgcatctatctcagggatgactttgaagaaaatgggaggcaagtttgtcctgagcagttcccagcttgacttttccctttagcttagtaattttggggccc

SEQ ID NO: 8994 - DNA, 569 bp, Homo sapiens
  MAP TO AC011381.3; EXPRESSED IN HEART, SIGNAL = 2.1; EXPRESSED IN FETAL LIVER, SIGNAL = 2.1; EXPRESSED IN HELA, SIGNAL = 3.1
gcaaagagcaatctgaacaaagaatttctcaatatcccaacgtctacatattaaccacattggtaactcacctctctcttgaactccttcacaatgtgccgtagcaaggcctggtcaaagtcttccccacctaagaaggtatccccatttgtggatttcacctcaaatactcctttctgaatttccaggatagaaatatcaaaagttccaccacctaaatcatatacagcaatgctgtaaatgatttgtgaaaaaaaaagaaaagaaatccttaagaacaaaacctatcaccaggatataaatttcaataaccaaatacagataatctaagctatttccctgagatatgtactagttaaattaccatggcccaaaagaaaagaaaagaatggttttgaaatgaaaaaacaaagacaatacagacttaaaatcagtaaaagcactgtaaaaggctcaattactaagaaattaagtgacactttagtttcacacatccaggtgagaaatttactgcacaaacttacactttgtcttctgatttgtctagaccataggcaagagcagcagct

SEQ ID NO: 8995 - DNA, 568 bp, Homo sapiens
  MAP TO AC008583.4; EXPRESSED IN HEART, SIGNAL =  12
ttcatggagtcctttgcctctctgccaccctacaatggtacagtcacatggctcttaatgacagggatatgttttgagaaatgtgtcattaggtgattttgaggttcagccaacatcaaagagtgtacttaacaaacctagatgggatagcctactatcctaatagtatagcctaatgttcctaggctacaaacctgtacaacatggtactctcctggatacagtaggcaattgtaacacaaggataattatctgtgtatctaatcatagaaaagatacagtaaaaatttggtattataatcttatgagaccaacatcatatatgtagtccgtcgtggctgaaacatcattatgtgatgcatgactgtatttgattttctttaaatagtattctggatctttagaggggtcttgaccatgagtccatgcagagagaggagcctgagctttatctcccagaaccttagtttccttatctgcaaaatgggaataatgggaataattatatcatgggaaatggttgtgagtaattgtttgagataatgatagtaaagcagccagcactgct

SEQ ID NO: 8996 - DNA, 550 bp, Homo sapiens
  MAP TO AL121953.10; EXPRESSED IN HEART, SIGNAL = 2.9
ttgagggtggcaggaatatcccccagatatgactcctcaatcctcagctccttacagctaacctacttctgtagaacttctgtttcagcctctcacacactgcaaaagaggcatcggcatcggccagttcctatatgtctttttccagctcagaagacacttaagggcagacaaactttaagtcaagaaagattaagaaggagaactctttgctgaattttctctccctttattctgaaaactctaccccctcacatccctaatccctgttctgtccctgccacatacacacacagacgtctgaccctgcacctccaagttcccaaagatattgtacgtagaaaaaacaaacctttttttattgacattcacactcaacactgaacactccttgccaccaactgtgtgggttttctcccacactggccaattctccaataccaactggatatcatacaattcaattctggcattaatcggcattaagtgcagatccccagcaggttaagagctcagtcccataagatctcccccaacttcagacaccagt

SEQ ID NO: 8997 - DNA, 577 bp, Homo sapiens
  MAP TO AL157882.1; EXPRESSED IN HEART, SIGNAL = 2.4
gctgcaggcagatttactccttctagctcattacacacaggatacatgactgcatagaagggcatataaaacgtggaaatggcctcagcttcattcttcatctcttccattgttatcctcattcaaacaccaattacagtagaaaaagcagtgctaaaatgcacttcattcactgcagtattctccttttttgcgtgattaaaggataaggcacaaaacacacactggcaactgaggcactgacttcacttcccacctatggaccctcttcagctcctggatctgttcactttggtaacgccagaggacttgagaggaaccaactttatttctttacttttactgtaatctagtcccaagagtaagaggagagaaatgcctgtggtttattttactgtgaactgcaagttcaaatcatttcttatctgttgaaatacagttggctatgatattagtgctcaccattattcttttcaactctatcaactctagtaaaatccacagggaacttttcatgagatgtgctgttagtgtattaatagtttcttctgtttgtggcagcaacagtgcttttgaa

SEQ ID NO: 8998 - DNA, 509 bp, Homo sapiens
  MAP TO AL133474.7; EXPRESSED IN HEART, SIGNAL = 3.8
ttaatgagcagccagtgtcgaaagctactagcaaataaagacattcctttaaagaaaactaaatttttggctgtgacttttggagatgcaggggtgggggtgggatatgtatgtctttcaattcactgagaagcacctagaaaaataacctataatccctgctttcatttcctcacttaccattctctttcaagtgactgcagttgtttccacccctgccatggcacacttcatagatggctttctagttacagaatctattgacctgtggggttgatcactctcttttttgcttcctcctcccttgactttaatggcagcttcatctggttcccattcagtttctctaaattgttccttatcagtttccttcatggactctcctgcctttgtctgtcccttaaatgttggggttccaaaggttttattctagactctttttttgtcttatgctacgtgttctccatcagtaatctcagccatgcccatggatcactcgcatgctgata

SEQ ID NO: 8999 - DNA, 523 bp, Homo sapiens
  MAP TO AF119117.1; EXPRESSED IN HEART, SIGNAL = 1.7
atagaagggggcttttcagcagagccgcaccagccctagtctctacaggcctgtggcaggccatgcttctcggggcggggtggggcaggatgggcgggagagcacagcgtgggctctgtggcaagcagggcgggttctgtttcagggccagggctgatcttcatcatctacccggaagccatcgccacgctccctctgtcctcagcctgggccgtggtcttcttcatcatgctgctcaccctgggtatcgacagcgccgtgagtaacccgcaccgcccggccctgtcctcggcagttgggttccttccacccgagggggccctgccctcccagggctaggcaagatccctgggctcacggacggcccccagacctcctgtccttgacttgggcgagccccgtgattatttgggagacctttctcggggctggagtgagtggtgactggagtttacctttccctttatccccctactctggggtacctgtgtgccctgccctgagccacctacagatcctggaa

SEQ ID NO: 9000 - DNA, 513 bp, Homo sapiens
  MAP TO AL133286.5; EXPRESSED IN HEART, SIGNAL = 7.3
atatcccacatgcaatagcgatatattaaatattatatgtacctatttataaatgatgtttctttatttaaacctttttacatgctttttttctttcacagggtaataagagatttgtttttgagttgtaatggagtaagtcaaataatcgaattaaattgcttaaatggtattcgaagtcattctctaaaagcatttgaaactctgataatcagcctaggggagcaacagaaagatgcctcagttccagatattgatgggatagacattgaacagaaggagttgtcctctgtacatgtgggtacttcttttcatcatcagcaagcttattcagattctcctcagagtctcagcaaattttatgctggcctcaaagaagcttatccaaagagacggaagactgttaaccaagatgttcatatcaacacaataaacctattcctctgtgtggcttttttatgcgtaagtaaagaagcagagtctgacagggagtcggccaatgactcagaagat

SEQ ID NO: 9001 - DNA, 517 bp, Homo sapiens
  MAP TO AC024581.1; EXPRESSED IN HEART, SIGNAL = 2.7
tccctgcttcatctcctttgttcaggtagacaggtccctaagaatgtttggtaatctttagccaagtctcactaaatttcatgaatgtcgtgtgtgaagtcttttgcccatgcacatgtatactgagcagatagaaaaccgaaagtatatcactgcccacctagtcatgcctagaactggaaactagccagtacatggctagccatcattatgaaaggaatctggagttataaaggtgaggcttaccgggtgtcagtctcagcagcatgccaattgccaattaagctttcctctggatagattggctcagagactgtcatatgaaactggaggctccaaagggaagcttctccagaatcactcttattggttatttcttgatggcccaacgtggtccccagggtcatcagcaggcatgccctcatggaaagctgtagaagggcagtgtgccaaggggtgtggccacaagtcttgatgctaatgctccctaagagagcccagccaaatccaaccttaa

SEQ ID NO: 9002 - DNA, 543 bp, Homo sapiens
  MAP TO AL049829.3; EXPRESSED IN HEART, SIGNAL =  93; EXPRESSED IN BONE MARROW, SIGNAL = 2.1
tggagacatctatggggacctccatgccaaggaccaggacaacactctagtctgggagtcttgaggagacctgggctgaagccagagggagctgccctcaccttgttctctgttgcatgcttctccttctccaccttggccagtgtcagctccaggtcatcaatgtccttcttgagctctgagcactcgtcttccagcttgcgcttcttggcagtgagctccgcgttcatctcctcctcatcctccagcctctcattcatctcctttactttggcctccagctgaatcttgtttttgatcagctggtcgcagcgctcctcagcatcattgaggttgtcttgttcctgggagaagagaacagggaggaagctgatggttaaagagaggagacctagggtcttaaaaagagctggcactcctagactcccagtccctggttgtgagatgggctataatctaggggaggggaggagagggctgaagagataatcacgtggcctcaccgcctgcacttggagctgcaggtcattcttctcctgcagc

SEQ ID NO: 9003 - DNA, 577 bp, Homo sapiens
  MAP TO AL049833.3; EXPRESSED IN HEART, SIGNAL = 9.3
ggatttggggaatcagtttgatttgtgtggtttttatgcctaggcagtcacaataaataatagttatattaattggctccctgatcagagttataaaaatcatgttttgtaggaattacgtcaaatacactggagtaatggtttcagtgagaaaagagcccgccctggggatcaacatgcacagatgtaactgtcccaaggttgctgggtggcctggagcttcttggtgcagattctccagagtgggtgccctggccttagttctgaaaatgacccttttccaggccacactatgtgttgcttcaacagcaccaaacccaaggtaagtgcagttcaaccccttgagctgccctgacccactgggtctcagagcctggagagagtaaagataccatgttctcctggagaaactgaggcccccagtttgggagtgacttgcccaagatcacacagagactaaaggtagtctctaaagctgtcctataattattaaacttgttgaactttcaaagcagctcgctaatatctttcttccatctccctggccatgggagaccctgaacatggggcctctcta

SEQ ID NO: 9004 - DNA, 501 bp, Homo sapiens
  MAP TO AC009680.5; EXPRESSED IN HELA, SIGNAL = 1.8; EXPRESSED IN FETAL LIVER, SIGNAL = 1.9; EXPRESSED IN HEART, SIGNAL = 1.7
aaggtttttgacatgccctgtcgacatttccccattgtcttcgtgattaacatttggctcctcgttacttctgcagatttctgcaggaggcttgaatttctccccccaaaaatgattttttcttttctatggcatcatcaggctgcaaattttccaaacttttatgctctgctttctcttgaacagtttgccgcttagaaatttcttctgccagataccctaaatcatctctctcaagttcaaaattccacagatctcaagggcaggggcaaaatgctgccagtctctttgctaaagcatagcaagagtcacctttatgctggttcccagaaagctcctcatttccatctgagaccacctcagcctcgacatcattgtccatattactatcagcattttggtcaaagccattcagcaagtctctaggaagttccaaaggtttcctcatcttcctgtcttctgagccctccaagtcttcaggcggttctaaacttccccaca

SEQ ID NO: 9005 - DNA, 598 bp, Homo sapiens
  MAP TO AL133368.1; EXPRESSED IN HEART, SIGNAL = 2.3
atgaggggtaaaccagagcccaggtatggagtggaggctgattgttcccctcttagagcacactatggactgtttgtattccccaaattcatgtgtggaaaccctaaccctcaatgtgatggtgttagggggtggggcctttgggaggtgatgaggtcagcagggtgaagccctcatgagtggaattagtgcccttatggaagaggcccagagagctctcttacccttttccaccatgtgagaagatggccgcctgcaacctggaagacagccctcatcagaacctgaccatgctggcccccctggtctcggactcccagcctccaggatggtgagacatatatttctgctgtttataagcttcccagtctatggactttgttacagcaacccaaactcactaagacagagcacataactctagtataggtatctctgtacatacttaaaaatctacatcattagtccacgcatttcttgagatcttatctcatttatcattttcgtagctttgcagagccttatacaaaagtttggtacacatttattaaatgaaaggatgaaataaatggaagtatcacacactgaccctgtcacc

SEQ ID NO: 9006 - DNA, 524 bp, Homo sapiens
  MAP TO AC016372.2; EXPRESSED IN HEART, SIGNAL =   2
tttggtacttggggatgagcagctattcacagtagagaagctccagtttgaagtatcctacactacttgaattcactacaggctgcatggaggaagcagcatggccactttgatttccagaactacccgtacacaatgtgaaaagaagaatagaggtgaggtggatttggttttggaggtgagtgagcaggtgcctccaaataagagttggggctcaaggttttcttaaaaaagatagactcttgaaaaattgcactctagttacattagtgccaactcatgaggtcacctgttcttttttccctctcccattatctcccctttctaccccattctaccctctccctgatgccctatacatcacagaaacttgcccttgagacgtaagactgtttggaaggaggttggaagagctggccttggctcagagagttgcttttaccttgtggtatcttaaaggtgccacctgatgtccaaccattcataacagacagagagctgttgccaacaaggtcagcagaaca

SEQ ID NO: 9007 - DNA, 576 bp, Homo sapiens
  MAP TO AC011501.2; EXPRESSED IN HEART, SIGNAL = 1.7
accctcactcattccaggtgccatggatgggatgataaagagagatccttctaaactcacaacttctctttctaggaaaccacagaaaaccttcctcctggcccacccaggtcccctggtgaaatcaggagagagagtcatcctcaatgttggtcagatatcatgtttgagcacttctttctgcacaaagagggatctctaaggacccctcacgcctcgttggacagatccatgatggggtcccaaggccaatttctccatcggtcccatgatgcttgcccttgcagggactacagatgctacggttctgttactcacaccccctatcagttgtcagctccagtgatcccctggacatcgtggtcacaggtgagagtgtctagacattgtctcattgtcactgggacacagagtgaatgatccaggacttggaaccccaggtggtcatgaggaagataagtgtgggattcttatggaaagagagtgattggtgaggtctgtaccaacagagacagagaaacaggagacataagtacgaacaggtgtcataacagaggacagacacaggggccatac

SEQ ID NO: 9008 - DNA, 578 bp, Homo sapiens
  MAP TO AC007841.1; EXPRESSED IN LUNG, SIGNAL =   2; EXPRESSED IN HEART, SIGNAL = 1.9; EXPRESSED IN FETAL LIVER, SIGNAL = 1.8; EXPRESSED IN BRAIN, SIGNAL = 2.1; EXPRESSED IN PLACENTA, SIGNAL = 1.2; EXPRESSED IN HELA, SIGNAL = 1.5; EXPRESSED IN BONE MARROW, SIGNAL = 2.6
gcaaaagacccaatttatcacagcaaataagaacattaatgttacattaaccataagagaagactggccaaaatcaagataaaatatgaacggggagccacactcccagaaatcacaaaaagccacctactacactgacaacaaagagtcaaatgcagcagacctggaagccaaacacacaaaacagagcacacaggcaactgtggtgagagcacacaggcaggcagcgggaccacagccacccctccatggtatatggatacagttagagcagtctgaaagacttggaacattttcctatggcaaacgttcttttcctcccctacctggacattccccttccatcctcgctcttttgtgatcaacattccatacagcagccatgaagatctttaaaaaaacaaaaacaaaatcctatttctgcattgcctagaacttctgagggtttcttatcacaattagaatcacatcccaactccttactgtggtctatgaagctccaagtaatctggcccctgccacatcactgactttcctttgcctaacctggtggccacactggcttctccccagttctt

SEQ ID NO: 9009 - DNA, 582 bp, Homo sapiens
  MAP TO AC006992.2; EXPRESSED IN PLACENTA, SIGNAL = 2.3; EXPRESSED IN BRAIN, SIGNAL = 3.7; EXPRESSED IN BONE MARROW, SIGNAL = 1.9; EXPRESSED IN LUNG, SIGNAL = 1.7; EXPRESSED IN HEART, SIGNAL = 1.9; EXPRESSED IN ADULT LIVER, SIGNAL = 2.8; EXPRESSED IN FETAL LIVER, SIGNAL = 2.6; EXPRESSED IN HELA, SIGNAL = 1.4
aaaatggtttcgtggggtggccccagggtccctgtgctgtatgcagtctagggaattggtgtcctgcatcccagccgctccaggtgtgactaaaaggggtcaaggtacaggttggacaatggtttcagagggtgcaagccccaagtcctggcagcttccacatggtattgagcctgaaggtatacagaagtcaataactgaggtttgagaccctccacctagatttcagaagatgtatggaaatgcctggatgtccaggcagaaatttgctgcaggggcggggtgctcatggagaactaccatgcacctggaagagctgtagacacccaatgccagcccatgaaagcagtcaggagggaggctatagcctgcaaagccacagggacagagctgcccaaggctgtgagagcccaccatcagtgtgacccggatgtgagacctggagtcaaaggagatcttttggagctttaagatttgacagccctgctggattttggacttgcatagggcctttagcttcttcagtctggccaatttctccgatttggaatgatgtatttatctaatgcctgcaccctcatt

SEQ ID NO: 9010 - DNA, 566 bp, Homo sapiens
  MAP TO AC009290.1; EXPRESSED IN PLACENTA, SIGNAL = 5.3; EXPRESSED IN HELA, SIGNAL = 2.5; EXPRESSED IN LUNG, SIGNAL = 2.1; EXPRESSED IN HEART, SIGNAL = 1.7; EXPRESSED IN FETAL LIVER, SIGNAL = 1.7; EXPRESSED IN ADULT LIVER, SIGNAL = 1.5
  unsure 26
  unsure 328
  unsure 487
  unsure 524
gagcccaatcacgtatataccacttnccatttgatgatggaatgctgctgtgcgtgccccactttatgactagatgggtcagaaagcacccagttcatgataggcagttcaggtcacatggtgacttgatgacccatagtcaaacgttcagtttccaccaaagcccagtaacagaccaacatctgtctctcaaaaggagagtagttatctgcagaagatggcagggcctgctccaaaattttagaggcctctgctgtgattcacctatgggggcctgccagaggctctgatcagcatccctatctgccgctgtcacctcaagcactanttgaatttgctgggtcatatggcccaagtggcagagcagcttgcacagcatccttgatctgttgcagagccttctcctgttctggagcccactcaaaactggcagccttttgggtaactcgatgaataggccacagtaacacacccatatgaggaatgntcttgcctgcaaaatccaaataggcccactaggcatntgtgcctctttcttggttgtaggtggggtcaaattcagcaac

SEQ ID NO: 9011 - DNA, 591 bp, Homo sapiens
  MAP TO AL049758.11; EXPRESSED IN HELA, SIGNAL = 1.7; EXPRESSED IN BRAIN, SIGNAL = 2.3; EXPRESSED IN PLACENTA, SIGNAL = 1.5; EXPRESSED IN LUNG, SIGNAL = 1.9; EXPRESSED IN BONE MARROW, SIGNAL = 3.7; EXPRESSED IN HEART, SIGNAL = 1.4; EXPRESSED IN ADULT LIVER, SIGNAL = 1.5; EXPRESSED IN FETAL LIVER, SIGNAL = 2.5
aagagagatgaccgatcccctttcagagaagagagatcaggacactgaaggaaccggaagttacatcggaggaaggttcaaaagatgtgggatgtgtgctggcctgcaaggtgatattcacatgtttgagggacttattttaaggcaccatgaaagaactaagatcaattcagtgaggaattttaaaactacttaataagcacctacgaggagtcaggcactctgctaggggaagacaaagggcaagaagacacattcagctcctgccctcatgaggcttgggaactgacttatggaagggaggctgacttgaatgcagaagcctcagaagctgcattaatgaaaggcagagtttctcacggagctgacctgggaccaaatggctgccttgaggagaaggaagggtgtagtagaggctggactgccctggagtgggaagaggggggtcagcactggactggtgcagggtgagggtggggtggaacttccaggttcttcatgactctgtgatactaaattttgtagatttagcaacactctaaggaaataacattcttcattcttataagccaatgtacttatcctgaaatg

SEQ ID NO: 9012 - DNA, 580 bp, Homo sapiens
  MAP TO AC005006.2; EXPRESSED IN HELA, SIGNAL = 3.5; EXPRESSED IN ADULT LIVER, SIGNAL = 3.6; EXPRESSED IN PLACENTA, SIGNAL =   2; EXPRESSED IN BONE MARROW, SIGNAL = 1.7; EXPRESSED IN HEART, SIGNAL = 4.4; EXPRESSED IN LUNG, SIGNAL = 5.3; EXPRESSED IN FETAL LIVER, SIGNAL = 4.1; EXPRESSED IN BRAIN, SIGNAL = 2.6
cacaaggtcctctccacctgtgcctctgtgcattgagtgggggcagcagtggaacctaatcccccaccagcttctggagctgtaatggacaaaggcctaggaaggcctcagtcttatcacagatgcttccacttcctcctcaaggcttctcgtgttatctgccccacccctcctcagcctgccagagcacatttgagagtcccccaggcatgctcccgcctgagcatagcagcgtggatgccaagcctccagcccccttgtcctgctttggaggaagcctgggaagctgggtctgtgctgggcatcctgccattgtggacttcgaaacaaagacctgtctcaggcctagctgcctggtgccccttctaccctcccctggtggcccttggattggcattccagggggccagggcaaacaaggattgtgagtccttgtttggcctggccccctggaaggagtagctccttcatgctactctgccctcaaattagctcagggatgtcaaatcctccaccactgcactaaataacttcctggaagtagcacaaaatacttaattgagggccacttaatggagga

SEQ ID NO: 9013 - DNA, 586 bp, Homo sapiens
  MAP TO AC007841.1; EXPRESSED IN HEART, SIGNAL =   4; EXPRESSED IN FETAL LIVER, SIGNAL = 6.2; EXPRESSED IN ADULT LIVER, SIGNAL = 4.9; EXPRESSED IN PLACENTA, SIGNAL = 6.5; EXPRESSED IN HELA, SIGNAL = 5.3; EXPRESSED IN BRAIN, SIGNAL = 5.7; EXPRESSED IN LUNG, SIGNAL = 3.5; EXPRESSED IN BONE MARROW, SIGNAL =   6
aatccaataccctgtgcccccattttattctaggaattaaccccagctggcttgggatttttttgccctgttctcaaaataaactttggactggtgacttttgggttaatggttaaataagttaagactttgggggactgttgggaaggcatgactggttttaaaatgtgaggacatgagatttagaggggccaggggcagaatgagatggtttggctctgtgtctccatccagatctcatcttgaattgtactcccataattctcacctgttgtgggagggatctggtgggagataatttgaatcacaggagcagatcccccccatattgttcttgttgtagggaataagtctcacgagatctgatggctttatcaggggtttccgcttttgcatccttctcattttctcttgccacccccatgtaagaagtgcctttcgcctcccaccatgattctgaggcctccccagccatgtggaactgtaagtccaacaaaatctcacctcccagtcttggtatgtctttatccatagtgtgaaatggactaatacaataatgatttctttttctttggatagattccca

SEQ ID NO: 9014 - DNA, 554 bp, Homo sapiens
  MAP TO AL031588.1; EXPRESSED IN ADULT LIVER, SIGNAL = 2.3; EXPRESSED IN HELA, SIGNAL = 1.8; EXPRESSED IN BRAIN, SIGNAL = 1.9; EXPRESSED IN PLACENTA, SIGNAL = 2.1; EXPRESSED IN BONE MARROW, SIGNAL = 2.4; EXPRESSED IN HEART, SIGNAL = 2.1; EXPRESSED IN LUNG, SIGNAL = 1.9; EXPRESSED IN FETAL LIVER, SIGNAL = 1.7
cagtcctaagagcgctggagggacttctgctgtgcagcctggcatggcaaccacaccagtccagggctgggagctgccgtactgcatcgcggaagtctcagatgtcttaagtctgcagtagatctaaaaggggctggtacacatcaggagctcggcctgcacccaagagactggcgtggaagccagatgcgcaggccaggctgcagggttaccaaatggttgaggtaagcagatgcgtgagtcattctacagcaataaagagaggaagcggaccaacgtcactcacctgccaactgacgtgcacgactgcggccgctgtgcccgcgaaagctttggtgttgagctgtccggggagtcacctaagtccaagaaaggaagtgtgcggtcaggtaaagtgatcagggggagacctactgttgggggatcgtcaccgaatgggcaattctccgagtatctccactgtcccaacttgagtgtaggtggcactggctcagacaagtacacaaagggccaccctgctgcaggcagccacatgagaggcattcacccctaca

SEQ ID NO: 9015 - DNA, 590 bp, Homo sapiens
  MAP TO AL079300.11; EXPRESSED IN PLACENTA, SIGNAL = 1.7; EXPRESSED IN BRAIN, SIGNAL =   4; EXPRESSED IN HELA, SIGNAL = 3.6; EXPRESSED IN HEART, SIGNAL = 2.5; EXPRESSED IN LUNG, SIGNAL = 3.5; EXPRESSED IN BONE MARROW, SIGNAL =   5; EXPRESSED IN ADULT LIVER, SIGNAL = 4.3; EXPRESSED IN FETAL LIVER, SIGNAL = 4.2
gagggtcgggaggatttcctcccctcttacaagatcaaaagacagaagatattcaatattcagcccaatattgcattgctgtcaattttggatggcataggcgttgtgctgtggatgttccaagccccagttgcatggggctcttccagatatctctaataagcctctgtggtccccatccatcaacggcaataggagaaggtgacaggatagacctcaaggggaattgtgggctgagcagcaagagttattgatgaaggtgcagaattagcacaggccccagatgagcctggaggtgaagatgaagccagtttattttttctgtgttgggtaaggcaaaagcaggtttgtggggatagggttgctaaccttaaccttaatcctaaccccagttaaatttgaattttagatttaaaaagccaaaaaaataatttttagcacaagtatgctccgtgccatatttggtttggatattcgacccctccaaacctcatgttgaaatctgatccccagtgttggaggtgtttaggtcacaggggctgatctctcatgaacagattaacaacttctgggggagtggggtatgtaag

SEQ ID NO: 9016 - DNA, 576 bp, Homo sapiens
  MAP TO AL035682.16; EXPRESSED IN BRAIN, SIGNAL =   3; EXPRESSED IN PLACENTA, SIGNAL = 3.8; EXPRESSED IN HELA, SIGNAL = 3.8; EXPRESSED IN HEART, SIGNAL = 2.4; EXPRESSED IN BONE MARROW, SIGNAL = 3.9; EXPRESSED IN LUNG, SIGNAL = 3.1; EXPRESSED IN FETAL LIVER, SIGNAL = 2.4; EXPRESSED IN ADULT LIVER, SIGNAL = 1.8
ttccacatggacagggattcttaccctgtagtgttcacagctgtgtccacaagccaagaacagtgcctgacactcagatattttctggacaaatgaatgcatgaaaaaatggtactcatcacctttcttggggctgtactttgtgggaatgagacctcctgacccggttatccaccagtcactccattaggccatggggtgatgactcacatgggggggtcacataaagattctgcaggttttagggcacagcccctctatcatgatcaaatccaagccagggacaggagtcatccacttaccacccttctgctgaacatgcgtacacacacccttcttctattcccccttcccctaaaggaaggtactaaggcaataagagctaatatcactgacatcagcttactttgcactgtgctaaggatttatgtgcatttaatttccggaacccttataaggaagatgctgtctcacagatgatgcaactgaggctcagagaggttgagtcatctgtccaaagttacccggctaggagcagacttcaggagtcctgagccctgtgcctgtactgcctct

SEQ ID NO: 9017 - DNA, 575 bp, Homo sapiens
  MAP TO Z86090.10; EXPRESSED IN ADULT LIVER, SIGNAL = 5.3; EXPRESSED IN FETAL LIVER, SIGNAL = 6.2; EXPRESSED IN HELA, SIGNAL = 1.9; EXPRESSED IN PLACENTA, SIGNAL = 9.3; EXPRESSED IN BRAIN, SIGNAL = 2.3; EXPRESSED IN BONE MARROW, SIGNAL = 1.8; EXPRESSED IN HEART, SIGNAL = 2.5; EXPRESSED IN LUNG, SIGNAL = 1.9
gagatccctttcctgatggggctgcctgtgtccagtccctcccagcttccccagggccctggggctctgcaggcattcagaagtggaagccagccacagcctgggactgaagaggttaatgtgcatctgcctccgaatgttaatgtgtctaggtgatgtcagtgggagccatgaagaagggagtggggagggcagttgggcttggaggcggcagcggctgccaggctacggaggaagacccccttcccaactgcggggcttgcgctccgggacaaggtggcaggcgctggaggctgccgcagcctgcgtgggtggaggggagctcagctcggttgtgggagcaggcgaccggcactggctggatggacctggaagcctcgctgctgcccactggtcccaacgccagcaacacctctgatggccccgataacctcacttcggcaggtgagttgactgggagccctccctcctctgggctgtgggtggaaaatgggaaggtttcacccctgagccaaactgcttgggaaactttatcacagttcttggggacaagatctgtggtctgctttgctctg

SEQ ID NO: 9018 - DNA, 553 bp, Homo sapiens
  MAP TO AC005300.10; EXPRESSED IN FETAL LIVER, SIGNAL = 1.4; EXPRESSED IN PLACENTA, SIGNAL = 1.3; EXPRESSED IN HELA, SIGNAL = 1.7; EXPRESSED IN BONE MARROW, SIGNAL = 1.7; EXPRESSED IN LUNG, SIGNAL = 1.5; EXPRESSED IN HEART, SIGNAL = 1.7
tacccctaaacccattgcacaagctgttcatgttaattctgtacccgacgctttccccacggggcctcccctcactctgaaatggcatccaggtccatcttgccctccacctctgcatggctctccatgccccatcgcctctcccagatcctagcactgggtccacactctcgccctgtccatttaggttgatgaaagcaggcagtcacccgggtgggccagtcttgcctgtgggaggaacatgcagtctcctgtctcatggtttgaagtgtgccaggaagcctggcccagcccacctccccctggagtccttcccaggaggaataaccccttaggtcattgactataagatgagttcgctcactggatccttcctctctgatgagacaggaagaaggtacacagtgaccaggtaggaggaggagagggagtagaaaggagggatgcgggtggctggtccctgcatttgcctgcttccctgcacgggtgtcccactggccgcctctgctcaccagtgtcatgggattctctcagaagatgaaaacagcccctg

SEQ ID NO: 9019 - DNA, 575 bp, Homo sapiens
  MAP TO AP000123.1; EXPRESSED IN ADULT LIVER, SIGNAL =   2; EXPRESSED IN HELA, SIGNAL = 1.4; EXPRESSED IN PLACENTA, SIGNAL = 1.8; EXPRESSED IN BONE MARROW, SIGNAL =   3; EXPRESSED IN HEART, SIGNAL = 1.4; EXPRESSED IN LUNG, SIGNAL = 1.7; EXPRESSED IN FETAL LIVER, SIGNAL = 1.9; EXPRESSED IN BRAIN, SIGNAL = 1.9
ggatgatgggtcctctccacataaactatattcccttatctacaccttcaaagttcctggtagagtcaacacattggattaaggctttttccatggaatacactataataagggggctggagcgaggctgaccttcctctaacacaacgattaacaattttggctggttgattctttgttgaggggctgtctgtgcattgtaggatgttttacaacttacctggcctctacctaccagacgccagtagcatcctccaatcatggaaactaaaacatgtgcccagacattgccagatgatccatggagggcaaaatcaccccttgttgaaagccacttctcaaacccatgaccacagatctgtttcatcaggtcaacatccttcaccataaatttcagggatctggaggagtggagggtggagactataagcttgaggtttaaaatagttaatgagacctcaagttttaaaaacttgtagagagcaaatacagaggattgaacagtttagaaaaacaccacaatgctaagcaaatatcttacagatagaggtgaacagtataaaatggaattcctg

SEQ ID NO: 9020 - DNA, 565 bp, Homo sapiens
  MAP TO AC007539.8; EXPRESSED IN LUNG, SIGNAL =   2; EXPRESSED IN BONE MARROW, SIGNAL = 2.1; EXPRESSED IN HEART, SIGNAL =   2; EXPRESSED IN FETAL LIVER, SIGNAL = 2.1; EXPRESSED IN ADULT LIVER, SIGNAL = 2.5; EXPRESSED IN HELA, SIGNAL = 1.9; EXPRESSED IN PLACENTA, SIGNAL =   2; EXPRESSED IN BRAIN, SIGNAL = 1.8
cttgggtctgaggggacagtgggaccaggtggtggaatgagttcacacaaggcagttgtgagattttgggataagaagagcagcccctgggtttgtgctgtagaaaacattgcccatcattaactgggtttccttatcagttggggccacagggtccctggtggataaagcaatgatgatgatgatgctgctgttgctgatgatgattttaatgatgataatgatgttgatgatgatgatgatattgatgacaaggataatattgatgctgctgatgatttaatgatgatgttgatgatgatgatattgatgacaatgataatattgatgctgatgatgatttaatgatgataatgatgttgatgatgatgatgatgatattgatgacaatgataatattgatgctgatgatgatttaatgatgataatgatgttgatgatgatgatgatgatattgatgacaatgataatattgatgttgatgatgatttaatgatgataatgatgatgatgatgatattgatgacaatgataatattgatgttggtgattatattgattttga

SEQ ID NO: 9021 - DNA, 574 bp, Homo sapiens
  MAP TO AC007841.1; EXPRESSED IN PLACENTA, SIGNAL =   7; EXPRESSED IN HEART, SIGNAL = 1.3; EXPRESSED IN BONE MARROW, SIGNAL = 3.5; EXPRESSED IN LUNG, SIGNAL = 2.1; EXPRESSED IN FETAL LIVER, SIGNAL = 2.3
ctcccttcctagcatctcccaatagaaggaggagttgtttgaggcaagtgaagagtgacatttattagagggtgtggtcactgtgttacaaaggcacaggctttgcccagccttcccttgcagtccactccctgcagtggacctggagacagtcttgcccctctgtctttccatgtgcatgcttgagtgcttcggccactttacaggtccccacaccaagcagccatctggaaggtaaccagatgttctggtttaaatcccgagtccaaaactacgattgtcaggatgctgactcctttggagctctagagcctgaagatatgcactcaaaccccaaatttccagaaactctgcattgcagagcatcctcccagccatctgctctatctccacccacatgtgagtcatcaggatgactaatgttaccctgagataagtagcatgatcctaaatgcaccccgtgatggcatccacagaataagcattgaaacagaaataacgcttcaggttttgccctggaagaagtcatatatctcttattcacatcaatggatgctaacttccaggcaagctc

SEQ ID NO: 9022 - DNA, 571 bp, Homo sapiens
  MAP TO AL049758.11; EXPRESSED IN FETAL LIVER, SIGNAL = 1.8; EXPRESSED IN ADULT LIVER, SIGNAL = 3.5; EXPRESSED IN PLACENTA, SIGNAL = 4.6; EXPRESSED IN HELA, SIGNAL = 1.6; EXPRESSED IN BRAIN, SIGNAL = 1.6; EXPRESSED IN LUNG, SIGNAL = 1.8; EXPRESSED IN HEART, SIGNAL = 2.2; EXPRESSED IN BONE MARROW, SIGNAL = 1.4
gttttcctgtcatggtgctgctagggccttgaagggttaacagaggacagagaaaaagcaacttaagattgttagctgtgccctccccgaggaatgggggtgccagagagcctgtgccagagagcaggtagtgggccagggtgcggcacgccaggtgcccacttcctgcagagctccgtgcattgccgagtgccgaggggtgagacccctggacagagagagaggaagagagacagagtgagcgcggtgggagcagaggaagcatttgttcaccaactttttggccttagtgtcgtccttctcactgacggtgctgcccgtgtcgtcctcatcctcgaaggggttgtagctggactgtgactgcgcagactgggcggggttgctcgggacattaagggtgctatggagagagagagctttcaggggatcccagctctgcaggggcccgtgagggtcctggcaactcctagctgcaggatctcaagagacaaatcagctcctcctgtgaccggaggggaccgtggtgtttcaacagaaaggttactatggcagaatgcgggcaatacttcag

SEQ ID NO: 9023 - DNA, 588 bp, Homo sapiens
  MAP TO AL035682.16; EXPRESSED IN LUNG, SIGNAL = 2.7; EXPRESSED IN FETAL LIVER, SIGNAL = 2.5; EXPRESSED IN ADULT LIVER, SIGNAL = 3.5; EXPRESSED IN PLACENTA, SIGNAL = 7.8; EXPRESSED IN BRAIN, SIGNAL = 2.6; EXPRESSED IN HELA, SIGNAL = 2.9; EXPRESSED IN HEART, SIGNAL = 2.5; EXPRESSED IN BONE MARROW, SIGNAL = 3.4
gccttgtcctctgcttaagtgattttgactttcgattcaggagaagtggtgtaaggttttcagaaagtgagttaaagcaaaacagttggccgcagcggcagcaatcatcttagtggggcacagttgcctcttaggtgtagccctgggcagatattttttgtggggctcctgtctgcatgtgcaatttgagccattcctaaatcagcaccattctggtgattcagtctcacaccatcccacaaaaatcacaatgaaaatactgcaccagccatcaggagcaatctgctcaccagggtgctcttctggaagctggcctggaccctgtaggtgcaggttctagagctctttggggcatctgaaggggagaaatgggagccagctagtcccagccaccagagggagactaaggctatttcaagatagacacttccagcagccaggacccatgcaggtccctgtctgagcttgggacccctgcccatttggtagtgctggttacacgcactggaatggggggctagaaaattcccaggaagacattccaagtgcagggctatggtggggtgaagtgggtccctaaaacacagg

SEQ ID NO: 9024 - DNA, 567 bp, Homo sapiens
  MAP TO AP000352.2; EXPRESSED IN ADULT LIVER, SIGNAL = 1.6; EXPRESSED IN FETAL LIVER, SIGNAL =   2; EXPRESSED IN PLACENTA, SIGNAL = 1.9; EXPRESSED IN HEART, SIGNAL = 1.6; EXPRESSED IN BRAIN, SIGNAL = 2.9; EXPRESSED IN HELA, SIGNAL = 2.1; EXPRESSED IN BONE MARROW, SIGNAL = 3.9; EXPRESSED IN LUNG, SIGNAL = 1.6
aaatgcaaagcagaaggtccagccaagagtcggtgcccaaggcaacaaagacaggaggagactcgtaggaggagggggtggtgttggggagctggagatggagggcgaggctggagggcagtccttcaaatgcagagaagcccccgggccccactggcagatgggagcagttaggggtaaatgcctggtgccagtgtccttatagccactgcccatttgttcccagctcggccatcctgatttacctgagctgtaagtaccagacgccggaccactggtatccatctgacctgcaggctcgtgcccgtgttcatgagtacctgggctggcatgccgactgcatccgtggcacctttggtatacccctgtgggtccaggtgaggagagccatctggagagtgattggccatcagagagtagttggcagtaggccggggccatagactgacccactgtctgcccccatcaggtgttggggccactcattggggtccaggtgcccgaggagaaggtggaacgcaacaggactgccatagaccaggccctgcaatggctggaggacaagtt

SEQ ID NO: 9025 - DNA, 583 bp, Homo sapiens
  MAP TO AC008151.1; EXPRESSED IN FETAL LIVER, SIGNAL = 1.7; EXPRESSED IN HELA, SIGNAL = 1.6; EXPRESSED IN BRAIN, SIGNAL = 1.6; EXPRESSED IN LUNG, SIGNAL = 1.9; EXPRESSED IN HEART, SIGNAL = 2.2; EXPRESSED IN BONE MARROW, SIGNAL = 1.8
aaagcaccatgaaggaggtgggcaaggactgggctctgggggaaggacataagcaaaggcatgggtgcagaactccctttgcacctggttatccaagcgccctaattcctcacaccagccctgtcaattcttccaccccgccctccgccaccttccctggcacaaggctccttcttgctgaagtattcacagctggagccctggattctggagggcacctcagctgggatttctacattgcattttcaggactgtcccactgggcccctctgggggaaagagcaggatgagagaagacagcctctgcaccagagaggtcaccaagctaattgggcaggtgcccggtgcctcccttcctttctggagcagctcttccaggatcctctacagagactcttgtgggggtggcatgaacagctcatttgttagtagcagcagcaaccaaggctgagggtgacatagcatgggatctgagacagcggagggaggcaaaacgtgccttccgtcaccacagataccctctgcctgcttatatctgagcctgccctccagcccccaccctgctccttggctcctcctgaag

SEQ ID NO: 9026 - DNA, 587 bp, Homo sapiens
  MAP TO AC007841.1; EXPRESSED IN LUNG, SIGNAL = 3.6; EXPRESSED IN ADULT LIVER, SIGNAL = 7.1; EXPRESSED IN FETAL LIVER, SIGNAL =   4; EXPRESSED IN PLACENTA, SIGNAL = 6.1; EXPRESSED IN BRAIN, SIGNAL = 3.5; EXPRESSED IN HELA, SIGNAL = 4.4; EXPRESSED IN HEART, SIGNAL = 2.6; EXPRESSED IN BONE MARROW, SIGNAL =   3
ctcccaccatgattctgaggcctcccagtcatgtggaactgtaagtccaattaaacctcttttttttcccagtctcgggtatgtctttatcagcagtgtgaaaacagactaatacagtaaattggtaccagtagagtgggacgctgttgaaaagataccccaaaatgtggaagcgaccttggaattggtgacaggcatatgttggaacagtttggagggctcagaaaaagacaggaaaatgtgggaaagtttggaacttcctagagacttgttgaatggctttgacaaaaacactgataatgatacggacaatgaaatcccggctgatgtggtctcagatggagatgaggaacttgttgggaactggagcaaaggtgactcttgttatgttttaggaaagagactggaggcattttgcccctgccctagagatttgtggaactttgaacttgatagagatgatttagggtatctgacaaaagaaatttctaagcagcaaagcattcgagaggtgatttgggtgcggttaaagaccttcaattttaaaagggaagcagagcataaaagttcagaaaatttgcagcctg

SEQ ID NO: 9027 - DNA, 561 bp, Homo sapiens
  MAP TO AC008166.1; EXPRESSED IN LUNG, SIGNAL =  19; EXPRESSED IN BONE MARROW, SIGNAL = 2.8; EXPRESSED IN HEART, SIGNAL =  12; EXPRESSED IN FETAL LIVER, SIGNAL =  39; EXPRESSED IN ADULT LIVER, SIGNAL =  28; EXPRESSED IN BRAIN, SIGNAL = 2.3; EXPRESSED IN PLACENTA, SIGNAL =  34; EXPRESSED IN HELA, SIGNAL =  13
tcacaatagcatatggaatcaatgtaagtgcccatcaacagataagtgaagaaaatgtgctctgtatgtatgcgcatacacacacacacacacactctagaatattattcagccatataaaggaatgaaatcctatcatttgcagcaacgtgaatggaacttgacgtcatgttaaatgaaataagccaagaacaaaaaaataaatactacgtgttctcactcatgagtaggagctaaaagtatggacgtcatgaagacagaaaagattggtggttaccagaggccagaaagggtagtggggagggaggataaagaaaagttgattaatgggtccaaaaagcagtatgatagaaggaataacacccaatgttagatacattagtagggaaataatagtttaaaataatgtatagtagatttcaaaatagctagtagagaactatttgaatgtttatagcacaaagaaaagacaaacataaaaggtgatggattgatctttacaaattttatgaatgtattaaattatcacatgtaccctcaaactatgtacatctattatgc

SEQ ID NO: 9028 - DNA, 982 bp, Homo sapiens
  MAP TO AC006548.19; EXPRESSED IN FETAL LIVER, SIGNAL = 1.3; EXPRESSED IN BRAIN, SIGNAL = 1.7; EXPRESSED IN HELA, SIGNAL = 1.2; EXPRESSED IN PLACENTA, SIGNAL = 1.2; EXPRESSED IN HEART, SIGNAL = 1.4; EXPRESSED IN LUNG, SIGNAL = 1.4; EXPRESSED IN BONE MARROW, SIGNAL = 2.4
gtcctcacccaacctcctgctctaaagtgtggaaatgcacatcttattttgtagtgatgagactctgttgacatagtgagatgctgcagtaaaatgcattcaaagtcactctccacctttgaaactggggaaatccgaaagggagacataggctgagtgcaggtccgagtcccatccttaacttagtgatgtctcagacctgttaaaagctttgtaataacaaatgcatgcttcccctcttcttactccttccttaggcctggaggaaacgctggtttatcctgcggaggggccagactagcagtgacccagatgttctggaatactacaagaatgatggctccaagaagcccctgcgcaccatcaacctgaacctctgtgagcagctggatgttgatgtgactctgaacttcaacaagaaggagattcagaagggctatatgtttgacatcaagaccagtgagcgtaccttttacctggtggctgagaccagggaggacatgaatgagtgggtccagagcatctgtcagatctgtggcttcaggcaggaggaaagcacaggtatgggagcacacacagccctgtctcaggaggggctgagatgaggccctccaatctccagcaaggagggcagctctagctgccaacactgccaagaagtgttgggctcgtgatgaagctaaaggcatttttggtgtttcttcagacacctcgataccactaccatcctcagtcctccacctctcccccttccctgagctctctgcactttgccctgtcacctctcagccacctgtagggaagacctctccttcgccttctactgatccatctctggctgttctggccctacttcagaccacctggcacagttgcacttgacccttggtgggtttgtttggggttgctttttgattcttactgatttataatcacttaggaggggacaggtgagaggagcaaatacagacttatgcttggg

SEQ ID NO: 9029 - DNA, 568 bp, Homo sapiens
  MAP TO AP000123.1; EXPRESSED IN HELA, SIGNAL = 1.9; EXPRESSED IN PLACENTA, SIGNAL = 4.5; EXPRESSED IN BRAIN, SIGNAL = 2.6; EXPRESSED IN HEART, SIGNAL = 1.9; EXPRESSED IN BONE MARROW, SIGNAL = 2.2; EXPRESSED IN LUNG, SIGNAL = 1.9; EXPRESSED IN FETAL LIVER, SIGNAL = 3.3; EXPRESSED IN ADULT LIVER, SIGNAL = 2.7
aaactcacagaaccccttggaagcttttagacagctgataaaattgtgtttcctagtttaaagtgcaagatatgagaacttttatagatgtcacacatcgttttttggcaataaaatcacttaatgatggaaacctttccaaactcctgttttcaagatattcttactgtagcacaagtttctggcagacagtgattactttctcacacattgttaactggcatcttgtgcttgaagggccaggtcaagctggtttatttatttatgttaaatcatcaccatggctcgaaccttgtaacctggctggcagttgctcatgcgcagaggggagatgtaccagctctgttcctttcttgccattcatctctgcttatgtccttagaaatagcttcataccttaagttctagggtacacgtgcacagcgtataataatgataataataaataaataaataagtaaaaagaatcctgaaaaaaaaaaaaaaaagaaatagcttcataccatttcttagcaggcatccttgccagacacttgcctgtttgtgtgaggactggctcagttaaaga

SEQ ID NO: 9030 - DNA, 592 bp, Homo sapiens
  MAP TO AP000353.1; EXPRESSED IN FETAL LIVER, SIGNAL = 1.9; EXPRESSED IN BRAIN, SIGNAL = 1.7; EXPRESSED IN PLACENTA, SIGNAL = 1.7; EXPRESSED IN HELA, SIGNAL = 1.2; EXPRESSED IN HEART, SIGNAL = 1.6; EXPRESSED IN BONE MARROW, SIGNAL = 2.5
cagaccttctcaaagtgggagagactgtaagtggagctcagtttgttctgcttgttcctgacgggcaggggacaggggaggctgtcagcgaagagccactcacctcttttgttctcttctttcattcttagctttttgaaaacctttaggagttagctggtcacggcatttattgaacatctgttgtgtgccaggcatggaaaagggtgccatggggaaagtcaagatgatggtgccttgattcctgctcccaggttggatctgatgtcccatggtatcatgggacagtagttggtgccaaggaggagtgccatgagctggcagacgggagcaagttctggggtttggtgggttgggaagaattcctggagaaggtgagtctctagagaggcctgcaggcccatttagacatggagcttggagagtcctacagcttttggatactgaggtgactggggtggatgaaaaagagactttgaggggagagagcttgggaaagcagctgggctctgagggttgggctctttcctgtgggcagtagggagagtgatgtggtcacaggatctctctctctctgggctctaaggaaggc

SEQ ID NO: 9031 - DNA, 575 bp, Homo sapiens
  MAP TO AC007567.1; EXPRESSED IN HEART, SIGNAL = 2.7; EXPRESSED IN FETAL LIVER, SIGNAL = 1.8; EXPRESSED IN ADULT LIVER, SIGNAL = 2.4; EXPRESSED IN PLACENTA, SIGNAL =   3; EXPRESSED IN HELA, SIGNAL = 1.4; EXPRESSED IN LUNG, SIGNAL = 1.3; EXPRESSED IN BONE MARROW, SIGNAL = 1.4
caggtggctagacccagaagagagataacaatcactgcagcttggctcataggaagccacatccataggaaaacggggagagtactacatcaagggaaaaccccatgggacaaaagaatctgaacaacagacttcagccctagaccttccctctgacagaatctacccaaatgagaaggaaccagaaaaccaactctggtaatatgactaaacaaggatttttaacacccaccaaagaatcacactagctcaccagcaatggatccaaaccaagaagaaatccctgatttacctgaaaaagaattcagaaggttagttattaagcttatcagagaggcaccagagaaaggcaaagcccaatgtaaggaaatccaaaaaacaatacaagaagcaaagggagaaatagtctaggaaatagacactataaagaaaaaacaatcaaaacttcaggaaacattggacacacttatagaaatgcaaaatgctctgaaaaatctcagcaatagaactgaacaagtagaagagagaaattaagagcttgaagacaaagtctttcaatgaacccaatccaacaa

SEQ ID NO: 9032 - DNA, 585 bp, Homo sapiens
  MAP TO AP000041.1; EXPRESSED IN HELA, SIGNAL = 2.6; EXPRESSED IN BONE MARROW, SIGNAL = 3.7; EXPRESSED IN HEART, SIGNAL = 2.2; EXPRESSED IN LUNG, SIGNAL = 2.1; EXPRESSED IN FETAL LIVER, SIGNAL = 4.2; EXPRESSED IN ADULT LIVER, SIGNAL = 1.8; EXPRESSED IN PLACENTA, SIGNAL = 2.1; EXPRESSED IN BRAIN, SIGNAL = 2.5
gaactcactcactcggagccaggtcccctgagatgagagtggcacctcagagacatcaccccagagtcaccccagatacatgcagagacagagaagcacccaggcacacagagcagtatggactatcaacccctatgctcaactctctgaaacagataagcagatgtatggctggcttgtggtcttcaaagttggtctaagtttcctggtgttcatataggagcactgggaagctggcatgtggattactgatgtagaatggtgtccagtctatagtaagctggaagctccccacctgcctgtctgtcacactcagcatgccttctgttgatgccactgtgtggataagcatagtgtctccagggagccctgtcaaaacgcccattgcctgggaaggaatacacagcaagtcactggcactggttagtctataaacgcccattgcctgggaaggaatacacagcaagtcactggcactggttagtctgtaaagtactagtgataacatgaagtagggcactgacagcgtggaaaggtaaattttacctgtaagggaaggagggaaggcaggaaagagggagaact

SEQ ID NO: 9033 - DNA, 551 bp, Homo sapiens
  MAP TO AP000053.1; EXPRESSED IN PLACENTA, SIGNAL = 5.5; EXPRESSED IN BONE MARROW, SIGNAL = 6.6; EXPRESSED IN HEART, SIGNAL = 3.4; EXPRESSED IN LUNG, SIGNAL = 5.6; EXPRESSED IN ADULT LIVER, SIGNAL =   8; EXPRESSED IN FETAL LIVER, SIGNAL = 8.2; EXPRESSED IN BRAIN, SIGNAL = 3.9; EXPRESSED IN HELA, SIGNAL = 5.1
ggtgccataagagaggcaagcatggagcactaggcgcaggggatgggcaactggcaagcggggagatgcatgcagcgcacttagtgcctggtacataccaagtccttttagtctggatttcattatttttaaatgggtattgctatttttaaaagaatagttacaaatatttattgtgtgttttgaaataagtgggtcaagatcaataagatattgttgatcaattgatcaataagatatcttttattcttaaaaatcatattcttctggttcagtggggaagagactgccgacctgtatttacagcattatgtgataagtgttctccttttcaggtatgtattagtctgttctcatgctgtcaataaagacatacctgagactgggtaatttataaaggaaagatgcttaattgactcacaattcctcatggctgaggaggcctcaggaaacttacaatcatggcagaaaaggaagcaagcatatccttcttcgcatgatggcaggaaggagaaatacagagcaaagtggggaaagccccttataaaacc

SEQ ID NO: 9034 - DNA, 554 bp, Homo sapiens
  MAP TO AC004624.6; EXPRESSED IN LUNG, SIGNAL = 7.8; EXPRESSED IN HEART, SIGNAL = 3.5; EXPRESSED IN ADULT LIVER, SIGNAL = 4.2; EXPRESSED IN FETAL LIVER, SIGNAL = 5.3; EXPRESSED IN BRAIN, SIGNAL = 3.7; EXPRESSED IN PLACENTA, SIGNAL = 3.8; EXPRESSED IN HELA, SIGNAL = 3.3; EXPRESSED IN BONE MARROW, SIGNAL = 4.2
atcgggtggtctctgtcatctctctagaagaaagtcaaataacaccaatcctgtatatacatgtagatcttaagagtttacaaagggctttccatccgtattcccatttcattcaaagcctaaaggtaaactaagaggcaaggctctccggggcccacacctggcccacagggtgtcctgtgtgcagtgggatggactgttcaccccaggagtgctccattggccttgcccagggaccctggaaatgactgaggggataaccgaagcagcacaggctggcaggatcaccatgctgtctaaaggtctggggcccaagacaggtatattctctggtactgccagagaagtgggtgaggtccagatatgcaggaatcacacagacagcaacagatgagccttccaggtaaagccaaggcccttggaaaggcagctcagaagaggcccttaatgagtactcatggagcgactgagcagacttacgcggaagcccacccaccagggcagcaatttggcctactctgttctctcccagaaccccagggcctactgtggtg

SEQ ID NO: 9035 - DNA, 577 bp, Homo sapiens
  MAP TO AC007567.1; EXPRESSED IN LUNG, SIGNAL = 1.3; EXPRESSED IN HEART, SIGNAL = 1.8; EXPRESSED IN FETAL LIVER, SIGNAL = 1.6
tgcagaatgttttgagcagcttcccaaaaatgtgaggaatgcctcaaggctggctacacaaagcgctctccttggtcctgagacctgtctttggttgagctcagactctgttccccagccagtgaactgaacccctccaccttagccctgccctgctttatttactctgcctaaacccgcctcctctccacccccatactctgtgcacatcccaatcactgcactcaccatgttctaggagggtatatttatacattcatctgtcccacaggatggagctccttgaggctagaacagcattctgtattcatctttgtgccccaaatacgcaggtaagaagtaggcactcaaaaaatgaataaatgtctacgtaatacatgtaactgtgctactttgtgatgtgtcgtatctcctttgctgggcagggaataaatttgagaaaaagatagatttaagatgtgattttcttgtgggtagagatgtgcatgcatgtgtgtgtgagtgagtgaatatatgtgtgggagacacagtgataaatttcagaggaggggcagagccagggcaaagacccagagta

SEQ ID NO: 9036 - DNA, 555 bp, Homo sapiens
  MAP TO AP000053.1; EXPRESSED IN PLACENTA, SIGNAL = 5.6; EXPRESSED IN HELA, SIGNAL = 3.4; EXPRESSED IN BRAIN, SIGNAL = 3.5; EXPRESSED IN LUNG, SIGNAL = 3.2; EXPRESSED IN HEART, SIGNAL = 2.2; EXPRESSED IN BONE MARROW, SIGNAL = 5.3; EXPRESSED IN FETAL LIVER, SIGNAL = 3.3; EXPRESSED IN ADULT LIVER, SIGNAL = 4.8
ttttgtcgtacctaattctttcaatgaaaatgaagaatttccaacttctgatattaacaactttggtcctatattcaagctagagtctttcaaataaaatagacttttaaaaccatctgtctccaaaccctaaatgtctcaggtgagcaactaagctgctcagtttatgtgactccccagaagttgaattttaacccagaactgactccaagttcattcttctttccacgacaaggagtcacctccttgtatgcccccaggagtctcccggattcctccgagaacagtggaatagtgctcctccccagagcacaggttttgccagtgaagattgaatttggctagaaaccgctgccctgctctctcttctcgaagcacctggaagtctgagaaggaactgggtggctggctctggtcacaaactagcagccagaagcaccccttgtcagtgatgcacccccagtccccctcaagggctccaagtaaacccaaagctgctcccctccaagaagtctggggccaccctagggaaggcctcctggccttgactctcag

SEQ ID NO: 9037 - DNA, 556 bp, Homo sapiens
  MAP TO AC007841.1; EXPRESSED IN PLACENTA, SIGNAL = 1.8; EXPRESSED IN HELA, SIGNAL = 1.5; EXPRESSED IN BRAIN, SIGNAL = 1.7; EXPRESSED IN HEART, SIGNAL = 1.4; EXPRESSED IN BONE MARROW, SIGNAL = 2.5; EXPRESSED IN LUNG, SIGNAL = 1.5; EXPRESSED IN FETAL LIVER, SIGNAL = 1.6
taaatgtttgtccccctccctcattcatatgttgaaaccctaatctcaacgtgatcacatttaaaggtaattagagggataattaaatcatgagaggtaattaggtcataagggtggagcccacatgaatggaattagtgcccttctaagaggagactggagagctgctaactctcttttctctatgtgtggaaactaggagaagttgactgtctgcaacctggaagcaagccctcaccagaagctgaccatgcttgcaccctggtctcaaacttccagcctccaaaactgtgagaataaatatctgttgtttgaaagccacccagagtaccatagtactctgttacagcagctcaaactgactgagaccctctttaacaatgacaataaaactaagaatggctaaaatgtactgagtgctgactagattggacaccggcagtgccacacacaccacataaatgatgtcacctgattgtcaaaacagatctagggaggaaaattctagagacatgaaaactgcagcttggttctcaggaaggaagtgcagaagtcg

SEQ ID NO: 9038 - DNA, 552 bp, Homo sapiens
  MAP TO AC004032.7; EXPRESSED IN HEART, SIGNAL =   3; EXPRESSED IN BONE MARROW, SIGNAL = 4.8; EXPRESSED IN LUNG, SIGNAL = 4.4; EXPRESSED IN FETAL LIVER, SIGNAL = 4.3; EXPRESSED IN ADULT LIVER, SIGNAL = 5.8; EXPRESSED IN PLACENTA, SIGNAL = 4.1; EXPRESSED IN BRAIN, SIGNAL = 3.7; EXPRESSED IN HELA, SIGNAL = 4.7
caaccaccactcatctctgctcagagcagttattcctttgtgagatgcttgggacatggctctagttttgcaacagggtgagattccaaaaaaatgttggggagggggcagaggaattccagagttcaaaactaaaaggcgcaggaatcaaagtcatttcattctattctctttctctgtcctctagccctcaggagtctgcagatccctgcaaaggctcagagaaggctgagcaggctgagcaagagggtgcctcatccctcccaggggtggggttgcccaggctggactggggatggaatgggagaggtggaggagatacacgcagtcccctccttcttccctgggatgcccggccaggaacagctttcagaaaagggaaagggctgagaacagcctcctccaactccagcacccaaggcacgggcagcagccttgctccaaagactgcaggctgggagcacaccatcccccatgcagaccaaaggctgcttagcacagcgtgaaaatgcagggcctgggcatttgcgaggaggcccagaaaaggagaga

SEQ ID NO: 9039 - DNA, 578 bp, Homo sapiens
  MAP TO AC007556.2; EXPRESSED IN BRAIN, SIGNAL = 2.2; EXPRESSED IN HELA, SIGNAL = 1.9; EXPRESSED IN PLACENTA, SIGNAL = 4.1; EXPRESSED IN BONE MARROW, SIGNAL = 1.9; EXPRESSED IN HEART, SIGNAL = 1.6; EXPRESSED IN LUNG, SIGNAL = 1.2; EXPRESSED IN ADULT LIVER, SIGNAL =   3; EXPRESSED IN FETAL LIVER, SIGNAL =   3
acaggagacacggaggaggcacgtgtgcttttcattgcttcagcccagtagtgacacatggcacctccaactgacagtacgttggctagaactggtcacatggtcctaacccagctgcaagggagactgggaaatgtagggaagcacttgtttatttggtaagcacaaactgtctctgtcaaagaaggaagtatcttgcttcataaaagaaaaagttttgattttaacttgtttttacattgcaggtagaaaaccgacccctaaaccttgtacagaatatgaatataagtgtggcaatgggcattgcattccacatgacaatgtgtgtgatgatgccgatgactgtggtgactggtccgatgaactgggttgcagtaagtaaacacttgtttttatagttcattgtagtaactcaggtttacctaattaaaacatgcaataacataatgtagacactgaccacattttctccttaatgtactttttgcttgaattccagtcaagcccatagctagctgtgactgagtgcttatcctagaccagacattgtgtcaaacattctacatgcctggtagcaa

SEQ ID NO: 9040 - DNA, 556 bp, Homo sapiens
  MAP TO AC007106.6; EXPRESSED IN PLACENTA, SIGNAL = 5.4; EXPRESSED IN BRAIN, SIGNAL = 4.3; EXPRESSED IN HELA, SIGNAL = 5.6; EXPRESSED IN HEART, SIGNAL = 1.3; EXPRESSED IN BONE MARROW, SIGNAL = 2.6; EXPRESSED IN LUNG, SIGNAL = 3.6; EXPRESSED IN FETAL LIVER, SIGNAL = 2.1; EXPRESSED IN ADULT LIVER, SIGNAL = 3.1
tgcttcaagtgctggaaatctggccactgggccaaggaatgcccgcagcccgggattcctcctaagccgtgtcgcatctgtgggggacctcactgaaaatcggactgttcaactcacctggcagccacttccagagcccctggaactctggcccaaggctctctgactgactccttcccagattttctcggcttagccactgaagactgatgctgcccaatcacctcggaagccccctgggccatcatggatgccaagcttcgggtaagtcttacagtgaagggtaagtccgtccccttcttaatcaatacggaggctacccacaccacattaccttcttttcaagggcctgtttcccttgcctccataaccattgtgggtatgacagccaggcttctaaacctcttaaaactccccaactctggttccaacttggacaacattcttttatgcactcctttttagttatccccacatgcccagctaccttattaggttgagacattttaactaaattatctgcttccctgactattcctggactacagccacacct

SEQ ID NO: 9041 - DNA, 578 bp, Homo sapiens
  MAP TO AC006427.13; EXPRESSED IN LUNG, SIGNAL = 4.6; EXPRESSED IN BONE MARROW, SIGNAL = 4.5; EXPRESSED IN HEART, SIGNAL = 3.3; EXPRESSED IN ADULT LIVER, SIGNAL = 5.3; EXPRESSED IN FETAL LIVER, SIGNAL = 4.1; EXPRESSED IN BRAIN, SIGNAL = 3.6; EXPRESSED IN PLACENTA, SIGNAL = 3.7; EXPRESSED IN HELA, SIGNAL =   3
cagtatgaggtgagcatggccattttgggaacagtgaaaagaaaatattaagaaaaactatttaactattcatccttgagaaataataagagctttactaatgttttacatacatattgatactctcacccacctttggttgttatgtgagagggtcacatgccacataatgtgcaaagagtgctctcaaggacaagttccatgaagggaagggacagctgcagctccctcacacatctgttcactgtcagtatattaacatgcacctggttaagtggatatgcattttattgtccagttctaatcatactaatcatcacgaaatggagaagtggctgaaaatatccctgcaaagaaatggtgggttgagcataatacaggaagaaaacaagaaaatggcagagttgatgcttctcctcctggtatgagttcttggtcagccccatcacaagatagaaataatgcaatcagttaaaaatttcttcaatgtattttcaaaaagtgtttgactgtgaaattatatattaatgttaataataaacttcatccaagcatgcagtgtgcctccagagaccaat

SEQ ID NO: 9042 - DNA, 548 bp, Homo sapiens
  MAP TO AC008166.1; EXPRESSED IN PLACENTA, SIGNAL =  19; EXPRESSED IN FETAL LIVER, SIGNAL =  28; EXPRESSED IN ADULT LIVER, SIGNAL =  17; EXPRESSED IN BRAIN, SIGNAL = 1.9; EXPRESSED IN HELA, SIGNAL =  11; EXPRESSED IN BONE MARROW, SIGNAL = 1.9; EXPRESSED IN HEART, SIGNAL = 8.7; EXPRESSED IN LUNG, SIGNAL =  13
aaccaaataccaccttgtgatgattaagtgttgactgagtgtcaacttgattggattgaaggatgcaaagtattgatgctgagtgtgtctgtgagggtgttgccaaaggagattaacatttgagtcagtgggctgggaaaggtgaaccaaacttaatctcggtgggtgccatctaatcagttgccagtgtggctagaatataaagcaggcagaaaaatgtgaaaagaataaactggcctagcctcccagcttacatttttctcccatgctggatgcttcctgcccttgaacatcggactctgagttcttcagttttgggacttggataggctctccttgctcctcagcttgcagctggcctactgtgggacattgcgagtgtgtgagtgaatacgtaataaactcccctttatatctatctaactatcttattagttcttttcctctagagaacactgactaatacagattttggtaccaggagtggttctagagaaacagaatattaaggatggtgttctttcattggttcgggggtttctgaagtt

SEQ ID NO: 9043 - DNA, 569 bp, Homo sapiens
  MAP TO AB016897.1; EXPRESSED IN PLACENTA, SIGNAL = 3.7; EXPRESSED IN HELA, SIGNAL = 2.7; EXPRESSED IN BRAIN, SIGNAL = 1.6; EXPRESSED IN HEART, SIGNAL = 2.2; EXPRESSED IN BONE MARROW, SIGNAL = 1.3; EXPRESSED IN LUNG, SIGNAL = 2.8; EXPRESSED IN ADULT LIVER, SIGNAL = 4.3; EXPRESSED IN FETAL LIVER, SIGNAL = 3.7
tttgcctaatatatcccaacagcatcatttcaacatgcaatctatacataaaatgcattcagattctctacattctttttcatgcagcgccttcaaaatccaggccgtctcatacccacagcatttccccgactgctgcgtgctagtgctggaccgtgagtgaccagagaaaccactgcattaaaatatgggggtcactcccctgcagtgtgtgtgtggggagcaggaggcagtgggggtcattccccctgcagtgttgggggaggagaaggcagtgggggtcattccccctgcagtgtgtggggaggaggaggcagtgggggtcattacccctgcagtgtgttgggaggaggaggcagtgggggtcattccccctgcagtgtgtggggaggagaagacagtgggggtcattccccctgcagtgtggggggaggagaagacagtgggggtcattccccctgcagtgtggggggaggagaagacagtgggggtacattccccctgcagtgtgttgggaggaggaggcagtgggggtcattccccctgcagtgtgttgggaggagaagaca

SEQ ID NO: 9044 - DNA, 563 bp, Homo sapiens
  MAP TO AL022318.2; EXPRESSED IN FETAL LIVER, SIGNAL = 2.5; EXPRESSED IN ADULT LIVER, SIGNAL = 4.1; EXPRESSED IN HELA, SIGNAL =   2; EXPRESSED IN PLACENTA, SIGNAL = 3.2; EXPRESSED IN BRAIN, SIGNAL = 1.8; EXPRESSED IN BONE MARROW, SIGNAL = 2.1; EXPRESSED IN LUNG, SIGNAL = 2.4; EXPRESSED IN HEART, SIGNAL = 1.8
aatgtggatcccagtggttgagacctccagggctgtgcatgggttcctgctcctggaccctgcactgtcactcgttcttgtgcttcctgagcccagattctgtaatttacccttcaaccccgtgagctctgttacgtttctcgttagctatggtccacttcttttgcttgaaaccgaagatccctaatggatagagaaggtgatacaagattccaggaaacaggaagcagagggaatgtgctgtggggagacagaggcgccacagccccctatcggcgacacctggctccaagcagtttttttctctggttcttaagcctctctcctccccgactcaccctccctccctgaaggtgtcttctctgcttttgcctttgagatggcctcttccttccccttttctggtctccttccctctgggtccctgccctgtccgaggcctcagtgctcccttctctgatgatgcctcccaacgttgactccagctgagcttctcaaagctccttctcctggccaagaacatttggtgtcaccttctaccctgtgctgactccttcctgctt

SEQ ID NO: 9045 - DNA, 567 bp, Homo sapiens
  MAP TO AC004032.7; EXPRESSED IN PLACENTA, SIGNAL =   4; EXPRESSED IN HELA, SIGNAL = 2.7; EXPRESSED IN BRAIN, SIGNAL = 2.5; EXPRESSED IN BONE MARROW, SIGNAL = 3.8; EXPRESSED IN HEART, SIGNAL = 2.3; EXPRESSED IN LUNG, SIGNAL = 3.4; EXPRESSED IN ADULT LIVER, SIGNAL = 3.6; EXPRESSED IN FETAL LIVER, SIGNAL = 3.9
ccagccaacagacttccttcaaagtttgaaggttagagttcttgtttattttagaccctactggtgtgtgcaaaaaccccgaaatggaggtgcctgtaataaagacaaaaatgcaggagtcccctgggatgagctgacaagtgccagcaatttcctcctgcccagtgtgatcacccagaaaggccaccttcccaaccaacatgccacccagccctgagactggacctacagggataatctctgagatgagatttaagtcaattccaagcatggaaatcggtgaaattaccctccaccgctccaacaacatctctgggcaggcaaggttgggtgggtggaggtgttggttaagggtttggggggttttgacaaaaagaaaaaaaagagagaaagagagagacagtatcagcaaattggagggtaattttttcccagggaagagaaccacatgccaggcactattctaagcatttcatgtatattacttcatcgggtcctcccttcaaaggcagggactgttattcctttttaaaggatgcagaaacaggttcagagacgtggggtgac

SEQ ID NO: 9046 - DNA, 553 bp, Homo sapiens
  MAP TO AL035681.13; EXPRESSED IN HEART, SIGNAL = 2.8; EXPRESSED IN BONE MARROW, SIGNAL = 6.7; EXPRESSED IN LUNG, SIGNAL = 3.7; EXPRESSED IN FETAL LIVER, SIGNAL = 4.5; EXPRESSED IN ADULT LIVER, SIGNAL = 3.9; EXPRESSED IN HELA, SIGNAL = 5.1; EXPRESSED IN PLACENTA, SIGNAL = 5.5; EXPRESSED IN BRAIN, SIGNAL = 4.5
gatcctctcccctgtcaatgcgggagcagtctgggtttcgagggctgaagagtccctacagagagctcttgatgttttctggactcaacctttctgtctgctactctggggtggggggtcctgagatacagagatacagctgagaacacgtgcagagcagccccacattcccaggggaggcgtgtggagatggcccaggagccgcctccaactcccttctctccctcattccctatccatctcctccaaagagaggcgaagtgacatggcccatcaccccaccttccggaagatctactgtgatgccgttccttacctcttcaagaaggtgaggttcagctcttgggcgcttttcccctcagccatgggtccattccgggcctgagggacctggctcttcccctgggaccatccctttccctcctgaggcctgcttccctcacccttcctcctggcctgcccagggagtccccagctgtcccattcctttaaggtacgagcagtctacacagaaggcggttggtttgaggaagggatgaagctggaggccatt

SEQ ID NO: 9047 - DNA, 560 bp, Homo sapiens
  MAP TO AL079295.1; EXPRESSED IN PLACENTA, SIGNAL = 1.7; EXPRESSED IN BRAIN, SIGNAL = 1.9; EXPRESSED IN HEART, SIGNAL =   2; EXPRESSED IN HELA, SIGNAL = 1.5
ggggtatagcaccaaaccaacacatatttgcaaaataattaaggaatctatcctctcttccaaagatgtccaacagctttacgataatggcttctggaaatgtgtctctcactgctttctctccaacagccttctttctcaaatatctagaagagcttttaatattcacattcagatgtgcaacatgaatgaattttccaacttcagcttccttggacacctgagcaattgcttggggaatcttcacaaaaacatcctcaaaatcaaagtttttggtttcccagtctcgtccaacaagatttatgaccacattgctgtgttccactactcgtcagatagaatctttatctctcgcgtcccattccagaaacagaagctagcccaggtctcccatgggacgaaggtgcatgatgtcacatgtatcacaccgatagggtatgatcacctgtgaccccacgcgtccaaggtggttgacaacacatcggcccaggaatcctgttgctccaaacccagtggccacaatcccactgacttgaggaacattcacctttcccatgagg

SEQ ID NO: 9048 - DNA, 548 bp, Homo sapiens
  MAP TO AP000350.1; EXPRESSED IN LUNG, SIGNAL = 8.6; EXPRESSED IN ADULT LIVER, SIGNAL =  13; EXPRESSED IN FETAL LIVER, SIGNAL = 9.4; EXPRESSED IN PLACENTA, SIGNAL = 7.6; EXPRESSED IN BONE MARROW, SIGNAL =  15; EXPRESSED IN HEART, SIGNAL = 5.6; EXPRESSED IN BRAIN, SIGNAL = 6.7; EXPRESSED IN HELA, SIGNAL = 8.6
gtctttcccttgtcgccctccccagtcatgacccgggcgtgaccttcagggaccgcggcccgtatcgggatccctgccccgcgaacactgcgcgtttcggctttcgcgcgctcgggtcccgtccccagaggtagcccggccggctccaacttcgggcaaaacttttcatgtccccctcagcgcgtgaacgtgacggtacggccgggcctggccatggcgctgagcgggtccaccgagccctgcgcgcagctgtccatctcctccatcggcgtagtgggcaccgccgaggacaaccgcagccacagcgcccacttctttgagtttctcaccaaggagctagccctgggccaggaccggtgcgtaggggtagtaggggatccatgtgggactgccgcagactggagccactgatcctgcctcagggggaaaaacccatttcttgccctgcccagtaaggacacatcagggtctggagctttggggccccctgaccccttaggttcctgctgttaggaccatcttcaaagtgcgagcaggattgaatgaat

SEQ ID NO: 9049 - DNA, 572 bp, Homo sapiens
  MAP TO AC008166.1; EXPRESSED IN PLACENTA, SIGNAL = 3.4; EXPRESSED IN HELA, SIGNAL = 2.3; EXPRESSED IN LUNG, SIGNAL = 2.6; EXPRESSED IN HEART, SIGNAL = 1.7; EXPRESSED IN BONE MARROW, SIGNAL = 1.9; EXPRESSED IN ADULT LIVER, SIGNAL = 2.3; EXPRESSED IN FETAL LIVER, SIGNAL = 2.2
gtttcccatcatcctgaagcacctggatttatagaacagtggaatggccttttgaagtcacaattacaatgccaactaggtgacaatactttgcagggctgaggcaaagttctccagaaggctgtgtatactctgaatcagcgtccaatatatggtgctctttctcccaaagccaggattcatcggtccaggaatcaaggggtggaagtggaagtgggaccactgaccatcacctctagtgatctactagcaaaatttttgcttcctgctcccgtgaccttacgttttgctggcctagaggtcttagttccagagggaggaatgctgccaccaggaagcacaatgattccattaaactagaagttaacattggcacctggacactttgggctcctcctacctttaggtcaacaggccaagaagggagttacagtgttggctggggtgattgacccggactatcaagatgaaatcagtttactactctacaacagaggtaaggaagaatatgcatgatatataggagatctatcagggtgtctcttaatattaccatgccctgtgattaaggt

SEQ ID NO: 9050 - DNA, 585 bp, Homo sapiens
  MAP TO AP000352.2; EXPRESSED IN FETAL LIVER, SIGNAL = 5.5; EXPRESSED IN BRAIN, SIGNAL = 4.3; EXPRESSED IN PLACENTA, SIGNAL = 4.1; EXPRESSED IN HELA, SIGNAL = 4.3; EXPRESSED IN LUNG, SIGNAL =   4; EXPRESSED IN HEART, SIGNAL = 3.1; EXPRESSED IN BONE MARROW, SIGNAL = 5.9; EXPRESSED IN ADULT LIVER, SIGNAL = 3.2
tgccactcactctatgctgtgatctaataggtctaggctgagaaatgggactgaccccacttctggtgacagagtaagcctggagacaagcgaagagcatgcagtgtgtttattgcagacagcagggtgcagtggagtgggctgcacccactgcacctgcttctgggccagctgggggtcccgccaagcctcactgtggttcagaggctggagtatgagcttgtgggcctccagcaagagctcagtaccaagggcagccgccacacgggcctgccacactgccagccggggcagtcttggaagaggtcgcagccaacggcagtgggctgggaagacagggcagctggggttggggctcagccccatgcccagagtccccccagagggcaggtgggtaggaaagcttcacctgcatcacctccgtcagcaccaagtcttccagggagatctgctccattgccaggaagggcctggccaccagcaccccccaatccaggtgctgcagggctggcatcagcctccccaacagccgctccagctgtgcagcatctgcaggctgtccggagaagtggggcaggagagact

SEQ ID NO: 9051 - DNA, 570 bp, Homo sapiens
  MAP TO AC008009.4; EXPRESSED IN ADULT LIVER, SIGNAL = 1.9; EXPRESSED IN FETAL LIVER, SIGNAL = 1.4; EXPRESSED IN HELA, SIGNAL = 2.7; EXPRESSED IN HEART, SIGNAL = 5.9; EXPRESSED IN LUNG, SIGNAL = 2.2
cggacaagaagctggagaaccgtgcagaaagacgatgtaaaaacacaaacccccaagagagcgagccaacagggttgtgtcctggtgagtgtgactccccaataaccgaaacctcccgcccgcagtcgcactaaggagcacaacttcaactccacacctccgaggcggggagctgaggttgaggcctgggccggaggtcgccaagaagaccggaaggccgcactcaccatggctccggctgggctcccttgcttccaccgggagcacggctcatcccagctcagaggccgcggccaacacctgcacgcctttaccagagagcgacgcaacccccaacctcaagcacaggcgccctacgcaacacggcaggagcagccgcaaactaggccggaaaactgtcgtaaaaggggacgcggaggagaaggaaagtcgctcaagcagtggacagagcggagaaagcgacttcgggttggttgaagggtgggcggatctctttatttctgggtgtaggggtggggcttctctgtgttttctgtcctttgctcctgggcggtgggtatttggaaattc

SEQ ID NO: 9052 - DNA, 552 bp, Homo sapiens
  MAP TO AL022329.9; EXPRESSED IN PLACENTA, SIGNAL = 3.4; EXPRESSED IN HELA, SIGNAL = 2.5; EXPRESSED IN BRAIN, SIGNAL = 3.2; EXPRESSED IN HEART, SIGNAL = 2.1; EXPRESSED IN BONE MARROW, SIGNAL =   3; EXPRESSED IN LUNG, SIGNAL = 3.3; EXPRESSED IN FETAL LIVER, SIGNAL = 3.2; EXPRESSED IN ADULT LIVER, SIGNAL = 3.4
agcagtgccgactggttctccctgggctgcatgcttttcaaacttctgagagggtgagttgaaatgcatccttctagtgctgtcctcatggcagcaggagcttggatgaaaactgagaatatgtagaaatgactagacgctaatgttattttaaatcacacagtgatctttaagccatgtgctaatctggaagactctgtcttagaagagtgaaagctgcttcccaataagctgctagataaaagcttatggcttcgtatttttattctgtaccatgtaggaatcagaattcttttaaacctaaaattagactgcttcgaatttttttctttgataagccacattgtaggaataagtattgttttgaaatgtaggtaatttaaaaaggtagaatgattttttccctagaaattaattattcatcatcttgagggtttacagattttgagagttacaaaaaaaggatgaaaacccaaagtaaacctattttattttattttgttttgtttttagacaagttctctctctgttgcctggctgcagtgtagtcac

SEQ ID NO: 9053 - DNA, 582 bp, Homo sapiens
  MAP TO AL022329.9; EXPRESSED IN FETAL LIVER, SIGNAL = 2.4; EXPRESSED IN ADULT LIVER, SIGNAL = 4.4; EXPRESSED IN HELA, SIGNAL = 2.8; EXPRESSED IN PLACENTA, SIGNAL =   5; EXPRESSED IN BRAIN, SIGNAL = 2.8; EXPRESSED IN BONE MARROW, SIGNAL =   3; EXPRESSED IN HEART, SIGNAL = 1.4; EXPRESSED IN LUNG, SIGNAL = 2.5
tccgcatctctttcaaaaactagaatttctgctctaagaatagaacataaggctccactcccttttagaaaagatatatgaattggaaaatgctctgaaagtccttttgcttcaaacaaaagtgtaaacttttacacttccccaactcacatttgatttgtaatgatatggttgagaagtacatctagatgtcatttattaaaagtgctttgtaagactagattgagctgtttctgagggcggtcaccagttgtgttggggtctggtttgagtgccttctgccaaaatgttgtgatggaggtgtttctgcgaccagacacaggataccgctgtgtctgcacccggttgcctgcatggccagaggaaaagtcagttggattaaacatcatggtatacttggctgttgtttttttttaattttttaattttttgggatagggcctcgctctgtcacccaggctggagaacagtgggatgatcatggctcactgcagccttgaattcctaggttcaagcaatcctcccacgtcagcctcctgagtagctaggactacaggtgcatgccacctttcctggctaatt

SEQ ID NO: 9054 - DNA, 556 bp, Homo sapiens
  MAP TO AC007564.9; EXPRESSED IN FETAL LIVER, SIGNAL =   8; EXPRESSED IN ADULT LIVER, SIGNAL =  11; EXPRESSED IN BRAIN, SIGNAL = 3.5; EXPRESSED IN PLACENTA, SIGNAL = 5.7; EXPRESSED IN HELA, SIGNAL = 3.7; EXPRESSED IN LUNG, SIGNAL = 2.8; EXPRESSED IN BONE MARROW, SIGNAL = 2.5; EXPRESSED IN HEART, SIGNAL = 2.8
tatcttgggtggaagaagccaaagatattggacaggattgcagcaatcagggaaggctaacacatgggcttgaggacattcactcagtgtcttaaaagaaaggtagaaattggacatggagagaaaacaaaaaaataaaaaactgtgttagtccattttcacattgctgataaagacatacctgaaactgggaacaaaaagaggtttaattggacttacagttttgcatggctggggaggcctcagaatcatggcaggaggagaaaggcacttcttacatggcagtggcaagagaaaataagaaagaagcaaaagtggaaacccctgataaacccatcagatcttgtgagacttattcagtatcatgagaatagctcaaggaagaccagaccctatgattcaattacctccccctggctccctcccacaacatgtgggaattctgggagatacaattcaagttaagatttgggtggggacacagccaaaccatatcattccatcctggcccctccagatctcatgtcctcacatttcaaaaccaatcatgccttcc

SEQ ID NO: 9055 - DNA, 580 bp, Homo sapiens
  MAP TO AP000053.1; EXPRESSED IN HEART, SIGNAL = 4.1; EXPRESSED IN PLACENTA, SIGNAL = 6.1; EXPRESSED IN LUNG, SIGNAL = 5.2; EXPRESSED IN BONE MARROW, SIGNAL = 9.2; EXPRESSED IN ADULT LIVER, SIGNAL =   6; EXPRESSED IN FETAL LIVER, SIGNAL =   8; EXPRESSED IN BRAIN, SIGNAL = 8.2; EXPRESSED IN HELA, SIGNAL = 5.6
tttagtcagtctgggctgggtcccaggtgtctagagttttagttttgtttcccaggacctggtgactccttgaactatttgcagattcctgaacccctgtcggagagtaagctgtgttctaatctcatcagatctaaggagagatgtaggaacttgccttgaggcttgaattctttctcctactctccacttgtggtagtcagtcttttgcatttaagggtcaaaaataagaaggcctattgtgtttccaaggctggggtccatagtgcatacgataggtttcagagggagagatggcagtggagatggggaaagaaaatgtggaaacctgagtctaggatgttgcttgctaagtgtactagaatatgccaccccaaatatgcctctttggcatataattattttgagctgaaggctattgagaaccagcagatgcacgaaaggtctaaaaacagagtctaagttttccttttgtaaaggattgtagaggtgtctccttctcccaggaagaagactcttaactactcatcagaggagaaagggcagacttaattctgcacaacaaatcttactaaacacc

SEQ ID NO: 9056 - DNA, 562 bp, Homo sapiens
  MAP TO AC004624.6; EXPRESSED IN ADULT LIVER, SIGNAL =  13; EXPRESSED IN FETAL LIVER, SIGNAL = 7.2; EXPRESSED IN BRAIN, SIGNAL =  15; EXPRESSED IN PLACENTA, SIGNAL = 3.5; EXPRESSED IN HELA, SIGNAL =  10; EXPRESSED IN LUNG, SIGNAL = 6.5; EXPRESSED IN HEART, SIGNAL = 5.4; EXPRESSED IN BONE MARROW, SIGNAL =  14
ctaagagctggctctgcctccctggctcccaggacagcagcagcacacagtaggcccacagcagtcagtgtgtgtgccatggatggactatcagtgacaacggggaatggctactctaggctcctgtctgcagcctccccttgtgtgtgtcaggctgggggtggggtattgatctggggtctggtcctgtgtccagcaaataccagggacccagccccggggctgggcatggggaagcagcagcagctgggagcccagctcccccgacccctgccctcagccctgcacctgctgcccgatgctaaattactctcggccactcagacagagccatggctggagggccccagggagcaatgggctgagattctgtagcagatgagggaggtgatgtgtgttgggagggaaaggagaggagaaaagatggactgggaggatgggggaggggggtcagctccaggcagcaaagctgacctccattcccacctaggcctccacggcaggcagcgcatggagaggggagggctctggagtgtgacgtgccagcctgtattcgattcgt

SEQ ID NO: 9057 - DNA, 594 bp, Homo sapiens
  MAP TO AC007719.1; EXPRESSED IN LUNG, SIGNAL = 5.9; EXPRESSED IN BONE MARROW, SIGNAL =  10; EXPRESSED IN HEART, SIGNAL = 4.4; EXPRESSED IN FETAL LIVER, SIGNAL = 7.3; EXPRESSED IN ADULT LIVER, SIGNAL = 6.8; EXPRESSED IN PLACENTA, SIGNAL = 4.5; EXPRESSED IN HELA, SIGNAL = 3.7; EXPRESSED IN BRAIN, SIGNAL = 8.4
  unsure 119
  unsure 555
gcaacacagttcaaaacacaaacttgtaatttatcatctacaacatcagtaccctgcatttctatagccttacacatattccagtaatgtgtaagcagtgtttcagcttttcttatgangatttttcagagagaaatatattttaagtctttagattgttttgtgtatacgttgctactactactactaacaataatgtaatttccaacacatattgtccaattttccaagtggtacctgaacaatgaggttgtgatccactccaatggccattcaattggcaggttcttgatgactggcctaaaagggaacgctttcctgtgcaggaatagtgaacagtagacccaaaagtatacttctcgccagacaggactgcattaggaggaacgccagggtgtccacagtcaatcactacaatacataattattaaatataaaatttttttatatctcctatcgaacaacctataccagcatgtttatagaacataccagaagtaaatgttctgctgaaacatctaaagcctccagaaatcaaacatctatgttgaaggntgtctttttaaaaacaaagtggagtttgcagctatagca

SEQ ID NO: 9058 - DNA, 567 bp, Homo sapiens
  MAP TO AC007564.9; EXPRESSED IN PLACENTA, SIGNAL = 7.7; EXPRESSED IN ADULT LIVER, SIGNAL = 7.9; EXPRESSED IN HELA, SIGNAL = 3.9; EXPRESSED IN BRAIN, SIGNAL = 7.8; EXPRESSED IN BONE MARROW, SIGNAL = 4.4; EXPRESSED IN HEART, SIGNAL =   4; EXPRESSED IN LUNG, SIGNAL = 6.9; EXPRESSED IN FETAL LIVER, SIGNAL =  10
caccagggtctacttgagggtagaaggtgggaggaggcagaggaacagaaaagataactattgggtactaggtttgataaggtttggctgtgtccccactcaaatctcatcttgaactgtagttcccataatccccatgtgtcacgggagggacccggtgggaggtaattgaatcatggggacagctacctccatgctgttcttgtgatagtgagttctcatgagatctgatggttttataaggggcttttccctcacctcactctgcacttctccttgctgctgccatgtgcagaaggatgtgtttgcttcccctcgcaccatgattgtaagtttcctgaggcctccccagtcctgcagaactgtgagtatattaaacctcttttctttacaaattacccagtatcaggtatgtctttattagcagtgtgagaacagactaatacagtaagttggtaacagaagtggggtactgttgtaaagatacctgaaaatgtggaaatgactttggaagtgagtaacaggcagaggttgggacagtttggagggctcagaagaggacaggaa

SEQ ID NO: 9059 - DNA, 549 bp, Homo sapiens
  MAP TO AL035681.13; EXPRESSED IN ADULT LIVER, SIGNAL = 3.7; EXPRESSED IN HELA, SIGNAL = 4.2; EXPRESSED IN PLACENTA, SIGNAL = 2.8; EXPRESSED IN BONE MARROW, SIGNAL = 6.2; EXPRESSED IN FETAL LIVER, SIGNAL = 1.5; EXPRESSED IN BRAIN, SIGNAL = 7.3; EXPRESSED IN HEART, SIGNAL = 2.6; EXPRESSED IN LUNG, SIGNAL = 5.5
ctcccaagggtggtgagactccaatgcagatgctgagagcccaggaggcatgagggcctctcatgcacctgagtggggccagcaggctggctgggctggggctgggcctcccggaaccgggcgccttcagacctggccagagaagcccgagagggcaggcaccggcagaaggacaaggccacactcacttggtcacgaacgccagcagcaggggtgcaagggccttggggaaatagtcctgctgcaccatgtggttcagcgccatcagggggccgtacaggttggcaatggccttgaccttgtcttcactctgagaggaacacagcgaaaagcggggtgagcttcaaagtcacctgggggggcccctggactccaccatccagactctgctgatagtgcccacaactgagtctagccggaatctcatcgtgaagaccaaggctgctggggcagacccaggcctcggggccccgtgggcgagccggctcaggactcgaggtgagggaggttggcgggcatggctggggcagcttctgtgcagaccccacc

SEQ ID NO: 9060 - DNA, 554 bp, Homo sapiens
  MAP TO AC007539.8; EXPRESSED IN HELA, SIGNAL = 7.1; EXPRESSED IN PLACENTA, SIGNAL = 4.3; EXPRESSED IN BRAIN, SIGNAL = 2.6; EXPRESSED IN LUNG, SIGNAL = 2.9; EXPRESSED IN BONE MARROW, SIGNAL = 3.2; EXPRESSED IN HEART, SIGNAL = 4.5; EXPRESSED IN ADULT LIVER, SIGNAL = 4.8; EXPRESSED IN FETAL LIVER, SIGNAL =  10
cagagacacgcacatgcacgtaagcatgttcctacacccacatggcgtgctgtctgtctgcaggggcctggcttgatggggtcttgaagagggggcagtgtgtaaaaagaaagagcctgacagaatgagtgtaggaaggaagagaaatgatgctacatctcagaaacttcaagcttaagtttcttttaggtccccttttaagctgcatccttttgagggattggaaccccactggggtctctccaccccagagtctcaggcaccgcgagcattcccatgtaccctggggcaccctcttgtacttcaccatcatttctgactttgaccagctgtaagagaaatgcagtcaggagcacagcatcccctacttactatcactacaagaaaactgagtcacttgcagtggggctgccacagtctcagcagatgcaaattaagttacaaggctgaatggtgcagccgctggacctgatagtaaggtgcaaaggtccaaacctgggcttgtctccacttcacgtcacaaaaacgtttggagctaaatgcagataaccatc

SEQ ID NO: 9061 - DNA, 546 bp, Homo sapiens
  MAP TO AC008174.2; EXPRESSED IN BRAIN, SIGNAL = 4.3; EXPRESSED IN PLACENTA, SIGNAL = 1.9; EXPRESSED IN HELA, SIGNAL = 2.4; EXPRESSED IN LUNG, SIGNAL = 2.7; EXPRESSED IN HEART, SIGNAL = 1.5; EXPRESSED IN BONE MARROW, SIGNAL =   5; EXPRESSED IN FETAL LIVER, SIGNAL = 1.4; EXPRESSED IN ADULT LIVER, SIGNAL = 1.9
tgcagtgttgtgcaaccatcactaccatccagctccagaacttttttcatctttcccaactgaaactgtataccaattaaacattaaagcctaatttccctctctccccatcccctgggaaccactattctagtttctgtctctatgattttgactatcctagggacttcatatgagaatcatgaaatatttggccttttttgctgacgtataccaattagcaaaacatctttcaaagttcatacatctagtagtatgtgtcataatatccttccttttttaaggctgaataacattccattgaatatttataacacattttgcttgtttatatttattcatctatcgatggacattgggattgcttccatcatttgtctatggtgaataatggtgtacaaatatctgtttcagtccctgcttttaattattttgaatatgtacacagaagtagaattgcttgatcatagggtaagtctatgtttaatttttgagaaacccccaatactgttttccacaatgtctgcactattgaagttcccacca

SEQ ID NO: 9062 - DNA, 576 bp, Homo sapiens
  MAP TO AC007719.1; EXPRESSED IN HEART, SIGNAL = 2.2; EXPRESSED IN BRAIN, SIGNAL = 4.9; EXPRESSED IN HELA, SIGNAL =   5; EXPRESSED IN PLACENTA, SIGNAL = 6.9; EXPRESSED IN BONE MARROW, SIGNAL = 2.3; EXPRESSED IN LUNG, SIGNAL = 5.1; EXPRESSED IN ADULT LIVER, SIGNAL = 5.7; EXPRESSED IN FETAL LIVER, SIGNAL = 4.2
  unsure 65
  unsure 180
  unsure 230
tgggaaaggcctctacctatccagtgaaagtgtctacctagactaagaggtattttagttttctngactcggagcatgttgagtaaagccaatttgccagtcctgggtgggggcaaatccccgagcttgatgtgtagggaagggagggggcctgaataatccccgagaagtagtagtatnagcagatggaacactgagaagttatttctttgaggatagatttccacgantggaaaggaaatgagaggttctaagaggcgggctagtggcttgtactatagcatagcctgcctttgctggtgtgtggtgattaggcctggcagaactgccatcaataaactaagtgtgatcagggtgaggaacaggaaagaaggaaatgcggggaaatggggtgaatgtcaggcggagcagagagatacagtcatggggatcaggtgtggtatcaggaataatgtgggaggccagattgaagtctgggccaggaacaatggtaattgtgggagactcaatgaagagtgagtatagctaaaggagcctgggagcagaaattatatgcgtcaggtgggaggaagaaaa

SEQ ID NO: 9063 - DNA, 581 bp, Homo sapiens
  MAP TO AP000129.1; EXPRESSED IN ADULT LIVER, SIGNAL = 4.1; EXPRESSED IN FETAL LIVER, SIGNAL =   6; EXPRESSED IN PLACENTA, SIGNAL = 6.5; EXPRESSED IN HELA, SIGNAL = 6.3; EXPRESSED IN BRAIN, SIGNAL = 6.4; EXPRESSED IN BONE MARROW, SIGNAL = 8.3; EXPRESSED IN LUNG, SIGNAL =   6; EXPRESSED IN HEART, SIGNAL =   5
tcagattcatctgcagcctctaccaattgttccctcttctttagtttttcttaccctgtttacaagtgcccctatgtttaagtcttgacaaaaattgtttggaagctttgatgtttatattgaaagtgcatagaaaaaaaatttgtttctcccacttagaaagcattagaaaacttctagctacctggagatgacatctattgttatgaggagcccaaagcccatctcacttgatttgggggcaacatcttgccctcctgtggaaaatcaccctcctcctcgctggtggtgttgatggagttgtcatttaggatgcctcccctttcctgattcaggggcaataaactaggtcggattctccctgtccccaacaaggattcaaatatcgtgcagcaaacttcaaagacagaaaacatttgtagcagatttatcccaaaagtgatgctcacagacactgtccattattctcctcactctgcccacatgcttgtcccacttattgcttatttatttatctttttctttggttctgtgtgctatcccatatcctcccattacattcctttatttttctctccctg

SEQ ID NO: 9064 - DNA, 552 bp, Homo sapiens
  MAP TO AL079295.1; EXPRESSED IN FETAL LIVER, SIGNAL = 2.6; EXPRESSED IN ADULT LIVER, SIGNAL = 3.7; EXPRESSED IN HELA, SIGNAL =   3; EXPRESSED IN PLACENTA, SIGNAL =   4; EXPRESSED IN BRAIN, SIGNAL = 4.2; EXPRESSED IN BONE MARROW, SIGNAL = 3.5; EXPRESSED IN LUNG, SIGNAL = 2.7; EXPRESSED IN HEART, SIGNAL = 2.2
tctctctgtttccaggctgcctgatctttagaatctcaaagtctcctgcaaaaaatgggaaaaacctcacctatctcaaagatgattgacaagtgatacataatatgaataattatgtttgtaaatgtgctatgtatgtaaaattgactggcacaaagtaggtataaaaaaacaaaaacatttttataatggtcattattagtggtggttaagaacagaaatgctggagccaaactccttgggtttcctaatttctacaacatggacattaatagtactgctgagtaagtatataaggctgctgagtggaataaatgctctaaaatatgtaaagcacttaagacaatgcttaatgcacagtatgtgctctgcattattatttagtattattagataatattaatatttttatcatagaataatgtatactttattacatattataagaatgaagtaatcttattcaacaatgaattccattactgcaagtgttttatcaaagtcttaagtcagggatggaaatttcagaaatgaatcagagtctcaactaaa

SEQ ID NO: 9065 - DNA, 565 bp, Homo sapiens
  MAP TO AC007539.8; EXPRESSED IN HELA, SIGNAL = 1.6; EXPRESSED IN BRAIN, SIGNAL = 1.7; EXPRESSED IN PLACENTA, SIGNAL = 2.6; EXPRESSED IN LUNG, SIGNAL = 1.4; EXPRESSED IN BONE MARROW, SIGNAL = 1.4; EXPRESSED IN HEART, SIGNAL = 1.4; EXPRESSED IN FETAL LIVER, SIGNAL = 2.5
ctgcaggcagtcaacataaacaaacccaggagaaatgtgcctgagttcattccaaaggaaacaagtggggtagctgcctacctgtgctttgattccagaacataaattagatccaagatgggaaaatctttggcttctgtcaacttggcttctcggtggaaatcttaccaaaaaattttggaccttccagatttcctgataagactagagtgaagacaaaagtttgtgtgtctccagttgctcatgtccccccacttccccatcccacctccccaaatgctagtaattatcatttgcaatgtaatcctgtggaaatgtgttaattacagcctcagagccctagagatcctctgcctttattatgttccagtgaatttactgggagacaattggggtcttttccaagggctaccaagtggctaagatacatctgcactgatggcaacttatgttttctcaacactacatcatggatttacatgctgagaagcccactttaatgaacacctgctatcttttccatgcaataaattgtttccaggagtgggaggacagcacttacagc

SEQ ID NO: 9066 - DNA, 575 bp, Homo sapiens
  MAP TO AL035681.13; EXPRESSED IN HEART, SIGNAL = 2.9; EXPRESSED IN BONE MARROW, SIGNAL = 2.4; EXPRESSED IN LUNG, SIGNAL = 3.3; EXPRESSED IN FETAL LIVER, SIGNAL = 4.8; EXPRESSED IN ADULT LIVER, SIGNAL = 4.2; EXPRESSED IN HELA, SIGNAL = 2.7; EXPRESSED IN PLACENTA, SIGNAL = 4.3; EXPRESSED IN BRAIN, SIGNAL = 2.4
cagcaccacctgctctccgcaccgcggcggatgatggcggaggaggaggattttgaaagccggcagtttctttgcttcgatttgatttgttcgaggccccggccggcttgccctcgccccgctcgcgcggcctctcgggtagagtagtccggttccccatctgggagcgcgatggggcgcgcaccgcgaactacccgtcccatggcgcaccgcgcgcagagcgtcctccaccgccctcctcttcgccctcccctggtggcttctggctctttctcgcagagaccgcagggaggtgttcagccgggagcgcccagagactacaattcccagaatgcgttgcacccaggtccctcagctcttccggaaaggttttgttcgcgtaactttgttgataacaggtactgctggctgctgggtctcttgggcaagacacaggtatccatttcccgaaagaaaagactcttttccgtcccatgaaactgaaagggcattcgaaggcttccacataaatatgcacaaattacctgataattaaaaaggggaaatagtaactatcgtagagaagctccgcagac

SEQ ID NO: 9067 - DNA, 577 bp, Homo sapiens
  MAP TO AP000352.2; EXPRESSED IN HEART, SIGNAL = 1.8; EXPRESSED IN BONE MARROW, SIGNAL = 1.8; EXPRESSED IN ADULT LIVER, SIGNAL = 1.5; EXPRESSED IN FETAL LIVER, SIGNAL = 1.8
tagtggtggggcagtttctctctgttggatgcccagactctctgcaaactattaatacctcagggtggtctgttcttctctgtgcgcttggagtaggagtggtcttataagaacacatggtgcagtgccttcattttccagtggtggacaacactagactggctcaagggcctgcagcagaggccagcctggaagccaagtatcctgctggctgcttgctgaggcttcaaggtctagttgtcacttctgttctgttttgttcacaggcagtttcatccggtgatgagaaagaggggttgaaacaccctgggctgatactgaaatattccacttataagaacttggcccagctggcagcccagcgggaggatctggagacagccatggagttctacttagaggtgtggttttggcagtgcttagctaccttggtgttttgaaagctcttggtggaggggatgaggttgcggtcttgtgggccaaaaagaagagtttgtagtggtggatcaccaagctatagtacccaaggctctagggtaggtccataggtgataacaattagtactgaccaggcctg

SEQ ID NO: 9068 - DNA, 586 bp, Homo sapiens
  MAP TO AL035682.16; EXPRESSED IN HELA, SIGNAL = 3.6; EXPRESSED IN PLACENTA, SIGNAL = 1.6; EXPRESSED IN BRAIN, SIGNAL = 2.9; EXPRESSED IN BONE MARROW, SIGNAL = 4.1; EXPRESSED IN HEART, SIGNAL =   2; EXPRESSED IN LUNG, SIGNAL = 2.8; EXPRESSED IN FETAL LIVER, SIGNAL = 2.3; EXPRESSED IN ADULT LIVER, SIGNAL = 2.2
acccaccatacaagagctggtatttttgcacatcctggcacatctagagagcattctaacacacttagggcaggagagtgtcacctctcagagaggccttccttgatgaccctgtctaaagtctctcccccagcaccctgtttcttttcttcatggcatgtgtcaccagctgaaatctatttctttctggcatttttttcttccttactagactgtatgaaccacagagcaggaacctcactccattcacccagcacctaccaatttacctggctggaagcaggtgttgatagatgacagtggtgatggtgataatgatagtggtggcagtggtggtatttggtatctactgggtatttactctgtgccaggccttgttctaagcaatctacatgtactaacccacccaatgttcacagtgacccatgaggtaagtgttataatgattactcccattttgcagttcagtaaatcaaggctcagtgaggcaaagggcctcgatcagagttacgcaggtagcacgtggccgagcaatgatttgcatccagaagttctggttccagggcctaccctggattcctgcctt

SEQ ID NO: 9069 - DNA, 559 bp, Homo sapiens
  MAP TO AP000352.2; EXPRESSED IN FETAL LIVER, SIGNAL =  12; EXPRESSED IN BRAIN, SIGNAL = 3.6; EXPRESSED IN HELA, SIGNAL = 4.5; EXPRESSED IN PLACENTA, SIGNAL = 8.4; EXPRESSED IN BONE MARROW, SIGNAL = 3.4; EXPRESSED IN LUNG, SIGNAL = 4.8; EXPRESSED IN HEART, SIGNAL = 3.8; EXPRESSED IN ADULT LIVER, SIGNAL = 8.6
gggcagggtctctgcatatctttgtcttaactggtccaacctctctgatgcctgccactcagggagctgtagggctctgaggggcttagggtgcccctggagatagggtgggtgtggttagggccaagtgcaacttctgagaagcagaagggcattagaatgctacacatgaagttgactcgttggcctgatggtttttagtgtctcctcggaactgtcctgctggtatggtgaatggcagatttggacctgacttcccagggacccactgcctgggtgacctcctacagctgtcatttgcctcgtcccagcgcgacctgttcgaggatggttggctggagtttgtggtccgtgtttactggctgaaggctcgcttcctggcgctgcaggttagttccatggtcagctgcttggggagcatgccctgacacccagcagggtgggcagaaaattgaccatgttgagggtgtgtgtgtgtatgtgtgtgtgtgtgtgtgtgtgcatgcatgtgtacatgcatagcacctgcccgggcactgggcttggcatgagaaagtgt

SEQ ID NO: 9070 - DNA, 580 bp, Homo sapiens
  MAP TO AC008272.1; EXPRESSED IN HEART, SIGNAL = 5.8
gcatctgagagcatcagtgaactctcagaagaaaaaaatggtcatttaaggaccgacatcctctaaatttttgtcacacaggtttgcaaactaaagacagccatactgagtgagttgtccattgcaaggtagaacacagcctttgaactaccagtgaagaagatactccccaaactaattaccctgcttttagcacattacatgcgagcaaaaatgagctcacctcttcatccagactcctgccccagggctgctggccctccccagcttctgttgcaggaactgcttaggtctcatgcttctcagggctcccctcaagcccttcagtgtctgtaggcttctcacgaggctgctcctgagcttgcctctctgccctcgactggctgaatgtcctttctgcttcttgaaggtctgctagggtgacaccctgggaaaatatcacaagatcagggctgtttcacactaaccatggaataactcttcattgatcagaagtattcccaaaaagatctaatagttgtcaaattccaaaatgaagcccctcaaaatgcataatgaggccacttcaagcaatatatgc

SEQ ID NO: 9071 - DNA, 583 bp, Homo sapiens
  MAP TO AP000352.2; EXPRESSED IN LUNG, SIGNAL = 3.4; EXPRESSED IN FETAL LIVER, SIGNAL = 3.6; EXPRESSED IN ADULT LIVER, SIGNAL = 4.1; EXPRESSED IN BRAIN, SIGNAL = 4.1; EXPRESSED IN PLACENTA, SIGNAL = 3.2; EXPRESSED IN HELA, SIGNAL = 3.2; EXPRESSED IN HEART, SIGNAL = 2.7; EXPRESSED IN BONE MARROW, SIGNAL = 5.8
agcagggtgctaggtgaatctgcattagatgctgcagggggaaagcagaaaaaagtaccctggttgacatggggtgacctgagtttaagtcctgctctatgccttgcttggtgggcgcttttgagaaacccctaggcctttctacacttcggtgtcaccagctgtgaaatggtgagggcatttctgtgtcttggttgttaagaggagtataaacttgcaaataggtcggcagagctttgtacaggaaaaagtctgatccctgggcaggttcaggcgtaaggccagcccagtctcatgatcttcttacagatggagggccggcgcgacagcatgctagagacagccaagcactgtttcacatcagcagcccgctgcgagggtgatggtgacgaggaggagtggctcatccactacatgctgggcaaggtggctgagaagcagcagcagccacccaccgtttacttgctgcactacaggcaggctggccactacctgcacgaggaggctgcccgctaccccaagaagatccactaccacaacccacctgagctggccatggaggccctggaggtgacaccatgct

SEQ ID NO: 9072 - DNA, 577 bp, Homo sapiens
  MAP TO AL022319.2; EXPRESSED IN HEART, SIGNAL = 5.4; EXPRESSED IN LUNG, SIGNAL = 2.2; EXPRESSED IN FETAL LIVER, SIGNAL = 1.6; EXPRESSED IN ADULT LIVER, SIGNAL = 1.7; EXPRESSED IN HELA, SIGNAL = 2.3; EXPRESSED IN PLACENTA, SIGNAL = 1.7; EXPRESSED IN BRAIN, SIGNAL = 2.3; EXPRESSED IN BONE MARROW, SIGNAL = 2.8
agtcacaggctattgcatcgtgttaggcagaactatgaccttgctattgtctttatttggaaattaagtgtggcttcaggacatgcgtacgggtgccaggttgacaagggtagatttgtggatgaattttaggcgtcctcttgcccggaggaaggaccgggtgaaggactgtgttgggtgtgtttgtgaggggtctccaggggagacccgtgtgtgggtctgagtaggctgggtggaatgctctgtcctcagtgttggcgggcaccatccaagcagccagcgggtgggagagaacaaatgccgaaggcgaatctccgagagccgggacagcctttccttctgctgccttcgacatcagaatgccaggctcttaacctttagactccaggacttaaccagcatccccccgccccggggccttgaggcttttggcctcagcctgagatatagatcatcggctttcctggttttcaacacagaaacattgaatcctcctcaatagatgaagaaatgtcctttatgtacatctgcatttgtgaaataaaatctttcgagatctcagctatttgggtgcctg

SEQ ID NO: 9073 - DNA, 564 bp, Homo sapiens
  MAP TO AL035682.16; EXPRESSED IN ADULT LIVER, SIGNAL = 5.4; EXPRESSED IN FETAL LIVER, SIGNAL = 6.3; EXPRESSED IN HELA, SIGNAL = 3.6; EXPRESSED IN BRAIN, SIGNAL = 3.7; EXPRESSED IN PLACENTA, SIGNAL = 8.2; EXPRESSED IN BONE MARROW, SIGNAL = 3.8; EXPRESSED IN LUNG, SIGNAL = 4.1; EXPRESSED IN HEART, SIGNAL = 2.7
ctgctgtcagcccttcttgtctctgtatcaggccccatccttggctgtgagcctggtctggctgggcctggcttggcccagaatgtgctgccgactcaggcatctcccgggagaggctgtgagcagggccagcagacaggcccctcagcctccactctggctgttccctgggtcttccctgggaagtgggagagtggaggggaaccaaaatctcccctagtgtggggctcacctctttgagggaaccactgaggtccacagcaagggagtggggtatgatgtgtgcaaatgcatgagacacacagtgagtgacaaagttgtagctgtgggcctcggtggcggggggcctcagcttcagctttctcatatggagaaatgcagcagcacggcccctcctgtgagactttcctatctcatccactccacaggacatcagggagagtaggagctgctgtctctcctcccatcagatcattactctaccattccaatgtactaacaggcaccctcttcagaatattctcagtccaaaacctgatgagctctggatcactgaggaaccca

SEQ ID NO: 9074 - DNA, 588 bp, Homo sapiens
  MAP TO AP000041.1; EXPRESSED IN HEART, SIGNAL = 2.4; EXPRESSED IN FETAL LIVER, SIGNAL = 5.3; EXPRESSED IN ADULT LIVER, SIGNAL = 6.6; EXPRESSED IN PLACENTA, SIGNAL = 5.2; EXPRESSED IN HELA, SIGNAL = 4.1; EXPRESSED IN BRAIN, SIGNAL = 5.1; EXPRESSED IN BONE MARROW, SIGNAL = 4.5; EXPRESSED IN LUNG, SIGNAL = 4.9
caaggacctgcccagagtgcagctgctgctgggtgtggactcccacagctgaggctcccccaacccaagcagccaggaatctgtaggtcatagtggggcagtcaccatggagaccatgaagaggcagttgggtgtggggtggtatgctgccttggccaagctctgccagctgagtgaccttggacaagagacatgagctttcttagccttggcttccttatctgtaaagtaggggtgatgctagtaccatcttcacaggccatctggcctgagagggagaacctggcacaccacgcatatccaattaagcagaagaaggtgcctgactgcatgagtgtcatcccattgaatcttctgggaggtcctacaaggtatggtctctgttactctgggtgacatgatctgtcctgcagcatcacaaggggtctgtatgcctcggggcgccaaggaacaactcagcactgtccctgagctctgtacaggttccacttcccaaacccccccaacgcaaggcaaggcctctgttctcacctttgcatgccctggggtgcctggtactgagcatgatgcacggttagttctctggga

SEQ ID NO: 9075 - DNA, 589 bp, Homo sapiens
  MAP TO AL078474.2; EXPRESSED IN HEART, SIGNAL = 1.3; EXPRESSED IN PLACENTA, SIGNAL = 1.9; EXPRESSED IN BONE MARROW, SIGNAL =   2; EXPRESSED IN LUNG, SIGNAL = 1.7; EXPRESSED IN ADULT LIVER, SIGNAL = 2.5; EXPRESSED IN FETAL LIVER, SIGNAL = 2.8; EXPRESSED IN BRAIN, SIGNAL = 1.7; EXPRESSED IN HELA, SIGNAL =   2
tgagattcctggagacccacgcaaaaaggaaaacattaaaaaaccatgtaattttcctgacgaaataagataaatgctaacagttccaaagggatgacaagttctaaaggacactaaattctaaaggaaatttcactcatgtgtacttagaaagtgataatgcactgagaaaacttaataagaaatgtagaggtgtgtgtcatatgccctctactccaaacaaacaaacaaacaaacaaaaggaactccaacagcagcagcagctaaggaaataatgttaaagtggttcacgttgcccaaggtttccaagatgttgcccatgaagagattctgcctctttgacaatctcctagaagtatcacttctctcagacgtatttttggtaggaaggaggtaccagcagtttctttcctttgtaataccattgcatctgtaagataacagagaatagctaccagactaacccatcaatttacctcttgctcttaatacagtagcttgcacaaaagtagaaattgattaggttaagataattgtttttattgacatttctttacttctgagtaaatgccatcaactcctaagggtg

SEQ ID NO: 9076 - DNA, 547 bp, Homo sapiens
  MAP TO AL022319.2; EXPRESSED IN PLACENTA, SIGNAL = 1.4; EXPRESSED IN LUNG, SIGNAL = 1.9; EXPRESSED IN BONE MARROW, SIGNAL = 2.3; EXPRESSED IN HEART, SIGNAL = 1.6; EXPRESSED IN FETAL LIVER, SIGNAL = 1.9; EXPRESSED IN BRAIN, SIGNAL = 2.2; EXPRESSED IN HELA, SIGNAL = 1.5; EXPRESSED IN ADULT LIVER, SIGNAL = 1.6
ctagggagttaccctggctgagcgaagggttccagggctgggcactgggttgatctcacacccctcagtgaggtcatcgttactgcctgtggcctgcaagctaaggtgtgcgagcagacaccaggttgatgtctgcgtactcctggaccaggatcagtgcctcttcaatggaggattccgagacaggattcataatgtcctccatttgccattctggtagttgccggaaggccagcttttagagaaaggtaccaggaaactgacaatgcttccttgaattggcttctgtatttgcttcatcagtgtctctcatagtgaatattctggtgttcctatagatcaggttttgctgatttgggaaaataaagactatggatcaactaggaatactgttcatattaatgagaaaatgcttctgttagaaccttgttgaaggcacaattttgagttgatccagttcttgaactctgtagactctgataattctgaatctgttgttttgtcttttgctgatattttgtgtgtggcaaatgtcgaggaagccagt

SEQ ID NO: 9077 - DNA, 560 bp, Homo sapiens
  MAP TO AP000347.1; EXPRESSED IN PLACENTA, SIGNAL = 1.3; EXPRESSED IN BRAIN, SIGNAL = 1.7; EXPRESSED IN HELA, SIGNAL =   3; EXPRESSED IN LUNG, SIGNAL = 2.5; EXPRESSED IN HEART, SIGNAL = 2.2; EXPRESSED IN FETAL LIVER, SIGNAL = 1.8; EXPRESSED IN ADULT LIVER, SIGNAL = 2.1
ggggctcagcctatcttcagagggaaaatcacacctcagaacaccagacacccaaaagaaagctccagttcggcagatacctgccaatagaccctggagtggctgccccagggaaaactgccattgcactgtcagctccctccagccctctctcaggtcccagcaggagcagatttctgactaagctcagaggtctcaacaaatggcaggttgaacatcagaggagttattaataggcctatagttacctcaagactccaccttaccagggccaaaaatgagtcctgggagggcagccagaaagaaagtagggcagagaggaaacacagggagaggggccctgggaccacgtcagatatggagggaaccaggggaacgagagcagccctgatgattgtactccccacagcccctgcatgcctgtgaaccctgagaattcagggtgaggagctcactcttgcctttcacctgttcctgggctctggcaggctggcctgcttcctgccccagcctcacccactctccgcactcctcgccactgatgtgggcagctgatctct

SEQ ID NO: 9078 - DNA, 569 bp, Homo sapiens
  MAP TO AL035701.13; EXPRESSED IN BONE MARROW, SIGNAL = 3.2; EXPRESSED IN LUNG, SIGNAL = 4.2; EXPRESSED IN HEART, SIGNAL = 2.6; EXPRESSED IN FETAL LIVER, SIGNAL = 5.6; EXPRESSED IN ADULT LIVER, SIGNAL = 4.7; EXPRESSED IN PLACENTA, SIGNAL = 4.3; EXPRESSED IN HELA, SIGNAL =   3; EXPRESSED IN BRAIN, SIGNAL = 2.2
gaaagtaggactttgccttcactcttaaatttactttctaatttaaaggtgaaattgtgattactgtaaattgctattaaatgaagacctgggaattatctggttgaaaattgaactaattattctgtgtgaacttctttaaatcgaagtaccctcttaacacaacagtatcacaaggtatgatttgttcctaggatacaacagaaatatctcaactaaatacttacatttttgtgatgattcatttagcacaattgtccagccttcatcggcaaccaaaataatgggctgaattcgatcattatgttggtaataaaatctgttaggaatgtcttctttgagataaacattcatatgagggctacagtttttcagtttgttataaacctctgttctatctgagaaaaaaaaagaaacagcaaaggaaacaagttatgattgataaggaaaaaatatgtctaactagaataattggaagtaaattatagataatgtcatctattaaatcacttcttaaaaaaacagagcaataataatgtgagagtgttggggactgatacacacaaaca

SEQ ID NO: 9079 - DNA, 579 bp, Homo sapiens
  MAP TO AC005300.10; EXPRESSED IN LUNG, SIGNAL = 1.9; EXPRESSED IN HEART, SIGNAL = 2.7; EXPRESSED IN BONE MARROW, SIGNAL = 1.9; EXPRESSED IN ADULT LIVER, SIGNAL = 1.6; EXPRESSED IN FETAL LIVER, SIGNAL = 1.9; EXPRESSED IN BRAIN, SIGNAL = 2.1; EXPRESSED IN PLACENTA, SIGNAL = 1.2; EXPRESSED IN HELA, SIGNAL = 2.5
gcaggtactggtggaacaggttggcgccgtatacgtcagacatagggttatcactggcaggggcagccacaccggaaaaggaaaaaggagaaaaaaccctaaatcaatgttgcaaagcaaagggagcagagaagagtttcggggcagaagagtgaattagatatagggaaatgggggtgagagtagaggaggagggagagaaggggatgtcataaaagggacaaaggagggagagcagagcctaccccacagcatagagcttccggatgggggcggcccagccccgcctctccgcctgtcgcctgatcaggtcctcggcatactggtaagtgaggatgctgggtttgcccatcaggccctcgtatctcagctccttgcccgtcactttctggtaaatggtttccaggcacagcagaaaggtgccatgtccaaacctgccagaaacgagcacgcagcagttcagtcttcctgatctccaggctcttctagagaacacgactgccactgtctaagcagcaaacacacagaccagccttttccccagggtaagagctgacatgtagcagacactgtgcaggc

SEQ ID NO: 9080 - DNA, 570 bp, Homo sapiens
  MAP TO AP000123.1; EXPRESSED IN HELA, SIGNAL = 1.8; EXPRESSED IN BRAIN, SIGNAL = 2.3; EXPRESSED IN PLACENTA, SIGNAL =   4; EXPRESSED IN BONE MARROW, SIGNAL = 2.4; EXPRESSED IN HEART, SIGNAL =   2; EXPRESSED IN LUNG, SIGNAL = 1.9; EXPRESSED IN ADULT LIVER, SIGNAL =   5; EXPRESSED IN FETAL LIVER, SIGNAL = 3.6
cgagtaatatgcccacaaaccacctgatttaaagtgggaaaataaacctgccagaacaaactagtttgcaaatcgcacctcttcaaggtaatatagaggacatgtgttaaaagaatgatttcaattttagagtagcgaattgtgagggtttttctccccttaaatgtgcagagaataaaatgcatttgtcttttggggccactccaagcaaatggcaagatgagggagaggaagctgtggaaacactaccacctagtggtagaagacagactttcaaaaacgtggcctaaggctttgcagaattcattttccaataactttggggacatgctcacaaccctttataaaagctgggagaaagaagaaatagaggaaggagagagaggtaaatggctgcccaagtggttaggaacttaacattttccatcaggccgatcaacctagggagaatcatcagatctggagagttcagaggctgctacatagacaagagacaaaaaaggcactgcaggacctgcttgcttaaaaacgcccctgccccacagtactgcccacacgtactggatgtga

SEQ ID NO: 9081 - DNA, 587 bp, Homo sapiens
  MAP TO AL023553.5; EXPRESSED IN ADULT LIVER, SIGNAL = 2.4; EXPRESSED IN PLACENTA, SIGNAL = 2.5; EXPRESSED IN HELA, SIGNAL = 3.7; EXPRESSED IN BRAIN, SIGNAL = 4.5; EXPRESSED IN LUNG, SIGNAL = 4.5; EXPRESSED IN BONE MARROW, SIGNAL = 5.8; EXPRESSED IN HEART, SIGNAL = 4.1; EXPRESSED IN FETAL LIVER, SIGNAL = 2.9
gtccaccgtgagctctgtcccctttgcaagctgactcgcccaccccaccagcagccatgtacctttactgcctcacagccctggcctacagaaactcaggctctccagggagaagtgaccagccaagaccccccaaacaggatccctgacctgctgggggagatcccagagcagaagccccaggacacagcttccagccctgcactccggctctcccgcctcatgggggcttcagcaccatcagagccactcaccacaagcgtgtacggagcctccttctttggcagctcctcactggaagtggtggcatctgctgagctgggccctgtgggggacgtgtcaacaaagctctcgtccaccacccggaagcggatctcctcgccggtgtccatgtagaggtcgtgtgctccttcctccgtctcgtactcccacacccacacctgctccgcttcgtcgctgagggggtccagggtcaaggcagcaaccagatagtgggaggggcttccctcagcacccactccccgaccccgcaggaaaaaccaatctcagggtgagatcactgtggctgggaagtcacaggaaaagca

SEQ ID NO: 9082 - DNA, 568 bp, Homo sapiens
  MAP TO AP000129.1; EXPRESSED IN FETAL LIVER, SIGNAL = 1.4; EXPRESSED IN PLACENTA, SIGNAL = 1.5; EXPRESSED IN HELA, SIGNAL = 1.3; EXPRESSED IN HEART, SIGNAL = 1.6
ggattcaactgctgtccttgaactaagctgtagagaacagtgattcttcgttcactgtacatgcgaattctattgtcataatataatcccaaattctttgtgacagcatacgctaaaaaggggtatgtcataaaagagaatttgttctgtttctactttgaaaacagtataatctttatgcatttctagaacctccttcagtggttcattaataaactcttcaaaagggataagggatttttgacaatccagggttttaacaccaagttcattttccagggggtccactcaaggacctttcttgtttcttctctcttcttccaaaagctcctgaagtgtcagctcactggactcagggatgggctcttcatcatcttcctcactgtgatttgtgtccacttcccctcccactaccatttgcatagtaaatcattttcaagcacttcgaagcagcaacaatggcatcatcatcattcaccagattttgactgttaaattcgttgcttatgactttgtaagtaataagttgctgaactgtctccatcattctccgaatctggtctgcatt

SEQ ID NO: 9083 - DNA, 588 bp, Homo sapiens
  MAP TO AL079300.11; EXPRESSED IN ADULT LIVER, SIGNAL = 7.2; EXPRESSED IN HELA, SIGNAL = 3.6; EXPRESSED IN PLACENTA, SIGNAL = 7.7; EXPRESSED IN BONE MARROW, SIGNAL =  11; EXPRESSED IN FETAL LIVER, SIGNAL = 6.5; EXPRESSED IN BRAIN, SIGNAL = 1.8; EXPRESSED IN HEART, SIGNAL = 3.4; EXPRESSED IN LUNG, SIGNAL = 3.4
tgtgatcagagctaaacaagggaactatacacttttgggtttactttttcaaagtgcttatatcattcaatctatgattacatgtggacacacacatacgtacacacacacacacacacacacacacactccaccaaagaaaccaaggtaggtattatctgcatttgacagatacagatgctgaagcccagaaaagatagagaactggctcaggtaacagacaaaattggtatcatgcccaagtctccagcttctagcttgggttctttctccaccagaccaccaggagcatccaaacagcctcctggtggccagaaccagtccaaatgctgaacattaataagagatgctacagagagagactgctccatttatattgttcatctgtgaatcctccttagtttcactgagaaggacatcaaagaagagaattctggattcagtagaggttgagttaagtcattggaagaccttgttggggtcctttgatcttagtctaagacatttagaacaagggcttgtttgggcttatttgaagggattcactcttcttggtcttcatgttttggccctgaaatccatcagatg

SEQ ID NO: 9084 - DNA, 567 bp, Homo sapiens
  MAP TO AC007841.1; EXPRESSED IN LUNG, SIGNAL = 1.3; EXPRESSED IN HEART, SIGNAL = 1.3
tggtacatacctcataagggttcagtctgtaattattcaatgaatatttattgagcacctactatgtgctggcactttcatagacactgggatagtaagccatactattatagagctgacattcccataggagaaagagatgtgtgatagatcaatgggattggattgcacaatgcctatatggctggcaaagtattgtttctgggtgtgtctgggaggctgttgctagaggagtttggcacttgagtcagtgaagaggtagacccaccctcaatgtgggtgggcaccatccaatcagctgccagtgtagctagaccaaagcaggcggagaaaggtgggatgtccttgcttgctgggtcttctggcttcctcttcatgtccttgcttgctgggtcttctggcttcctcttcttcctgtgctggatgcttgcttctgctcctcctgcccttggtcattagactccagattctttggcctttggactctggtacttgcaccagtggtttgctggggactctcaggcctttagcctcagactgaaggctgcattgctggcttcattggtt

SEQ ID NO: 9085 - DNA, 569 bp, Homo sapiens
  MAP TO AL034406.1; EXPRESSED IN FETAL LIVER, SIGNAL = 4.6; EXPRESSED IN HELA, SIGNAL = 4.2; EXPRESSED IN PLACENTA, SIGNAL = 2.3; EXPRESSED IN BRAIN, SIGNAL = 4.5; EXPRESSED IN BONE MARROW, SIGNAL = 2.9; EXPRESSED IN LUNG, SIGNAL =   2; EXPRESSED IN HEART, SIGNAL = 3.4; EXPRESSED IN ADULT LIVER, SIGNAL = 4.5
ggattaaagaacttgcaaagcagaaatattttatataataaactataagctgctatttattcatgttaacatgcatttgactttggataggaaaacctagatatttagccagaaaaacaacatggcaaaacaaatttcaatcagtttaaaagataaatttcctgatagtaagtattctgtaactttaaaagcctatttcaagtcctagaacaataggttaaatatgatctggcttttaaaactaggtcatgaggtggggcaagatgactcaatggaagtctccaacaattgtcttccctgtaggaacaccaaatttgacaactatctacacaaaaagtacactcataagaatcaaaaatcaggtgagcaatcacaagacctagttttaacttcatatgttgaaataggcactgtagtgggtaggaaagacagtcttgaattgtcaaccccacctctgccccatcccctggcagcagccacctggtgtggagagagaatctatgtgctggcaggagggaaagcatagctattatgggagtttagtgctgccaacaccaacacccacaaag

SEQ ID NO: 9086 - DNA, 562 bp, Homo sapiens
  MAP TO AC002472.3; EXPRESSED IN HELA, SIGNAL = 2.3; EXPRESSED IN HEART, SIGNAL = 2.3; EXPRESSED IN BONE MARROW, SIGNAL = 2.5; EXPRESSED IN LUNG, SIGNAL = 3.2; EXPRESSED IN FETAL LIVER, SIGNAL = 1.7; EXPRESSED IN ADULT LIVER, SIGNAL = 2.9; EXPRESSED IN PLACENTA, SIGNAL = 1.9; EXPRESSED IN BRAIN, SIGNAL = 3.1
ttgaagtgggcttaactgggacccagagggatagggtccctacttgccccaccccctgtaccttgctgagcttgggacggtcgtagggaaggtgccggtctagcgtgcacaggacgatccggtcggagaagccctcctgccgcagtgtctctgcacacaccagaccagctgcacctgaggggaggggcccgtgggccaggaaccacttctcaccaatcccatctcccaccctgcccctcatgaccccactaccaacctgcacccacaatgagcacattggtgctactgctgtacccagcacttggagagatacacttggccatcaccttggtccttcgctgcagctgtagggcctgtgggtgccaggagggtggagggtcactgccatcctctgcatgccatcatcctggcaggcaggtcctggcgctccagcccagcctcatccctaccgcaacccctcactctgctccagtgacacgtgccaagctcctcccaccacagggctttgcacatggcattctctgggccaagatgccctcccggctcctcccttctgcctgag

SEQ ID NO: 9087 - DNA, 574 bp, Homo sapiens
  MAP TO AL035682.16; EXPRESSED IN LUNG, SIGNAL = 2.8; EXPRESSED IN HEART, SIGNAL = 2.1; EXPRESSED IN FETAL LIVER, SIGNAL = 2.5; EXPRESSED IN ADULT LIVER, SIGNAL = 3.1; EXPRESSED IN HELA, SIGNAL = 2.4; EXPRESSED IN PLACENTA, SIGNAL = 2.4; EXPRESSED IN BRAIN, SIGNAL = 3.5; EXPRESSED IN BONE MARROW, SIGNAL = 3.9
acagcctgagagggaggctgggcatggaccatcagctctgactcagctccggcacagctgtaccccaggccgagagatggaccatgtatgccttccagccctccggggcccccaaacagggaggcagggccgaacattccacccaggctcaagagagacatggactcagggttgcttatgtctactgaggtggggacccagcctctctacccagctttcctcccctgattccattagacacactggccttctctctccctccaacagccacacctgcctatctccaggccttggaacttgctgttgccacctctcaagatgcttttcttcagctcttctgtgaccatccccttcccatccttcaggtgcagctcagggagacccccccttcatcctacaccatccccttataactttctactcctcccttccagcctgaaatcattttagctacctattggtttgctatctccacccagcctcaggctgtgagttaccccagagcagggctatagctatctcattctctgctttatccttagctctacagcatctggcacataacagttgctca

SEQ ID NO: 9088 - DNA, 565 bp, Homo sapiens
  MAP TO AC007564.9; EXPRESSED IN FETAL LIVER, SIGNAL =  23; EXPRESSED IN ADULT LIVER, SIGNAL =  34; EXPRESSED IN PLACENTA, SIGNAL =  30; EXPRESSED IN BRAIN, SIGNAL = 2.3; EXPRESSED IN HELA, SIGNAL = 7.8; EXPRESSED IN BONE MARROW, SIGNAL = 2.4; EXPRESSED IN HEART, SIGNAL = 7.2; EXPRESSED IN LUNG, SIGNAL =  11
cagtgtcctcatctctaaaacaaggataataatggtaaccaatgtcatagggctcttgtcatattaaatatttaaaatattaaattatttaaaataatgtctgcacatgccatgtgctcaataagtatttaatattaactattaatattactactagcagtagaaatatttgcattttcatgactattatcattattgtttatcaggcactatgctaggtctggctaaaaatcttgaactaaaaaagaaaatcctaccaaacccaagcagccaagaaaaactgctttgcaatctccttatataatacatctgatatcttgacctaggataacattttccactttcaaatcatgatctgctcctaggaacctcctctccatactgattctgtatgactctagttcattcaaatcacacacacacacacacacacacacacacacacacacgtacgcgtgtgtaattgattaggcaaatttatctgtatcatgtgaaccaatatgaaactatttcattttgctaactacaggaactttaatctacactgcctttgcagcaacaaaag

SEQ ID NO: 9089 - DNA, 562 bp, Homo sapiens
  MAP TO AC007462.2; EXPRESSED IN ADULT LIVER, SIGNAL = 4.7; EXPRESSED IN PLACENTA, SIGNAL =   3; EXPRESSED IN HELA, SIGNAL = 1.9; EXPRESSED IN BRAIN, SIGNAL = 2.4; EXPRESSED IN LUNG, SIGNAL = 3.1; EXPRESSED IN HEART, SIGNAL = 4.3; EXPRESSED IN BONE MARROW, SIGNAL = 2.8; EXPRESSED IN FETAL LIVER, SIGNAL = 4.1
gggagtgaaagagcagcttgttcagttgctacttcaattagcaggagttttgtggccaagagagaaaaaaagcaaaagctctaccatctgcttttatttctgaagttgtctcagtatcaggctactgacctctgcaacctatttatcatttgcatacaaaatattcctttctttcctttcccctctccctttctcctcccctccttccctcccttccaccttccctccctccccaactccttccatccttccctttctcactcccttcttctttcctttctctcttttatgtttctctttcatttttgaataatctgagtgatacatacttctactacgttttcgctgcccataactccctgggaagaaatcagaaaaaaaaaaaaaaattattacctcctgctagctacctatcaatgttagacaactgtaatgtgttttatactgagaaaatatatagaagaaacgtttcttccactgaagatcttccaaaaacagtaccaaatagtattttatgtaataatgaaaaataataataacacatggcatagctgagtacaga

SEQ ID NO: 9090 - DNA, 576 bp, Homo sapiens
  MAP TO AL021707.2; EXPRESSED IN PLACENTA, SIGNAL =   5; EXPRESSED IN ADULT LIVER, SIGNAL = 6.7; EXPRESSED IN FETAL LIVER, SIGNAL =   6; EXPRESSED IN BRAIN, SIGNAL = 3.1; EXPRESSED IN HELA, SIGNAL = 4.5; EXPRESSED IN BONE MARROW, SIGNAL = 3.5; EXPRESSED IN HEART, SIGNAL = 5.5; EXPRESSED IN LUNG, SIGNAL = 3.5
tccaggcaagatgactaaagtgggaatccactgagaccacaacttcacagttcacatcatgaaattccttagctttgtcactaaaagcaacagtttctgtaggaccacgaaggtgaaatccaaaggatagaagaaaagcaccaaattatttccccttaaagtcatcaaggcttaggtctttgaactctccattgacaatggctgtacccttaaaatagggtgcatgctgggcgacagcaggtgcatggtatgaggagctggtgctaaagaattttgcttgactggaaccagaccataatatgtttgtcaagctcgttcttccagaagcagcaagcttgagggctgcagtggcagaaatgccccaaggaatggcactcacatgtcgggcagccgatgctcagagtagccttcccacagcagctaccatcttcagtgcacgcgggcgaaacttcctttgtcttgtacttaggtcttggcctgaatttccatcagcccagaatcttctgctacttcctcccctatttagttcttggtctgaacacagcctagaattatcctcttccttgttccttctgg

SEQ ID NO: 9091 - DNA, 568 bp, Homo sapiens
  MAP TO AC004624.6; EXPRESSED IN BRAIN, SIGNAL = 3.4; EXPRESSED IN PLACENTA, SIGNAL =   4; EXPRESSED IN HELA, SIGNAL = 4.2; EXPRESSED IN HEART, SIGNAL = 2.5; EXPRESSED IN LUNG, SIGNAL = 4.1; EXPRESSED IN BONE MARROW, SIGNAL = 4.1; EXPRESSED IN FETAL LIVER, SIGNAL = 3.4; EXPRESSED IN ADULT LIVER, SIGNAL = 3.4
ggggatgactcacacctggccggctggtggctatcaggtgcaggtgcaggcacggggcggggcacatggggcatattcagcaccttcctttccagcagcaaaaccctccgtggctgcctaggctcctccaacagtgctccgtgtagtcacacaaagtgctgattaaacacttatgactcagcttattcaacatctactggaatatttactgagaaagagcatcttagtgtcaagtgctgagcacggccctgggagacgtggagatgtcacatccaccagtgtccgctttgatgtcggggaggcctctcctggcttgcgtcttggctacaccacgtgccagctgcaggggtttcagccggtttctcaccacatctctctcagccatgacactgagcatcctggtggctcacagtgtctgtcggaatccaggaggctgcatatttcagtgggatcaggcattgccatcaggttcaatcaagcacctggggccatgcttgcttcctggagatgcttggtcaatgcctgtggaccgggtgagcaaggagcaggaacctgctggtgactcagg

SEQ ID NO: 9092 - DNA, 583 bp, Homo sapiens
  MAP TO AP000041.1; EXPRESSED IN HEART, SIGNAL = 1.8; EXPRESSED IN BONE MARROW, SIGNAL = 1.6; EXPRESSED IN LUNG, SIGNAL = 1.7; EXPRESSED IN FETAL LIVER, SIGNAL = 1.5; EXPRESSED IN HELA, SIGNAL = 1.6; EXPRESSED IN PLACENTA, SIGNAL = 1.9; EXPRESSED IN BRAIN, SIGNAL = 2.2
actcgcctctccatcatcactgagtctgctgcgctgtctcgcctccaactggtggctgagtctttactctggaggcgcttcctagcattgccataacaaactgctaccaacttcatagtttaatacatggatatttattgtctcatagctctggaggccagaagttcaaaagcaaggtgttggccggagcgcatttcctctgaaggctttaatggagaatccttcctcgcttcttccagactctggtggcctcaggcattcctcggcctgctgctgcatcacctccatctctgcccccatctggccttctcctcctggctgcatcttctcatcttctgtctgtctcaaatctccctctgcctttctcttataaagacacttgtcattggatttagggcctgcctggtaatccaggatgatctcatctcaagatccttaacttaatgacatctgcaaagacccgttgtccaaacaagggcacattcacaagttctggggatctgcacatattttttttaggggggtgcaccattcaacccaggacaaggggcaagtctcttaatccttggaaaacagtcctgga

SEQ ID NO: 9093 - DNA, 575 bp, Homo sapiens
  MAP TO AC004624.6; EXPRESSED IN BRAIN, SIGNAL = 4.9; EXPRESSED IN HELA, SIGNAL = 6.4; EXPRESSED IN BONE MARROW, SIGNAL = 3.7; EXPRESSED IN HEART, SIGNAL = 3.7; EXPRESSED IN FETAL LIVER, SIGNAL = 4.7; EXPRESSED IN ADULT LIVER, SIGNAL =   7; EXPRESSED IN PLACENTA, SIGNAL =   3; EXPRESSED IN LUNG, SIGNAL =   4
cacacctaagacctcctgcacatgcaggctggaccatgcacacacaaccacgccatccacagatcaggcatgtgtgtgccatgacctgacccattcctgagcacactctgaggaagccgatctatgaaattcacacacctgtgaaattccacagccccttgggttctgactctcactttgctgcacccgtcctgtccctgctgttttctagtggctgaagcaaatagaggggaccgaggccgccctgacccagaagatgctggacctggagaaggagaaggtaaaagatttgactgcctgggggtgggggagagggttcaaagagctcagagaggttgatttgcaggaaggctttgcatgtgttttcctaatgatttgcatgcatttctcaattttgcttttgccccagtggttgttctaagtaattgtcacccatttacttactctttcactcgctcaattactcatcgaatacatattttcagagcctctgctgtgtcccaggtgctatggcaggattagaggcttagtaatgaataagtggggtccctgccaccaggagcaagctcacagac

SEQ ID NO: 9094 - DNA, 564 bp, Homo sapiens
  MAP TO AP000123.1; EXPRESSED IN PLACENTA, SIGNAL = 2.4; EXPRESSED IN BRAIN, SIGNAL = 2.4; EXPRESSED IN HEART, SIGNAL = 1.5; EXPRESSED IN LUNG, SIGNAL = 1.3; EXPRESSED IN BONE MARROW, SIGNAL = 1.9; EXPRESSED IN ADULT LIVER, SIGNAL = 2.3; EXPRESSED IN FETAL LIVER, SIGNAL = 3.6; EXPRESSED IN HELA, SIGNAL =   2
tatggtgctgcggtattctgaatattcagtatctaaatctgttcatttcatacacacatgcacgtgtgttcacaaacacacatgcatgcaggcacacaccactgcaaaatttttaagctgcaggaccccctggcctgaaaaaatgcacacagcttctgaaagtgcctaagttactcatgggaaaataaagcttattatttaatggacttaacaatattttcttgttcatgatgatgttttacttccactgatacacaaatatttattaagtgcctactatgtggcaggcactgtcccaggaacaggttaagcagctgcaagcaatgtagacactgtaatttctgcattttaataaaattgctaactcatactaaatacttactatgagcctgatattattgtaagccctctatttgtattatgtcttttcatcctcacaacacaaccccaggaggtaggagcttttataatcccacttgataaaccaggagacctaagtgcagagaagttaagttacttgcccaaggtcacacagctggttactggcagaactgggatttgaat

SEQ ID NO: 9095 - DNA, 583 bp, Homo sapiens
  MAP TO AC007539.8; EXPRESSED IN LUNG, SIGNAL = 6.5; EXPRESSED IN BONE MARROW, SIGNAL = 5.9; EXPRESSED IN FETAL LIVER, SIGNAL = 7.9; EXPRESSED IN ADULT LIVER, SIGNAL = 9.7; EXPRESSED IN BRAIN, SIGNAL = 3.9; EXPRESSED IN HELA, SIGNAL = 4.6; EXPRESSED IN PLACENTA, SIGNAL = 7.4; EXPRESSED IN HEART, SIGNAL = 3.4
cctgtaccaaacactgttctaagcactttacatatatcagtatgtttaatccttaaaacagccccaggagggtaggtaatcttaatactcccatttagagacaggaagactgaagacacagagaagaagatcagaggcccaaggtcatggaactgataagtggtgagtctgacctcattgtccttgctaaaaccatgacactctagtgccttttaatatgtagctgtccttgttccccagaaaagtttaaatttattgggagagcaacaggaaacaccacaaaggttccagaagatttagaatgcagtgcactcacatatgtgaatgacaagaggtcgagtatttctggggatggggacaaccgtgtgggtcagatgacccaggcagggaggacagcagggaggcaagctgtgagtgcagccgcctgtcccacatgcacagagagagaggagctccacaggctttggggtcctgcgagctttataagttttaacaaagaaagaatttttttttaaatttgaaaggccaccaggaatctctctctcttttttcaaaaatagacagggtctcactctgttgcccc

SEQ ID NO: 9096 - DNA, 576 bp, Homo sapiens
  MAP TO AC004624.6; EXPRESSED IN FETAL LIVER, SIGNAL = 7.2; EXPRESSED IN PLACENTA, SIGNAL = 4.7; EXPRESSED IN HEART, SIGNAL = 2.8; EXPRESSED IN BONE MARROW, SIGNAL = 6.4; EXPRESSED IN LUNG, SIGNAL = 5.4; EXPRESSED IN ADULT LIVER, SIGNAL = 6.7; EXPRESSED IN BRAIN, SIGNAL = 3.5; EXPRESSED IN HELA, SIGNAL = 4.8
gatggtcagcccaggaggaaattccccaagttcctttctgatgatgttcctgttgttattctaggctgggtggggtggaggcatctccagaagaagccacctgctcacaggatgcctctcccaaacttctgcgcgggaagacgtttggaattagaatggatgaagtgaaatagaagactgaatgtgacgaggaggctggctgtgtctgcatgggaagagccggctgaaggccaggccgggccatcctcagctggctgcaggtggacgggctcaggccctgctcatcaggtagaaggaacggttctgtggtctctggtgaggaggacctttggacaaaagggaaaggactgaaatgtaggcagttgagggaactcatggggtgagggcaacagaggagctagaagttctcagaaggccagatccatggatggagaaggacacggtgccctgcacagaaggggccctgccagccagggagggctgctcacaccacatcccaggatccatctctaagcagacatgcaccgggatggcccagtattacccattctcttttgaaatcaaaaccccaaagca

SEQ ID NO: 9097 - DNA, 576 bp, Homo sapiens
  MAP TO Z97055.1; EXPRESSED IN BRAIN, SIGNAL = 1.6; EXPRESSED IN PLACENTA, SIGNAL = 2.8; EXPRESSED IN HELA, SIGNAL = 2.2; EXPRESSED IN BONE MARROW, SIGNAL = 1.9; EXPRESSED IN HEART, SIGNAL = 2.2; EXPRESSED IN LUNG, SIGNAL = 2.9; EXPRESSED IN FETAL LIVER, SIGNAL = 4.9; EXPRESSED IN ADULT LIVER, SIGNAL =   4
gaagtggtttgatcatgggggcagttccctcatgggttggtgctgccctcgagatagtgatttctcttgggatctggttgtttaaagtgtgtgggattgtcagaggcctttgaaccagagcatctcctccctggacaggggctaggtaaaataaggctgaaacctcctgggctgcattcccagatggttaaggcattctaagtcacagcatgagacaggaggtcagcacaagatacaggtcataagcaccttgctaataaagtatgttgcagtaaagatgctggctaaaacccaccaaaaccaggatggccatgacagtcacctctggttgtcctcactgctacactcccaccagcaccatgacagtttacaaatgccattgcaacatcaggaagttatcctatatggtctaaaaaaggggggcatgaataatccaccccttgtttagcatatcatcaagaaataaccataaaaatgggcaaccagcagccctcggggctgctctgtctatggagtagccattctttcattcctttactttcctaataaacttgctttcactttatgaactcaccc

SEQ ID NO: 9098 - DNA, 562 bp, Homo sapiens
  MAP TO AL023553.5; EXPRESSED IN LUNG, SIGNAL = 6.9; EXPRESSED IN BONE MARROW, SIGNAL = 5.8; EXPRESSED IN HEART, SIGNAL = 4.3; EXPRESSED IN FETAL LIVER, SIGNAL =   4; EXPRESSED IN ADULT LIVER, SIGNAL = 6.2; EXPRESSED IN HELA, SIGNAL = 3.7; EXPRESSED IN PLACENTA, SIGNAL = 5.3; EXPRESSED IN BRAIN, SIGNAL = 6.6
agtccctgccctctctgtgctgtttacttgtcggcaaagtagtggctgtgacagcatgtgactggggccaattatccattcagacacagctgacacctactttgttctgggaactttaatactgtgacaaagttctctaaaataggcaccttccccaccgtacctcatcgcccagggcaggcaggcagggcaggctagatctcgtaccgatacttgagcacgcctcctcctggtgcagaaagaaacctcttctgtaccgaaatacaagcagcagctgtggcctgggccaccaggtggagcatggggaacactctgggccctgggaggacgaagccagtgccactaggagcagactggctggggacggttgtccacacagactctggccccatctgggtgggcttgcagcaggcgtcctgggccagaggaggggccctggcatctatccaacaccaggacctctctttaggcctaggccaaactcttcagaagtcacgacacacagatgtgggccccggtcacgcctcatgagctgtctctgggaagaaaatctcccggcatc

SEQ ID NO: 9099 - DNA, 591 bp, Homo sapiens
  MAP TO AL079295.1; EXPRESSED IN ADULT LIVER, SIGNAL =  42; EXPRESSED IN FETAL LIVER, SIGNAL =  80; EXPRESSED IN HELA, SIGNAL =  32; EXPRESSED IN BRAIN, SIGNAL =  11; EXPRESSED IN PLACENTA, SIGNAL =  39; EXPRESSED IN BONE MARROW, SIGNAL =  11; EXPRESSED IN LUNG, SIGNAL =  36; EXPRESSED IN HEART, SIGNAL =  20
catcaaaaatcagaaaactgctaagtaatccttagaaaaaggacacagagtgagcagaaagtgaaaattaatgtttattaaaagacaaaccagttgtaactattgatcctacgaaatcttctatttggaacaagcattcaaaatttcaaaatggtaaataattctaaataagtttcaggggctatgacgtccctaatcgtggagagccagtaatattgtaacatgcttttggatgattaaaccatgaggattaaatgcaactgtgagggcatctgtgagaatttaagtattaccatgccctccatgccccgcccccatcagtgtaattcttctccttttacggtcactgtaatttattttaggattgttcagaagaaacagatttttaagagtcaaaatggctatagcatattttgatggtattcttggttaaacatttacctgaactcagttctaacagattaggaggaccactatactcgattatcttcaatttgctggtactgattctatgtgcattacacatgaagaacaagaataaatctattcagtataattaataaaacatttattgaacatctattgcagaca

SEQ ID NO: 9100 - DNA, 553 bp, Homo sapiens
  MAP TO AP000127.1; EXPRESSED IN HEART, SIGNAL = 4.2; EXPRESSED IN ADULT LIVER, SIGNAL = 4.2; EXPRESSED IN BRAIN, SIGNAL = 6.1; EXPRESSED IN PLACENTA, SIGNAL = 6.1; EXPRESSED IN BONE MARROW, SIGNAL = 5.9; EXPRESSED IN LUNG, SIGNAL = 5.1; EXPRESSED IN FETAL LIVER, SIGNAL =  10; EXPRESSED IN HELA, SIGNAL = 6.9
cttcttggtctgatctgcctgtctgggggattaggagtgtaacattaggccagcactatctcaggttggtaattagacttccagtgctgcattttaaattcttctcatacaattctcttatctgattgatgagaagccaagtccgaaacagggagcatctttgccaagcacatcgaacattcttgtgcactacttcgaaactgtctcacttcatttcttactgtagcctctttgcacacacttaagccagtttcatgatggtgcagtcccaaagtgcttccttcactttgaggcaactcacgtgctccttgcttcctgctaggtcttctctgatgccatggcaaggaaagtccatgttaattttctctgcactcacatatgtaccacccagaagtggggtcaagtgtaggcaacagagaatgcaaaccaaaggatgaaaactccccacttttgtcctccaggtagataatacttgatatggttttgtcatgtctccacccaaatctcatcttcaattgtagctcctgtaattcccatgtgttgtgggagacac

SEQ ID NO: 9101 - DNA, 583 bp, Homo sapiens
  MAP TO Z98884.11; EXPRESSED IN FETAL LIVER, SIGNAL =  14; EXPRESSED IN ADULT LIVER, SIGNAL =  14; EXPRESSED IN PLACENTA, SIGNAL = 5.9; EXPRESSED IN BRAIN, SIGNAL =  24; EXPRESSED IN HELA, SIGNAL =  13; EXPRESSED IN BONE MARROW, SIGNAL =  19; EXPRESSED IN LUNG, SIGNAL =  11; EXPRESSED IN HEART, SIGNAL = 8.9
ttgtatacacaaacaaatgcctagctagaggccacacatcatttgaacatcttttaaaagcagataagttaccttcaggccctaattgagaacatttaatttaggctttagaaattattaattactccagactgtatgcacctgaatttccctttcagtgactagatgaatattatataatactcttcaacaagcacattatgtctgcatttgaaatgtgatatggacatatgttttgttacagatgtgggcaatcgggattactgttctggttatcttcatcatcatcatcatcggtgagttacccttttctaaactgattggaaaagtcttctccatgtgttcacagaccattgattttgtgtacaagaactcagattaaaatttccctccgaaatgttagttttggctaggtgcggtgactcatgcctgtaatcccaaagctttgggaggccaggagtttgagaccagcctgggcaacatagcgtctctacaaacaattgttaataattaaccaggcatggtagtgcacacctgtaagtcccagctactcaggaggctgagacaggaggattgcttgagc

SEQ ID NO: 9102 - DNA, 555 bp, Homo sapiens
  MAP TO AL023553.5; EXPRESSED IN HELA, SIGNAL = 2.7; EXPRESSED IN LUNG, SIGNAL = 1.9; EXPRESSED IN HEART, SIGNAL = 2.9; EXPRESSED IN FETAL LIVER, SIGNAL = 2.1; EXPRESSED IN ADULT LIVER, SIGNAL = 2.5
aggaaacagcatccgaagtgaacgcacagacaagacagccttaataaattagtataatactattagaaggggtggcattttgttctgtttcttagcagcattgtctacatgcggcctgacggtctccttccctgggaaatttaaaaagccgtcccctggttgttagctctgatgtaaaattataaaatagaaatctggtagggtttgttttgtttaaaaaggaaaagccctggtgaggcagggcggtcccaggcagtcctgttagctctggccgttgggtctgcccacggagctccctcctggaggctggatctgaatggagtccaggaggggccgaagtgcctgtccaaagggcctgcaaggaaacagagacatgagaggggtgggctctgggatgtggcctgctgtcacacaccctgtgctgcccacgggtagggaggaggagtgggcgctggtggcagcagaagcagcaccagcagagaaggaaagagcacctcgtcacctcacttaagtttcccacctgcctcacacaccagtgttcttggagggcatctc

SEQ ID NO: 9103 - DNA, 549 bp, Homo sapiens
  MAP TO AC004624.6; EXPRESSED IN BONE MARROW, SIGNAL = 1.8; EXPRESSED IN LUNG, SIGNAL = 1.8; EXPRESSED IN HEART, SIGNAL = 1.5; EXPRESSED IN FETAL LIVER, SIGNAL = 1.3; EXPRESSED IN HELA, SIGNAL = 1.8; EXPRESSED IN BRAIN, SIGNAL = 1.9; EXPRESSED IN PLACENTA, SIGNAL = 1.2
ttcaggtcacaaaaacatcaccaaactttgagataaagaccccaaacacttctaatgttaaacattgaaataaatgtgaaaggctcaaacaaatttagatttaagaaagactcaaaaaaacacaagtaagatgattatttacccaattgttccagttcagggtcacaggtggctgaggcctctcccggcagctcagggtgcaaggcctgaacaggacactcacacccacgcgcacactcacgcaggctgggactatgtcgacatgtcaaggatggtgacatggggatatggacccagattcgccggctggtctctaagaccaatcacaagtatccttgcgagagggagacagagagggttgagtctagggatggcagtgtggccgccagtgtgggattgcatgcagctggctccaaagatgaaggcagggccaggagcccaggaatgcagctctagacctggagaagaccaggaattggatttccccttcagcctcggagagggcttggctccactgacagctcgactagctcaggaagactgattccg

SEQ ID NO: 9104 - DNA, 592 bp, Homo sapiens
  MAP TO AP000350.1; EXPRESSED IN ADULT LIVER, SIGNAL =   5; EXPRESSED IN FETAL LIVER, SIGNAL = 6.5; EXPRESSED IN PLACENTA, SIGNAL = 6.6; EXPRESSED IN HELA, SIGNAL = 6.2; EXPRESSED IN BRAIN, SIGNAL = 4.3; EXPRESSED IN BONE MARROW, SIGNAL = 6.1; EXPRESSED IN LUNG, SIGNAL = 9.5; EXPRESSED IN HEART, SIGNAL = 5.5
aaagaggagaaggcagagcctggacccttgggaagaggagttgctagggatgaggtggggcagtggccctgtcctctcttggtcccaacctgggtgggagggatcttgatgttcagacccagacttggataggaagaggcacggggcaattgcagactccctgcagggaggtgtgtaggtgggcaggagagcagggtggtaggactctggcaaagaggcatctggcctggcctctcctctgcctccttagggagctcctaggtggccctcaggcctggcccctgctgctggccagctgcctggtgcccggggcgctccagctcgcctccctgcctctgctccctgaaagcccgcgctacctcctcattgactgtggagacaccgaggcctgcctggcaggtgagtctctgtccttgggctcccagactgcccttgaccaagggatgcatctccccagagtatacgggtccccatttcataggtttcatttatcaaggaaaagctatccctctctttgtgcctcaatttcatgatctgcctatacctgccttcaatcagaactctatcaagtggttgtcctaactgccaggca

SEQ ID NO: 9105 - DNA, 557 bp, Homo sapiens
  MAP TO AL035681.13; EXPRESSED IN HELA, SIGNAL = 1.4; EXPRESSED IN PLACENTA, SIGNAL = 1.9; EXPRESSED IN BRAIN, SIGNAL = 1.7; EXPRESSED IN BONE MARROW, SIGNAL = 1.9; EXPRESSED IN LUNG, SIGNAL = 1.8; EXPRESSED IN HEART, SIGNAL = 1.5; EXPRESSED IN ADULT LIVER, SIGNAL = 1.5; EXPRESSED IN FETAL LIVER, SIGNAL = 1.6
agcagcagcacttcattcaggtagattcaggatatacacaccagtacctcccattcctcctcttattccattagcctttgtgggggcaggggctcacctggttaatgcagtgccccaggttttgaagggcccatcactttgtttgctttgaggtggtcatatcgggtgagtcatgtgctaagttctcttcccagctgtctgtgagatgtgtggtatcgtgggtacaagggaagccttcttctccaagaccaagaggttctgcagcgtctcctgctccaggagctactcctccaactccaagaaagccagtatcttggctaggttacaggtgagaggcaatcacttggatccttcccggtgcctttggtgctgagacaggaaccaccaagtgactgaaggccagggccaggaaagtttgaaaaggtccttgcttgtggccagctggtatttattatgttctcaaacttcagaggacagtagaatccatttgtggagctttttaaattataggttcctgaagctacgctccattacctaccatcatcccccagagtctg

SEQ ID NO: 9106 - DNA, 580 bp, Homo sapiens
  MAP TO AP000350.1; EXPRESSED IN FETAL LIVER, SIGNAL = 3.4; EXPRESSED IN HELA, SIGNAL = 4.1; EXPRESSED IN BRAIN, SIGNAL =   5; EXPRESSED IN PLACENTA, SIGNAL =   5; EXPRESSED IN HEART, SIGNAL = 2.8; EXPRESSED IN LUNG, SIGNAL = 3.8; EXPRESSED IN BONE MARROW, SIGNAL = 7.1; EXPRESSED IN ADULT LIVER, SIGNAL = 4.7
tgagatcagccagtgtcacctgctggccagcgaggaagggcctgtcccccaggaacttgtcctccagccattgcagggcctggtccatggcagtcctgttgcgttccaccttctcctcgggcacctggaccccaatgaggggccccaacacctgatgggggcagagagtgggtcagtctatggccccggcctactgccaactactccctgatggccaatcactctccagatggctctcctcacctggacccacaggggtataccaaaggtgccacggatgcagtcggcatgccagcccaggtactcatgaacacgggcacgagcctgcaggtcagatggataccagtggtccggcgtctggtacttacagctcaggtaaatcaggatggccgagctgggaacaaatgggcagtggctataaggacactggcaccaggcatttacccctaactgctcccatctgccagtggggcccgggggcttctctgcatttgaaggactgccctccagcctcgccctccatctccagctccccaacaccaccccctcctcctacgagtctcctcctgtctttgttgcc

SEQ ID NO: 9107 - DNA, 593 bp, Homo sapiens
  MAP TO Z98884.11; EXPRESSED IN HEART, SIGNAL = 1.4; EXPRESSED IN LUNG, SIGNAL = 1.2; EXPRESSED IN FETAL LIVER, SIGNAL = 1.3; EXPRESSED IN BRAIN, SIGNAL = 1.8
aggggaaaagtcaaactgggaatgcatcacatggaggccaggagaaaagtcatggaaccactaattctgtttttacactcacagtaatctaagccagttctttacacaacctcttactcgttgaataatagcgaaaatttaagctaacatattctttcttttgaaaacaaacatgtttaaacattttagatgtgggtatgtctgtcttggaaattaccaataaaatatttctcccagccttgtttcgccatgggccagtagggtgcgtcaggaccagcactaatatctttaatctcctcagtggaggtgaagacagaaagcaagagaagtgtcactccccattccggatcatcccctatctgattcatgtacatcaccctgcccagccagaattggaatcggaaccttgctgtctcactgtggttgaaaagattcactctggttatgaaggtaagtcagtagataagatgcagaaatgtcagcaatcagataggaacatgggaaagtctgtttacgtcagtcatagaacaacaaaaagagctcttgggtctccaatttgacccttaaactcttcaggcatttgaagctggttt

SEQ ID NO: 9108 - DNA, 557 bp, Homo sapiens
  MAP TO AL079300.11; EXPRESSED IN ADULT LIVER, SIGNAL = 4.1; EXPRESSED IN FETAL LIVER, SIGNAL = 2.3; EXPRESSED IN HELA, SIGNAL = 2.1; EXPRESSED IN PLACENTA, SIGNAL = 2.1; EXPRESSED IN BRAIN, SIGNAL = 1.8; EXPRESSED IN BONE MARROW, SIGNAL = 2.3; EXPRESSED IN LUNG, SIGNAL = 2.1; EXPRESSED IN HEART, SIGNAL = 1.8
agtttatgggctggatggtggcagtcacactttgttcaggagtttctcttaacatctggccgcaagtggtgcctgggctgtccagggtctggcatgcttacgtcagtccctgctgcatgcctggcctctccttctcgctctccttccactgctctgtggatgagagtgcgagggcagtgaggctctcccaacttcttcttaccctgacaacacattgggcttcctgagcagggtctaagcctcatttctttctagatcctcaccccaagcccagtaaaaccctagccatggtcactcaccctgttctgcaaggtccacatgctgacaggcatgacgacctagctgtagagactgccaaggtattgtcatcgggcagtcgctgttctcatttcctgggcaattattccaaaccatcctgacttccctctgatctctccccatcactctcaggaggcaactccacttctgtttcattcaaagtaaaataataatgcctttaacttctgctgtgatgtatatgcattcatctctatttgcccccatattccctctggtct

SEQ ID NO: 9109 - DNA, 551 bp, Homo sapiens
  MAP TO AC007463.3; EXPRESSED IN FETAL LIVER, SIGNAL = 6.6; EXPRESSED IN PLACENTA, SIGNAL = 6.3; EXPRESSED IN BONE MARROW, SIGNAL = 2.8; EXPRESSED IN ADULT LIVER, SIGNAL = 5.4; EXPRESSED IN BRAIN, SIGNAL = 3.6; EXPRESSED IN HELA, SIGNAL =  11; EXPRESSED IN HEART, SIGNAL = 4.1; EXPRESSED IN LUNG, SIGNAL = 4.6
tgagaactgtagagagtgagttgagcatagtttgtgattttgagggcctctaaaagtattaaagcagcagcagccactgcacgcagacataagggctagtcaagtttggacagaaagcctacagggtatggtcctggctcttgtgtaagaattctgaccacgctaaccatgcctaggaaggaaaggagttgtagttttgtagaaggtgctggggtttgagagatcagtcggacacgattggcagggagagcacgtgtgtttttatgagaattatgccaagataggtaacagatgaggaagtaatttgggcttgattgaagtaatgggggctgtctgtgaagctttgcagcagtacagccttggtaatttgctgagcctaatgggtgtcaggtgaaagcaaagagaggctgggacgaggggtgcaggggaatagtgaaaaaaacatctttaagatcaagcacggaatagtgagttgtggaggaaggtattgaggacaaaagagtgtacaggttgggcaccacagggtggataggcaagacaatttggttgat

SEQ ID NO: 9110 - DNA, 566 bp, Homo sapiens
  MAP TO AB016897.1; EXPRESSED IN PLACENTA, SIGNAL =  22; EXPRESSED IN HEART, SIGNAL = 1.3; EXPRESSED IN LUNG, SIGNAL = 1.5; EXPRESSED IN FETAL LIVER, SIGNAL = 1.6
tcactcacttctggttgatggtaaagagagcagatggcttagaaaacatgatacaggaaaatttagtatgtaatccagtaaatatcctaagttatttattttcatgtgtgtgtgtgtgtttaaatcaagtaacccttttaattgaattttaaaatgacagcgaattttgacattctgagaaatggggattttgagatgtttctctccatatctccctttgtcctgtgtgtgtggccgacgccctctggatgaagaggctgtagccgttgagctccctgtgggggcctgtttcatcccgaggggactgcgtgttgctctgtgtggtttgagagaagctgctcttctctgttacttcccttctatgaaggtagaagctttcagtgttacaacttctgatggcggaaaatttagtttttattaataattccttcttggatagtctagtgaactatattaatagaacagtgtactgttcacagaaaagaacttgtagggagttttttgtagtgatatgctctattaggatacagaacaatctaagagtaagcttgatagacatgatgtga

SEQ ID NO: 9111 - DNA, 573 bp, Homo sapiens
  MAP TO AP000053.1; EXPRESSED IN HEART, SIGNAL = 2.6; EXPRESSED IN BONE MARROW, SIGNAL = 2.6; EXPRESSED IN LUNG, SIGNAL =   3; EXPRESSED IN FETAL LIVER, SIGNAL = 3.6; EXPRESSED IN ADULT LIVER, SIGNAL = 3.1; EXPRESSED IN PLACENTA, SIGNAL = 3.7; EXPRESSED IN HELA, SIGNAL = 2.3; EXPRESSED IN BRAIN, SIGNAL = 1.6
agcctgagacaagcagcaacttctctcattcctcctctctatgacaagacaggaactgggacactcaccttactaccctaattcgctgagcctcggaagaaaagcagcttagatttttaatcccatccaagatggaggccctcctgctcctgctgccttgttctcaccccctttcgtgatgtgcgaggccatcggaaggtgtggaatttctccactgattcctctcattgtccctttctccctactcctggggaggctgcaatggtgacctcatccaccttcagaggcaggtgctggaggaggaaaggatgtgggagttcaagccggctgcagaggcccaagagcccagatggtgtccttccagcaaactggagaggcactcctcctaccaggcagccactgccccactccagggcccctggctcagctagggaagtggggctgggtttcaccccctgctcatcccctaaggcccagtgctggactcagtgcagcacctgcccagccatctctagcagcggcataaagcataaaatcaaggccaatgttacgtgctgccttgacatgtggtaa

SEQ ID NO: 9112 - DNA, 571 bp, Homo sapiens
  MAP TO AP000350.1; EXPRESSED IN PLACENTA, SIGNAL = 6.2; EXPRESSED IN HELA, SIGNAL =   8; EXPRESSED IN BONE MARROW, SIGNAL = 3.4; EXPRESSED IN LUNG, SIGNAL = 6.8; EXPRESSED IN HEART, SIGNAL = 4.1; EXPRESSED IN ADULT LIVER, SIGNAL = 6.3; EXPRESSED IN FETAL LIVER, SIGNAL =   7; EXPRESSED IN BRAIN, SIGNAL =   3
tccgtgctgaggaggattagtataagaggaaggcatgcctcttcgcagttgagacaagaggaaggcatctgtctcctgcccgtccctgggcaatggaatgtctcagtataaaacccgattgtatattccatttactgagatggggaaaaccgccttagggctggaggtgggacatgcgggcaacaatactgctctgtaaggcattgagatgtttatgtatatgcacatcaaagcacagcacttaattctttaccttgtctatgatgcagagacctttgttcacgtgtttatctgctgaccttctctccactattatcctatgaccctgccacatccccctctctgagaaacacccaaaaatgatcaataaatactaagggaactcagaggctggcgggatcctccatatgctgaacgctggtcccctgggtccccttatttctttctctatactttgtctctgtgtctttttcttttccaagtctctcgttccacctaacgagaaacacccacaggtgtggaggggcaacccaccccttcaggctgcatcagcaactcagttatccaggcg

SEQ ID NO: 9113 - DNA, 546 bp, Homo sapiens
  MAP TO AC004032.7; EXPRESSED IN FETAL LIVER, SIGNAL =   9; EXPRESSED IN PLACENTA, SIGNAL = 4.9; EXPRESSED IN BRAIN, SIGNAL = 9.4; EXPRESSED IN HELA, SIGNAL = 4.2; EXPRESSED IN HEART, SIGNAL = 4.5; EXPRESSED IN BONE MARROW, SIGNAL =  12; EXPRESSED IN LUNG, SIGNAL = 8.6; EXPRESSED IN ADULT LIVER, SIGNAL = 8.7
gatcatggagtcactcagcgcccagcactggcagacatcacaggacccagtgagtgctgttctgttttccacttgattgtcagcctcccccatcagactgtggccatgtggagaagggcaggtttggtctgttcaccccccgaccctgcacacaccaggccctcagttgggtccagtgtactgactgtgaagcgcccttcatccccatttgacagacgagaagactgaggctctaaggggcaggagctacccaggggtcacccacggccatgtcaccagctctggtggtgtggctctctcctctcagcccaggattcccagctgctcaggccagggtggaatcccaaatgccctgtatctgggcagctcctgtctgcagagccacagtttcctcatctgcaacttgggggtggtgattcctgctgagcccggctaagagcagcatgggagacctcacgagagactggcaataccatgtgcatgttggggggtcagtcccagaggctggggcaacatcatctcaaaacagataaccctgtgtgtgcc

SEQ ID NO: 9114 - DNA, 576 bp, Homo sapiens
  MAP TO AL022238.1; EXPRESSED IN HEART, SIGNAL = 2.5
ctttttattgtagaaaattggaaagtctaagaagaaaatttaaaaactgttgtaatctcactgctccaagataatcattgttaacccttgagtgtatttttcctgttatatatttttcacagaaaagtttgacaactcttgctttagattcatcaagattcttttcacagaaaaacagttttattttgataaattctgaagattccttttcttttctttcttttttatttttttggctaggtttctgcctcaatgctcaagcagtttcccaacagtggcctgagtccaggtcttttcaatgtggggccccagttatctcctcaacaaattgccatgctgagccagcttccacaaattccccagtttcagttggtaagtagaagattttcttcctgtggctaaaaaggtcatttgctttttttttttctttagctttgatttgcttcccacatctttgccactttctatgttcaaagggtgctagtccacacttctttgcaaactatggagtgtgcttaagggttgtcagctcaactggaggaaaatgtaaccaagagaccgggaatttggtgttac

SEQ ID NO: 9115 - DNA, 574 bp, Homo sapiens
  MAP TO AB016897.1; EXPRESSED IN LUNG, SIGNAL = 2.4; EXPRESSED IN ADULT LIVER, SIGNAL = 2.1; EXPRESSED IN FETAL LIVER, SIGNAL = 1.7; EXPRESSED IN PLACENTA, SIGNAL = 1.3; EXPRESSED IN BRAIN, SIGNAL = 2.1; EXPRESSED IN HELA, SIGNAL = 2.1; EXPRESSED IN HEART, SIGNAL =   2; EXPRESSED IN BONE MARROW, SIGNAL = 2.1
  unsure 200
caacttctcatttcccgctcctgcttcatctcttggaatagtgtttggcacattatagtatctgcttctactatcgtcttcccaactggaacacgagccccgcggggctggggacaaggtcttaccttgcatcccaataaatgagcatttcatttaaattgtgtttaaaatcgtggcttgctggatgatggctgaaccgngtcagctggtgtcggtggtagatacattgtggtaaaagctttttccttcctcccgaccccacctccaatccttgcagtttactgttacacaccctagacttgacttgggaagtaaacagcgccagcttaaggaagcacgtggcctattgataaaggattgggctgaatgtttagagccaaatgcacccttcggttaaagtgctgaaggattcaatgcgcaccttcgggtgcttagcacagagctgctgagaaggaataaagtagggtcggattaggaataaaaagtttaaagtatgatcctttccccacgcggcttacacacaggctgtgggtatcggtcatcaccgcaaagcagccagagtcccacagagtgt

SEQ ID NO: 9116 - DNA, 566 bp, Homo sapiens
  MAP TO AC007564.9; EXPRESSED IN HEART, SIGNAL = 1.7; EXPRESSED IN LUNG, SIGNAL = 2.7; EXPRESSED IN BONE MARROW, SIGNAL = 2.5; EXPRESSED IN FETAL LIVER, SIGNAL = 3.8; EXPRESSED IN ADULT LIVER, SIGNAL = 6.8; EXPRESSED IN HELA, SIGNAL = 2.2; EXPRESSED IN PLACENTA, SIGNAL =   5; EXPRESSED IN BRAIN, SIGNAL = 2.7
tcagcattttaggcaaagccattcaacaagtctctagggagttccaaactttccacatttttctgtcttcttctgagccctccaaactgttccaacctctgcctattacccagttccaaagtcgcttccacatttttgagtatcttttcagcaacaccccactctacttgtaccaatttattttattagtgtgttttcatgctgcttacaaagagatacccgagactgggaagaaaaagaggtttaattggacttacagttccacatggctggggaggcctcagaatcatggcaggaggagaaaggcacttcttatgtggcagtagcaagagaaaaagagaaagatgcaaaagcagaaacccctgataaacccatcagatctcgtgagacttgttcactatcatgagaatagcacgggaaagaccggccctcatgactaaattacctccccactgggtccctcccacaacacatgggaattctgagagttataattcaagttgagacttgtgtggggacacagccaaaccccataaaaaagcatagagaatgaacagaaaacattc

SEQ ID NO: 9117 - DNA, 568 bp, Homo sapiens
  MAP TO AL008582.11; EXPRESSED IN HELA, SIGNAL = 3.4; EXPRESSED IN HEART, SIGNAL = 3.7; EXPRESSED IN ADULT LIVER, SIGNAL = 2.5; EXPRESSED IN PLACENTA, SIGNAL = 2.3; EXPRESSED IN BONE MARROW, SIGNAL = 2.8; EXPRESSED IN LUNG, SIGNAL = 3.6; EXPRESSED IN FETAL LIVER, SIGNAL =   2; EXPRESSED IN BRAIN, SIGNAL =   3
ttccacagtctgcaaaccagttccttctgcagtgttttcctctgggagtgtcttgggctaagccacagcggtgtcaccccaccacacacactgccctgcaaaaggactgccaatacccccagcccattccccagcctcacatataaataaggacttgcgacccagaatcacatccagaagggaagtttcacatggcttggaatcctttaaaaaaggacagcaaaccaaatacacacacacacacccctccctacccacaacatccagcctggggaagaaggggctgcatgagggaaagaaagcccatacacatcaatggccagggccatgatgatggtctgggcctagagggaatggtggggtggggccataggacagagatgaaaggagtttcactagacgaagtgctaatctccctgtagtcacagacatcagctccagggggagggtgtcaagtggccagccagcaactccctgtggcccagcctgaaagggagtggggactggggtcagacctattcaggtggcagggcccgagaaggcctgctgaggttggatggctttgagt

SEQ ID NO: 9118 - DNA, 570 bp, Homo sapiens
  MAP TO AP000053.1; EXPRESSED IN HELA, SIGNAL = 2.8; EXPRESSED IN PLACENTA, SIGNAL = 2.4; EXPRESSED IN BRAIN, SIGNAL = 4.8; EXPRESSED IN BONE MARROW, SIGNAL =   4; EXPRESSED IN HEART, SIGNAL = 2.3; EXPRESSED IN LUNG, SIGNAL =   3; EXPRESSED IN FETAL LIVER, SIGNAL = 3.6; EXPRESSED IN ADULT LIVER, SIGNAL = 4.4
gatggcagacaggaaccaagtacttgcttaaagtcaggaactagggtggggccccgaaagaaagacagtgcctcactgctgcctagggaccaaggttttagaaaaataaggttgaggggccaagatggccgattagctgctgctgcagtccgcggctctcatggagaggaatgaaaacagccagtgaattcagcaccttcaactaaaatatccagattctcggccccactcggactagtcagacaactagacctatggagaatgaagaaaagcaggctgggaaaatggtccacccgagagcggcacggagccaaaggaagccccaccccagcaaagggaagaggtgagtgagtgtgcgacaccacccggaaaaccatgcttctcccatggatcttcgcaacccgcagatcgggagatcccttcatgagcccatgccaccggggccttgggtccgacacacagagctgtgcagagtcgtggcagagcggccactcaggcacacacaaagacccaggaattttacatactccagcccaaggaatcccagcaaggcaggagatccattcatct

SEQ ID NO: 9119 - DNA, 593 bp, Homo sapiens
  MAP TO AC004032.7; EXPRESSED IN HEART, SIGNAL = 1.6; EXPRESSED IN BONE MARROW, SIGNAL = 1.8; EXPRESSED IN LUNG, SIGNAL = 1.6; EXPRESSED IN FETAL LIVER, SIGNAL =   2; EXPRESSED IN BRAIN, SIGNAL = 1.7; EXPRESSED IN PLACENTA, SIGNAL = 1.8; EXPRESSED IN HELA, SIGNAL = 1.6
gggtcttgctaggagggaagccttagtggccaccttacaggatcaccaggggaaaggtcactcccttttcccacccccatcatccctcttttatggaaggatctgggcctcaagggaccagctcctctgcaggaattggccacaggcacgtctgggtcctgacctacccagggcccatctgggtcttcatccccttgagcctgcctcggccactaactcaacagaaacgggtcctgactgctaacagacccacaatgcggtcatccagtctcaggctgggtcctccggatctacctcccccatgcatgtgcagcgatgtgggagccccgagccccacagggaaagcttgggcaagaaccttctgtcctttgtgacggccgacaccagccgccaagtaattcatacaccctcagcctagcccaggtgatgttgttataaatgaattccacatttataaattattttccactcgcgaaccccaagagtcagtaaacgacacttcaactcatgttgacgcatttctccctgccccatccgtccctctgccatgcccctatcctgagaaaatacgccgcaccccaatttccatctag

SEQ ID NO: 9120 - DNA, 587 bp, Homo sapiens
  MAP TO Z83844.5; EXPRESSED IN ADULT LIVER, SIGNAL = 2.7; EXPRESSED IN FETAL LIVER, SIGNAL = 4.9; EXPRESSED IN HELA, SIGNAL =   4; EXPRESSED IN BRAIN, SIGNAL = 4.9; EXPRESSED IN PLACENTA, SIGNAL =   7; EXPRESSED IN LUNG, SIGNAL = 3.5; EXPRESSED IN BONE MARROW, SIGNAL = 4.4; EXPRESSED IN HEART, SIGNAL = 3.7
aatttcaggttgtgccttggttagaggagctgtgttgggtcctaaacactaggaccacaaaggggagtgaactgtgttcccagggcttgctgacgcccgtggactatggagtcaggatgacaggacagtgcggtgaggggcatctgcgacaggactgcgggctctacccgccctgatgtgggagctcctggagtgggggtgagcagtgagccagggtctgcagggctgtcctctctccacagccaacagccaggccttacagtggggcaggcttagtgactgtgcctcagttatgctgtacctgggagtgggcaggccctctcccatgtcaccatcaaaacccactgatgaaggctggtgggagtctgagggctgcacccgggtatggtgagttcccctcagggattgtgctgagcgccttggcctggcttcttggctccgcccacctgctctccctgccaccaagttgtcttccccgggtggcatgtgccacttggctgcctcgtgcctgggcacagtggtgcctattatgggccctccaggtggctctggtgctcagcctgctgtgagcaggaacagctgagtcc

SEQ ID NO: 9121 - DNA, 593 bp, Homo sapiens
  MAP TO Z82188.2; EXPRESSED IN LUNG, SIGNAL = 3.3; EXPRESSED IN FETAL LIVER, SIGNAL =   6; EXPRESSED IN ADULT LIVER, SIGNAL = 5.4; EXPRESSED IN PLACENTA, SIGNAL = 7.1; EXPRESSED IN HELA, SIGNAL = 2.4; EXPRESSED IN BRAIN, SIGNAL = 1.7; EXPRESSED IN BONE MARROW, SIGNAL = 2.6; EXPRESSED IN HEART, SIGNAL = 3.4
acacagaacgcagaatcgcttgcatgcctccccctcctcccagggtttgccccctccctgccctgcatgtggcatccttcctttgccttcttatcccgcggactcatcatccttcaggccccgggttcacatcctccgtgaagcctcccaggcctttacccttgctttctgatggggttaggtacctgccagaggccttccttctctccccaactaaagtgggtgctccccaagggcaggaactgaatcccattcattctgcatttctttatgctgcctggtatgtgcctggagcataggaggtgcttagtcattgtgatgtggatagaagggtggttaatgggtgaatggaaaatggactgatggatgaacagaagaaggatgaatggggggatcatggagggaatgatggagggagagaaggaatgatgggggagaaggaaggaaggatgggggagaaggaaggaagaatggatggatggatggatggatggatggatggatggatggatgaagggatgaacagacagacggatggacagacagtggatgtggatggacagaataataagactctttcaggaaggccagaa

SEQ ID NO: 9122 - DNA, 567 bp, Homo sapiens
  MAP TO AL035681.13; EXPRESSED IN HEART, SIGNAL = 2.9; EXPRESSED IN ADULT LIVER, SIGNAL = 4.5; EXPRESSED IN FETAL LIVER, SIGNAL = 5.9; EXPRESSED IN HELA, SIGNAL = 4.4; EXPRESSED IN BRAIN, SIGNAL = 6.8; EXPRESSED IN PLACENTA, SIGNAL = 4.3; EXPRESSED IN BONE MARROW, SIGNAL =   8; EXPRESSED IN LUNG, SIGNAL = 4.8
tatgggagtgaaggagggtgtcgtgggcagcgctgtgagaggggctgctgggggtgggggacctacctctgcaggtcccacagggcccttggggtccaggctcctggagtggctgctgcgcaggctcctagtctgactcgtcctctctgctctgcagctctggtcttgggcttcgactgggggaagttcctgaaggatcacagttacaaggctgctcccgtcagctgtttcaagcacgtgagtgccctggagctgagggagggaggccggggagccgggcctggagctgctcctccacctgcttcaccagggcggcttcaggctggacagtgacagtggggaggtctgggcaggagacggatggcgttaccactcgctccatttcatgtttatgtcaaaaaaatcctcctacaaacacttctatcacctgcttggcttcactcccggtctgaagcccttcagtttatttacatgatggaacttggtgctagctgatgtcgaagggtctttgcagtctgaaacccttctctcctttctcccccatttgcagcattttcccatggaaag

SEQ ID NO: 9123 - DNA, 582 bp, Homo sapiens
  MAP TO AP000352.2; EXPRESSED IN PLACENTA, SIGNAL = 1.5; EXPRESSED IN LUNG, SIGNAL = 1.2; EXPRESSED IN HEART, SIGNAL = 1.6; EXPRESSED IN BONE MARROW, SIGNAL = 2.1; EXPRESSED IN FETAL LIVER, SIGNAL = 1.5; EXPRESSED IN BRAIN, SIGNAL = 2.6; EXPRESSED IN HELA, SIGNAL = 1.2
ctccccaacatatccaaagcatggacagggccaggagcaaggccagcagggagagagccttccaggtgacatggcagcattgctccccaccccgtcccatctcctgttcacctgtggtgaagggttgtgcagtctgacccccagagctcatcatgcctctatgggtgttggaccatccagtgatcccaggctctgaatgtgaatccagctccaccaaggaggcactatgtggcctcggtaaaggacgccaccatgcggccaccaacctggaggctggttttggctttcatttttcccacccacctccaacccttcagcacaccctgcagttagagtttcaagaaaagtcagaaccgaccatcaccccaccaaccctgcaccaccaccaccttggtctggggctccagcgctgcatgccagatgactgcagtggctttctcacccctgccagggggatcctttatgacgtaagtcagatcacagttctcctctgctcaaaatactccagcgactcaatccccctgcggtaagagccaaagccttcccagtgtcccatgctcccctctgtcgtgacctcctgct

SEQ ID NO: 9124 - DNA, 547 bp, Homo sapiens
  MAP TO AC008022.1; EXPRESSED IN LUNG, SIGNAL = 1.3; EXPRESSED IN BONE MARROW, SIGNAL = 1.5; EXPRESSED IN HEART, SIGNAL = 1.7; EXPRESSED IN BRAIN, SIGNAL = 1.5; EXPRESSED IN PLACENTA, SIGNAL = 1.3; EXPRESSED IN HELA, SIGNAL = 1.3
  unsure 53
  unsure 189
  unsure 191
  unsure 307
  unsure 320
  unsure 401
atgtccatctccctcactgggctatgagctctaggagggcagggaccctcctntgtccatgtctacccttgagtccctatgcctggcccactgccttgcctctaacaggagatcaataaatatgtgctgtatcactataggcccagttggctcctaatggttcctggaccctggaagaccacattctangngtgagccagctgcaatggcagccccacatggcaaggaccatgacatggatcttgttactgggtacagtgggagtatagcagaggggaggtggaaagacgtcatagatgaaatggtncattgggctgggnttttgaaggataaatagcagtttgcaaggtggaggagtggtgaacttggtgagaggtaggacttcctgaatgaaaacaaanggcactgtcctactctgtttgtgctgctataataaaatactagagagtaggtaatttataaagaatatttattttccacagttctggaagctgggaagtccaagatcaaggcaccagcagatttggtgtctggtgagggctgctct

SEQ ID NO: 9125 - DNA, 569 bp, Homo sapiens
  MAP TO AP000352.2; EXPRESSED IN BRAIN, SIGNAL = 6.7; EXPRESSED IN PLACENTA, SIGNAL = 4.5; EXPRESSED IN HELA, SIGNAL = 4.4; EXPRESSED IN HEART, SIGNAL = 3.8; EXPRESSED IN LUNG, SIGNAL = 4.1; EXPRESSED IN BONE MARROW, SIGNAL = 9.1; EXPRESSED IN ADULT LIVER, SIGNAL = 5.4; EXPRESSED IN FETAL LIVER, SIGNAL = 9.1
ttagcttctgggcagtgaggaaccatacaaagttccacacagaaggtcagggtcaagtaagcgtttgcccaagctcttttcagaggtcacatggaagctagaatggaatggggtaggagacaaaaggaatgcaggcatgatatctggaggaactgtggaccagagcctttgcagatatgtcttctcttcaaccaaggagacggacagctccatgtctttattctaccaacacagcatcccctcagtggctcagcaagtgtgggacacgcactcacagcaagaaaagctgcattaaggtcttcagattctctttaacagcaggttctactggaggcaggtccttggccttcaggacagctgggagggcctcctggaagaggtcctcccgcactgcagcctccacgtgttgggcaccatgctgccaccgtgggtccgctttcaaagactcagcagccagcactgatgggctaggggaagacagagtcagcggaggggctgggcatagccaagtgtaaggcagcatgacctgctttaggggttctctgattggattttccctcctccaccat

SEQ ID NO: 9126 - DNA, 563 bp, Homo sapiens
  MAP TO AC007463.3; EXPRESSED IN FETAL LIVER, SIGNAL =  13; EXPRESSED IN PLACENTA, SIGNAL = 8.9; EXPRESSED IN BRAIN, SIGNAL = 2.2; EXPRESSED IN HELA, SIGNAL = 4.4; EXPRESSED IN BONE MARROW, SIGNAL = 2.1; EXPRESSED IN HEART, SIGNAL = 4.8; EXPRESSED IN LUNG, SIGNAL = 5.7; EXPRESSED IN ADULT LIVER, SIGNAL = 4.9
ttttgatgagcatgttacttgatgggagaaaaaaaaagtgctttctctgaaaaatggaatgaaattacccacactgagaagaaaaactgccttccctgctgtgggtaaggtaggccagtaaacatgtttccaccttctgccactcctcctcccaggaagacaacaagaaactattttctaccaaactgcatgtattagataaaatttgtttgcccatgagatgaaacactgcatggtggttaaagcagggataaagagttggaccagtggttctcaactggggtggttcagcccccagggatgtttttggttgtcacaaccggggacggggacaagctcctgcagatatccagtgagtagaggccaagaagactgttacataccctacaaggcacagagcagctccctctctctctttttatctctctctctctctctcacgcatacacacacacacacacacacacacatgcacacaccccccaaagaatcatccagcccaaaatgaacagtgctaacttgagaagcctctaggaagataagcctggttcatatcccagctt

SEQ ID NO: 9127 - DNA, 581 bp, Homo sapiens
  MAP TO AC007539.8; EXPRESSED IN HELA, SIGNAL = 5.4; EXPRESSED IN PLACENTA, SIGNAL = 7.9; EXPRESSED IN BRAIN, SIGNAL = 3.9; EXPRESSED IN LUNG, SIGNAL = 4.5; EXPRESSED IN HEART, SIGNAL = 3.1; EXPRESSED IN BONE MARROW, SIGNAL = 6.3; EXPRESSED IN ADULT LIVER, SIGNAL = 7.6; EXPRESSED IN FETAL LIVER, SIGNAL = 5.8
cctgtcaccaccagaatggatacataaattgaggcatattcatacaattaaatactacacagtcatgaaaatgagcaaactaatagctatgtataacatcaagggtgaaaaaaacaagatgaaagaatatacacagtttgattctactcatagagagttcagagacaatactcaactatattgtttaaggatgcatacctctgtgttaaaactatcaaatgagcaagagaatgattatcataaaattctgcacagtggttggatccaaaggagcagcagggatgggagatcatgtatgtgtacgggggagaagggaattcagagctgctggcagtgctggtctgggctatattggtgtttgttttattcattgtgtgtgtgtgtgtgtgtgtgtgtgtgtaaaatggatttttctgcatgttcacaataaaatttaaaaagacacaaaatacatatattaaataggttggtcaggtaagttctcattaagatgacattttatcaaggatctggaggaggtggaggagccagccacatggatattctaggggaaacattctgggcagaggaaacagcaagag

SEQ ID NO: 9128 - DNA, 575 bp, Homo sapiens
  MAP TO AL022319.2; EXPRESSED IN LUNG, SIGNAL =  12; EXPRESSED IN BONE MARROW, SIGNAL = 5.4; EXPRESSED IN HEART, SIGNAL = 9.2; EXPRESSED IN FETAL LIVER, SIGNAL =  31; EXPRESSED IN ADULT LIVER, SIGNAL =  14; EXPRESSED IN PLACENTA, SIGNAL =  16; EXPRESSED IN HELA, SIGNAL = 8.9; EXPRESSED IN BRAIN, SIGNAL = 4.4
tggtggcacttctcctggcgggctgctgagaggagcagagaaggctgcgtgcattgggttcccagctgggagtcctgacacccgtcctctggcctgctgtgtcactgcagagcctgttgtgggaatgttgccagccgcaggaagccagtcctcatccctgggagaagagcttctttgtagtcattagagctctgatggcttcttgatgacatgtttgcacagtgggtggcctgaggactccagtgactgcaggcaaggtgtcatcgatggctttggagatgaaatttctagtcctgctagccctgggtccgtcccatctctggagtgtgcactgtctcctgccaggtaaggctgggctgctcctagagtcccacctgttccagcccaggggaggccgcctgctgctctgactccagtgctattgaccatgtggtccccgcacaggcatagtcctcccccaggccctggagccttggcctgaatgtgctgttgcctgagtaacacggcccctgtcctcagacgcgctgtggccattgtcctcttgtccctgggccgcctttgtgtgtgcctgtgtc

SEQ ID NO: 9129 - DNA, 570 bp, Homo sapiens
  MAP TO Z97055.1; EXPRESSED IN PLACENTA, SIGNAL = 3.6; EXPRESSED IN BRAIN, SIGNAL =  13; EXPRESSED IN HELA, SIGNAL =   7; EXPRESSED IN BONE MARROW, SIGNAL =  16; EXPRESSED IN HEART, SIGNAL = 3.5; EXPRESSED IN LUNG, SIGNAL = 8.2; EXPRESSED IN ADULT LIVER, SIGNAL = 8.2; EXPRESSED IN FETAL LIVER, SIGNAL = 8.3
tggaactgcaatgtggagactgtttgtaatcagacatggagaggctgcacgttctaaaggcgagacagctgctttcggttgggaatcatcacactccctccgctcacgccgctcttcccttcccccgctgtttcacacgctgcttccagagtttgtccagcaaggaataaatgaatgcatacaggacttttggctagtagactgtctgggtattgtgagcatgcaggttgttgtttctgttattataaataaaagtcaaacgtgaggtcacactttcccatcttctgtttatacaccaagtcaaacttctcattcatggagacggtgaagatgtccttccacagcccaactcttcctgaaacgcaaacaagagaactgctggggccacttgctgtccggccagctactgaactaaaggaagccttggaaatggatctggaacattccagatctattcctggatccctttgaacttggcctatgggggcaggaagggccgtctgagctacagaccaggtggtcccctaacatttgtgaaactactggatgcggcagaacatgacctgaacc

SEQ ID NO: 9130 - DNA, 555 bp, Homo sapiens
  MAP TO AC006427.13; EXPRESSED IN PLACENTA, SIGNAL = 1.5; EXPRESSED IN HELA, SIGNAL = 1.4; EXPRESSED IN HEART, SIGNAL = 1.3; EXPRESSED IN BONE MARROW, SIGNAL = 1.6; EXPRESSED IN LUNG, SIGNAL = 1.4; EXPRESSED IN FETAL LIVER, SIGNAL = 1.4; EXPRESSED IN ADULT LIVER, SIGNAL = 1.5
cttcaacatgtggagatggccgagcggaagtgttggcaacctattaatgccctaattcctcatttcacttccaggccattcttccccactctcctcaagtcaaaatgccctatcccacccccacttatggcctactatttagccttggaaacagaaactctatcttgaagttctactcaaacaccacgcatcttcctacctctctcattctgcccgtgccccagcacccacccgtcaggcccttcagttgccgtcctcagcccagttttccatctggcaaacacatctttccagatccatccaaatgccatttccttctaagctgacctggtcatcccaaagcagaattaatctctcctctgaactaccatggcacttcattcggtcttccattgtggtacttagtgtatagcaatgtaattactcgtgggtgggaaattcatcttatttacctttgttactctaaggctttgtaccagtaccggacacataaaatctggtcaacaaatgtatgctgaataagaaatactaaagactgctgattgaaggtaagca

SEQ ID NO: 9131 - DNA, 552 bp, Homo sapiens
  MAP TO AP000129.1; EXPRESSED IN BONE MARROW, SIGNAL = 3.9; EXPRESSED IN LUNG, SIGNAL = 3.8; EXPRESSED IN HEART, SIGNAL = 2.7; EXPRESSED IN FETAL LIVER, SIGNAL = 3.5; EXPRESSED IN ADULT LIVER, SIGNAL = 5.2; EXPRESSED IN HELA, SIGNAL = 4.4; EXPRESSED IN PLACENTA, SIGNAL = 6.7; EXPRESSED IN BRAIN, SIGNAL = 2.4
accaggtgaatggtttgctcatgtcttttgaacgggctgcacagtccctgttccctgaaggagcgtcggcaaaacagccaccagtggagatctattacctcggaagcaccttcccccaacagtcccctctcaggctatccacttacattttgtgtcccaaattggttccttccagtgggttgtctcgctgacttcaagaatgaagctgcagaccctcgcggtgagtgttacagttcttaaagatggtgcatccggagtttgttccttcagatgttcagatgtgtcccgagtttcttcctcccagtgggttcatcctctcgctgacttcaggagtgaagctgcagaccctcacggtgagtgttacagctcttaaaagtagtgctgacccaaagacccaaagagtgagcagcagcaagacttactgacaagagcgaaaatgcaaagcttccacaaggtggaagggaacccgagtgggttgcagccgctggctaggatagccagcttttattcccttatttggccccacccacatcctgctgattggtccatttt

SEQ ID NO: 9132 - DNA, 576 bp, Homo sapiens
  MAP TO AC004832.3; EXPRESSED IN ADULT LIVER, SIGNAL = 1.7; EXPRESSED IN FETAL LIVER, SIGNAL = 2.1; EXPRESSED IN PLACENTA, SIGNAL = 4.5; EXPRESSED IN BRAIN, SIGNAL = 1.8; EXPRESSED IN HELA, SIGNAL =   4; EXPRESSED IN HEART, SIGNAL = 1.5; EXPRESSED IN BONE MARROW, SIGNAL = 2.1; EXPRESSED IN LUNG, SIGNAL = 2.5
agcctgtccctgcaactgctgcagagccacgtagggttacaggtggtggctggctgtgggatccacttcttgtgcatgacacttctaggcatccggctgggtgcggctctggcagtcagcagggcctctgcaccagctggcccagtctgtgctagagggcatggtggctggcaccttcctctataccacctttctggaaatctttccaggagctggcgacttctgagcaaaggatcctcaaggtcattctgctcctagaagggtgtgccctgctcactggcctgctcttcatccatatctagggggctttgaaatagaggccgctgttctccctccctgccccagtgtgtggggaaaaggaaggaatgggaagggaggttctgaggacgaaagctttctctaggagctaaggatggagcctttggcactatctgacccatgagagggaagtgggcaggcaagagagactggtctcagccccaaggaacgagagacggctgagtcactagagacatgatcagggacattagtgttactagaaaggggtcccgatccagaccccaagagagggttctt

SEQ ID NO: 9133 - DNA, 559 bp, Homo sapiens
  MAP TO AP000356.1; EXPRESSED IN BRAIN, SIGNAL = 5.4; EXPRESSED IN ADULT LIVER, SIGNAL = 4.3; EXPRESSED IN HELA, SIGNAL = 3.6; EXPRESSED IN PLACENTA, SIGNAL = 3.5; EXPRESSED IN BONE MARROW, SIGNAL = 4.4; EXPRESSED IN HEART, SIGNAL = 2.8; EXPRESSED IN LUNG, SIGNAL = 4.1; EXPRESSED IN FETAL LIVER, SIGNAL = 4.8
gacccggctctccttctgcagtgcaggcgaaggcctagatgccagtgtgacctcccacaaggcgtggcttccagactccccggccggaagtgatgcttttttgccgcgggccctgggtttgaagcagcctggctttctcttggtaagtggctggtgtcttagcagctgcaatctgagctcagccacctacacaccaccgtggccgacactttcattaaaaagtttcctgagacgacttgcgtgcatgttgacttcatgatcagcgccgctgggaagaaccccagagccggtggggtggggctggaagcagcaggtgcagtgatagggctgggtgcccaggaggcctcagtgctcaatcaggccaaggtggccaagcccaggctgcagggaaggccggcctggggggtgtgggtgagcacaggcaggcaccagctgggcagtgttaggatgctggagcagcatccgtaactccactgagtggggtagtctggttggggcagggaccgctgttgctttggcagagagagaggatccccactggggagaggctgttctgact

SEQ ID NO: 9134 - DNA, 566 bp, Homo sapiens
  MAP TO AC004832.3; EXPRESSED IN LUNG, SIGNAL =   3; EXPRESSED IN FETAL LIVER, SIGNAL = 3.8; EXPRESSED IN BRAIN, SIGNAL = 3.6; EXPRESSED IN HELA, SIGNAL = 3.2; EXPRESSED IN BONE MARROW, SIGNAL = 3.3; EXPRESSED IN HEART, SIGNAL = 3.2; EXPRESSED IN ADULT LIVER, SIGNAL = 3.5; EXPRESSED IN PLACENTA, SIGNAL = 4.2
gttacaatagctgcccccagctgccctgaactttgacctgctctcctcgcaaacctggggcctgtggtgccccagaagttctcagtaaaggctctcatgttagcttctgcttgtaggatggtctgagggttagctggagagatgactgagaggaactggccctatcatgggaatatgggaatctccccatccttggacacccagtcctgctaacctaaccctgaccagaactgtttccctgttacagccagaagcttcgacctgcagaagtcggaggccatgctccggaaggtgagacacatttggctgttgcttcagttcctccccatcagaatcactccttgcgtggacttcttttgccgcacctcccatcccaatcacagcttttggctttgagtattagccgaccactgttgccttatccctctgggacaaattgcattcccttccctggcaacacaggctttcatagctctgggccagccaagaatgataatctgttctgctaagacctctaaaacaggcagggccttcttttccattcctgcctaatgccttctggtgac

SEQ ID NO: 9135 - DNA, 583 bp, Homo sapiens
  MAP TO Z83844.5; EXPRESSED IN HELA, SIGNAL = 2.1; EXPRESSED IN BRAIN, SIGNAL = 2.8; EXPRESSED IN PLACENTA, SIGNAL = 1.2; EXPRESSED IN BONE MARROW, SIGNAL = 3.4; EXPRESSED IN LUNG, SIGNAL =   2; EXPRESSED IN HEART, SIGNAL = 2.9
cggggacttgactctgtaggacgaggaatccctggagggcttgaggcaggagcgacaaggtgaggtttgtgaatgaggagccgtggggtgggggtgggagcaggagcaggtgcagactggaggtgctgggacccaggaggaggtggtgtacctgcccctgagccttctcctctggaggctggggaagggccgctgtccagaggaacggggcagcctgtgacaccctggcgtccggcccacaggaggcatgtgagcgcagcctggcagagatggagtcctcgcaccagcaggtgatggaggagctgcagcggcaccacgagcgggagctgcagcgcctgcagcaggagaaggagtggctcctggctgaggagacggcagccacggcctcaggtatggaccctggggggggcacagtgggctgggctctgagcctctgtgctgaggttcctcctagccaaactggggaggattttatcaaataagatgtaggggtctcagtgccacatttggggtaaagggtcagcaggtgttagaagctccaagaactggcctgtagccctacttaaaaagggaaactgaggca

SEQ ID NO: 9136 - DNA, 552 bp, Homo sapiens
  MAP TO AC004624.6; EXPRESSED IN HELA, SIGNAL = 2.5; EXPRESSED IN HEART, SIGNAL =   2; EXPRESSED IN BONE MARROW, SIGNAL = 2.8; EXPRESSED IN LUNG, SIGNAL =   2; EXPRESSED IN FETAL LIVER, SIGNAL = 1.7; EXPRESSED IN ADULT LIVER, SIGNAL = 1.6; EXPRESSED IN BRAIN, SIGNAL = 1.7
ggtttctagctttcaggagcctctcaaaggggccaatggccaaaagaaggttgagaacaactgaagaagaaagacaaactggggtgctctgggatgtcgtcatttgttcgtccaacaaaaagtgatgggacacctgctgtgtggtaatctctatgctaagcacgggggcaggggggcggggggcagagggacggatgccctgcttgccctcctcacgttacagagggtgacataggaatcatcaaacaaatgcaagtcccaggtgctgctgtaaaggaggaggggtaacagtggaggcgcggacagcaagagttggtgtcagggtgtcagaggaggagccttcagccagtgcaaaagccctggagagagagggagggagcaggagaagccggtgtgaagaaaacagagaagcaaagagtgatgtggcaggagatgaacctgtgacggttggcagcatggcagatgttggcatggagagaagtgggggggcggggactccagacatggtaaggactcaaaaatgattttgcaaggggaaaggaaggaagaaaa

SEQ ID NO: 9137 - DNA, 546 bp, Homo sapiens
  MAP TO AP000353.1; EXPRESSED IN PLACENTA, SIGNAL = 1.4; EXPRESSED IN BRAIN, SIGNAL = 1.6; EXPRESSED IN HELA, SIGNAL = 1.6; EXPRESSED IN BONE MARROW, SIGNAL = 1.7; EXPRESSED IN LUNG, SIGNAL = 1.9; EXPRESSED IN HEART, SIGNAL = 1.7; EXPRESSED IN FETAL LIVER, SIGNAL = 1.3
tggggagtagactgtggtggtgccagcagcaaaaagatggaaaagagagaaggaggtggagtcagggctgaaccacacagctggagggaagaggggggttctacgagtagcgcaggagggaggcgaggcaggcaccgcagagcttccagctgcctcagggccgacttccatttggcactttgagtccaaggtgcctgtgcaccttgtccagatgctctggaggtggttgctcgggtatgtgggtctgagactccaaacagctcggccaaagccgacatggagatccatcagttcacaagtagtgaatgagccttctcaggtgggtggcagtcccagggtggccaagggtccagggagtgcaccctcactctgcaggtgagtcagaatcaggcaccacagagccagggttgcacccctgctggggggaacaggagccccttttcctctccccgacacacagggacaaagttatcatgctctttgggtgccactgggaggcactgatgggagagactggccaggccttcccaagcaagctccaggcag

SEQ ID NO: 9138 - DNA, 581 bp, Homo sapiens
  MAP TO Z82201.1; EXPRESSED IN BONE MARROW, SIGNAL = 1.9; EXPRESSED IN LUNG, SIGNAL =   3; EXPRESSED IN HEART, SIGNAL = 2.8; EXPRESSED IN FETAL LIVER, SIGNAL = 6.8; EXPRESSED IN ADULT LIVER, SIGNAL = 2.1; EXPRESSED IN BRAIN, SIGNAL = 1.5; EXPRESSED IN PLACENTA, SIGNAL = 4.2; EXPRESSED IN HELA, SIGNAL = 3.3
gttcagggatgggttttcagaaacgtcaattaccatccttttttaagattcagaaactaaaagttaaaatcaaagtgcttaaacacttgaccctcacttaaaatgattgagttgaaaactgtaaagtcgttaatttatttaaaccatatttcacttgcatctcttattaggaatactgaaatttcccaacataaagagaaaaccaaacaggaagttgttacaaaactcaccctacagttctcttcaatcagatcaataaacatgctggtgttgaccactccagtgtccccagggtcaagcatttgcattagttctttgaattctgaatcgcttagttttacagccatgcaatttagaatatatcgaaattcttctcttgttatcggtccatcgggtttctgagcatcagagtgtatataagggaatttttgaaaaaaaaaaaaaaaggaagaaaaagtgttatgtatgtttagcatcatttaataaagagcgagctttggccaaatagaattatgattggaaatgcaaatacatcgactgatgatccttacataacatgagcactgtgtgtgtgtgtgtgt

SEQ ID NO: 9139 - DNA, 572 bp, Homo sapiens
  MAP TO AC007463.3; EXPRESSED IN LUNG, SIGNAL = 1.4; EXPRESSED IN BONE MARROW, SIGNAL = 1.5; EXPRESSED IN HEART, SIGNAL = 1.5; EXPRESSED IN FETAL LIVER, SIGNAL = 1.9; EXPRESSED IN BRAIN, SIGNAL =   2; EXPRESSED IN HELA, SIGNAL = 1.5; EXPRESSED IN PLACENTA, SIGNAL = 1.5
ttagcacacacgagccactcaacacaaagctcttgccatccattgggcataatcagtaggttacgcaaacgtggttattgtcatttccactcaaactagaacatacgtgtggaagaagatgactttggagtttgataagaggttctgtggagacttgcccaggagatgtcaagcaaggcaatggcctcctgagggaggagcacacaccgcagtcagcctcggggccaccagcccagctggggcctctgctcaagtagttttctctcttacagctttgggaccctcctctggaagaaaaacgagtgactgaaaatgagtgaaggctttccccagtgctgttcccaacagcatccaatgtgtagacccctacatgcaaagagaccccaatgccttctcagttccacatgctgtcgatgcctcagatcgtcctggttgctgtctatactcaccttgttgactacccaaagatatggacctgctgaattcttgacctccataaagtcaatggtcttcaccccatccgcattttggccatcttttccctggccacctctcagacctttgcaccatcc

SEQ ID NO: 9140 - DNA, 569 bp, Homo sapiens
  MAP TO AL031588.1; EXPRESSED IN PLACENTA, SIGNAL = 1.6; EXPRESSED IN BONE MARROW, SIGNAL = 2.5; EXPRESSED IN LUNG, SIGNAL = 2.4; EXPRESSED IN HEART, SIGNAL =   3; EXPRESSED IN FETAL LIVER, SIGNAL = 2.4; EXPRESSED IN ADULT LIVER, SIGNAL = 1.7; EXPRESSED IN BRAIN, SIGNAL = 2.9; EXPRESSED IN HELA, SIGNAL = 2.4
agaggctgtgctgaacacggcaagcagcatccccggcctgacccacagatgcagcagcacccgcgtccttgcttttccacccaagctgtgacaaccaaaaatgcctctagacactggcaaggtcccctgaaggtggggtgagcttgccgccactgagcggccctgctttgaggccagggtcacagtggtaaggtccccactgtggtggaaggcttggtttgatcctggcttggccatctgcacctgcctgacaacaactcactggatcctaccatggtgggcaccatccttggcactgaggccatgccctctccaccggatgagccacccaagctctgggcgtcgctgtcctctttcataaaattggagaaactgtatctgtgtatcggggttcagggatgattaagagaccagcatacaactcagcctaatgaataccttaaaactctcctgccaccatggccagtcccaggaaaggcaggggaccaaggacaggaacagagttagtcacagcctccaggaagccacggctgctggaggccttctcaagccctggtctggaagcactg

SEQ ID NO: 9141 - DNA, 570 bp, Homo sapiens
  MAP TO AC007539.8; EXPRESSED IN ADULT LIVER, SIGNAL = 5.3; EXPRESSED IN FETAL LIVER, SIGNAL = 5.3; EXPRESSED IN PLACENTA, SIGNAL = 3.9; EXPRESSED IN LUNG, SIGNAL = 2.7; EXPRESSED IN BONE MARROW, SIGNAL = 6.8; EXPRESSED IN BRAIN, SIGNAL = 5.3; EXPRESSED IN HELA, SIGNAL =   4; EXPRESSED IN HEART, SIGNAL = 2.3
tctagggagcagtagggcagagaatcatggaatatcagaaaaatctgttgaaagttgtccacagccagcagcaaactagcggcttgaggaactattcagcagacacttatgtagcacttaagtatgcaccagacacggttctgagtggttttacaagtgccaactcacttcatcttcataccaggtcttgacagagttagttactatccctgtttctctaatgaggaaactggaccacagagaggttagggactaagggctcacaaacggtaagtggcatcatcagcactgaattcaggccatctctgacccagggccatgctctcagccctgccaccaatgctgcctcccacatgaaaattaatgctagttaaaaaacaaacaaacaaacaaacaaacaaaacaaagaaaaccagaaacctactcctttgctccactgcaaacttccagaattaaattctttccaggggcaaaattttgaaatcgatattctgatgaatagccagattttagaactactctcaggctaccctcttcattttatacatggggaaactgaggccgagaggg

SEQ ID NO: 9142 - DNA, 556 bp, Homo sapiens
  MAP TO AL022319.2; EXPRESSED IN HELA, SIGNAL = 1.5; EXPRESSED IN PLACENTA, SIGNAL = 1.8; EXPRESSED IN BRAIN, SIGNAL = 1.8; EXPRESSED IN BONE MARROW, SIGNAL =   2; EXPRESSED IN LUNG, SIGNAL = 1.9; EXPRESSED IN HEART, SIGNAL = 1.7; EXPRESSED IN FETAL LIVER, SIGNAL = 2.2; EXPRESSED IN ADULT LIVER, SIGNAL =   2
ttcctaatgttcctgctgggccctggccctgcttggccccaactccttgtcccctcagctctgctttcgccgtctccaggacatgggatgctaacagaggccgtgggtgaggaggagctcctgagccaggaaggtggctggcttcaccgtcaccggcctggtcctctgcggaacagacctcagaagcggaccctcttgaaggcatgtttggaataggccgattccttttggggtggatgctaattcctcccagttttgctggggagggcctggcaggcaaacttccatgcctcctttgacccagagctgttctccacccactagccagtcaggggaaagatcacctgtaggtctccaccttcctacagcaggcctacatcttcctgcctatttcccaacacctccctgcagaatcacagaaatggcagagttggaagggcccacagagggtctgagcccacccctcacaggccctcatgtacagcagggtcccttcgctcatgccaagccagggccagcgtctaggtctttggactcccagctaaaagacagaggc

SEQ ID NO: 9143 - DNA, 585 bp, Homo sapiens
  MAP TO AC007841.1; EXPRESSED IN PLACENTA, SIGNAL = 1.6; EXPRESSED IN HELA, SIGNAL = 1.5; EXPRESSED IN HEART, SIGNAL = 1.5; EXPRESSED IN LUNG, SIGNAL =   2; EXPRESSED IN BONE MARROW, SIGNAL = 1.5; EXPRESSED IN ADULT LIVER, SIGNAL = 1.7; EXPRESSED IN FETAL LIVER, SIGNAL = 1.9
tgcattgttgggtacagtggccagtggctacacctggcttttgagcccttgcacagtggcaaggacacattgagatgtgccctaggtgcaagatacacacaggatttcaaagactgagtatgaaaaaagaagaaaaaatgtctcattaatatttttatattggttgcatgtggaagtgataacattttggatataaagttgacctttgaacagtatgggtttgaactgcacaggtctgcttataagtgaaatttcttctgcctctgccacccctgagacagcaagaccaaccctccacttcctcctcctcctcctcctcctcaacctgctcaacgtgaagatgatgaagatcaagaccttcatgatgatctacttccacttaatgaatagtaaatatattttctcttccttgtgattttcttaataacgttttctttcctctagcttattttgttgtaaggatacagtggtatataatatttataacatacaaaatatgtgttaaccaactctgctatcagtaaggcttctgatcaacagtatgctaacatttttggacagtagttaagtttgggcagagtcaaa

SEQ ID NO: 9144 - DNA, 552 bp, Homo sapiens
  MAP TO AL031588.1; EXPRESSED IN HEART, SIGNAL = 2.5; EXPRESSED IN FETAL LIVER, SIGNAL = 2.8; EXPRESSED IN ADULT LIVER, SIGNAL = 3.6; EXPRESSED IN BRAIN, SIGNAL = 4.5; EXPRESSED IN PLACENTA, SIGNAL = 3.1; EXPRESSED IN HELA, SIGNAL = 3.2; EXPRESSED IN LUNG, SIGNAL = 3.6; EXPRESSED IN BONE MARROW, SIGNAL = 5.4
gactgcttaaggccagaaatctgagaccagcctggacaatacagttgtgacaccatctccacaaaaaattagccaccatggtggcatgcctgtggtccaagctactcaggagcctggggtgggagaatctcttgagcccaggaggtcgaggctgcagtgagtcatgatcgcaccactgcaatccagcctgggtgacagagcgagaccctgtctttaaaaaaaaaaatgttttaaacccaaattacttaccaagattatccacagcataatgaaaaaagcaactaaatttgatgtgcttgttgcaaactatgtcaggattgggagtccttcctttttcatactcattcaaaaagtcactagaataaaagaaaatgacttcagttccaagtgtgaaacattcctcaaaaaaaaaaaaaaagttcactaaattgcttgtttaatgtaatttccccttgtcataccaaaactataattttctgcaaaacaggagaacgtcagtcatcgaacatttgtttataacctgctgcatgggccacccgacaaggtgttatt

SEQ ID NO: 9145 - DNA, 578 bp, Homo sapiens
  MAP TO AP000347.1; EXPRESSED IN HEART, SIGNAL = 1.6; EXPRESSED IN BONE MARROW, SIGNAL = 1.5; EXPRESSED IN LUNG, SIGNAL =   2; EXPRESSED IN FETAL LIVER, SIGNAL = 1.6; EXPRESSED IN PLACENTA, SIGNAL = 1.4; EXPRESSED IN HELA, SIGNAL = 1.4
caggtgtttgtacccagcagtggaactctgtgtccagctgaaagctaactgtaaacacgcagtggctcatgtgaagtggagatggggcccaggggaggagcatgagaggtcccaccctggtcctctggagcccctgtgatcagaggactccactgaaaactctcacccagtaagctgggattcactgggttttcaaacaaaagggactggaactcacaaatctcccctgattcccaaatttacccttctttctttcctctgcccatagcaaaagcatgaaagagctaaaagaactctgcaaaaaagacactgcagtgaagagggacctactgatcaaggtacagtggagtctgggagatgcaggacaagtgtttaagggtcagagaaaagagtgagtttggaagggcattggaccaggtgtcgagtggttattttgtttggttttgacttacctactaaaagtggacttgaaaaattccctccatgcctaccttgggccaacaggaagagtggtgtgtcggtccatgggcacgtgggggcatgggggcaggaggccctggaaatgggatgtggcaatg

SEQ ID NO: 9146 - DNA, 566 bp, Homo sapiens
  MAP TO AC006548.19; EXPRESSED IN PLACENTA, SIGNAL = 4.9; EXPRESSED IN BRAIN, SIGNAL = 1.5; EXPRESSED IN HELA, SIGNAL = 2.9; EXPRESSED IN HEART, SIGNAL =   2; EXPRESSED IN BONE MARROW, SIGNAL = 4.6; EXPRESSED IN LUNG, SIGNAL = 3.2; EXPRESSED IN FETAL LIVER, SIGNAL = 3.4
ttgaaagattcagggatggggattcccaccacatccccattcaactctcctgtttggactgtgcagaaggcacatggatcatggagaatgactgcagattattgtaagcttacataagtggtaactcaaattgcagttgatgtaccaggtgtggtttcattgcttgaggaaattaacacatctctttgtacctggtatgcagccattgacttggcaaatgcctttttctccattcctgtccataagggccaccagaagcaagttgtctccagcaggaaaggccagcaatatgcctttactgacctacctcatgggtgtgtcaattctctggctttgtgtcataatgttatttgaagagaacttgatcgctttttgcttccacaagatatcacactggtccattacattaatgacattatgctggttggatcctgtgagcaagaaatagcaaacacactagacttactggtgagacatttgtgtgccagaggatgggaaataaatctgactaaaatttagggatcttctacctcagtaaacttgctaggagtacagtggtgtggggt

SEQ ID NO: 9147 - DNA, 545 bp, Homo sapiens
  MAP TO AC007567.1; EXPRESSED IN HELA, SIGNAL = 5.9; EXPRESSED IN PLACENTA, SIGNAL = 5.7; EXPRESSED IN BRAIN, SIGNAL = 5.8; EXPRESSED IN LUNG, SIGNAL = 6.5; EXPRESSED IN HEART, SIGNAL = 4.4; EXPRESSED IN BONE MARROW, SIGNAL =  11; EXPRESSED IN ADULT LIVER, SIGNAL = 8.3; EXPRESSED IN FETAL LIVER, SIGNAL = 6.6
ctgctcatagtgacttccttccaaagagtacagtatggaaggattgggtagtctctttacagtgcagaaacctgataaatactacctcagccaggtgatcaaggccaacatcaacagtgatgtcatgttgatagtatatatttttgatatgatatgatgtgatgaaaatagcactctacctctgtggccttagccctagtcttatcatgagaaagacctctggcaaatcacaatagagggatatcttacaaaaaatatctgatcaattcacctcaaaactgtcaaggtcatcaaaaacaaggaaagtctgagaaactgtcacagccaagaggatcctagggagacataacaaataaaatgtaatatggtatcctagataggatcctgggacagaagaaaaaaacaagattagtaaaaatctaaggaaatatgaataagtatacagttaataataatgtattcatattgattcattaattataacaaatataccagccaaatgcaagacgttaataataggggaaactgggtgtggtatttacggg

SEQ ID NO: 9148 - DNA, 554 bp, Homo sapiens
  MAP TO AP000189.1; EXPRESSED IN PLACENTA, SIGNAL = 1.6; EXPRESSED IN HEART, SIGNAL = 1.9; EXPRESSED IN LUNG, SIGNAL = 2.1; EXPRESSED IN ADULT LIVER, SIGNAL = 2.8; EXPRESSED IN FETAL LIVER, SIGNAL = 2.1
cgctccacaactgcttcatactctgtgcacaagaaatcctctcaagagagaggagaggagtgatgccaaatgggcttacattagagccgtggacactaccactggtattattcatacaaccaaggctctacaacacccctctggagaaaaagtgcaacacaaaatctgtgtaacaaaggaaagcaaaagtagcaataagggcccagaggaatacaaacagtgcaaatacagtactgcaaactcagtaaaaggagtttttgattggagtatgaactttcaagttgaagatatatttcacaggaatattcacccaaagcttgagagctagagcgaggagagacttgcagtcggtaactgagtagatgaaatgcataatttttcactaggtgataattccctttgggaagaagtgctttatctttaattattccactttttgttaaatggttcatgcttttaaactgcgattgtctcaaacttgcttgctattgaattgtgtaacatcagataatggcaagttgtcaaaagataaccccagtggatatttgaagctg

SEQ ID NO: 9149 - DNA, 552 bp, Homo sapiens
  MAP TO AC007556.2; EXPRESSED IN LUNG, SIGNAL = 4.1; EXPRESSED IN HEART, SIGNAL =   3; EXPRESSED IN BONE MARROW, SIGNAL = 4.2; EXPRESSED IN FETAL LIVER, SIGNAL = 3.2; EXPRESSED IN ADULT LIVER, SIGNAL = 3.9; EXPRESSED IN BRAIN, SIGNAL =   3; EXPRESSED IN PLACENTA, SIGNAL =   4; EXPRESSED IN HELA, SIGNAL = 3.1
gaaagttccatgaggacaaggactgtgtctttcttgtttcccatcatatctactgcctagcacagtgccttggtgtgtactatacatgtaaggtgtatctgctgattgattaatcaaatgagtaaatgagtgcatgaatgaagcaagcctggtgctgacactggagtattttagatattgacacttagattctactgttaacttgtaatttcatttttctatctttcctttcagtggatgttccctgtaattcaccaaaccgtttccggtgtgacaacaatcgctgcatttatagtcatgaggtgtgcaatggtgtggatgactgtggagatggaactgatgagacagaggagcactgtaagcaaaagtcaaaagggagaaggaaaaaggaaggaccccaagtggtctgcagtttggaaaatgtgcctctgggatttcagtttgttctatagagttgtgcccatgactgcagatctctgctgacataattgtttacaagaccatgcaaacacatgcattgcttacatgtaaccctgcctgtttcttcctgtc

SEQ ID NO: 9150 - DNA, 560 bp, Homo sapiens
  MAP TO Z97055.1; EXPRESSED IN FETAL LIVER, SIGNAL = 1.3; EXPRESSED IN ADULT LIVER, SIGNAL = 1.9; EXPRESSED IN PLACENTA, SIGNAL = 1.7; EXPRESSED IN HELA, SIGNAL = 1.4; EXPRESSED IN BRAIN, SIGNAL = 1.8; EXPRESSED IN LUNG, SIGNAL = 1.9; EXPRESSED IN HEART, SIGNAL = 1.6; EXPRESSED IN BONE MARROW, SIGNAL = 1.5
aaatgtttataactctgtgctggcagccaagagctggatcccagttgcagatggggctatgcgtagcagtgagagtgggagacacagagacagggactgagagagagagagagagagatgggatcagggataagggcagtactgccaggcactgggctgggtgctttctgttcatcacatttaacttcacaatgcccctcacacaactgttttctcccccatggtacagatataaaaagtgaagctctgagagatgaaatgatgcttgcgagtcttgtgcactggctgtctgatgccaaagcttgcagtctcaaccatgatatcatgtgcctgtcccactggaggctggatggggggctgagagagctggaccatgaaacccttgcccagctgggtcctctctttgtctctggaaagtggggagggcccccagctgctgtctacatgcagtgacgaagagggggtgagtcctcagccctgctcctgtcctgcccacatctgggtcacactggggatgacagatgtccagtgtggctggccaagaatgaatgccggtggac

SEQ ID NO: 9151 - DNA, 563 bp, Homo sapiens
  MAP TO AP000347.1; EXPRESSED IN FETAL LIVER, SIGNAL = 1.7; EXPRESSED IN BRAIN, SIGNAL = 2.8; EXPRESSED IN PLACENTA, SIGNAL = 2.5; EXPRESSED IN HELA, SIGNAL =   2; EXPRESSED IN BONE MARROW, SIGNAL = 3.1; EXPRESSED IN LUNG, SIGNAL = 2.5; EXPRESSED IN HEART, SIGNAL =   2; EXPRESSED IN ADULT LIVER, SIGNAL = 2.4
cccatttacccactgcagacataggagatatggggagggggtggcaggtcagggcatgaggaggggcactgctatcaggcactccctcacataacctgcagtatggggatcgggggcctgccagccagacgggaagaatgacatcccaatggggtacatcaggccacctatccctctacacagggcacagcctccagggcagggcaaggacccccaccgtcccaccccagaagacaggctatgggtggtagctgagggtcccatgctgttcagcagctgtgcccacccacccgccctgcctgctcctggcctcactgaccacgatggcatagaagtgggcactgccaatcctcagcaccactcttgtgcacaggtcctggatccatcgctccagcagggtcacctcccgttcataccacaaccagctgacaaaatgccgcagccgccagccctggccgatgtcgttgaagctggagggaaccggcatgtccacggtggggcctgactgcgaagagaagggctgggctcagctcctaggccccccaaagggatccaggaccagt

SEQ ID NO: 9152 - DNA, 555 bp, Homo sapiens
  MAP TO AC007463.3; EXPRESSED IN HEART, SIGNAL = 3.3; EXPRESSED IN LUNG, SIGNAL = 2.4; EXPRESSED IN BONE MARROW, SIGNAL = 3.7; EXPRESSED IN FETAL LIVER, SIGNAL = 4.3; EXPRESSED IN ADULT LIVER, SIGNAL = 4.6; EXPRESSED IN BRAIN, SIGNAL = 3.9; EXPRESSED IN PLACENTA, SIGNAL = 3.1; EXPRESSED IN HELA, SIGNAL = 2.4
gaagaataaacctgcctgcccatctcacatagacctgagaatgagaatgaaaataatggcctgaaagggttgaggtgaaagatccactgtaacaaatgtgggagcaaaaggaaaatggcccacgttaagcaaaactccatggtccaagtcatttctgtgcaggaagcaagcccctgggatagaagggacagacaaacagagccttgatctcctgttggagaatgaagaaatgaccaaagatcaggagccagtgctatgcaggatgcaagacacggatgttgtccactgtgaatgctggtagacagtgaagctaatgtcccctgtcagagactggaactgatgcagcgtgggaatatcagagatgttagaatcaatgagtgcactgaataagaggtgagaggctttaaagaattggcaaagaaaattcctcaataaacatttgtcccactgtagcacttttcttaaattaaggtaaaaaaggaacttttgatgccactcaagggggaaattgtttttacaggtgtggttttccagcccatcacccttacttcccac

SEQ ID NO: 9153 - DNA, 589 bp, Homo sapiens
  MAP TO AP000127.1; EXPRESSED IN FETAL LIVER, SIGNAL = 1.9; EXPRESSED IN ADULT LIVER, SIGNAL = 1.9; EXPRESSED IN HELA, SIGNAL = 1.7; EXPRESSED IN PLACENTA, SIGNAL = 2.2; EXPRESSED IN BRAIN, SIGNAL = 2.1; EXPRESSED IN BONE MARROW, SIGNAL = 1.9; EXPRESSED IN LUNG, SIGNAL = 1.8; EXPRESSED IN HEART, SIGNAL = 1.4
tccagaggcatacacagcaccagtgagcaacccttaaaacaagcttagggctggccagaaaaattttagagtgctaaagacagcgtgtgcatggatagtagccagcagtcaggcggtcacaagaagggtcagctatgaagagctattcagggacaagcagcatgctggaagatcctggaaacagctggcaggtcgtggagtcttgattcgctcactggctcctacacacttagcaggttcttcggcagctggacacgcaggactgctgatacgtcctggagaccccacaggctggctggcagacagtagagactcctcccactggttggcagacagtagagatgccgcccactggttggcagacactggagatgcctcccaggggctgacatccactagagacaaaggtgagcggccggctgtaggtagttgagcaggggttggaaatacaggtagtttgtcgagagcaagtcacctggcaagggttggagacacatgaagttcgccggtaacaggttggctggcaagcagtgggctcacagcaggtctcttgacagtggtccaggagccaagagccagtctggaagga

SEQ ID NO: 9154 - DNA, 562 bp, Homo sapiens
  MAP TO AC006548.19; EXPRESSED IN PLACENTA, SIGNAL = 4.6; EXPRESSED IN BONE MARROW, SIGNAL =   2; EXPRESSED IN LUNG, SIGNAL =   2; EXPRESSED IN FETAL LIVER, SIGNAL = 1.4; EXPRESSED IN BRAIN, SIGNAL = 1.8; EXPRESSED IN HELA, SIGNAL = 2.5; EXPRESSED IN HEART, SIGNAL = 1.6; EXPRESSED IN ADULT LIVER, SIGNAL =   2
ttgagcagtgcacctgattgtacactttgcatggaaggagaaatttccagatgtgcggttatatactgattcatgggctgtagtcaatggtttggctggatggtcagggacttggaggaagcatgattggaaaattggtgacaaagaaacttggagaaagagtatgtagatggacctctctggtcaaaaactgaagatatttgtaccctgtgtgagtgttgaccaacaagtgacttcagcagaggaggattttgataatcaagtggataagatgacccattctgtggataccactcagcctctttcctcagatacccctgtcattgtccaatgagcccatgaacatagcggccatggtggcagggatggaggctatgcatggattcagcaatgtggacttccactcaccaaggctgaactgtctgtggccactgctgagtgcccaatttgccagcagcagcagagactaacagtgaaccctttgtatggcatcattccctggggtgatcgaccagctacccagtggcaggttgattatattggacctcttccaccatggaaa

SEQ ID NO: 9155 - DNA, 549 bp, Homo sapiens
  MAP TO Z95114.19; EXPRESSED IN HEART, SIGNAL = 2.3; EXPRESSED IN ADULT LIVER, SIGNAL = 1.9; EXPRESSED IN FETAL LIVER, SIGNAL = 2.3; EXPRESSED IN HELA, SIGNAL = 2.5; EXPRESSED IN BRAIN, SIGNAL = 2.6; EXPRESSED IN PLACENTA, SIGNAL = 2.4; EXPRESSED IN LUNG, SIGNAL = 2.8; EXPRESSED IN BONE MARROW, SIGNAL = 3.1
agatggcagaactgaccctgcccttgtgggcttcctctcccctcagcctgaggtcactcactgccagcgaaggacttggaggaaatattcctcctggactgctgagagggacattctcaagttcagcagagggggctgcctggaggaggtgtgcctgccagagaaaactagcccaggggagatcaggatggcatagccggggcgccccatggaggtaaccccacggaggttacctgggcaattcagccgcagtcacgaatctcttccaggcttcattgttagtcagcaggatttgcagatgcactgggctgactctctcccggaagtatttggtggcctcttcagtaaagcgtttcttttctacttggaaacaaaaagcataagattggaagaaagtgtgctacagcctaaatggcattgagaataaggtggttcgaggttaatcctcctcaaccagctgtcacatggggtatttttgatggaggcatcagtgctatagactgagttgtgtgccctccaaattcatatactgagaccctaaaccccagt

SEQ ID NO: 9156 - DNA, 566 bp, Homo sapiens
  MAP TO AL008723.8; EXPRESSED IN PLACENTA, SIGNAL = 1.9; EXPRESSED IN HELA, SIGNAL = 1.4; EXPRESSED IN LUNG, SIGNAL =   2; EXPRESSED IN HEART, SIGNAL = 1.6; EXPRESSED IN BONE MARROW, SIGNAL = 2.4; EXPRESSED IN FETAL LIVER, SIGNAL = 1.3; EXPRESSED IN BRAIN, SIGNAL =   2
acattttacagccccaccagcaaggttttttatttttgctattctgataggtgtgtagtgatactacactgtggttttaatatgcatctgcctaatgattaatgatgttaaatagtttcatgtacttatttgctgtctgtatttaacaaaacagtataaaacttataacctgaaaactgcaaaacattcttgaaagaaattttaaaaggtctaaataaataaaaagacatcctatgttcatggattggaatacttaatattgttaatgtgacaatacttaccaaattgatctataaattcaacaaagtccctctcaaaatcctagctaccttatttgcaaaaactgacaagctgatcctgacatttatatggaaatgcaagagacccatattagccaaaatagtcttgaagaacaaagtttgaagactcagacttcccagttttaaaacttacaacaaagctatgctaataaagagaatggtactggcataagaataggtatattaatcaaaggaacataatttaaagtacaaaaaaaaaaaaaccctcacatttatggtcagttg

SEQ ID NO: 9157 - DNA, 568 bp, Homo sapiens
  MAP TO Z83840.7; EXPRESSED IN LUNG, SIGNAL = 1.4; EXPRESSED IN HEART, SIGNAL = 1.8; EXPRESSED IN FETAL LIVER, SIGNAL = 1.7; EXPRESSED IN PLACENTA, SIGNAL = 1.4; EXPRESSED IN HELA, SIGNAL =   2
tcaggagttatgctgggtttgaattgaagaaaaaaggccaagttaaaataggaaaacaaatggttttcatttggtggcagctgaaatcaaagtatacatgtatatacattctaatccatcatctatcccatgtggcattttccaaggttttaagagtctaccacgccaaaccctttgccactttcactgcttttgctttgcttttcccctttcttttctctcgctttgccgtcagcctttttctttgcctttggttcatccatattgggtactgtccatgctggtctagaagagtctttttgtttctcttagtatcagtctcccttttcatgtcatctttttcatcttttacctcacattgcattttctcttggcaatgtttgggtaccaccacagttgctatctcttgaacatctttcattaaaacatcaccgtctagtttgagaatacttttaagcctgctggcctcctttggggcattcttttttctcttttcagcacgcatctttcttttccacttactccgtaagcttttagccatgtttcacctgagaaacgaacacccaca

SEQ ID NO: 9158 - DNA, 585 bp, Homo sapiens
  MAP TO AL031588.1; EXPRESSED IN PLACENTA, SIGNAL = 3.4; EXPRESSED IN HEART, SIGNAL = 3.1; EXPRESSED IN FETAL LIVER, SIGNAL = 4.3; EXPRESSED IN ADULT LIVER, SIGNAL = 2.1; EXPRESSED IN HELA, SIGNAL = 3.6; EXPRESSED IN BRAIN, SIGNAL = 3.1; EXPRESSED IN BONE MARROW, SIGNAL = 3.8; EXPRESSED IN LUNG, SIGNAL = 3.1
agggagcctccagtgaccccccaaaacaacgtgggcgagaagacagcgggtcacacctgaaagcactgttggaggaaagaactaaaaacaccatcaatgccatcaataattgtttaaaactttaaatgcaatttcttcagtattttttaaagacacattaaaatgtatctattactcaccaatagaaaacttaggaattttaaattgatttgtaggagtaggcataacctttgtcttggaatttagacaggaatctcgccgtctgatacttctagtcttattcaattgagaagattctgaccaagcgcaactggagttcagccactggccgccaccttccggagtctggggttgggtgggggatgctgaggggggtgccgtgagctgctccgctgccagctcagaaacatcgacccgcttggcctgccaggaggatgcccccacagggcctgcaggcagagctggccgcagcatggcgggtcccattctgcctgacttgctgatgtttgacagaggccgggagctatttgcaggaatacttgcaaattcacttgatttagctagaaggtatacacacaaaaatca

SEQ ID NO: 9159 - DNA, 558 bp, Homo sapiens
  MAP TO AC007539.8; EXPRESSED IN FETAL LIVER, SIGNAL = 1.8; EXPRESSED IN HELA, SIGNAL = 1.8; EXPRESSED IN PLACENTA, SIGNAL = 1.8; EXPRESSED IN BRAIN, SIGNAL = 2.3; EXPRESSED IN BONE MARROW, SIGNAL = 2.4; EXPRESSED IN LUNG, SIGNAL = 1.6; EXPRESSED IN HEART, SIGNAL = 1.3; EXPRESSED IN ADULT LIVER, SIGNAL = 1.7
tcctaaaatagagatgcctttggtaattaatttcccaagggccgattcttcaaattgcagggccttgcccagcacccccccgccagggcatagtcactaaaaacatattgggtaagcctgtaaaggggggtaactgaataaatgagtgtatcatttatgtcttcggctttctcttacctaggctaacagaatctcactttctagtgatgctgagccgtggtcaattctcatttatttatgggctgataatccagtgagtggattatcaagagaggtggttatccttatttctctttctcctcttcctccttccctgtctccctctcctgccaccccttttcttcctctgcctcctcccctcccccatcccaggcctattaggcactcctttctagcgagtaagccagggaaataagagaaggtgtaacgtgaacccacccatgcagttcaaagatcgcagcagctctgggaactagcttggtgggagagaagatgaagttcacagcagatgtcaaaacttcattgggggcaatagtttctgccgtctccatggataac

SEQ ID NO: 9160 - DNA, 574 bp, Homo sapiens
  MAP TO AC008166.1; EXPRESSED IN PLACENTA, SIGNAL = 1.8; EXPRESSED IN LUNG, SIGNAL = 1.5; EXPRESSED IN HEART, SIGNAL = 1.3; EXPRESSED IN ADULT LIVER, SIGNAL = 2.1; EXPRESSED IN FETAL LIVER, SIGNAL = 2.8; EXPRESSED IN BRAIN, SIGNAL = 1.5
ctagggctggtgtacatgctccttccatcagtgtcggctaagttctacaagtttttgctttctgttgtgacagggaagtgctgggttctaatgcaatgtcctataatcactggcctctccatcctgcaagcacacagattctccctgccactgggctgctgccagcagataggggtagagtgatgtccacaattcaagactttctttcctaccctcttctgtgcctctttcaatggcatgaagttaatatcaggtactatcatggcttacctgactggtggttcttatgaaggtgctgcttttttgtgtagatagttgttaaatttggtgtccctgcaggaaggaaaatcagtggaggcttctgtgcagccatgttgctctgtttcccataaaagttgttatttttcatattttactgcaaaaaacctcttgcttttgaaactagacctctcatttaatattcatcatttatgagagtaaaattgtatgattatttaaacaaaatagctttaaattaatttttgattgctctagttcaaaatacagataagtggcaacctctggtgttggataa

SEQ ID NO: 9161 - DNA, 588 bp, Homo sapiens
  MAP TO Z98884.11; EXPRESSED IN LUNG, SIGNAL = 7.5; EXPRESSED IN HEART, SIGNAL = 4.2; EXPRESSED IN BRAIN, SIGNAL = 5.2; EXPRESSED IN HELA, SIGNAL = 4.8; EXPRESSED IN BONE MARROW, SIGNAL = 4.8; EXPRESSED IN ADULT LIVER, SIGNAL = 4.9; EXPRESSED IN FETAL LIVER, SIGNAL = 5.8; EXPRESSED IN PLACENTA, SIGNAL = 2.3
gtttggggccagactatgacttggagataatcaggtctcaggatctcagcacattttggtgtgttatgttataaccttaaaatggtatttcattgcattggattgaggtggaagtctgccctcctgcctgattatttttttctctccaaggcgaggcagggaggtagacctggataacttgtaaggttcctttctaacctgagtgttctgtgaacttctgacttcaggtgaacatgatgaccttggcagaacacattattgaagccacacctgaccgaatcaagcaggagaattttgtgcccatggagtcctcaggattggaaagaacagaccctgccaccattagcagtacaatgagctggctggccagttatctagcggatgctgactgccttcccagtgctgcccagatccggtgagtaaagttacggaggtcactacccagcatagattcccggatgtaattggaggcaggggaggctgattgtatttgatgaatgccgtgtcatagaagaccataccaaggaaggaaggaagcatgaggacaagctctgttgccactttcaaggcccagctcctattcctacc

SEQ ID NO: 9162 - DNA, 556 bp, Homo sapiens
  MAP TO AL023553.5; EXPRESSED IN HELA, SIGNAL = 1.9; EXPRESSED IN PLACENTA, SIGNAL = 1.4; EXPRESSED IN BRAIN, SIGNAL = 2.3; EXPRESSED IN BONE MARROW, SIGNAL = 1.9; EXPRESSED IN LUNG, SIGNAL = 2.8; EXPRESSED IN HEART, SIGNAL = 2.4; EXPRESSED IN FETAL LIVER, SIGNAL = 2.6; EXPRESSED IN ADULT LIVER, SIGNAL = 1.9
cagtaaagcccatcccactgctcccccacgctaggagacctgttggttggtccttgaggcccccagactggagggtgggttacccacagggagggcatgaatgaagcctgcttactgatgcatccagctggtgagggggcttttggggactcactcacaatgagacccaatgggagaaaaactgagcagaggtaagaggctcaacacagcgagagtctttagaagaaaactagactcttaccctcactattcctcagtgtcctcacagcaaacaggctaggcctggagcctctcacatccgggtgggtagagctcataaacgaatttgaaaagaagccctctctgctccacgactgggggtggaaggtaaagtgggtgatggggcttcagaaactagacccagtcccaggcctgcaaaggtcggggtgggaagactccgagacgccctgtctcccaccagatgatgactgacgcttggctgtgtgcttgtgtgcctggaaccccggttcagaagccagctccgaccactggtgtgtcgtagggctgaactagggtg

SEQ ID NO: 9163 - DNA, 582 bp, Homo sapiens
  MAP TO AP000346.1; EXPRESSED IN PLACENTA, SIGNAL = 3.4; EXPRESSED IN HELA, SIGNAL =   2; EXPRESSED IN BONE MARROW, SIGNAL = 1.3; EXPRESSED IN LUNG, SIGNAL = 1.6; EXPRESSED IN HEART, SIGNAL =   2; EXPRESSED IN ADULT LIVER, SIGNAL = 2.7; EXPRESSED IN FETAL LIVER, SIGNAL = 3.2
cccaatcacacagacattgcaggctcagagggaggagcccctttgaaagaggtgagcagagtctggggcatttgtgcaaatgttgatgaagtccccagacaactcgcaggctcccaggaaaccctaactggggaagaaaagatgaggataagcagagcccaccatgggtgagaagagaggaaagccagggtctccaccacccaggtcctcagtgtccctcctccgtgtgcccggccctgtcctgtgggtggagggtgaggagagggagagaaggaagggttggcagtttcataagaactggacctcctcctatgagtagatgaaatagtttaatgagattggttttggattttccagcttccctagaggccggaatcagactcccaatataagctcttggtcgctgtggtgaaagttcgtgtgtattcatcccctgagaaggttccctaacccttactgtgtcttctgtgtgaggagtgcagctctaagcactcagggtactgtttcccagtgaatcttaatgaaatgtttggagaatttttatttcctccatttagcctaaccagaacagaaacgtcagct

SEQ ID NO: 9164 - DNA, 564 bp, Homo sapiens
  MAP TO AL031587.3; EXPRESSED IN BRAIN, SIGNAL =   5; EXPRESSED IN PLACENTA, SIGNAL = 2.4; EXPRESSED IN LUNG, SIGNAL = 3.1; EXPRESSED IN BONE MARROW, SIGNAL = 4.4; EXPRESSED IN HEART, SIGNAL = 2.3; EXPRESSED IN ADULT LIVER, SIGNAL = 2.1; EXPRESSED IN FETAL LIVER, SIGNAL = 3.2; EXPRESSED IN HELA, SIGNAL = 2.4
gtcaaagcagaagctgggaggccaggaaggaggcccctgaggtatttcagaggagaggcaatggcgggggccagggagctgggggtggcctggcaggccacagtggcagtggtgagaagtacacagtttcctggttgggtttggttttccttttttaaaattacgtttttgacagcttctcttaggtacagttgacatacaataaactgcacatattgaaaaggtgcacttggatgagttttgacacatgtatgcatcacacatgaaactctatcaccacaatcaagtaaacaagtacatctaccgtccccaaactttcctcttgcccctttgtcatccctcccttcaccccaccctctccctaggcaaccacgtgcagtcactgtagattaatctgtattttctagaattttatctaaatggaatcatacagaaggtactcgtttttgtgtgtggtctggcttctgtcactcagcataattgttttgagatttatccatgttgttgtgtgtatctgtagtttatcctttttattacagaagaatatgtcattgtatggctaga

SEQ ID NO: 9165 - DNA, 568 bp, Homo sapiens
  MAP TO AC007539.8; EXPRESSED IN LUNG, SIGNAL = 1.4; EXPRESSED IN BONE MARROW, SIGNAL = 2.4; EXPRESSED IN HEART, SIGNAL = 1.9; EXPRESSED IN ADULT LIVER, SIGNAL = 1.8; EXPRESSED IN FETAL LIVER, SIGNAL = 1.9; EXPRESSED IN PLACENTA, SIGNAL = 1.8; EXPRESSED IN HELA, SIGNAL = 1.7; EXPRESSED IN BRAIN, SIGNAL =   2
tccttcctctctcagtaccagtgaggattacagattcattaggcaaatatttttgagaccctactaaaggcttggcattggttgtataatagggagcgagatatagtgcatccctcaagaactctagatggagcagacaataagtaaacaaggaattaaaattaaaatacagctttaatgattgacaatagggcaacagcagagagctaagggatccctaaggagggaggccctgcacctaacacagacttaagtgtttaggggattttcaagggagatgaaacctgaagaatgaacagtacaagaatggccatggagacaatcacattgaaactcctcactcatgtggccatgtcagcctggctggtaagtggggtggggagggtggtaggtcatggggcagcaaggggtgtgtcaggtagtgatggaggttccgagagaacactgtattccagggagacaggctcaggtgagaggggtaagctatgagagaggaggctgaaagaaaaaaacaaactccatattaaggagaggatgctggtcctgttgaggtgcgtggagtctctct

SEQ ID NO: 9166 - DNA, 557 bp, Homo sapiens
  MAP TO Z98884.11; EXPRESSED IN PLACENTA, SIGNAL = 2.2; EXPRESSED IN BRAIN, SIGNAL = 1.6; EXPRESSED IN HELA, SIGNAL = 1.5; EXPRESSED IN HEART, SIGNAL = 1.8; EXPRESSED IN BONE MARROW, SIGNAL = 1.7; EXPRESSED IN LUNG, SIGNAL = 1.8; EXPRESSED IN FETAL LIVER, SIGNAL = 3.3; EXPRESSED IN ADULT LIVER, SIGNAL = 1.5
acttaaagattttgtaatagtggaacgtgcgcaatccctagtattataacagtgcttattttatggactggtgtgtacatagtactgtaggaggtgctatggagatttttaaaaatagcttaagaaaatatttgtcttttaagatatttaaaataaagctagagaggaaagtatgccaatgctagcaaacacaaactgctgattataaataagtttcatttatgtgtaatggaaaaaattagagcagtgatgcttatgtaatgaggtttgtcaaggacagcttcttgaagaaggtgaatcttcagtgtgtcttaaagcatagaatctgcgttgatgacgagaacaccgtccacccaggtgtatggcacagtttgcagagaagttatgtgccatacgtattttagtctgcatagaataagctagtatattttttggcatagaaattgaaccttcagtaggtgaagtgcaggtcttaggagaagatttaagaagcatgttggagaaaattatttgaggagttttgttgcatttgtaggttgtgcctgtgtattttaaga

SEQ ID NO: 9167 - DNA, 566 bp, Homo sapiens
  MAP TO AL031587.3; EXPRESSED IN LUNG, SIGNAL = 5.4; EXPRESSED IN BONE MARROW, SIGNAL =   6; EXPRESSED IN HEART, SIGNAL = 4.4; EXPRESSED IN FETAL LIVER, SIGNAL =  11; EXPRESSED IN ADULT LIVER, SIGNAL = 5.3; EXPRESSED IN BRAIN, SIGNAL = 3.9; EXPRESSED IN PLACENTA, SIGNAL = 4.8; EXPRESSED IN HELA, SIGNAL = 4.2
agaaagcaggcacatgcagatcaggtattttgccacattctttaaagctttatattttgggaaagtttaaatacttattaagagaggatatagggaaagttaaatacttcatctctgcccttgggaaattttcaggcttttgggagtaatataaatcgaaatatttagtaataaaattagtaagctggtagctctcagactagctgattatcagaatcatctgggcagttttgcaaatgcaggctctcaggccgcttcactagagattctattccgggggtctggggaaggacccaggaacctgtattttttagcatgctctcctgttaattctggatttgttggtgtgaacctgagctggaatcatcaggggtggcttcctagaggagatgggcctagaattggcatccctttgcttggtggtagagtccccactgtgggccaagtgttatgctgggggctgggcctccgtggtgaatcacatgtggttctgggccactaggagctcatggtctaatgtggaaagtttccaaacaagtagttacagttcaatgagattggtgcca

SEQ ID NO: 9168 - DNA, 543 bp, Homo sapiens
  MAP TO AB016897.1; EXPRESSED IN PLACENTA, SIGNAL = 3.1; EXPRESSED IN BRAIN, SIGNAL = 5.2; EXPRESSED IN HELA, SIGNAL = 5.2; EXPRESSED IN LUNG, SIGNAL = 6.3; EXPRESSED IN HEART, SIGNAL = 4.1; EXPRESSED IN BONE MARROW, SIGNAL = 7.3; EXPRESSED IN FETAL LIVER, SIGNAL = 3.9; EXPRESSED IN ADULT LIVER, SIGNAL = 6.2
agctgcccttcccttaagacacacacacattggcccagcatagtgtgctaggcagtaccctagcatgcagcaggcaaatacagggcacctgggtccacctgaacttcaatcaaccacagataatttcttaacttatactagattgagataacactatatacaaccctactctactaccatgtattagattatgccaaaaaataatccatggtcattgtaaatgcacacttacctggcacactgtattttacttgctctatctggcaactccttccataagggaagtctgaagtgagcagtcgagctgggagagcagagtcatgcggggcaggggaatgatggggtcccacagccgtgcccatcagcccgttgaccacatctgcatggcacagggagaaggaggggaggacaggtgggtcccggcacggccaccccttcatcagcccatcaaccacagccttcacggcactcatcccatgagctgtcacccagcacccactaggaactgaacaagaaggacatggctgtgtcctcagggaactt

SEQ ID NO: 9169 - DNA, 579 bp, Homo sapiens
  MAP TO AL031587.3; EXPRESSED IN LUNG, SIGNAL = 1.5; EXPRESSED IN BONE MARROW, SIGNAL = 1.9; EXPRESSED IN HEART, SIGNAL = 1.7; EXPRESSED IN FETAL LIVER, SIGNAL = 1.4; EXPRESSED IN BRAIN, SIGNAL =   2; EXPRESSED IN PLACENTA, SIGNAL = 1.3; EXPRESSED IN HELA, SIGNAL = 1.4
gtttcacccctacctccctgcttctgccatctcctctggggacttgctaccctagggttgtcctttgcaggccagcgcctcggcttccatggcccagggcctcactcttcataaagggagagcagcctaaccctggcctggcgcctcatgccctctagcacagcgcactcctccctggcctctcctgccatcagctcccagggggactctggatctgaactggacctcaggcattgggcagagggtctgcgccctgggacaagttccctcctgttagaggggctgagcctcggttctgtagaaactttaagactcaagagctggacagcagcttcgagtcctctggaccggccgcttcacattatggatcaaagcctgagacccagagagggcgctgcagcccctggtgagcgcacacctaggtctcagctctggagcccagcaatccccttcatacaccctagggccagaggccaaggggctaagggcaggctggatctatctgggagctccctccgaaaccctctggttccaacacaggactaagtccccttcctaggactaagctggtcagatgca

SEQ ID NO: 9170 - DNA, 574 bp, Homo sapiens
  MAP TO AC007539.8; EXPRESSED IN FETAL LIVER, SIGNAL = 3.4; EXPRESSED IN HELA, SIGNAL = 1.9; EXPRESSED IN PLACENTA, SIGNAL = 3.6; EXPRESSED IN BRAIN, SIGNAL =   4; EXPRESSED IN LUNG, SIGNAL = 2.9; EXPRESSED IN HEART, SIGNAL = 2.3; EXPRESSED IN BONE MARROW, SIGNAL = 6.3; EXPRESSED IN ADULT LIVER, SIGNAL = 4.4
ttgctgtcacctcctcttccctccctgtgccttcactgcatctggagtgcttgtctctggtttgctgccaggtcgcaacccatggttttacactgacctgtggttccccactcaaggctgctcacttcccggccacacagtgaatagctggctctttcctttataccatatttcacagactcggacacagccttctcacacattccctgctcttcaagcttcttccaccaaccccctgctgctttgcctgggcactggcagcttcagagcagagctcccactcaatggaaaggtacacacagcccactcatctgcatgacttcccttaagggaagtgggcgtacattcattatcattagaatctgaagcctgataccgtgcctggaacacagtcacatggtttatgttcagtaaagattggttgctgcaagaaaggaaggcaggaaaggagggagggagggaagaggaaatgtggggctggagttgccgtggagtatttaggaggtgggtccatgatgaggcttttgtcagaaagcaacagtgctctcctcttcccaggctcaatgcatctctc

SEQ ID NO: 9171 - DNA, 554 bp, Homo sapiens
  MAP TO AL034406.1; EXPRESSED IN PLACENTA, SIGNAL = 1.8; EXPRESSED IN HELA, SIGNAL = 2.3; EXPRESSED IN LUNG, SIGNAL = 3.2; EXPRESSED IN HEART, SIGNAL =   2; EXPRESSED IN BONE MARROW, SIGNAL =   2; EXPRESSED IN FETAL LIVER, SIGNAL = 2.4; EXPRESSED IN ADULT LIVER, SIGNAL = 2.2; EXPRESSED IN BRAIN, SIGNAL = 1.7
cagtaagtctgggtgtggaggtctcaggaaacttacaatcatggcggaaggcaaaggggaaggaagcaggcatgttatacatggctggaacaggaggaacagagtaaagggggaggtgctgcacacttttcaacaaccagctctcttgagatctcactcactatcatgagaatagcaagggggaaatcttcacatcattcaatcacctccaccatgaccctcctccaacattggggattacaatccaacatgagattcagacagggacacaaatacaaaccataccagcctctataacacttttggtatcaagttcacaagctaaaactagttaatctggtattaccaaattaatacctttcgttgcaatatcctttatggattttatcatacaacctaatgtggaatatggctgatcttaattgaattagaaggtatcatgtatacacaatgaaggtcacagagaactgtagtgctaaaaaataatggtatttatttctagctttaccagtccattttatactcatatggcagagaagacatacagacttttt

SEQ ID NO: 9172 - DNA, 566 bp, Homo sapiens
  MAP TO AP000350.1; EXPRESSED IN PLACENTA, SIGNAL =   2; EXPRESSED IN BRAIN, SIGNAL = 2.4; EXPRESSED IN LUNG, SIGNAL = 2.3; EXPRESSED IN BONE MARROW, SIGNAL = 2.4; EXPRESSED IN HEART, SIGNAL = 1.6; EXPRESSED IN FETAL LIVER, SIGNAL = 1.6; EXPRESSED IN ADULT LIVER, SIGNAL = 2.1; EXPRESSED IN HELA, SIGNAL = 2.3
cccttcctcctggaagccttccctgagcccctgctgaagttcatgacattttgtttcttccttgctgcccttagttgagatgacagtctggccccgtgtagggctgtgtgaccctgggtagttacctaacctctctgagcctcacatccctcctctgcatcatggggatagtgaaaatgccccagaaaacggttgaagagtgttcagggcatgtcttctgcccctgccatgtccccccagtgtggctagcttgctctatatgagctgcatgtacaaagcacctgaccactggtacctccaggacctgcaggcccgcgcccatggggatcagtacctgtcatggcagcacatggccctgcagagtagctgctgctgggccatgtggcagacggtgagccatggagggcagggacacctcccgggatgcccaagggatgctgctttcactttacaaaattctgtttagacctgagaccaaatcctggaatgccagagactgcctaattcacccaacttgtttcataggagggaaaccaaggaccagagccaaggaaggattcccctaa

SEQ ID NO: 9173 - DNA, 969 bp, Homo sapiens
  MAP TO AC007106.6; EXPRESSED IN FETAL LIVER, SIGNAL = 6.1; EXPRESSED IN ADULT LIVER, SIGNAL = 5.8; EXPRESSED IN PLACENTA, SIGNAL = 4.6; EXPRESSED IN HELA, SIGNAL = 5.8; EXPRESSED IN BRAIN, SIGNAL = 4.1; EXPRESSED IN LUNG, SIGNAL = 4.3; EXPRESSED IN HEART, SIGNAL =   4; EXPRESSED IN BONE MARROW, SIGNAL = 4.1
gcgagggctcttaggactgccagcatgctgtcacctctgttagtacagtcagaattcttacatgagagccaggacagcgccctgtagcctttctgtccaaacaacttgaccttactgttttagcccagacctcatgtctgcctgcagtggctgccactgctttaatacttttagaggccctcaaaatcacaaactatgctcaactcactgtctacagttctcataacttccaaaatctattttcttcttcccacctgatgcatatactttctgctccctggctccttcagctatactcactctttattgagtctcccacagttaccattgttcctgtcctggacttcaatccggccttccacattattccggataccacacctgaccaccatgactgtatctctctgatccacttgacattcactccatttccccatatttccttctttcctgttcctcaccttgaacacacttggtttattgatggcagttccaccagacctaactgccactcaccagcaaaggcaggctatgctatagtatcttccacatctatcattgaggctactgctctgccccgctccactacctctcaacaagccaaactcattgcctatactgactctaaatgtgccttccatatcctgcaccaccatgctgttatatgggaagaaagaaatttcctcactatgcaaggggcctccatcattaatgcttttttaataaaaactcttctcaaagacattttacttccaaaagaagctggagtcattcactgcaagggccatcaaaaggcatcagatcctatcactcaggacaatgcttatgctgataaggtagctaaaaagcagctagcgttccaacttctgtccctcacggccgtttttctccttctcatccggccactctcacctacttccccactaaaacttccacttatcaatctcttcccacacaaggcaaatgatt

SEQ ID NO: 9174 - DNA, 570 bp, Homo sapiens
  MAP TO AC007463.3; EXPRESSED IN HEART, SIGNAL = 1.9; EXPRESSED IN LUNG, SIGNAL = 3.9; EXPRESSED IN BONE MARROW, SIGNAL = 6.4; EXPRESSED IN FETAL LIVER, SIGNAL = 4.5; EXPRESSED IN ADULT LIVER, SIGNAL = 3.7; EXPRESSED IN PLACENTA, SIGNAL = 2.7; EXPRESSED IN BRAIN, SIGNAL = 3.1; EXPRESSED IN HELA, SIGNAL = 3.1
taggtatgggaggcaaccacataaactctagaatacagaaggtaagtgtttcttctagatatggtttggattcgtgttccctcctaaatttcatgttgaattttaagccccagtgttggaggtggggcctgctgagaagcgattggatcatgggggcagacttcttatatgtggtttagcaccatcttcttggtactgttctcatgatagtgagttctcatgagatctggttgtttaaaagtgtgtggcacctgctccctctctttctcttgctcctgcccctgccatgtaagatgcctgtttcccctttgccttctgccatgattggaagcttcctgaggcctccacaaaagcagaagctactatgcttcctgtacagtctacagaactgcaaaccaattaaacctcttttcattagaaattacccagtctcaggtatttctttatagcaatgcgagaacgaactcatacgatccctgtcacaaaatctctctctgtcctcctttttgctttcagttagtatatttgctgttgtctctaaaatctataccaaagtgcagaccatttctg

SEQ ID NO: 9175 - DNA, 592 bp, Homo sapiens
  MAP TO AC009313.2; EXPRESSED IN PLACENTA, SIGNAL = 1.3; EXPRESSED IN ADULT LIVER, SIGNAL = 2.3; EXPRESSED IN BRAIN, SIGNAL = 2.8; EXPRESSED IN HELA, SIGNAL = 2.4; EXPRESSED IN BONE MARROW, SIGNAL = 3.1; EXPRESSED IN HEART, SIGNAL = 1.7; EXPRESSED IN LUNG, SIGNAL = 3.3; EXPRESSED IN FETAL LIVER, SIGNAL = 2.5
cccacacagccagaactttgtatgcatcaccactcttaactttgtcaatgagcagagttaaacgtttgcacgtctatctcttgcttaagaacatgagctcctcaagagcaaaaaaaccattttaagaacttctgcacccagcatggagcctaacacatggtagataataaatgtttattgaataaatacagttgatccttgaacaacatgagtttgaattgtgtgggtccacttacatgtgaatatatttcagtaaaagttagaccaagtgggcccacctcccctgcctcccctttcaccttctccttctctttgactcctcaaaccactgatacagcaagaccttctcatcttcctccttctcctcagcctactcaatgtgaagacaacaaggatgaagaccttcatgatgatccacttacacttaatgaatagcaaatatattttatcttccttatgatttttaaatacattttctttcctctagtttattgttagaatatagtatataacatatatacaaaatattcattaatcgattttatattataggtaagatgtattagtagttaagttttggaggagtcaaaag

SEQ ID NO: 9176 - DNA, 596 bp, Homo sapiens
  MAP TO AC006427.13; EXPRESSED IN HELA, SIGNAL = 3.7; EXPRESSED IN PLACENTA, SIGNAL = 3.9; EXPRESSED IN HEART, SIGNAL = 1.9; EXPRESSED IN ADULT LIVER, SIGNAL = 4.1; EXPRESSED IN FETAL LIVER, SIGNAL = 4.1; EXPRESSED IN BRAIN, SIGNAL = 3.1; EXPRESSED IN BONE MARROW, SIGNAL = 4.2; EXPRESSED IN LUNG, SIGNAL = 3.7
aggcagcatgctcgttaagagtcatcaccactccctaatctcaagtacccagggacacaaacactgcggaaggcctcagggtcctctgcctaggaaaaccagagacctttgttcacttgtttatctgctgaccgtccctccactattgtcctatgaccctgccaaatccccctctgtgagaaacacccaagaatgatcaataaaaataaaaaaaaaagatgcatgtccaatgtaggttagtcttatgaagtttaagaattccaatatcatcgccagctgttagaggtgaaggaaacctactccagagatcatctagctgccttgctactctaagtagcagcattgcatcacctgagagctcattcacaatcccacctgtcaacaagggagaattcatgtgcacgtcttaaagccctgctttaccccattcacccagcagtaacatcctaggtcttctgcttggactatccagcttcatcttgctcacagtcttcataaaatgtaattctgtttcccatatttaaaaaacaaggaatgtcacaaagaaatctgatccctaactttgttttgaaaaatctgaaatctggcaatcccaa

SEQ ID NO: 9177 - DNA, 543 bp, Homo sapiens
  MAP TO Z82188.2; EXPRESSED IN HELA, SIGNAL = 1.3; EXPRESSED IN BRAIN, SIGNAL = 2.9; EXPRESSED IN LUNG, SIGNAL = 1.4; EXPRESSED IN HEART, SIGNAL = 1.8; EXPRESSED IN BONE MARROW, SIGNAL = 2.7
ctgacagggttttcccagagtggctctgaggtcaaattccgaggagctgatggaactcccactgactgccccccacccgatccccaaacccagctccctgggctgaccgccctgggccactcttcagttccagtcacctccctacctctaggagaggattttctcttcgaagatcccccatgaagaatgcgggtccctctctccatcagggactttcctgatgagaaaaccagcattctgcccccagagccaggctctgtgccccagacacacccagataccaaacagaaccaagctcccactgccccacacctcaggtcccaggaggccctcccagcgggccccacaggccactctctaactgacgggctgatgagagctgcccctcccatccttgagcaggtacacaccccccacccctgcttcctacacctgcgcctcaggcctcggtctcagtcccttctctgtacaccctctgaggtcgcttcagtcaggctagttcccagatctctctccactgcctactggagatgcctcctaccc

SEQ ID NO: 9178 - DNA, 586 bp, Homo sapiens
  MAP TO Z95114.19; EXPRESSED IN ADULT LIVER, SIGNAL = 1.8; EXPRESSED IN FETAL LIVER, SIGNAL = 1.5; EXPRESSED IN BRAIN, SIGNAL = 1.6; EXPRESSED IN PLACENTA, SIGNAL = 2.1; EXPRESSED IN BONE MARROW, SIGNAL = 1.6; EXPRESSED IN LUNG, SIGNAL = 1.5; EXPRESSED IN HEART, SIGNAL = 1.4
tgccttttatgatggaaggtgacataatcacgagttccagcattcggatgcgcacatccgtggggggctgttattcagcctaatacaagatatatccagaaaattgcaatagggatgtcggagggggattgaagaatcccaactccaagccacatctaaggacgcttccaaggtgcagcccctgatggaggaagctgctccatctctgttgcccctgccccccatgagtttctagacagccagtgttcaagtcagtgtggcatgagagtgaactgcagaatggaaaggagtgagacgctgcagcaggagaaggagcccaccatcaaactccaaagagctggagaccatttgtgcggtggagtccgagaaaggtcggcaaggaaggggaaacatcatttgggttccttgccatagttgtcctcagctggcatggtttgctccagcagcaggctgggatgccagctgtgcccagggctggatgagccaccctcaagtaaatgctggccacttcgttgtgacgccaaaaattcagaaatgacttggtatgacaaagaagaaggaggactcaacgtgcataggagattgg

SEQ ID NO: 9179 - DNA, 584 bp, Homo sapiens
  MAP TO Z83844.5; EXPRESSED IN PLACENTA, SIGNAL = 1.7; EXPRESSED IN BRAIN, SIGNAL =   2; EXPRESSED IN HELA, SIGNAL = 2.6; EXPRESSED IN BONE MARROW, SIGNAL = 3.3; EXPRESSED IN LUNG, SIGNAL =   3; EXPRESSED IN HEART, SIGNAL =   3; EXPRESSED IN FETAL LIVER, SIGNAL = 2.8; EXPRESSED IN ADULT LIVER, SIGNAL = 1.5
ggggcagacatggacaagcgggtggtgagtggggggtcccgggaaggaggggcctgagcaggagacttccatccaatggggaagcaaggtcggggctggggtttccttgccagtctgagtgtctggcaccaagggcatggagactgctctgttccaaggcccctctggcactgcactcaagaggccctataccttccccatcacctttaccccacttccctgtgcaccagttcccataagccaaggccaggcttctgacagcacctgaacttctctgtccaatcagtgcgcaagagcaggctgtcaatggggcggcctcagagggtttcctgaaggaggtagcaattgagctggcttttgagggatacacgtttattaatcaagaggcagcgtttattggctgataaccgccagcttgttactaacatatgagtgcactgtctcatggaacactggcacaaccctaggggcaggcattgctttacacatgaggaactggaggctcagagataaagtcacttgtccaaggtcacatagctagtaagtggcagaactgaggtttgaaccctggtctctgatcccag

SEQ ID NO: 9180 - DNA, 575 bp, Homo sapiens
  MAP TO Z83844.5; EXPRESSED IN LUNG, SIGNAL =   2; EXPRESSED IN HEART, SIGNAL = 2.4; EXPRESSED IN FETAL LIVER, SIGNAL = 2.6; EXPRESSED IN ADULT LIVER, SIGNAL = 1.4; EXPRESSED IN PLACENTA, SIGNAL = 2.9; EXPRESSED IN HELA, SIGNAL = 1.7; EXPRESSED IN BRAIN, SIGNAL = 1.7; EXPRESSED IN BONE MARROW, SIGNAL =   2
cctgatgtctattgtctgtgtgcacagagctttggagtggcctggccaggaagaggggaagcgtgtgtggggtcagcacaaggggttgccgggatcttggttactggttctgctctgctgctggttccctctgaaaatgtgggtttctcccctccgtgctgagcctcagaaaggggtagggagccccatgccagcacacatggcccctcggctctctggcctctgcagggtcagcccagctccttcacctctctcctgctttcccctcaggcctcagtgaccccacacccccttcaggcccaagcctggatggtaccggatggaacagcttccaggtaggaggggaccacaaactagtctggcctgtcccagtcccagggtcagggcagctgggacaagtggcctggagaaactaaaaggatggatgggctctactcaagagcccagggccagggggtggcccaggggcctggagacacccacccagggtacagggcctccccttacctccagctgtatcttccccaagtctcagccttggggctgcagcccagcctttgggattgggattgaga

SEQ ID NO: 9181 - DNA, 574 bp, Homo sapiens
  MAP TO Z97055.1; EXPRESSED IN BONE MARROW, SIGNAL = 7.1; EXPRESSED IN LUNG, SIGNAL = 7.7; EXPRESSED IN HEART, SIGNAL = 6.2; EXPRESSED IN FETAL LIVER, SIGNAL =  10; EXPRESSED IN ADULT LIVER, SIGNAL = 3.5; EXPRESSED IN PLACENTA, SIGNAL = 4.9; EXPRESSED IN HELA, SIGNAL = 7.3; EXPRESSED IN BRAIN, SIGNAL = 8.4
gattctcccccgacacccactgagggcccagcgcacgcagggcctgtgccgggggctggggatgactctcgctcctgatgcccacagcctcagggagggaggtgattcggtaactgggatgcggcggtccagtgtggagacaggcattaggtgtctgcagggagcacgggagacctaaacagaggatggctggtttccggtgacaggatggaaggtgacaggaaagcccactcagtggaaagcaacttggtgatcctgagggaacgcagctggaagtggggctgctgtggggcgtggccagcctgggcaaaagggggatgggggtggggacaagcagagctgcatcggccaagagatgacgggaaaagtcagcagggcctgtccttgggcttcacgctctggggttatgagatggcacagtgggactgtcatcaaaagaacaacataaccctattttcattcttcaccttccccctggtaccacgtggaggaggaaccaaaagggaaggagagtgatggggtggagacaggctgggtgactacagcttcttaggagaggagtgacacagtaccg

SEQ ID NO: 9182 - DNA, 558 bp, Homo sapiens
  MAP TO Z98884.11; EXPRESSED IN LUNG, SIGNAL = 1.6; EXPRESSED IN FETAL LIVER, SIGNAL = 1.5; EXPRESSED IN ADULT LIVER, SIGNAL =   2; EXPRESSED IN BRAIN, SIGNAL = 1.5; EXPRESSED IN HELA, SIGNAL = 1.4; EXPRESSED IN BONE MARROW, SIGNAL = 1.5; EXPRESSED IN HEART, SIGNAL = 1.7
gggaagccaaaagattggacacccatggtataagatttgaaggttaattcaagaccacagtaaaagaaatgttacaatccagtgattgaggctgggatggtcagggaagactttatcaaagaagaaagtacaaagtatgccaaacataagtggcatgagaaaagcaaagaggtgggaaatggcacaattagggaacaggtaagaatgtgtggcctaattatgttgttacagatacctgaagagctacaacattccagctttgaaaagaaagtgtatctcctgtacaaatacaacttcttcctcctcagaagaagacaaacagaaccacaaggcagatgatgtccaagccttacaaggtaacaagaatgcccctcagagttaaattcaaagaactgtaaatacatccttcttgtttctctttaatgtcttatattgttataagcataaaattctggtttcatattacctctttatgacagtaaggtttaatttctcagttacaaacttctgtaaactgggtcttttatgtaaatttctcgttgggaatttttcttttca

SEQ ID NO: 9183 - DNA, 560 bp, Homo sapiens
  MAP TO AL078474.2; EXPRESSED IN PLACENTA, SIGNAL =   2; EXPRESSED IN FETAL LIVER, SIGNAL = 6.3; EXPRESSED IN ADULT LIVER, SIGNAL = 4.4; EXPRESSED IN BRAIN, SIGNAL = 2.2; EXPRESSED IN HELA, SIGNAL = 3.6; EXPRESSED IN BONE MARROW, SIGNAL = 2.3; EXPRESSED IN HEART, SIGNAL = 3.7; EXPRESSED IN LUNG, SIGNAL =   4
actacatcctgccctgaagccaaatagctcttgcatttccaaatcctcagggacccacaaagatccccccacattagtgcagagagcctcaggattgcaaccacaccaccagcacctgagcccacgcagtaccctataacccaggatagagacagtccagcacatcagggaggctctcctgagaacatagataactaaactgaagcatgagctcctcaaagcctgaaagccaccaacctgaggccactaccaccaaaagcaaacctacctccctccagcactggagtcactgcaggcttatgcatcccacttggggtcttgaggagcagtctgtccaccttgccacccatcccattggtgctgatgcaccctacacagaggctgacagagcaaccccactcccccactgccaatactaccagtgcttatgggtacctctcataaacccaaggatagacccaccattcattgacactaccagtgcccatgcacatcactctggatcctgaggactggcacaactgtcctgctgcccctaatggtgtctgtgcaccctgctc

SEQ ID NO: 9184 - DNA, 546 bp, Homo sapiens
  MAP TO AC007282.2; EXPRESSED IN HEART, SIGNAL = 2.5; EXPRESSED IN BONE MARROW, SIGNAL = 3.8; EXPRESSED IN LUNG, SIGNAL = 3.1; EXPRESSED IN ADULT LIVER, SIGNAL = 3.1; EXPRESSED IN FETAL LIVER, SIGNAL = 4.4; EXPRESSED IN BRAIN, SIGNAL = 4.3; EXPRESSED IN PLACENTA, SIGNAL =   3; EXPRESSED IN HELA, SIGNAL = 2.7
taagctatgcacatcctcccatatactttaaatcatttctaggttacttataatgcctaatacaatgtaaatgctatgtaaatagttatgctgtgttttatttgtactattttttattgtattatttattttaaaatatatattttctattcacaattggttgaatctgcagatgtggaaccagtggatacagaggcccaactgtgtatcattttcttcatattgttacctgtaaagctttcaggcgttcttcattgcagttttccagatttgtaatttttatagttaccagtgttcctgtgggagtatgccgtgcaagatggacagaagtcaagttgtcaaatcctcttcctgtaatcagacataaaactcatgttagtaaccaaagaagaaaaaaaactgacaatttagacatcatcaaaattgaaaagtcttactcttcaaaaagtactgttaagaaaatgaaaaggcacactactgattcaaagtattaataatacttatcaagcaatccaattaaaaaacaggcagaggattaaacaggca

SEQ ID NO: 9185 - DNA, 574 bp, Homo sapiens
  MAP TO AP000347.1; EXPRESSED IN HELA, SIGNAL = 1.6; EXPRESSED IN PLACENTA, SIGNAL =   2; EXPRESSED IN BONE MARROW, SIGNAL = 2.3; EXPRESSED IN LUNG, SIGNAL = 1.9; EXPRESSED IN HEART, SIGNAL = 1.6; EXPRESSED IN ADULT LIVER, SIGNAL = 2.8; EXPRESSED IN FETAL LIVER, SIGNAL = 3.5; EXPRESSED IN BRAIN, SIGNAL = 3.3
tccacctgaggtctattccgtgcccataacacctaccccacaatcatccttccaggctgccccagctgacagaaggggacatgaaggctgacccaatattgctgcctgcctgggtcacatagacctgtcctgtcatccactgctctcaaatgggctctggacagaacccaccagacacacaactgtgagatcctcaatagccctagggtggaggtgctatgaccaagcccttaccctggctattcctccccctgaagatcagggtgactgggaagatgacagggcaggaaccaaggccccatgacctgtccctgaaggctagacagccaacaggaacatcaggggatttggccctcctaagtggctgcattccatggcagtcagccatgaggggtctaaagtggagagccacagggctctgtcccctgccccggcctgctcagcagtttcctctctgcctgagagcatataagacaggcaggattcacagcagcaggtgggcaggaagaaagtctgagtgcgcaaaggatggctcagacccccgcagctgaccccaaaaagaaaaccctgggct

SEQ ID NO: 9186 - DNA, 969 bp, Homo sapiens
  MAP TO AL008723.8; EXPRESSED IN LUNG, SIGNAL = 1.4; EXPRESSED IN BONE MARROW, SIGNAL = 1.4; EXPRESSED IN HEART, SIGNAL = 1.7
aacaattgggcccttaactggctccttcacttaggtaccagaccagctggatgggtaaggatagagaatgggatggggactccaaaactggagtatttgaaattttactgagaaaagggccgggactagaccaaaaagtcctcaacaaagaaggctcaacaacaaagacaagaggcagaaccagcctttgtcccccatgcctagccctgggaaagccggctatgggcaggagggagctggaagctgaggatgtctctgagggtgagggactgcaaaggggtgggggcggtggtggccagagagatgccagagagcaaatggcacccatggcttctttacctttggacatcttcagcatcttcggcgtcttcgggaggctgaggtactgcatgagttgggccttcttagctttcaaatccaatttggcaggctttgcagtggtggatgctggtgctgtggctgccacagtctcaggaatctcacactcatggcagggtcccacatctggcctgcagcagtcacagttgaggcccccgctggggcccaggcagcaagtcagtttgctccccattgggcacctaaacacacaaaaaagtccaagaggcacaaggacagaatgtagtcggagctcctcctccttctacggccagctaccgactgaaggctgctggccctggccgttgcctagtaaccacaaaacctcctatgtcacctggttgccaggaaacaaccaagtcaggctagtggctcacaatggccgaccccacagacccaccaaatgcctcacaatgcccatccctgctgctgcccaccttgtggccaccctgtccctctgtggtgactgcattattcatcctgggctgcctgagctttccagtcctgagaaaagtgcaggggttggaggttgttattggaagtcaccctgggcaatgaactcaatagaaaaccctggttactaaagtcagttcc

SEQ ID NO: 9187 - DNA, 578 bp, Homo sapiens
  MAP TO AC007841.1; EXPRESSED IN PLACENTA, SIGNAL = 7.1; EXPRESSED IN HELA, SIGNAL = 5.8; EXPRESSED IN BRAIN, SIGNAL = 5.9; EXPRESSED IN LUNG, SIGNAL = 7.1; EXPRESSED IN BONE MARROW, SIGNAL = 5.2; EXPRESSED IN HEART, SIGNAL = 3.9; EXPRESSED IN ADULT LIVER, SIGNAL = 7.8; EXPRESSED IN FETAL LIVER, SIGNAL = 7.4
gtcttcacagcaggccctcccagcacaggcccagaggcctattgaggagaaagtggttttgtgggctgggcccagggtccccttgctgtgtgcagcctagggacttggtgtcctgagtcccagcctctccagccacgactaaaaggagccaaggtacagctcgggctgtggcttcagaggatggaagccccaagccttggcagcttcgacatggtgttgagtctgtgagtgcacagaagtcaagagttgaggtttgggaacctctgcctagatttcagaagatgtacagaagcacctggatacccaggcagaagtttgctgcaggggcagggcctacatggagaatctctgctaaggcagtgcagaggggaaatgtggggttggagcccccacacagagtccctagtggggcactgcctagtggagccgcgagaagaaggccaccatcctccagaccccagaatggtagaccactgacagcttgcactgtgcatctggaaaagctgcagacactcaatgccagcccatgaaagcagctggggggcgggggggctatacctacaaagccacagggatgg

SEQ ID NO: 9188 - DNA, 589 bp, Homo sapiens
  MAP TO AP000347.1; EXPRESSED IN FETAL LIVER, SIGNAL =   2; EXPRESSED IN PLACENTA, SIGNAL = 1.4; EXPRESSED IN BRAIN, SIGNAL = 2.3; EXPRESSED IN HELA, SIGNAL = 1.5; EXPRESSED IN HEART, SIGNAL = 1.4; EXPRESSED IN BONE MARROW, SIGNAL = 1.5; EXPRESSED IN LUNG, SIGNAL = 1.7
atcccctaggctcttcttgccagagcttcactcaccttgactcccacggcccagtggtggctgctcacttccgacctggggtcttccttgggttgaactaaaatcctcctagatgagtgacatccactcggccccaggtctgccctcctgaggctccccaggcctctgcttcatccaggaggggagatctcagcagagggggctgaggctgtagtgggccaagctccaactctgaaccgcacagctcattcttccctctccaggagtgcctaagcctcaacaacttctcctcggtgcacgtcatcgtctctgctctgtgcagcaacccaataggtcagctacacaagacgtgggcaggagtgtccaggtgaggagggctctctccatggcagcatcagggttgacctagggactcacaggtctccccccatgtgccctcaatgactctgaaaggttcttggagtccagggacactggaggcagggatgggccggtggctgtggtcactaagctgccctggactcctaggcaaggatttccaactcaggactaaggttttttaaccatcaggaacagactggagccaact

SEQ ID NO: 9189 - DNA, 569 bp, Homo sapiens
  MAP TO AC007556.2; EXPRESSED IN PLACENTA, SIGNAL = 1.8; EXPRESSED IN HELA, SIGNAL = 1.3; EXPRESSED IN BRAIN, SIGNAL = 1.4; EXPRESSED IN HEART, SIGNAL = 5.1; EXPRESSED IN BONE MARROW, SIGNAL = 1.8; EXPRESSED IN FETAL LIVER, SIGNAL = 2.2
attttacgtgggaaggagggtgcagcgcatagctccctttgatggcagaaaggttggcaacatactaggaagtcaacaccctgacttactagatctcctttggacaagttgtgtaagtagaaatgaagtttcttttgccatgttactggcaatttgcaattaaagaatattgtccttttttttttttttaaaggactatgaggttccctgtgaattaattattgactccttttgtatgactaggtacctgtactgggctgactgggatacacatgccaaaatcgagagagccacattgggaggaaacttccgcgtacccattgtgaacagcagtctggtcatgcccagtgggctgactctggactatgaagaggaccttctctactgggtggatgctagtctgtaggtgtctctggttactcatgtgggtgttaagaagaggtttttcttccatttccaaagaagagggatttgcatcatgtgatgaaaatatagcatgccagatagacattgccagaatatagaatcacagttttaggaactatgtttatattggaacttggtgaaca

SEQ ID NO: 9190 - DNA, 569 bp, Homo sapiens
  MAP TO AC002472.3; EXPRESSED IN PLACENTA, SIGNAL = 2.6; EXPRESSED IN BRAIN, SIGNAL = 2.3; EXPRESSED IN HELA, SIGNAL = 2.2; EXPRESSED IN BONE MARROW, SIGNAL =   2; EXPRESSED IN HEART, SIGNAL =   3; EXPRESSED IN LUNG, SIGNAL = 2.4; EXPRESSED IN FETAL LIVER, SIGNAL = 2.4; EXPRESSED IN ADULT LIVER, SIGNAL = 3.4
ggaaagattccaaggggttgggctggggggttaccgaggagggatatagaaggtcctgaagaacccaatgatcaccaacttagccctgccgccctctgctctctctcccagacctccatggcaaaagggctaccactggaaagcagccggtcctcataaactaagcaggtgtgggcccaagacacatgctccgcccttgcctgggggatagggaggtggattatctgcctactccaccccattccctagattaggactctcctggggcatcacagcaccagagaagctgaaacaatccccctcccccatcactcctctttctaccttgcctttttggctccagctgcacagccccatgtaggaccgatgggagggtggggtctctacctatgatgggggtgcagatgggggaggagggccaggacccaggcagcaggagggtctgtgctgacagctggtaagcatacctctgctaggaacactggggacagagcactgggagagagacctccaggcccagacgcagcaggagcccctgccacatgcagtcggagccctgcaatacaggt

SEQ ID NO: 9191 - DNA, 973 bp, Homo sapiens
  MAP TO AL022318.2; EXPRESSED IN ADULT LIVER, SIGNAL = 3.3; EXPRESSED IN PLACENTA, SIGNAL = 3.7; EXPRESSED IN HELA, SIGNAL = 1.9; EXPRESSED IN LUNG, SIGNAL = 2.4; EXPRESSED IN HEART, SIGNAL = 1.9; EXPRESSED IN BONE MARROW, SIGNAL = 2.3; EXPRESSED IN FETAL LIVER, SIGNAL = 3.2
caactcctttcaaactcctggtagattgatatgttcataatggcacctagaatgataaatgcttttcagtaggtttcaatttactttgcccagatccagacttgaaagctgaaaggactccttggtccatgggctgcagaatggacattgtgttagcaggcaggaaagcaacattcatctccttgtgcatctccagcagagctcttgggtgaccaggtgcattgtcaatgagcagtaatattttgaaaagaatatttgaaaagaatatttttttccgagcagtatatatcaacagtgggcttaaaatatccagcaaaccacgctgtaaacagatgtgcagtcatctaagctagagcactggcagagtagatttagcatcattcttaaggaccctaggattttcagaatggtaaatgagcattgacttcaacttaaagtcaccagctgcactagcccctagcaagatagtcagcctgtcctttgaagcttcaaagccaggcattgccttcccctctctagctatgaaagttctagatggcatcttctttcaatagaaggttatttcatctacatggaaaacctgttgttcactatggccaccttaatcaatgatcttagccagatcttctggacaacttgcagctgctccatcagcacttgctgcttcaccttgcacttttatgttatggagacagtttctttccttaaatctcacgaaccaacctctgctagcttcagacttttcttccgcaacttcctcacctctctcagccttcatagaattgaagagagctagggccttgctctggattaggctttcgcttaggagaatgtcatggctggtttgatcttctatccagacccctcaaactttctccatatcagcagtaagcctgtttcactttcttatcattcatgtactcattggagtggcacttttaatttccttcaaaggcttttcctttgcattcac

SEQ ID NO: 9192 - DNA, 587 bp, Homo sapiens
  MAP TO AC007564.9; EXPRESSED IN HEART, SIGNAL = 2.3; EXPRESSED IN LUNG, SIGNAL = 1.7; EXPRESSED IN BONE MARROW, SIGNAL = 4.1; EXPRESSED IN FETAL LIVER, SIGNAL = 2.5; EXPRESSED IN ADULT LIVER, SIGNAL = 2.4; EXPRESSED IN PLACENTA, SIGNAL = 1.4; EXPRESSED IN BRAIN, SIGNAL = 3.5; EXPRESSED IN HELA, SIGNAL = 2.3
cccaagccaaggctgttacttcttctttgagatcctgcagttcctggcatctccaggcttctgggcaccactgtgttccccactgccaaccaaggaagctgcttctggttcgcctggtccagctgcagccttgcagagagctggcgcccatgccagcacctagagctgcctgccacactgcagcagccagcatgtctgactgccagtggccagaccccatgcttgctcacacaatccttgctgctccacacctgacttgcccttggcaggcatgggatccaggtcagtagcgtgagccaagcgcagcctgccattgggcagaacaagctcagtgggcctgagcaaaacttgggcaaaggcaccactagcctgaggtttcaggccagaaaaccgataccccaaagatcccataacactaacagcctcccttgaccgctaatatcctaacaccctcccatgactgtgtctctctctagctgttttcttaccctctcgaatcttcttaaagactaatctacactttcaaccttcactttctcacccctactttctcaccccttatttactcctcaactccctgcagtgtc

SEQ ID NO: 9193 - DNA, 580 bp, Homo sapiens
  MAP TO AB016897.1; EXPRESSED IN BONE MARROW, SIGNAL = 3.3; EXPRESSED IN LUNG, SIGNAL = 2.9; EXPRESSED IN HEART, SIGNAL =   2; EXPRESSED IN FETAL LIVER, SIGNAL = 4.9; EXPRESSED IN ADULT LIVER, SIGNAL = 3.3; EXPRESSED IN PLACENTA, SIGNAL = 5.5; EXPRESSED IN HELA, SIGNAL = 3.4; EXPRESSED IN BRAIN, SIGNAL =   3
gttcagtgggggatgctccgcagtgcaggctcgcgcccaggttgacacgcagacctcttgatcattgcaggagctgaaacgaaatatcagagttcactgtcggattcgtcctttgttgccttttgatagtgaatccgacgatccagttttgcagagcaggtaacctgtgtttgcacggtgtgtgtatgtctgtgtgctcagggaaaagacagaggagtggcacaattttaaatgccgtctactgtcctgtccccggtcccaaagcaggacattctcgagttgtgggtgggggctctgtttaaggatggcgctgtcttgctgacagtggacactctgcagccctctgtaatacggcctgcaaaaggccaaactgcctgagcaggcctctcgtgcgtggtagtggttctgcacctgagagggcgtccgtcttttcgtggtttgcctctgcggggtccgaccgaacagggacaggctttgaatggacttttccctttatgtcactatatcaaaaagggagcaccctgcctttatgaaccccaaagaccacccactccgccatgcaggcagtcagtgagtattg

SEQ ID NO: 9194 - DNA, 587 bp, Homo sapiens
  MAP TO AP000352.2; EXPRESSED IN BONE MARROW, SIGNAL = 3.5; EXPRESSED IN LUNG, SIGNAL = 3.5; EXPRESSED IN HEART, SIGNAL = 2.7; EXPRESSED IN ADULT LIVER, SIGNAL = 5.3; EXPRESSED IN FETAL LIVER, SIGNAL = 4.4; EXPRESSED IN HELA, SIGNAL = 3.5; EXPRESSED IN PLACENTA, SIGNAL = 4.7; EXPRESSED IN BRAIN, SIGNAL = 4.4
tctcattgcagcagccatactgactctttgcacttgtgtagcttgtccatggctctcttctctctgggctctcagctcccccatgccctgttcacaggacacagcacatagtaggtactgagggtatcagtaactgcatgtggcatgaaggagagtagtgtgactatcattggaccctatgggtctctgtccgatgacatgctgaggatctgctaggttacagtgcccacatctgagagtgggggtgggcaggcagcacataccagctccccaagaggcctcctgcctcccttcagtctgccctgaaggcttaccctgctgtgacacttctgctgtctcccaccccgcactgtcaggtcattgactgcagcatggctgtgcaggaggaggccaaggagccccacgtctcttcagtgctaccctggatcattctacaccggatcatctggcaggaggaagacaccttccattctctgtgccaccagcagcagctccaaaacccagcggaggaaggtgcacaggcagtgggtgcagtggggatgagctctgactcccatgtccttgcccctgtcctctgccctagggtc

SEQ ID NO: 9195 - DNA, 544 bp, Homo sapiens
  MAP TO Z86090.10; EXPRESSED IN FETAL LIVER, SIGNAL =  17; EXPRESSED IN PLACENTA, SIGNAL = 6.1; EXPRESSED IN HELA, SIGNAL =  18; EXPRESSED IN HEART, SIGNAL = 5.4; EXPRESSED IN ADULT LIVER, SIGNAL = 6.7; EXPRESSED IN BRAIN, SIGNAL = 2.7; EXPRESSED IN BONE MARROW, SIGNAL = 4.2; EXPRESSED IN LUNG, SIGNAL = 9.3
gaaagcactttcagtccaaatgcagaaatgtcccacatgcccatcaggagcaagtttcaaaatgttcagtttgcttacattaagcagaataattctaggaatgtttcggaaggctttgacaatacaatcatcttcattagagacgatgcagggtcccttgcgctggatacgatggtttctcattttgcccttgccagctctcatttgctgagaggcatagcccttttttgtatcactccaggcttaagtggcaaaacagcctccttgattgtcttgtagccttcaactttatctctgaccaccaaaaaaagttcaggaacttccttaatatgatgacctgtagacatgaccagcactggtaaggcagaggcagccaggggagaacagatagcatattgttttttggattgtgttcactctacagtgccaacagtgccaggttttggttggtgcaaacatgtggcctccatgacagatatttccaaaagcaccctggccaaaagagtgagtcccaccacctcaaactctgggaatttgagaccca

SEQ ID NO: 9196 - DNA, 560 bp, Homo sapiens
  MAP TO AL021392.5; EXPRESSED IN BRAIN, SIGNAL = 3.3; EXPRESSED IN HELA, SIGNAL = 7.9; EXPRESSED IN FETAL LIVER, SIGNAL =  19; EXPRESSED IN ADULT LIVER, SIGNAL =  14; EXPRESSED IN PLACENTA, SIGNAL =  16; EXPRESSED IN BONE MARROW, SIGNAL = 3.5; EXPRESSED IN HEART, SIGNAL =   5; EXPRESSED IN LUNG, SIGNAL =  11
tgacaggtgcaagaatgacccagggtgctgttactgaactccaagccccctccccgccctgagagtcatgagtgggccactgaccccagagatggtgggcacataggggccggggaggagagaccctgctccaagccaattccaaaggggaaggatatgagccgggcagtgacctgtgggagccgcagactcgggcagtggacaagcccaccacataggtcactgccctttacaaaaagccccacatatatcccttctgctctccaggaatcagctccactttctggaaacacattgggtggactggatcagtgtccaagtacagaccccttgggaaatcagctgaaagctgcagcccctgcctctgctccaacacagatgtgtgaccacattcaattcacataatgaagacagagaggaggcagccttgaactcatgctaggaaacagcaactgtgaaaatagtaaatgctattactggcagatccatgcctgagccagaccctgtgccgaccgcttcacacagattgtcttgttaatccttcaacaacgctaggagtc

SEQ ID NO: 9197 - DNA, 573 bp, Homo sapiens
  MAP TO AC005300.10; EXPRESSED IN PLACENTA, SIGNAL = 1.7; EXPRESSED IN BRAIN, SIGNAL = 2.8; EXPRESSED IN HELA, SIGNAL = 2.6; EXPRESSED IN BONE MARROW, SIGNAL = 2.7; EXPRESSED IN HEART, SIGNAL = 2.6; EXPRESSED IN LUNG, SIGNAL = 2.4; EXPRESSED IN FETAL LIVER, SIGNAL = 2.4; EXPRESSED IN ADULT LIVER, SIGNAL = 2.4
cctctcaatacatcctcagactccataatctgtagtttaggtttagtaactaatatgtggagtggtccttgaaagcccttccaaaggccaggttactgcagcaacaacagggcctacctaagtgaggtcccggcacctggggtgtcaggacggatgggaactgcctgcaggactgcccaggcagcagccaggaatagaccaccaggccaaggctgggagctttgtgtcctcacctgggcatcttggcttcagccatccacaggagatccatgttgctggctaggacggggaggtgggggtaggggggtgttgccaggccagccccagggctcccattgctgaggaggacatccatgatcagctgcaggctggtctcccagcggaccggctcccctaggaggagcacccctttaaagaacagaggcgcaggtgagggctgcagggcagatggcaggcggcaggccctcaggatgccagctagggctacccatccacaagccctccacccatggtgcacccagctgggcaggggcacagctccccaacaagcccagtagagccccttacccatcc

SEQ ID NO: 9198 - DNA, 571 bp, Homo sapiens
  MAP TO AL022318.2; EXPRESSED IN ADULT LIVER, SIGNAL =   5; EXPRESSED IN FETAL LIVER, SIGNAL = 5.2; EXPRESSED IN BRAIN, SIGNAL = 6.9; EXPRESSED IN PLACENTA, SIGNAL = 3.6; EXPRESSED IN HELA, SIGNAL = 6.7; EXPRESSED IN LUNG, SIGNAL =  10; EXPRESSED IN HEART, SIGNAL = 3.6; EXPRESSED IN BONE MARROW, SIGNAL = 6.4
tgggtgaataatcaggcaggcgtccccgcggtgattaaacaccaaggaaaggctgtcttcccgagtccgtgactggcgccggagttttgggtccatggataaaatgtgtctccttgtctctactagagaagaaaaagaactggaattggaaggacaggaagattgaagggtagcgagagaggaaggctggagggtagtgagagaggctggagaagagcgaaaagaccacttacctgatttgaaattggtgagatgttcctttggctggttggtctgaggacccgagttgtaggtggatctcctcacccagtgaaggtgaggacaggggaccggtctcccgaaggagtcctcccgtcccgagttttggcaccaaacgtcacgcacgtctgtgtgaagagaccaccaacaggctttgtgtgagcaacaaggctgtttatttcatctgggtgtgggcgggctgagtccgaaaaaggactcagcaaatggtggtgggatcatcattagttcttataggtttgggataggcgtacaaagtacagtctcaagagtggggacaatattacaaagtaca

SEQ ID NO: 9199 - DNA, 567 bp, Homo sapiens
  MAP TO AC004624.6; EXPRESSED IN PLACENTA, SIGNAL = 1.3; EXPRESSED IN HELA, SIGNAL = 2.7; EXPRESSED IN BRAIN, SIGNAL =   3; EXPRESSED IN BONE MARROW, SIGNAL = 4.1; EXPRESSED IN HEART, SIGNAL = 2.9; EXPRESSED IN LUNG, SIGNAL = 4.4; EXPRESSED IN FETAL LIVER, SIGNAL = 2.8; EXPRESSED IN ADULT LIVER, SIGNAL = 2.2
gagtgctgatggctgaggaggtgcctcctcctggcagccctttcctccaatgccctagttgcttcctggcaatgcgaggctccttaagcacctgttggcagcactgtgagatgtggtcgtttgatgtctaagttgaccctggcactcaaagccatagcaagtgtttatttatgtttattattaaaatcaatcataaatcatttattattgtaattttgcacttgattatttgttttcttctccattatgtgaaggccacagcccgagaggaggctgacctgcgcttctgccagctgacccgggagtaccaggccctgcaacgcgcctacgccctgctccaggagcaggtgggaggcacgctggacgctgagagggaggcccgggtgagtgcagccagcctcagggctcgagggaggggccgaaggccaggtcatgtaggtcctttccagaagtgtgacataccctggcttggacactcagaggggattctgagaggtggtggggaacccatagcaaggtctctgctgtggtgacattctagatccctctctgcatcctcggtgtgat

SEQ ID NO: 9200 - DNA, 567 bp, Homo sapiens
  MAP TO AL021707.2; EXPRESSED IN BONE MARROW, SIGNAL = 3.6; EXPRESSED IN LUNG, SIGNAL = 2.7; EXPRESSED IN HEART, SIGNAL = 2.4; EXPRESSED IN ADULT LIVER, SIGNAL =   6; EXPRESSED IN FETAL LIVER, SIGNAL = 1.9; EXPRESSED IN BRAIN, SIGNAL =   3; EXPRESSED IN PLACENTA, SIGNAL = 1.8; EXPRESSED IN HELA, SIGNAL = 7.9
accctaaggaggaaagtggcattctatttctagcattttttcccctcatccccattatgggagctacagcttagaatcaatttcagctctaatcccttagccttacaatcaccagtatctgcctttgacgtcctctgagacctgctctccttcgtgcagggagtgccatgccctcgtgggtgacagcgtgctgacagagtggactgtgaatattcttcaagtacttgtggtcctgggtcatcaggggttgcattctacccagttacagagggtttcccatcgaggaagccagcagcatcagagaagtggcagggggcctttcctccgtgtgtagggccggccttgctaacccgaaacatttcctagaaatgtgctgcttgctaacagccgctgcttcactttcagctttcagagtccactgctgaatcccacttaatggagaaggaactggatgaactgaggatcagccggaagagaaaatgaagaccccagagacatttattggggagtaggatgtggctgagtgctttttttttggccagactagcggattcagtcctggaagag

SEQ ID NO: 9201 - DNA, 577 bp, Homo sapiens
  MAP TO AL022320.23; EXPRESSED IN PLACENTA, SIGNAL = 3.6; EXPRESSED IN HELA, SIGNAL = 5.8; EXPRESSED IN BRAIN, SIGNAL = 5.1; EXPRESSED IN HEART, SIGNAL = 4.4; EXPRESSED IN BONE MARROW, SIGNAL =   8; EXPRESSED IN LUNG, SIGNAL = 5.6; EXPRESSED IN ADULT LIVER, SIGNAL = 5.1; EXPRESSED IN FETAL LIVER, SIGNAL = 5.2
taaaaacatcccctccccaccaaaaaaagggcacatatacacacatacaaaaatttttgtgtaagtctgggaaattcataaccccttctctggtgtacatgggtattaataataataataataactaagatttactgagtccttgctatgtggcagacattcttctaagtcatcaattttttttccctttgcttggattccatatctagtaaataatttcagattaaaatttggattcctattgaggtctacttacagggagagaatgtgctggtcacatgaatctcaaatgtagctacattttcgttatcaataaactggccgtctggttcttcattcagtctcatgagcttgattaatgtgtgtctgcccccaggaaacagattggttcttagtaagctgaccaaatcaaatctctgcctgcaaggctgagggctctggactatggtcaattcactggagaaatggatacatccctgcaaaacctctcaggtgacagcataccagccattccccaggcagaagcagtcctgatatactgtgtgttgtatgagctatggagttagacctgagttca

SEQ ID NO: 9202 - DNA, 580 bp, Homo sapiens
  MAP TO AL031588.1; EXPRESSED IN PLACENTA, SIGNAL = 3.6; EXPRESSED IN HEART, SIGNAL =   3; EXPRESSED IN FETAL LIVER, SIGNAL = 4.6; EXPRESSED IN ADULT LIVER, SIGNAL = 3.1; EXPRESSED IN BRAIN, SIGNAL = 3.8; EXPRESSED IN HELA, SIGNAL = 4.3; EXPRESSED IN BONE MARROW, SIGNAL = 3.9; EXPRESSED IN LUNG, SIGNAL = 3.5
agaaaaatgggaaccccaaccctctctagtccacagtgcccccgtttcccaggcctctctggagttgttgccctggtgctggctgcacaggaccacagattagggccacccccgggtcaaatctgagagaggaaaaaccacccatgtgcctgaggtcatttttcaagttgttgctttctcctcagttcacctgctaacgtttacatcctagaatgctcagtggctaacatgatagaatatttctacctcaaccccaaagccatgattagcaggaaaatactagaagcatctgagagagagaaagcagtccaggtagcccggagcaggcctgtccatcagccaggccaggatgtccatgtgaggaccacgaagtgctccgcagagcatccgcagcagaccgtgacgggtgagggctgaacgagcccctctgtgatcctgcctgaacagatgacagcacaaacaccggccaagccacagggcgtcgactcccccggcccaggtgacaggggtgaccgcagctgcttcagtcacagcttcagcctcgccttgggctcctcagcctggaggcaaggcttgttaa

SEQ ID NO: 9203 - DNA, 594 bp, Homo sapiens
  MAP TO AL035681.13; EXPRESSED IN PLACENTA, SIGNAL = 2.9; EXPRESSED IN HELA, SIGNAL = 4.6; EXPRESSED IN BRAIN, SIGNAL = 3.8; EXPRESSED IN LUNG, SIGNAL = 5.3; EXPRESSED IN HEART, SIGNAL = 3.7; EXPRESSED IN BONE MARROW, SIGNAL = 5.5; EXPRESSED IN FETAL LIVER, SIGNAL = 6.1; EXPRESSED IN ADULT LIVER, SIGNAL = 3.8
tgcaataggcacgtcacttccaaaggagccctgggcaacagagttgttctcgaagcagctgggctgacggaacacgcagagagaagccaaggagggggtgggcacatgcaaggctcttaaggaaattccctaaccccagtcagcatgggaactggcgggctgtactttctgtaggctgagtggggagggaacatttgcaacccctggaggcttataaataccctggacatttgcgcgtgttgtaacagtggcaggccaagcctccctgcccccagctgacagcgtcgcacccccaggtctctgagctgttcgtcccttttctctaacagctccagaagccacagcacgtacagcgtgggggtcgaggggtggttattacctgctgggctatcagcacggagctcttgggccctaggcgcagcagcttctctggagagggaaaagccaggaaggtggagacgtctgcaggaggtggggaggacagcacgggagctggctcctgggaagtaggggcacagaggctctggagaattccggaccccagactccccgacacagctgtgcccatccccacacccagcacatccacccttc

SEQ ID NO: 9204 - DNA, 576 bp, Homo sapiens
  MAP TO AL031588.1; EXPRESSED IN BRAIN, SIGNAL =  12; EXPRESSED IN PLACENTA, SIGNAL = 2.9; EXPRESSED IN LUNG, SIGNAL =   9; EXPRESSED IN BONE MARROW, SIGNAL = 9.7; EXPRESSED IN HEART, SIGNAL = 5.8; EXPRESSED IN ADULT LIVER, SIGNAL = 6.5; EXPRESSED IN FETAL LIVER, SIGNAL =  12; EXPRESSED IN HELA, SIGNAL = 8.6
ctgcatcacactgcctggcactcacctggcaggcaggccatcccaagagcaccccaccagctgctaaggctgtggggaaagctgcctaccacataggggcagaggagaggaaaaaagcaaggagtctcgtataggctgctcccgatgtcagcagagccctgtaccgtgcgcctcagcaaactcctccatctattgctccaaggcccgcctttgatgttaggtcctggagaaggggaagtggtgcgggacccacaggtccagctgctccgtgccatgcagtcgggaaagggaaacaggcactaatcaaaggcaactgctcactcgtacctctttcttctgaagcacatgatgaagtctattctcagcagcgattttctttacaaactctttcgttaatccccccagagggaagatggttctcctcagggcatcctgggaaacctggctgagaaagaaggtctggtctttaaagctgtcagctgcctggaggagttttaccgctgccaagaataaagaacaaaagacgatgcaggaataaaaataatgatacttcactttcaacaatgtccttctgtt

SEQ ID NO: 9205 - DNA, 557 bp, Homo sapiens
  MAP TO AL035681.13; EXPRESSED IN LUNG, SIGNAL = 1.6; EXPRESSED IN BONE MARROW, SIGNAL = 1.5; EXPRESSED IN HEART, SIGNAL = 1.5; EXPRESSED IN BRAIN, SIGNAL = 1.4; EXPRESSED IN PLACENTA, SIGNAL = 1.3; EXPRESSED IN HELA, SIGNAL = 1.3
cggttctgtctgactctgggtctctagccatcaccctgcatcccaccacctccacctctactcccggcttagctcttcaaggacaggagacctcatctctttatctctagtagctggttctgcacacagtgggtgatgtgaaaagttgaggtgcaaacgaggacttgactgaggccgtgaggcagtctgtctcccctgctagcacagttagctcactctctcggtacactctcatcgccacacaggtcccactctatgaccagtgggaggatgtgatgaaagggatgaaggtggaggtgctcaacagtgatgctgtgctccccagccgggtgtactggatcgcctctgtcatccagacagcaggtgagtgtttggccagggcagggccagggatgtgtctgcagagtgacatctctagatgggtgaacagtgttgtaggcaggagttggcttcataaaacaaaaatcccacccactggaatttttgccccacttctaaggattcttttaccggagaagggaacacagagcttggcaggcttggaaaccccaaatttt

SEQ ID NO: 9206 - DNA, 572 bp, Homo sapiens
  MAP TO AC007841.1; EXPRESSED IN LUNG, SIGNAL = 2.4; EXPRESSED IN ADULT LIVER, SIGNAL = 4.6; EXPRESSED IN FETAL LIVER, SIGNAL = 7.6; EXPRESSED IN PLACENTA, SIGNAL = 6.7; EXPRESSED IN HELA, SIGNAL = 2.2; EXPRESSED IN BRAIN, SIGNAL = 1.5; EXPRESSED IN HEART, SIGNAL = 2.1; EXPRESSED IN BONE MARROW, SIGNAL = 1.3
aggacactatgcagggaagggcttcttctagactttttcattatattttacattttattgctggaaatgttttcttctttgcattaaaagatttcaaaattttcccccaggcatatatttaaagtctccgtccaccctaactttctttccaagaggttagtatcctttgtcatttactaaatgttttcctcccctgaagcgtcctctccagggacaaggagatgtcagggctcctgtatttctgaagggctttccccgtccacacctttctacaggttgccgtgactggaacaaaaaacaaatggtcaaaagctccatgaagaggaactggcaggaactgagcctgggctggactgaatgctaactttcaatctggtctggaaaaaggatttggataggaaaattaattgtaaaaatgagtaaattgtctatcatctcccggctgaatgaaataatagtgttctggaattacattatgattaacagaggctgtcacacaaactctggagacagcccacatcacccagcttagcacagagaaggtatgaattagtgtgcgctgaataaccaaa

SEQ ID NO: 9207 - DNA, 956 bp, Homo sapiens
  MAP TO Z95114.19; EXPRESSED IN ADULT LIVER, SIGNAL = 6.1; EXPRESSED IN PLACENTA, SIGNAL = 3.8; EXPRESSED IN HELA, SIGNAL = 2.7; EXPRESSED IN BRAIN, SIGNAL = 4.5; EXPRESSED IN BONE MARROW, SIGNAL = 2.9; EXPRESSED IN LUNG, SIGNAL = 2.3; EXPRESSED IN HEART, SIGNAL =   4; EXPRESSED IN FETAL LIVER, SIGNAL =   5
aatcccagggcatttaaaccaagcaaccttaacatctatacgaccagacctttactacagacaatgcccagaaatctgcagatccaaccatggctttatacccattgttcttgaactagtccccctaaagcacttcgaaaattggtcagcctctgtatcataatatcactgtgaagctaattagcattaaccttttatgttaaagaccgagagccaggatttctccacattaaaatgtcccaactaaacacatctacattatttactatggttttatgtataatcatatcactctttatcttatttcaattaaaattctcaaaatttatctccccaataagctcaacactaaaattctttgaatcacagaaacttgaaattccttgagaaatgaaatgaatggaaatgtatttgcctttcattgccctaacagtaatacgaagacccgtagttataatctcctatttccaagtattttatttctatcatctagtcacctgattaacaactggctaatctccattcaacagcgactaattcaactcatattaaaacaaatgataataatacataataccaatggatgaagctgatcccttatactaatttcatgtattctgtttattggctcaactaatttactaggaggcttcccactcacaccaactactcaactctcaataaatttaggtatagctattccagtatgagcaggagcagtaattactggtttttgtcacaaaacaaaagcatcccttgcttatttcctaccacaaggaatgcctatttaacttctctcttttctagtcatcgtcaaaaccattagccttttcattcaaccaatagccttacccatatgattgacagccaatattacaactgtaaatgtaaattatacatttaactggaggtgccatcttagtatcaacatctattagcctacccacagcctcagt

SEQ ID NO: 9208 - DNA, 583 bp, Homo sapiens
  MAP TO AL079300.11; EXPRESSED IN HELA, SIGNAL = 3.4; EXPRESSED IN LUNG, SIGNAL = 3.8; EXPRESSED IN BONE MARROW, SIGNAL = 2.2; EXPRESSED IN HEART, SIGNAL = 3.9; EXPRESSED IN FETAL LIVER, SIGNAL =  18; EXPRESSED IN ADULT LIVER, SIGNAL = 5.8; EXPRESSED IN PLACENTA, SIGNAL =  11; EXPRESSED IN BRAIN, SIGNAL = 1.8
tgggccacattctactcactccttgtttttatatagtttcatcagaacatataatttgtttacatatggtctatggctgctttgaactacaacagaagatttgagtagctgcagcagagaccaaataccctgaatggctcacagagcctaaagtatgtactacctggctctttataggaaaaagttcaccaacccctgatttaaggaaatatcagagaaaccacctaaccttgtgttttgaagctggattctgctggtccatgacctcctgaccttttccctgctctgttctgcaatgcaggaagttgcaaaggagctgtctcccacaggtgtgtttgaggctcctgggtcaactggcttctgtctggattcagcaatggcagatactgacagtagactaaagagggagaagattaaacacacacatacacacgtatacacacacagatatgtatacacacatacacatatacacaaatatacatatacacacatccacacatttatacatacgcacacatgcacactacacacatatgtacatacatacacacatgcacacatacatatacacatgcacaca

SEQ ID NO: 9209 - DNA, 557 bp, Homo sapiens
  MAP TO AL022319.2; EXPRESSED IN HELA, SIGNAL = 2.2; EXPRESSED IN LUNG, SIGNAL = 1.6; EXPRESSED IN HEART, SIGNAL = 2.4; EXPRESSED IN BONE MARROW, SIGNAL =   2; EXPRESSED IN FETAL LIVER, SIGNAL = 1.4; EXPRESSED IN BRAIN, SIGNAL = 2.1
cgcctacagctttcatctccgcggacatcgcttactgggctggcaaattgctggctctgagcagcatctggaccctggctcagtcctccccaccgagggtccctctcagggtcctactcctcttttgggacgacttcttgagtcagatgtaattacagatggaaatgggccttctcctttcatctgggcttgagaggagctggcagttttattagctttcccaggcatcaggctggaagctggcgcttgggttgttattttttttttccatcctccttttaacccacatggagtcggagtcaggtccttgcggctccccgttgctgatggaggggctcctgctctcggtcctctgctctcccacctcccagccagctgggtcctccacctgcacacccttctctgctccctggcgccagctctctcttagcttttaggtctctgctgagatgtcgctgcctcctgaccccactagcaccgctcccctagccaccccccactttcctggcgtcagcacacactggcttggtttgttaacttggtttactgggctttgg

SEQ ID NO: 9210 - DNA, 575 bp, Homo sapiens
  MAP TO Z97055.1; EXPRESSED IN ADULT LIVER, SIGNAL = 1.9; EXPRESSED IN HELA, SIGNAL = 1.5; EXPRESSED IN BRAIN, SIGNAL = 1.9; EXPRESSED IN PLACENTA, SIGNAL = 1.6; EXPRESSED IN LUNG, SIGNAL = 1.4; EXPRESSED IN BONE MARROW, SIGNAL = 1.8; EXPRESSED IN HEART, SIGNAL = 1.4
tctgctagagctcttcctatttttgattataaatttatgtgttttggccaccaacccagaaacttccagaaagcagggaccatgaatccctctggaaaacagtgttaattataatcttagcagtcacagtgattgtaacgctagcagttactgtttcttgaacatctaccccatgccaggcgctgtccagcatgttctgtggagacattaatggaatcgtcacagcgacccttccagggaggaggtctcatccccacttctcagccctgcccgaggtcacagagctgtctgtggtgttaagcttgcttcatctgaccctgtggccaatccccacatccgccacaccatctgtcttccacgaggctgcagagactcagtaagtgttggatggaataattgtttattttttggtgggggctgggggtgggagcccagtgttttagataatgagaaaacagataaattcctgataaacatgctcccaacaggtctacagcgatgtgctataatatgtgtcctttaagctgtaagaactaacagcagagcccagatgtgcaaggccccctcaatctaag

SEQ ID NO: 9211 - DNA, 562 bp, Homo sapiens
  MAP TO AP000344.1; EXPRESSED IN PLACENTA, SIGNAL = 3.5; EXPRESSED IN HELA, SIGNAL = 1.6; EXPRESSED IN BONE MARROW, SIGNAL = 1.4; EXPRESSED IN HEART, SIGNAL = 1.3; EXPRESSED IN LUNG, SIGNAL = 1.6; EXPRESSED IN ADULT LIVER, SIGNAL = 2.6; EXPRESSED IN FETAL LIVER, SIGNAL = 3.6
cggcccccagaaaattatagggagatgggaattttctacctggtcctgaagagcaggcaggaatggaaacaacaactgatcaacattcccagactctgaaaggcaggtgaatggcacagctcaccatggtacagttccatccacacacacctgggaatgccctctccatgaggaaacagaggcagaggaggcagccagtcagtagacaacatggatctccttggccatcaacctcgctgggctgtcgtcctgaagcggggtgctcagagactcacctctatgatactgagctgtgatcagcttagggatcacaaagaacacatctccaagcaagtccagaagactgtctcggatttcagtcagggagtgcttgtcatggaagtattcaccagccacaaggtgcaaataattgggcaggatgtgctgtaaaaaaatcatagtcataggagatccaggtcaaccacaatggccaacacgttaactctgcaggtatgattctgaatgctttacccacattgcttcatttaacccacacagcaaccctgtgatgcaagtatcaaaa

SEQ ID NO: 9212 - DNA, 562 bp, Homo sapiens
  MAP TO AC008151.1; EXPRESSED IN HELA, SIGNAL = 1.3; EXPRESSED IN HEART, SIGNAL = 2.6; EXPRESSED IN LUNG, SIGNAL = 1.2
ccagcttctgcagtcaactcctccctcttgagcttctcccaagttgcccttcaagcaggggaaggagatagataggatcccagcctctccatgatactactccccaaccccctccacccacatctgccacagaacgcctgccttcttcagaaaaacaaacacccatttgccccccggctcaggctacacaacacccagaggaaccagatgcccaccagccctacaaacacttgttccaggtttgtgctcatcagggacaccctgttgcacaaagaagaaactgacctggtacctcccttggcggggaatccattcctggggagaagatgagaggagaacaatgagaacatacaggagaaggagctgaacaccgtaaatgagtgccaggttaggtgtcatgggaggttaggagaggaagaattactttcatctggaaaaatcagaagccagctatatggacaggtggtatccatggtgcatcataaaaatgagaaaaattaaaaatgtgaaatggaggaacaaagctttccaagaagaaatggaataagcaaaggctttccca

SEQ ID NO: 9213 - DNA, 569 bp, Homo sapiens
  MAP TO AB016897.1; EXPRESSED IN LUNG, SIGNAL = 4.7; EXPRESSED IN HEART, SIGNAL = 2.8; EXPRESSED IN ADULT LIVER, SIGNAL = 5.4; EXPRESSED IN PLACENTA, SIGNAL = 9.5; EXPRESSED IN BONE MARROW, SIGNAL = 2.3; EXPRESSED IN FETAL LIVER, SIGNAL =   5; EXPRESSED IN BRAIN, SIGNAL = 3.5; EXPRESSED IN HELA, SIGNAL = 4.5
ctggagcatctggaacacagggcaccaagtccctaggctgcacacagcacagggaccctgggcctggcccacaaaaccacttttgcctcctgggcctctggacctgtgatgggaggggctgccatgaaggtctgtgacatggcctggagacattttccccgtggtcttggggattaacattaggctccttgctacttatgaaatttctgcagccggcttgaatttctccccagaagatgggtttttcttttctactgcatcgtcaggctgcagatgttctgaactttgatgctctgcttcccttttaaaagggaatgcttttaacagcacccaggtcacagcttgaatgatttgctgcttagaaatttcttccacccaataccctaaatcatctctctcaagttcaaagttccacaaatctctagggcagaagcaaaatgctccctgtctctttgctaaaacataacaaagtcacctttactccagttcccaacaagctcctcatctccttctgagaccacctcagcctggaccttattgtccatattgctatcaggcttttggtcaaa

SEQ ID NO: 9214 - DNA, 587 bp, Homo sapiens
  MAP TO AC004624.6; EXPRESSED IN BRAIN, SIGNAL = 4.5; EXPRESSED IN PLACENTA, SIGNAL = 3.8; EXPRESSED IN HEART, SIGNAL = 3.1; EXPRESSED IN BONE MARROW, SIGNAL = 5.1; EXPRESSED IN LUNG, SIGNAL = 3.3; EXPRESSED IN FETAL LIVER, SIGNAL = 4.9; EXPRESSED IN HELA, SIGNAL = 2.9
tgtgaagctgagaaaggaagtcactttatctatgaggtgaaatttacggccctgttaacaatggcacagataaaattccataataaatggtctaagacagacggcatgaaataaataacagtccttccaacagaaaaattaaatttcaaagctgaagagagtctgaagtctccctgctctaccgccctccacacttcctgtttcttctccatcccttcctataatgcgttcgctctccgtccgacctaccttcttgctaatccagacctcttccccaaccccagcaaaactcgggccctctcctccttcagcagcaggtggtggtgtaatgtgcagggggagctgggttccaatccctctcctcctctgctcttccctgaaccattgccttcctaccccctctactcccaaagcaaaaataaaagggatgataatattttctcatctaacagaatttgcactacagacagtgagataaaataaaatatgtgcttggaagtgccattaaaataaaatgaatcaactagttcatggagtcattcaacaagcatgtattaagccctgggaggagccaggcactgttctag

SEQ ID NO: 9215 - DNA, 581 bp, Homo sapiens
  MAP TO AC005300.10; EXPRESSED IN LUNG, SIGNAL = 3.9; EXPRESSED IN FETAL LIVER, SIGNAL = 6.2; EXPRESSED IN ADULT LIVER, SIGNAL = 2.3; EXPRESSED IN PLACENTA, SIGNAL = 4.5; EXPRESSED IN HELA, SIGNAL = 2.4; EXPRESSED IN BRAIN, SIGNAL = 1.8; EXPRESSED IN BONE MARROW, SIGNAL = 2.2; EXPRESSED IN HEART, SIGNAL = 3.3
cccatgtcctttttgctttgtctacagtcttgcccaaaattccaccccactggggaccctcactgctgcctcattcttattggtggcttaggcaaaaggcccctcctgaataactttactaacaggggtaggagagtggagggatgtaggtaacaagagagttaaggagagataagttatacagcaaaaagtttaagagagcagaggttgtggttaggggagatcatatgggattagccacatgggtcacacatacctggttagagatgggacagacttctatggggatgtcctttttccaggagtaagtcctgactgcggggtgtttgctcaaagcaaatccatggccgattctggtagtgttcagcatcagagcatccagaatgttcctgtctatggaagtaccctgccagtctgaacacacgggaatggtcttccatgggggatggatgggtctggtcttccatgggggatggatgggtctgacccacccgccccccgaccatcctcaaataaacagccccccaagcacaaaaatgaagagaaattaacattaacacaaatacacacacacagtttcc

SEQ ID NO: 9216 - DNA, 579 bp, Homo sapiens
  MAP TO AC004624.6; EXPRESSED IN LUNG, SIGNAL = 1.9; EXPRESSED IN HEART, SIGNAL =   2; EXPRESSED IN FETAL LIVER, SIGNAL = 2.3; EXPRESSED IN ADULT LIVER, SIGNAL = 2.5; EXPRESSED IN BRAIN, SIGNAL = 1.9; EXPRESSED IN PLACENTA, SIGNAL = 2.1; EXPRESSED IN HELA, SIGNAL = 1.7; EXPRESSED IN BONE MARROW, SIGNAL = 2.1
gtcaggtacccaagaggcagggaagcaggaggaatgggatagtcttcaccaaggatccaggtgtggctgtcaagggtgccccaggtcagtgaggctcctgctgggtgattcatgtgggggcaaacggggaagaccaccaagtcccttctcatctgagtgcccccaattcggtgagactgccactctctagcaaacgggctctgaagctgtcatggattcctgttctgacgctggtccctgatggcgcctccctctttctcaggacctgttcagcaggcagaagggctacctggaagaggagctcgactaccggaagcaagcccttgaccaggcttacctggtaggaccagaagtgggtttgacactttggcttcttagactccacattagaggctgctttttcctctggggctgaaactgcatttagggcgctccccagtgccaaacaggagtgataaaaatgccatctccaccttgtgactggaatgaccgtacagactgtccctttttccaaatcaatcgtgattttcaaaaatattcaaagttactttaatggttttcttagacatgcttcttaaa

SEQ ID NO: 9217 - DNA, 557 bp, Homo sapiens
  MAP TO Z97055.1; EXPRESSED IN LUNG, SIGNAL = 6.1; EXPRESSED IN FETAL LIVER, SIGNAL = 6.1; EXPRESSED IN BRAIN, SIGNAL = 5.9; EXPRESSED IN HELA, SIGNAL = 5.4; EXPRESSED IN HEART, SIGNAL = 5.2; EXPRESSED IN BONE MARROW, SIGNAL = 5.7; EXPRESSED IN ADULT LIVER, SIGNAL = 4.2; EXPRESSED IN PLACENTA, SIGNAL = 4.3
accccaaagacacaatccagagttcgaattctggctccaccacctgcaagctatgtgacccaatgccctttgcctcagtttccctctctgtaaaaaaggaaaagtaagacctgctttatacagttactctgagaattaaacaagataaatacataaagcttaagctcacgtctgggcacatattaagcgctcgccaaatgcctcctgattgtgtgtttttggttgtaacgtaggacttgagcacatgagttctggagccaggtggcctgtgtctgaatgtctattgcaccaatttgaagagctctgtcctgtggatgatgttcaggctctccagcccagacctctctggcacacccactgccccatgaacacacacacacacacacacacccctcctgccatattgagttatgtgccctcaaggtgcctgcctctgtcccttctctcttgtttttccctctgcctagaatgccctcttcttttgctggaatcttcaattttgctggtgtcttcataactagtcaaaacccagcttatctgtcactgcctccaggaag

SEQ ID NO: 9218 - DNA, 564 bp, Homo sapiens
  MAP TO AP000350.1; EXPRESSED IN FETAL LIVER, SIGNAL = 2.4; EXPRESSED IN BRAIN, SIGNAL = 1.5; EXPRESSED IN PLACENTA, SIGNAL = 1.9; EXPRESSED IN HELA, SIGNAL = 1.7; EXPRESSED IN BONE MARROW, SIGNAL = 1.8; EXPRESSED IN LUNG, SIGNAL =   2; EXPRESSED IN HEART, SIGNAL = 1.3; EXPRESSED IN ADULT LIVER, SIGNAL = 2.2
tgagatagggatcctactttatctgtattgtgttaaccaaaaaatgactgagacaggtgtctcaatcaataaaggttaatttagccaaagtttgaggacatgcctgggaaaaacacaagtctcagttcctaatattaaccgcttgcatttagtagaaatgaccttcaaggttctctgtagcagagatgtggttgaaaaaggaaaggaagacatagggtttgtagatggccatagcttcacggaagagcgaaagaagggcaggatatgtggttctctccctatggaaaaccatagaggccaaaagcttccctgcccaaacttcagccccaaagactcagataatagccttaaccagagccctggcatgaagaaaggacaaggccttgactgtttatacagacttgagatatgtgctcactgtgatccatgcccatggtgcaatcgggtacgaaaggggacttctgaatgccaataacaaataaatcaaatatgaaacataaatattggcactactgcacagtggaaatgactagacagattgtgggggtcatctaatgggggact

SEQ ID NO: 9219 - DNA, 560 bp, Homo sapiens
  MAP TO AC007092.4; EXPRESSED IN FETAL LIVER, SIGNAL = 2.8; EXPRESSED IN PLACENTA, SIGNAL = 3.4; EXPRESSED IN BRAIN, SIGNAL = 1.7; EXPRESSED IN HELA, SIGNAL = 2.8; EXPRESSED IN BONE MARROW, SIGNAL = 2.1; EXPRESSED IN HEART, SIGNAL =   2; EXPRESSED IN LUNG, SIGNAL = 2.5; EXPRESSED IN ADULT LIVER, SIGNAL = 2.4
ccaaacttttccacatttttctgtcttcttctgagccctccaaactgttcctctgcctgttaccaagttccaaagtcacttccacctttttaggtatctttatagcagcaccccactttctgtatcaatttgctgtattagtctgttctcacactgctaataaagaattgcttgagactggataatttataaaggaaagagatttaattgactcacaggtcggcatggctggggaggccttaggaaacttacaatcatggcagaaggggaaagcaaacacatccttcctcacatggcagcagcaaggagaagtgcagagtgaagttggggaagtcccttgtaaaaccatcagatctcgtgagaactcactcactatcatgagaacagcatgcaggtaactgtccccatgttttcattacctcccaccgagtccctcccatgacatgtggggattacacaaactacaattcaagatgagttttgggtgaggacacagccaaaccatatcagctatacataaaaagaaacctatataacagtgcctttcataaaacaaataa

SEQ ID NO: 9220 - DNA, 553 bp, Homo sapiens
  MAP TO AP000127.1; EXPRESSED IN ADULT LIVER, SIGNAL = 1.6; EXPRESSED IN FETAL LIVER, SIGNAL = 1.9; EXPRESSED IN PLACENTA, SIGNAL = 1.6; EXPRESSED IN BRAIN, SIGNAL = 1.4; EXPRESSED IN HELA, SIGNAL = 1.5; EXPRESSED IN BONE MARROW, SIGNAL = 1.8; EXPRESSED IN LUNG, SIGNAL = 1.7; EXPRESSED IN HEART, SIGNAL = 1.5
aacttgcatgaccttgcctccttaaattttgtgccctgggcaccttgcttgtcccatcctgaaccagaccctagtgctgtgtgatgtgaacgagtacatctccctctaagaacaccactgtttgtttatttttgcagacaaggatggcaacattcaatgtacctagttgagtaaggaggatggcaagaatgctcagtccctggaagctgaacacctcattatagtaccagagcctggcatctgcataattcctggttcttatttgtactgaagaccaaatgaaactcaccaaggcccagtcctgcattgtgcactgggttgcacatactcaataagaatttgtagacttgcattttctcttcaactttttattcctcttgatgatcactttaaccaactgctcaagaaaattttaaaaacaagtggagctcaactcaaatttatttttccaaccttaaaatatcaattatttaattttaatgtgcataaaaatcacctgtgggatgtctcaaaaatccatattccacctgttaccgtatgagggcttccataa

SEQ ID NO: 9221 - DNA, 560 bp, Homo sapiens
  MAP TO AP000041.1; EXPRESSED IN LUNG, SIGNAL = 2.6; EXPRESSED IN BONE MARROW, SIGNAL = 1.7; EXPRESSED IN HEART, SIGNAL = 1.3; EXPRESSED IN FETAL LIVER, SIGNAL = 2.4; EXPRESSED IN ADULT LIVER, SIGNAL = 2.1; EXPRESSED IN BRAIN, SIGNAL = 1.5; EXPRESSED IN PLACENTA, SIGNAL =   2; EXPRESSED IN HELA, SIGNAL = 1.9
tttttgtttgcttctttccagtttcttggcttgatcctatatcataaggtggctagatagtgtgcttccggaaactgaagtgtcatggtattatgaagccagttgagaagggagcagagatttcaccaagaaataagttctgagcctagcccatgcagagactggactaactttatcggttgagaagattttctgaagtgcacaaaccccagatctgtagccctcgtgtggtccatctcccctcatcctcatgtctgcagttcactgagaagaatcacaatgacgacacaatagctgtcactcttgaaacacctaccacgcaacaggcttgatgcgcagagctttatttacatgatgttttttgtagcctcaccagtgagtttctttctgaaggtccataagctgctggaggcttattcattttcccataaggggctgactcccagggaggtaaaggatgtgcctggactcacccagctggctaaaagggtccctgttgcttaactcccaattcggtgcttttgctactgccctgtgtcacattcttcttggtccagcct

SEQ ID NO: 9222 - DNA, 571 bp, Homo sapiens
  MAP TO AL022319.2; EXPRESSED IN LUNG, SIGNAL = 2.1; EXPRESSED IN BONE MARROW, SIGNAL = 2.1; EXPRESSED IN HEART, SIGNAL = 2.5; EXPRESSED IN FETAL LIVER, SIGNAL =   2; EXPRESSED IN PLACENTA, SIGNAL = 1.6; EXPRESSED IN BRAIN, SIGNAL = 2.7; EXPRESSED IN HELA, SIGNAL = 2.4
cagggaagctggtgaggaggctgctgcaaccctgccggctctgagatgctgacagcagggaggggacagatagaaaagctgacggcaatcctggttaagagatgctgcccccgccggcctgtgcagggcacaaagctgaattcctagagccgcgaccacgccagatccttctcagcggtcagggccttacagttggcctcacgggtgctcagtaagtgcttgttttattaatgaagggaacatcatttaattagtcagacactagcagtgtagaacggctggccaggaaaccctgctctggagtggagcggagaaactcgaggagtggtgattaatggggtttacttttcagcagttaacgtgaacgttttctgagggttctaaggccttctgagggttctaagagatatttcatttctagggcaagaatgtgttttagccttatcttatccatagcatgagttaaaggtggtctccaatgcatggatagatttgaactaggtttggaatctgggacgctttctcccacaggagctgtgggatgggggtggctgggtttgcagaggcttct

SEQ ID NO: 9223 - DNA, 579 bp, Homo sapiens
  MAP TO AB016897.1; EXPRESSED IN HELA, SIGNAL = 1.3; EXPRESSED IN LUNG, SIGNAL = 1.2; EXPRESSED IN BONE MARROW, SIGNAL = 1.9; EXPRESSED IN HEART, SIGNAL = 1.5; EXPRESSED IN ADULT LIVER, SIGNAL =   2
gaatgaaaagaacagcttcaaggtgtttagaggctcctgtcaacgcccctcatgcttggaaatgaatgcaagctgcagattcgggttgccttctccacttgctgcaaatgcacctttaattgcttgtacacatcacattttcccggggagctgatgagtcacctgcctttccactcataggctcacgcccacctcaatccatccttctttatgtccctacaggtaaagaaaattgcctgcattagctgccctgacagccacccactactcccgagggtgaacatccagaagagagaaggtgaacctctcagagtcggtctggaccgtaacaatgggaacggttatgctctttcaaaaggctctttctcttttatgcccacagataaaagttagggacttcttgctgaatcccaggaggtagtaaaaaaaccacgaatctccatccaaggatccctgcacctagtcggtgcctccacggcactccggtttaaagaccagggatcttagtcgtcactgtttgtagagaatgagaagaatcaaacctcacaaaattaaatcgcttctgatgctctcccttcc

SEQ ID NO: 9224 - DNA, 586 bp, Homo sapiens
  MAP TO AP000041.1; EXPRESSED IN PLACENTA, SIGNAL = 4.4; EXPRESSED IN HELA, SIGNAL = 2.7; EXPRESSED IN LUNG, SIGNAL = 3.7; EXPRESSED IN BONE MARROW, SIGNAL = 1.7; EXPRESSED IN HEART, SIGNAL = 2.7; EXPRESSED IN FETAL LIVER, SIGNAL = 2.5; EXPRESSED IN ADULT LIVER, SIGNAL = 2.5; EXPRESSED IN BRAIN, SIGNAL = 1.9
gtgagatgtcagggattgcggatggggcagaagggaggcttcacgcagcccgcacccttcaacacatacatgctcctcgtcctggtcaccactgagtgttacaggcaagaaaataaaaaccctaaactcctcagacagtgatcattaggtgtcattctgttcaaatcttaaaaaatagtttgagcagatgaagaatcagtaaagaaagcttggaggtgatttgataacattttatctacccagaggaccaatcaaagagagtatttgtattgtggtgatggtggtgatggtggtggtggtggtggtggtggtcgtggtgctggttttgttccatttgcttgcttccggtggcttcactcacatgcttcctctgcagtcctggttccccacagccatgggcagaaggtacagcctatatatgagtctctatcagtgcacaggtgtccagtgtaggaaaaaataaaatggaacattacagcaccccgtttaatagacaacttttgaattcacttatgaccatggtctccatggttctaggggctgtgagggcatcagagatgccttttgtattttatattcacacaga

SEQ ID NO: 9225 - DNA, 582 bp, Homo sapiens
  MAP TO AC008151.1; EXPRESSED IN FETAL LIVER, SIGNAL = 3.5; EXPRESSED IN ADULT LIVER, SIGNAL =   3; EXPRESSED IN HELA, SIGNAL = 2.4; EXPRESSED IN PLACENTA, SIGNAL = 3.3; EXPRESSED IN BRAIN, SIGNAL = 2.8; EXPRESSED IN LUNG, SIGNAL = 2.6; EXPRESSED IN BONE MARROW, SIGNAL = 5.7; EXPRESSED IN HEART, SIGNAL = 2.3
ggaagccatagaggagggagctgggaggaaagggaaggagaaaaatcaccagagactcaagacatgaatgggagaggcgaggggaccccaaggagagaggagtggaatgtctgttgaatgaattaactgaatgctgaaatgtcctcattctaaaagcaagactaaggctcaaggggaataaagagatctctcatctaacatcccaaagctagtaagggctggaggaggactagaccccacatctctccagtatctactccaaagggtgctggtttcactttcttgatagttggtgttcgagctcctcaagacctggatctggtttcttcagatctgcccaggaaacaggtgaggcctaaggccttacttagagacttccactactggcttttgcccaaccccactccctcatcatgtgtccttcataagaaccctggcacaggaaacgtcagctgtgcctctgacttgctgtgtgacctggtgcaagtgccttcccctctcggggccctagaaccctctctgtaagttgttaccaggggccacaggtgttcggtaaatattgaataaccagtgtcttggcca

SEQ ID NO: 9226 - DNA, 575 bp, Homo sapiens
  MAP TO AP000041.1; EXPRESSED IN ADULT LIVER, SIGNAL =   3; EXPRESSED IN PLACENTA, SIGNAL = 1.7; EXPRESSED IN BRAIN, SIGNAL = 4.3; EXPRESSED IN HELA, SIGNAL = 3.2; EXPRESSED IN LUNG, SIGNAL = 3.9; EXPRESSED IN HEART, SIGNAL = 2.5; EXPRESSED IN BONE MARROW, SIGNAL = 4.1; EXPRESSED IN FETAL LIVER, SIGNAL = 3.5
ctactctgggaccatggactgtatagaaattaggacttgaaattgtcctttgccacctccttccttctccttatggagtacagaacaatggctctgggcagggccagcttcaggtgtgcatgacccattgggacagtggcgtagaaccccgtgcttggaagagccttgaacgtggtcaatgctctgctgtcagcccttcctgacttttaaataagggggccccatatttacatttcatactaaggctcaaaaatcatgtagctggttttgctcttggtaatgaaagactccttgaggtggttcccacagttttccatatcccagccagggctctcttcacactgtccccacttccatggctggagccgtagttttttcctggtcataactgtggaaggcagaaaaaactcacttcttaagtcctaacccaagatcatattttttcctgttaaaaattgctgttcatcttaaagtagcaacatgagtcttaaacgggattcagtacttcagtccaatgtgctaaaatgattcagttttaaagaaaactatttttgttggtgcaaaagtaattgtgg

SEQ ID NO: 9227 - DNA, 566 bp, Homo sapiens
  MAP TO AL021707.2; EXPRESSED IN HELA, SIGNAL = 2.4; EXPRESSED IN PLACENTA, SIGNAL = 1.7; EXPRESSED IN LUNG, SIGNAL = 2.2; EXPRESSED IN HEART, SIGNAL = 2.3; EXPRESSED IN ADULT LIVER, SIGNAL = 1.5; EXPRESSED IN FETAL LIVER, SIGNAL = 2.9; EXPRESSED IN BRAIN, SIGNAL = 1.8
actggcaaagaggctaccagataggagctgttcaataaggggtctctattatctacccttgacctctcaagagagacttctcttgatctctgactcttccccacccccatcctcctacgcccctgaaaaggaagacagaaaaatgaatgctagtgacccaagttgcattgattgtcaaccaagagtccagcaatgagcttggataacaaagttaacaaacaagtatgagtctgtgtttttgccctcaagggacttacactctatttggagagccaaatcagcactcgtggaacaattaaatgctaaactgctgtgattacgaatcaaagtgaggtcaacgtgggccagagcagtcacagaggactgtccagaagaggtggacatgagtgttggtggcatcaggctcctgagcttgataaactgggaaatacctctccaggcctcccccatctttcccttgcatcagcactccctggtctgcatgagtgaaaggtactgggcatgtgtgcaggggtgtgtgtatgtgtgtgtgccagtggtgggggggcggtcacaggggttagtct

SEQ ID NO: 9228 - DNA, 563 bp, Homo sapiens
  MAP TO AC004624.6; EXPRESSED IN LUNG, SIGNAL = 4.3; EXPRESSED IN HEART, SIGNAL =   4; EXPRESSED IN FETAL LIVER, SIGNAL = 4.6; EXPRESSED IN ADULT LIVER, SIGNAL = 3.8; EXPRESSED IN PLACENTA, SIGNAL = 3.8; EXPRESSED IN HELA, SIGNAL = 4.1; EXPRESSED IN BRAIN, SIGNAL = 3.1; EXPRESSED IN BONE MARROW, SIGNAL = 9.1
gagtggtcggtagcatcaccaaggtaccaaaccagccctgatgccatgcacttcagtctccctgatgagtgggtaataaacacgtgctcgtttcaataggatgtgtcctgtttcttgcagctaagcatctcctgcctgactcactcttccatcacaggaggtaagttcagtgcctggaacattctagaagctcaatccaggttacttccctctcctctttttcctgaatgttccttttaggctacacttacctgctgggaagtacactgtacctagaaccatagatttcactgagatagaccaggttttgtatctgcaggcacaatttggctgcttgtgaaaggaaccaaactgaagttgcctgggcaaaaatggcacaggaaggcaaggctagtcctgtaacaagggatgggtgtgcagctaccacaggggcagagctcagctccacacagtagtgaccagggacccaagcattgccaagaagccctaccattttcctggttcctgtgggctgtgacttctttcttattctgtcctggcttccctcactggacagggaacag

SEQ ID NO: 9229 - DNA, 581 bp, Homo sapiens
  MAP TO AL022238.1; EXPRESSED IN ADULT LIVER, SIGNAL = 1.8; EXPRESSED IN FETAL LIVER, SIGNAL = 1.8; EXPRESSED IN PLACENTA, SIGNAL = 1.2; EXPRESSED IN HELA, SIGNAL = 1.6; EXPRESSED IN HEART, SIGNAL = 1.8; EXPRESSED IN LUNG, SIGNAL = 1.5
caagcaagatcttttcctgaatgaggaagaagactcaggtagaaacttgtttggaggaggaaaagtaacagcaaagtgaagcagaggaagaacagaggcctagaagactgaggagatcactgagtttacaatgggcatgggtacgtgctctggtttctcttcagattatataaatctttccaccttttacaagaggcatgggtagaaaatgagaaaagtaaatttatcacagtgtatcaaagcaatgagtgccaggaagcactctgcaaagagtggggagtttgatggagcaaattcttcatctttccagaactgtgactgccctcacccccaaaaccagtcctctgcagttcaagaggggaggtggaagaagacttcagtgacgagcccaggtgactgacaggcttctctgatggcctgaatattctgaaattggcactctagtcaattctgacagctaactctggagttcaggtggaggcatgaacaagccagggaatgaggacaccgaggaagtgtggaggaagaggaagtatagtggcagaatctaacttgtatcatggctattgtgggcgttattt

SEQ ID NO: 9230 - DNA, 576 bp, Homo sapiens
  MAP TO AC004624.6; EXPRESSED IN PLACENTA, SIGNAL = 3.5; EXPRESSED IN BRAIN, SIGNAL = 4.3; EXPRESSED IN HELA, SIGNAL = 3.2; EXPRESSED IN BONE MARROW, SIGNAL = 2.5; EXPRESSED IN LUNG, SIGNAL = 5.8; EXPRESSED IN HEART, SIGNAL = 3.6; EXPRESSED IN FETAL LIVER, SIGNAL =   2; EXPRESSED IN ADULT LIVER, SIGNAL = 2.7
aaagaaactgaggcacagggccaccaagacacctgctccaggtcttgtagctggtaagtggcatggttggaattcacaccaaggctccacgcctgtccccacatttccaaaatgattctccacaggccagtggctctagcactggagcgtgcatggggaggtgccttgggctgagggttttgcggcccttcctgggaggaggaagctccaggtcctccgagccccccagtcccctctgcatgaaataagctgaagcagcaggagagggtttcccttagtaagcagcattcggatttgactgcctggcaccggcatgacatcttaatcaatcttcccacagggctattcacgattcagcttggtacccacattcccgggggaccccacagctgctagaacccaggccctggctgaggccacatctcaggggactcacttcattttcttctgtgtcttatcctgcatttaagtagcccggccagagtgccagcacccgggagaggggaaacctccgatttcattgacaaacatggctcgtgaatgtgagcctggcacctgcagatcggagacccacat

SEQ ID NO: 9231 - DNA, 566 bp, Homo sapiens
  MAP TO AL031587.3; EXPRESSED IN LUNG, SIGNAL = 5.7; EXPRESSED IN HEART, SIGNAL = 4.3; EXPRESSED IN BONE MARROW, SIGNAL = 9.3; EXPRESSED IN ADULT LIVER, SIGNAL = 3.2; EXPRESSED IN FETAL LIVER, SIGNAL = 4.9; EXPRESSED IN BRAIN, SIGNAL = 6.9; EXPRESSED IN PLACENTA, SIGNAL = 3.5; EXPRESSED IN HELA, SIGNAL = 4.5
cacagaccagctcttggaggtgtcaatccagtttcctccaggtgtagactcagctccttcagggggtttagaccagctctcttggaggtgtagcccctgtgcagacattggcttccagcctgccaggccccctgccctgcttctccccaacaaacccctggcttctcttagggggccaagtaggggcagccttcaaggcaaacttgtcctgcagcctttggggacgtgttctccgtgatcggggtgcgggagccccagccagctgcgagcgaggcttttgtgaagttcgccgatgcccaccgcagcatcgagaagttcggcattcggcttctgaaaaccatcaagccggtaggtcctattgagcatgtgtgtgtctggcgtgtgagggtggggaggggagagtgtggcatgcagagaaggtcgtatgctggagtcctgtgcctgggtacagcctctggctcagtcacccacacagtggactgtgggtgagtcactgtgcccccttgggccttgccattgacctctgggctggcttctgaccctggctcgccactgagtcacagctt

SEQ ID NO: 9232 - DNA, 574 bp, Homo sapiens
  MAP TO AP000127.1; EXPRESSED IN BRAIN, SIGNAL = 4.9; EXPRESSED IN PLACENTA, SIGNAL =  49; EXPRESSED IN HELA, SIGNAL =  25; EXPRESSED IN LUNG, SIGNAL =  32; EXPRESSED IN HEART, SIGNAL =  20; EXPRESSED IN BONE MARROW, SIGNAL = 6.5; EXPRESSED IN FETAL LIVER, SIGNAL =  58; EXPRESSED IN ADULT LIVER, SIGNAL =  43
ccccatgacttctccttcagaaggttccagacacttcttatcttcaaaggagcttattttactctttgtgtcaacaaagaccacaactagcttattaaaaactttctcttatgaggcttaaagttcttttctaaccaaaatgttcatttgagtatctcaaatgcttgttcttatttttagtatttgaggattccatgaggaaagtgagatttttttccggcgcttattccttaaatgcttttcatctttgctggtatttcctcctaaccttcacctttccagagagaaaatccgtaatgctttttcttcttctccttcttcttcttctccttcttcttcttcagaagctagctttctccttgaataatttagttacacttcatgtttacctcctcttacatcttaaaatgcaatgatatctgtaaataatggttcaaaaaagaaagaaacaaacaaagtcaaactaacacaatgtcttattcttgaggcatgtgaataaatactccagttagggatttgaggtggctttagcgtagctgacagaggaaaagattcacttaggccacacctcctt

SEQ ID NO: 9233 - DNA, 543 bp, Homo sapiens
  MAP TO AL022238.1; EXPRESSED IN HEART, SIGNAL = 3.4; EXPRESSED IN BONE MARROW, SIGNAL =   6; EXPRESSED IN LUNG, SIGNAL =   4; EXPRESSED IN ADULT LIVER, SIGNAL = 3.3; EXPRESSED IN FETAL LIVER, SIGNAL = 4.7; EXPRESSED IN PLACENTA, SIGNAL = 4.1; EXPRESSED IN BRAIN, SIGNAL = 5.9; EXPRESSED IN HELA, SIGNAL = 4.1
tggatggaaatggtgaaaccacctgagagaacacaggctgggccagtttgcgggaaaggttggtgagcatgtgggcatggtggttgaatcatctgtgtctaggcagaaattcctgataggcagttgaggaaaacaagctcagtgttggagtaaaagcttcatcaaattaggtttcagtggtatcccctgacattggaaaaggtattatctgctaatatcttaacattttcttttgtcttgtatttgctttcctctggcaggtgcagagattcttagaagaggaggtgtatcccctgttaaaaccatatgaaagcgtgatgaaggtgaaagcagaattatgtctgtagagttggaagagaattaaacgaaaatcattgttaattgctgaggcatgaaaattgtgttactataatgccttattttacctcgagaattgttaccttaaattagtacagcactttcttcttcccatggtgctttcctgtttctcagtctcacatttctcaacaaggcaaaaacaaagagcgttgaagttgactctgc

SEQ ID NO: 9234 - DNA, 590 bp, Homo sapiens
  MAP TO AL022328.21; EXPRESSED IN PLACENTA, SIGNAL = 4.4; EXPRESSED IN HELA, SIGNAL = 3.1; EXPRESSED IN BONE MARROW, SIGNAL = 3.1; EXPRESSED IN LUNG, SIGNAL = 2.9; EXPRESSED IN HEART, SIGNAL = 2.6; EXPRESSED IN ADULT LIVER, SIGNAL = 3.5; EXPRESSED IN FETAL LIVER, SIGNAL = 4.3; EXPRESSED IN BRAIN, SIGNAL = 2.8
agcttttctacggccagagcctcgaacagtttttacatttctaaatggttacatttatatgtcccttgatatttggccctttgggaaaacatttgccaacccccagctctaacccagtgtttctcaaagggggcactttgggtatatttgaatgggacgcttctcatttcgtatgactctgtgatgtgattataggagagttagcgtccccaggccccaggggctggtcccaggaagcatctccacacgttcacagtggctctggagctctggtggggacacaggtgcctcccatgccgaacaccaggtttcattcatgaagcatgtgtccctgtggtgttcacaccaccaagcagaacttggaaagaacccccaaaatacagaagaaaaggtgagtcccctaggccatcacagtaacagatcacctgtaccgcgcgtgtgctgaccgcagagcccgtcaaagatgttatgtttccttttttctgacctcggggactcgagaggtgagtgcttagttctcccagaggtacagagattacgaaggcttatggagacaagtaagttgccagacatcacacagccagtgtcct

SEQ ID NO: 9235 - DNA, 561 bp, Homo sapiens
  MAP TO AC007106.6; EXPRESSED IN PLACENTA, SIGNAL = 4.3; EXPRESSED IN BRAIN, SIGNAL = 2.9; EXPRESSED IN HELA, SIGNAL =  13; EXPRESSED IN HEART, SIGNAL = 5.1; EXPRESSED IN BONE MARROW, SIGNAL =   7; EXPRESSED IN LUNG, SIGNAL = 8.8; EXPRESSED IN ADULT LIVER, SIGNAL = 7.2; EXPRESSED IN FETAL LIVER, SIGNAL = 5.8
tcaaaaactcccccactgagcaccttgtgaccccccacccctgccagacagagaacaaccccctttgactgtaattttcctttacctaccgaaatcctataaaagggccccacccctatctcccttcactgactccttttttggactcagcctgcctgcactcaggtgaaataaacagtcttgttgctcacacaaagcctgtttggtggtctcttcacatggacttcagtgaaatttggtgccgtgactcggatcgggggacctcccttgggagatcaatctcctgtcctcctgctctttgctccatgagaaagatccacctacgatctctggtcctcagatcaaccagaccaaggaacatctcaccaattttaaatcgggtaagcggcctctttttactctcttctccaacctctctccctatccctccacctctttctcctttcaatcttggtgccacacttcaatctctcccttctcttaatttcagttcctttccttttctgtcgctgagtctttcctctttccttttctaccaacccatctgacctctcccctcct

SEQ ID NO: 9236 - DNA, 554 bp, Homo sapiens
  MAP TO AP000129.1; EXPRESSED IN FETAL LIVER, SIGNAL = 5.5; EXPRESSED IN BRAIN, SIGNAL = 3.4; EXPRESSED IN PLACENTA, SIGNAL = 5.4; EXPRESSED IN HELA, SIGNAL = 3.7; EXPRESSED IN BONE MARROW, SIGNAL = 3.4; EXPRESSED IN LUNG, SIGNAL = 4.3; EXPRESSED IN HEART, SIGNAL = 3.2; EXPRESSED IN ADULT LIVER, SIGNAL = 7.5
aggagggtgggcagagttagggcaggaagtatctacacacattctctacggggcaggtgacgcagtcagatctcagtgttcagtttcctggagggggcaaagtcttcacgcctaacccaaatgacttcctcgcttgcgctctccaggcctccattgatccccgacagggcagcttgcttcttgagctgtgccatgcgggacgcgtgactatccagggttttccggcctctttcccgctgactgatggaggtggcctgaagccgctcctgcaggtctctgtccactgaggcacccttcacggactcacagaactcatcatcgtcactgaggatgtctgtctccttgatgtcatcttgctcctcatactgagcaagatcaaactgctcctctacccatcggtcagtgtccccaccaccggggggctgctgggactctttctccgggctgcttgcggagacggcatcagaatcaatggtaaacctgtttcgagccagccgccgcctcctcctcccaagagacttgcttggggcagacactgcacacacacacaaaaa

SEQ ID NO: 9237 - DNA, 573 bp, Homo sapiens
  MAP TO AL079300.11; EXPRESSED IN HEART, SIGNAL =   2; EXPRESSED IN BONE MARROW, SIGNAL = 1.3
tgagtccccacctctacaagaaatacaaaataaaaaattagctgggtgtagtgacatgcacctgtaatcctagctacttgggaggctgaagcaggaagatcacttgaacccaggagctggaggctgcagtgagctatgattgcaccactgcacactagcctgagtgacaaagtgagaccctgcctccagaaaaagaaaaaccttacccatcctttgtcccattcatcaactctgacctatgtttgcttccagcctccttgaagctgcccttgaagacttcccgactctacaataacttggagacagagagactggccaggcctccccggtggccagagccagccagcatggccaccctcaagaggcgagatgagcccacagaggcatatcctgcggggatgctgggctcccagtgtggttggcctgaacaaaataaagtgttgactcctgggcatctgtgccttctctatggccttgctacctgggattccagagagttgatggggtgcagataggggtaggactgttagaatagaaccaacccaaactgtgtgtagtttggggtgtatactt

SEQ ID NO: 9238 - DNA, 599 bp, Homo sapiens
  MAP TO AL079295.1; EXPRESSED IN BONE MARROW, SIGNAL =  28; EXPRESSED IN LUNG, SIGNAL =  32; EXPRESSED IN HEART, SIGNAL =  33; EXPRESSED IN FETAL LIVER, SIGNAL =  53; EXPRESSED IN ADULT LIVER, SIGNAL =  61; EXPRESSED IN PLACENTA, SIGNAL =  30; EXPRESSED IN HELA, SIGNAL =  30; EXPRESSED IN BRAIN, SIGNAL = 4.4
agctaaaacagcggaagaggtgatttattatatggttgttacactcggccacaaataaacacagaaatagtccagaatgtcacaggtccagggcagaggaccaacatgggcattttgtttatgagcaaggtgggtctcagaggtgatcggcgatcagagggcgatgaagttctagatccattgagacaagttctagacagtagcatgcagtcccacaacttgtaccagcatccccagcgtctggcattccatgtttctgctcctgtggcctccacggtgcaacaagctagcggtttacttggacctctgcctcatctttcttcttttgcgcttcagcctgcgcattcgcttcttcctccacttggctctcatggcacagaggtttccaaaaaaatggcgctaaggccgagagcataaagcagtatttcaaaagaggtaattagactgatgatgaggggataacacatggaagagaaacatttcaaaagcttctccgcttttccaaaagaggaaggagtttgttgaaattttctaaactcagatttggtgaaaaattactttgaaaagatatatttgaaacttctttcctctgggtccca

SEQ ID NO: 9239 - DNA, 1961 bp, Homo sapiens
  MAP TO AP000346.1; EXPRESSED IN PLACENTA, SIGNAL = 3.3; EXPRESSED IN BRAIN, SIGNAL =   2; EXPRESSED IN HELA, SIGNAL = 2.3; EXPRESSED IN BONE MARROW, SIGNAL = 1.6; EXPRESSED IN LUNG, SIGNAL = 2.4; EXPRESSED IN HEART, SIGNAL = 1.7; EXPRESSED IN FETAL LIVER, SIGNAL = 3.1; EXPRESSED IN ADULT LIVER, SIGNAL =   3
ccctgggcccactgttctttctctatactttgtctctgtgtcttatttctttcctcagtctctcatccctcctgacaagaaatacccacaggtgtggaggggctggcccccttcatctgatgcccaatgtgggtgcctttctctagggtgaaggtactctacagtgtggtcattgaggacaagttgacgagagagtcccaagtacgtccacggtcagccttgcggtaagcttgtgtgcttagaggaacccagggtaacgatggggcaaactgaaagtaaatatgcctcttatctcagctttattaaaattcttttaagaagagggggagttagagcttctacagaaaatctaattacgctatttcaaacaatagaacaattctgcccatggtttccagaacagggaactttagatctaaaagattgggaaaaaattggcaaagaattaaaacaagcaaatagggaaggtaaaatcatcccacttacagtatggaatgattgggccattattaaagcaactttagaaccatttcaaacaggagaagatattgtttcagtttctgatgcccctaaaagctgtgtaacagattgtgaagaagaggcagggacagaatcccagcaaggaacggaaagttcacattgtaaatatgtagcagagtctgtaatggctcagtcaacgcaaaatgttgactacagtcaattacaggagataatataccctgaatcatcaaaattgggggaaggaggtccagaatcattggggccatcagagcctaaaccacgatcgccatcaactcctcctcccgcggttcagatgcctgtaacattacaacctcaaacgcaggttagacaagcacaaaccccaagagaaaatcaagtagaaagggacagagtctctatcccggcaatgccaactcagatacagtatccacaatatcagccggtagaaaataagacccaaccgctggtagtttatcaataccggctgccaaccgagcttcagtatcggcctccttcagaggttcaatacagacctcaagcggtgtgtcctgtgccaaatagcacggcaccataccagcaacccacagcgatggcgtctaattcaccagcaacacaggacgcggcgctgtatcctcagccgcccactgtgagacttaatcctacagcatcacgtagtggacagggtggtgcactgcatgcagtcattgatgaagccagaaaacagggcgatcttgaggcatggcggttcctggtaattttacaactggtacaggccggggaagagactcaagtaggagcgcctgcccgagctgagactagatgtgaacctttcaccatgaaaatgttaaaagatataaaggaaggagttaaacaatatggatccaactccccttatataagaacattattagattccattgctcatggaaatagacttactccttatgactgggaaattttggccaaatcttccctttcatcctctcagtatctacagtttaaaacctggtggattgatggagtacaagaacaggtacgaaaaaatcaggctactaagcccactgttaatatagacgcagaccaattgttaggaacaggtccaaattggagcaccattaaccaacaatcagtgatgcagaatgaggctattgaacaagtaagggctatttgcctcagggcctggggaaaaattcaggacccaggaacagctttccctattaattcaattagacaaggctctaaagagccatatcctgactttgtggcaagattacaagatgctgctcaaaagtctattacagatgacaatgcccgaaaagttattgtagaattaatggcctatgaaaatgcaaatccagaatgtcagtcggccataaagccattaaaaggaaaagttccagcaggagttgatgtaattacagaatatgtgaaggcttgtgatgggattggaggagctatgc

SEQ ID NO: 9240 - DNA, 585 bp, Homo sapiens
  MAP TO AC008151.1; EXPRESSED IN HELA, SIGNAL = 1.2; EXPRESSED IN PLACENTA, SIGNAL = 1.6; EXPRESSED IN BRAIN, SIGNAL = 1.5; EXPRESSED IN LUNG, SIGNAL = 1.3; EXPRESSED IN BONE MARROW, SIGNAL =   3; EXPRESSED IN HEART, SIGNAL = 2.3; EXPRESSED IN FETAL LIVER, SIGNAL = 1.3; EXPRESSED IN ADULT LIVER, SIGNAL = 1.6
ctctcctgaggcccagtgtcctgaggcagccccctttaaggagcgatcggccttccagaagagctccagtcttaattttagcttggaggcctgccacaggaggctttagagagaggcaggctgaagttatgtgggacagctgtcagccggcatgctgggtggggcctatttagctggcagggacataagtctggggacactgaattggtctctctgccccaagtattttcagccccagccggccacacagctcggatctcctcctgtggatccccccagctctgcgatgatggcagaagagcacacagatctcgaggcccagatcgtcaaggatatccactgcaaggagattgacctggtgaaccgagaccccaagaacattaacgaggacatagtcaaggtaggctctgcaggcctgcctcggcgggcggagagtgtcaggtttgcgagacgtgggcgcttggcaggggagggtatctgctgcagacacagtttccctgaaaagagacttgttgctctgttgtctctgtatcacccccccaaccccaccccacccccaaaaaaaggcttctaaatcaccgaagg

SEQ ID NO: 9241 - DNA, 586 bp, Homo sapiens
  MAP TO AC004032.7; EXPRESSED IN ADULT LIVER, SIGNAL = 1.9; EXPRESSED IN PLACENTA, SIGNAL = 3.8; EXPRESSED IN HELA, SIGNAL = 2.9; EXPRESSED IN BRAIN, SIGNAL = 3.9; EXPRESSED IN BONE MARROW, SIGNAL = 3.7; EXPRESSED IN LUNG, SIGNAL = 3.3; EXPRESSED IN HEART, SIGNAL = 3.2; EXPRESSED IN FETAL LIVER, SIGNAL = 4.6
aatgagctgatcacagccacatgtgtgcctgcagccatgtgctgggcactgagctcagagaggtgaacccaacacaggttccaccaccttccagagctcccaccctatgggagagatattccggtaaacatgaacctgcaaaatagagcaggagctccaccagagcaaaaggcaggcccatgttgtgagatctgaggggagaactggggatcctggaagacttcacagaggaggcggtgtgcaagtagggggttaagcaagctttgcaggaagaggaggcgagaggagcacgccaaacccaggcgtgactccttccaaagcaagagactggcccagggaccctgatttagggatgggtgtgaaacgagggaagaggaggctgcaaaattcaagtgaggtcagtcatggagacccctggaagaagttagaccgtgttcctgccagcaatggggagccaaggaaggcttctgagcagagaaggagcatcgagaatccatcaaaattaataaaggggcttgcacctcatccatctaaccttgccgtagaacacctgacttagaaacatagccccttattgagaaccaag

SEQ ID NO: 9242 - DNA, 567 bp, Homo sapiens
  MAP TO AL035681.13; EXPRESSED IN PLACENTA, SIGNAL = 3.2; EXPRESSED IN HELA, SIGNAL = 2.8; EXPRESSED IN LUNG, SIGNAL = 2.4; EXPRESSED IN BONE MARROW, SIGNAL = 1.7; EXPRESSED IN HEART, SIGNAL =   7; EXPRESSED IN FETAL LIVER, SIGNAL =   4; EXPRESSED IN ADULT LIVER, SIGNAL = 2.8; EXPRESSED IN BRAIN, SIGNAL = 2.5
tgagtgagctgctgggataccggatgtgggacaggcaattggtgtcaggacgtatcccaagcccttgagctgggccagagggtctgtctggtttaggacccctgtgtcagctttgcctgttggctgctttgtgacctctgagacgctttccttcctggtgtgtttggaaatagcactgcttagtctagtctaggctggttcttcctgacccagcagtgccctggggctggaaaagccctacaccctacctgttccctgccccaggcaggacagcactgaagtcacagtgaacaaaaagaacctcctcctctgtaccccagcaccatggctctctgtagagcagctcgagggcatcttggtcaccatccctcattaggtcagttgctaccaaggcactgtgaaagcactgcagagctgcagcccatcagggtcagaaagggacacaggaagactcagttctctggacatgagtcttgtatgtgccacaggcagagggctgggagggggcggggagggcaggatgcctggggatcagagtgcagagcccatgaggagcacaggctgcac

SEQ ID NO: 9243 - DNA, 575 bp, Homo sapiens
  MAP TO AL023553.5; EXPRESSED IN HELA, SIGNAL = 5.2; EXPRESSED IN LUNG, SIGNAL = 7.1; EXPRESSED IN BONE MARROW, SIGNAL =   6; EXPRESSED IN HEART, SIGNAL =  11; EXPRESSED IN FETAL LIVER, SIGNAL = 6.9; EXPRESSED IN ADULT LIVER, SIGNAL = 5.2; EXPRESSED IN PLACENTA, SIGNAL = 3.6; EXPRESSED IN BRAIN, SIGNAL =   6
ggagagagaacagcactgccggcccggccctgcagggatgggagaggccgcactgcccttggcttcctgagtcctctgcaggcccaaggccccgtggtcccaaagatcgtcctgcagctctggcctctgaggaacacaggggtctgggaagaacatggaaatttcctgggttcctttctcagttttggcctaggcttttggtaggtgcaggagacaggagtggcaattggtgctgaccaacaaactggccacctccatttcagattgtcacagccctggccattgcgggaaccctcaagttcaacccagagaccgactacctgacgggcacggatggcaagaagttcaggctggaggctccggatgcagatgagcttcccaaaggggtgagcgcccacgccccctgcttgctggttgctgtgtggccacgtcacttccttctcaacctcacagcacctcctgtgcaggcagggagggcgctgctagtgagaaggaagcagctctgttccctgggaggggaggtggggcccgaggaaacttgccttctgagagtctgtccttgtgggaactgagga

SEQ ID NO: 9244 - DNA, 575 bp, Homo sapiens
  MAP TO AC007106.6; EXPRESSED IN LUNG, SIGNAL = 7.9; EXPRESSED IN HEART, SIGNAL = 5.9; EXPRESSED IN ADULT LIVER, SIGNAL =  13; EXPRESSED IN FETAL LIVER, SIGNAL =  14; EXPRESSED IN PLACENTA, SIGNAL = 8.7; EXPRESSED IN HELA, SIGNAL = 6.3
ttcaagtgaatttatttcagcagtgatctttattatttttcttttactaattttgtgtttggtttgctcttgcttttctaattctttaatatgcatcattacatagtttatttgcattttccttctttttgatctaggcacttacagctataaacttcccttttagtattacctgtgctgttttggtatattgtttttccattaccatttggttcaagaaattttttccctctgcttttctgaagtagaatgagttttaccccatagccaccacagctggtaatgctgagtttcacttgaagccagcaagtctcagaggctcacccaaggctctcaatgtagtacctgagtattgctgttggttattcagggccccagggctcttcagttagtaggtgatgaatgctgccaggactgagtacttcccttcaagcaacagattccattctggtccaaggtttgtctagaaatgtcttctgagagctagggcctggactggtccttatgactctgagcagtgccttatcctgctatggctgagctagtacccaagatgcaaaacaaagtccttccca

SEQ ID NO: 9245 - DNA, 568 bp, Homo sapiens
  MAP TO AB016897.1; EXPRESSED IN FETAL LIVER, SIGNAL = 1.5; EXPRESSED IN ADULT LIVER, SIGNAL = 1.6; EXPRESSED IN PLACENTA, SIGNAL = 1.8; EXPRESSED IN BRAIN, SIGNAL = 2.5; EXPRESSED IN HELA, SIGNAL = 1.3; EXPRESSED IN BONE MARROW, SIGNAL = 1.6; EXPRESSED IN LUNG, SIGNAL = 2.5; EXPRESSED IN HEART, SIGNAL = 1.9
agggaagagtcaccggaaaggggctcagaacgccggaggtggaccagcgtataaaatcctagggaccaaggttaaacaccgcccttgaccttcacggtacctgcttggatctcttccgaatgtactttctttcctgctctaaggctttgtaataaacttccactcctgctctgaaacttgcctcggtctttttctgccttatgcccctccttcgaattatttcttctaaggaggcaagaattgaggttgctgcggacccgtgcggattcgctgccagtaactcggacaccttccacccctaacacacggacacaatgggcctgcaaccacaattctcctcctggcattcagttgcacaagccactaaagtcttcccttcttgagctagttggagttggctgctgtgtcttgtgcccacgctgactaacactgctccttgtgcagcagccagaagcagagctggcacctgcaccaagcccggccctctgtgcccaagattgccgcctctccagggggcacttggttatttgaccccctcctcaccccacgggctctgttacccagtgaa

SEQ ID NO: 9246 - DNA, 967 bp, Homo sapiens
  MAP TO AL035682.16; EXPRESSED IN FETAL LIVER, SIGNAL = 2.5; EXPRESSED IN ADULT LIVER, SIGNAL = 2.2; EXPRESSED IN PLACENTA, SIGNAL = 3.1; EXPRESSED IN HELA, SIGNAL = 1.8; EXPRESSED IN BRAIN, SIGNAL = 2.2; EXPRESSED IN BONE MARROW, SIGNAL = 2.6; EXPRESSED IN LUNG, SIGNAL = 2.6; EXPRESSED IN HEART, SIGNAL = 2.8
tgctgggaggtaattcttgcacagagctaggggtggctttcagggtcatattattcaacctccttaaattaaaatggggacactgaggcccaaagagattacggaatccgtaggccatgcagtgaacttcctgggcagagatgcttcagggcaccatccttacaggcagtgacaaaactcaagcgtcttaccatcatccaagtaggtctggtccaagttctgctcctgtttaatggtcacccccgcaggtaatacttccttttggtcactgaccgggggtccgtttttggcggctctttggctcgtggcattctgctgctgaatgactgtggggtaggaacccgggctcagcctctgaccttgactgaccgggggcgggccaggtctggtggtgcctggtgcgaaattctcgcagtacatgatgtgctggaactcctggtggcttccgcagcgcagctgctggttggtgggtgagtagtggatcacaggcgaggcctgctggttggtcggagaggggtggagcagggctgagctctggccctgggagccggcgtgcaccagcacagagcggtgagcgtccgcaagggacagcggggcggccatgagggccggctgctgatagcccagcaggctggggctcaggctcttgctccgctggtagagtacggccgctgggttctgttgctggtagcgggcgtcaggggatgagagccccgtgcggaactgctggcagggagccatggtggccacgaggcaggagggggactcggccaccatcgggtgctgggggtagtaaggctggctccccaggcctccatgggtggggctgcagatcagagtggggtcatattcatccgtgggctccgtcttgatggctgggactgggaggagaaaagagcacataggggcgcccatggcagtgagccacggatgtgcacggaggattcgtggatggtgcttgagaaca

SEQ ID NO: 9247 - DNA, 572 bp, Homo sapiens
  MAP TO AL079295.1; EXPRESSED IN PLACENTA, SIGNAL = 6.4; EXPRESSED IN BRAIN, SIGNAL = 8.4; EXPRESSED IN HELA, SIGNAL =   6; EXPRESSED IN LUNG, SIGNAL = 7.1; EXPRESSED IN BONE MARROW, SIGNAL = 7.5; EXPRESSED IN HEART, SIGNAL = 5.2; EXPRESSED IN FETAL LIVER, SIGNAL =   8; EXPRESSED IN ADULT LIVER, SIGNAL = 4.7
ccaaacctaccaagcccaggggatggtactgcgcagggagttcagcccttgcgcctaagtctgacaagataaacaacatagggggaggaaaaaaaacaatgtcacaatcaccgctaggttttaaaaacctaacaccttggaacagaaggggatgtggcagtctgtgctctgtggggaggccatttgtgcaacagcagaacctcgcagctttccactccttatatgtgcaagtgcaaaccctcacccacagcactctgtactcacccagaggtacatcatgtcagatcgggctgctcaaactcagcggtcagtggatcctggactgcaaaaaggcacttcagtgaaccacaggaaagaagatgccaaaactggggggcaagagtttgaggtggggagaaaccccccaaaatcacttgagttaaaaaatcctaaaaaaaaaaaaaagaaaagactggtctcctcccccctccgctccagctgactgttctgttgttctctctcctccctctcaccctccctccgtccctccctctctctctctctctttctctctctctctctgggagttccca

SEQ ID NO: 9248 - DNA, 562 bp, Homo sapiens
  MAP TO AL022320.23; EXPRESSED IN PLACENTA, SIGNAL = 1.4; EXPRESSED IN BRAIN, SIGNAL = 1.5; EXPRESSED IN HELA, SIGNAL = 1.6; EXPRESSED IN LUNG, SIGNAL = 1.7; EXPRESSED IN HEART, SIGNAL = 1.5; EXPRESSED IN BONE MARROW, SIGNAL = 2.3; EXPRESSED IN FETAL LIVER, SIGNAL = 2.6
cctataaagattcacaaggccctgccaagctaaaacagcaaagaatggattttgcttacaattagtttgttcgctgcctctttaatcttgtctactttggcttctgagagtcctttgacattgcatagagctcttcttgttgtcatctgtatacctttgatggtacagattcctactgatttcagtttcttaatgtcagccacgttctgtaaattaaagaatgggcacagcagactgataagatgccagcctgcaaggctcccatactatgtcatgtgtttctgtgtccatctccttccaccatgatgccaattttatacaagctgccaggtggaacccacccaccatgtagccaaatgttctggaaatatctgagtagaacatactcagcaggctgccaaatgttctgactgtgccctgatttcccaagaatgttagtgagaccatggcaatgtaacaaggaattcaaaagaaaagcctgttggtggaaaagctaacaaatttatcacacattcaccccctcagttcagctccttccttctacagaacttcattaccaaca

SEQ ID NO: 9249 - DNA, 576 bp, Homo sapiens
  MAP TO AC002472.3; EXPRESSED IN ADULT LIVER, SIGNAL = 1.9; EXPRESSED IN HELA, SIGNAL = 1.4; EXPRESSED IN PLACENTA, SIGNAL = 1.6; EXPRESSED IN BRAIN, SIGNAL = 1.6; EXPRESSED IN LUNG, SIGNAL = 1.5; EXPRESSED IN HEART, SIGNAL = 4.1
cggtgtccaggtcacaatcccagtgaactctgatgcctacagagccaccctgcacatagcacatagcttttccaccggtgggtgggcccgggaccctctcccagagccctctaggaaccctgcccccaacttgggacccaccagcaacgccaggtcctcgaaggtccctccagccttggccacgaggtccccaatgcggaacacgggacagtaggggctgaattgtggttcatagcggcagtgcttaaaataggtggggtcccaggtctccaaggcattggacctgggaggagtgggaaaggtcagatgaggtaggggacaaggagggtcttggggcagatgagacccactctgcttacttagagaagttgaacttgctgaaggtgactgtgtttttgatgaacagtgtgaagttctgggcctgggccagcaggggcctcctgcaggtggaagggaggtgacagcctctgccaggcctggggccctgcgccagttggggtaggggattgtggggacacttacgagggcacaacgccactctccacggggcaccaactccagatctcacaggtcctg

SEQ ID NO: 9250 - DNA, 980 bp, Homo sapiens
  MAP TO Z82188.2; EXPRESSED IN ADULT LIVER, SIGNAL = 3.1; EXPRESSED IN HELA, SIGNAL = 4.4; EXPRESSED IN PLACENTA, SIGNAL = 4.3; EXPRESSED IN BRAIN, SIGNAL = 1.8; EXPRESSED IN LUNG, SIGNAL = 3.3; EXPRESSED IN HEART, SIGNAL = 1.9; EXPRESSED IN BONE MARROW, SIGNAL = 4.2; EXPRESSED IN FETAL LIVER, SIGNAL = 2.3
gagaagtgctgggctacgaggctgggaaagttctagaatatttaggttagcaagcttcttaaaataggtccaagagagaagagaggagcagaaataggctgggagggatgatggcagccaagatagaagcagggtctccccagaatgccaggtccccggggacctccctggccttcctgcttcacagcagtgcaaactgagccctgcaggggacgggaccagcacctgagctctccagccgggagggtggcccagaggccctcagtcgtcctcggccttgatgaggtggccgctgaaggtgatgtaggtgtcgaagtcgttgctgtagatggcgttctcgcgctggcgcttgaagagccgcacccagacgcggtccccgtaggccaggtccagcatcacactctggctctgcatgatgctgcgctcgctgggctgcgcgtacaggatgacagcctctttctggttatgcataatgtgcacgtacgtctccttgtaattccagctgtgcacattgaggctgaagaagtagatgccacgcaggggagcagcaaactggccggtcgccatgtcaaagcacccatcaaggttcacaaagaccctttcgaagagcagcgtctggaagtcctcgccgctgtgcagggccgtcttgcggcccactgagaaggcgaagaagcgcttctggcacggggcgccggggctgcccatctcccccttgtcacccttgctgccctgagggccaggctccccttggggaccctccctgcccatgtaccctggcaggcccattgggcctgggtcccctttgtcacctgtggggataaaaaggggacaagtcagggtggacatctgagcctgctccaaggaggtgcccacactcatctgtgacggctctgcccctgtcctggcccagagaagaagccagcatttatttagcacctactgtatgccagacattgcctccccacatgcctgcctaaaga

SEQ ID NO: 9251 - DNA, 572 bp, Homo sapiens
  MAP TO AC007281.3; EXPRESSED IN ADULT LIVER, SIGNAL =  25; EXPRESSED IN FETAL LIVER, SIGNAL =  20; EXPRESSED IN BRAIN, SIGNAL = 3.5; EXPRESSED IN HELA, SIGNAL =  10; EXPRESSED IN PLACENTA, SIGNAL =  22; EXPRESSED IN HEART, SIGNAL = 7.4; EXPRESSED IN LUNG, SIGNAL =  11; EXPRESSED IN BONE MARROW, SIGNAL = 5.4
aaaaatgaaatggaatatgcctcttcttttctgaacaacgctaaatatgtctctatttatctttaaatatgaattataaaacctaccagagagagttgctctaaggattaaatgagattctgtgtgtggggtgtgtgtggtgtgtgtgtgtgtgtgtgtgtgtgtgtgttacccaataaatggtggtaggcactatataagtggcatttattataatcatcttatttcttattaaattggtagtgttcaaacttggttttatagatacttgtgaaggcattattatttttgttattatcattatcattatttttagagatagggtcttggtctgtcacccaggctgaaatgcagtgatgtcatcacagctccctgcagcatcagactcctgagctcaagtgaccctcctgcctcggactcctgacttgctggtactaaaggtgtgcaccaccatgcccatctaatttttttttttttttttttttttttaaccttttgtagagatgaggtctctctatgtagcccagctggccttgaactcctggcctcaagcaatcctcctaccatggcct

SEQ ID NO: 9252 - DNA, 577 bp, Homo sapiens
  MAP TO AL022238.1; EXPRESSED IN FETAL LIVER, SIGNAL = 1.6; EXPRESSED IN PLACENTA, SIGNAL = 1.8; EXPRESSED IN BRAIN, SIGNAL = 1.6; EXPRESSED IN HELA, SIGNAL = 2.6; EXPRESSED IN LUNG, SIGNAL = 2.1; EXPRESSED IN HEART, SIGNAL = 2.2; EXPRESSED IN BONE MARROW, SIGNAL = 1.7; EXPRESSED IN ADULT LIVER, SIGNAL = 2.3
catgatctggccatgaaggccttcttcccctttcctcaactccactccaacccgccaggtactcccgaggccgcacagatgcacacagctgcccctgctcacaggagacatcctggaccttccccaccaggctccccagacctctccctctcctccatttttgtcctaaggctcctctcggatcttccatatgatctgcttatttcttatatttgttgtccacctccccaggctgcactgtgagctccacaagggcaaatgtctcttctgttcgttgggaggcgagggccttggggcagtgcttccagctgaaggacggcaccttccctggtcctctcgcccaggccttggagacgggagggctcacagccaccactgcatccacagtgcttgcccaagactggtcacgcacggaagcattcaataaaaacaaaccaacccagggctagagacacctatgaacagagaaggccgtcagggaggcagcaggggacctggggttacctccgctctgaatgagaatgtcaaacaggtcgtccatctgctggcttgaggaaccattttcctgtgggacaaa

SEQ ID NO: 9253 - DNA, 558 bp, Homo sapiens
  MAP TO AL022328.21; EXPRESSED IN BRAIN, SIGNAL = 2.8; EXPRESSED IN HELA, SIGNAL = 2.1; EXPRESSED IN BONE MARROW, SIGNAL = 2.5; EXPRESSED IN HEART, SIGNAL = 2.4; EXPRESSED IN ADULT LIVER, SIGNAL = 3.1; EXPRESSED IN PLACENTA, SIGNAL = 2.5; EXPRESSED IN LUNG, SIGNAL =   3; EXPRESSED IN FETAL LIVER, SIGNAL = 2.9
ctgtgaggttgctggaactgggcggtgttggaggctcacaaggcacctgatgtcacctgggacgggcggttttcagggacgtgcaagctgctcacgttacacgcgttccctcctttccatgtgctgcccggaatcctggtgttgggtgacctcctgaccggcccacgtagtgaactctgtgtttggtttcagacaggccgacggtcgcaaggtcctacggtcaagcatccgggagtttctatgcagcgaagccatgttccacctgggagtccccaccacacgggccggcgcctgcgtcacgtccgagtccacggtggtgcgcgacgtgttctatgatggtaatcccaaatatgaacaatgcacggttgtgttgcgtgtagcttccactttcataaggtaatgccgggggcctttcggcctgtctacacgcacttgcttagagtcctaggagatttgggcctgtgctgctaggattctggtagaaacaaacccagatgaccgccttggcctcttctgaaagtccagcctgtccctggcagcctcagaagctgcctgtcc

SEQ ID NO: 9254 - DNA, 552 bp, Homo sapiens
  MAP TO AL031588.1; EXPRESSED IN LUNG, SIGNAL = 6.4; EXPRESSED IN HEART, SIGNAL = 4.9; EXPRESSED IN FETAL LIVER, SIGNAL = 5.2; EXPRESSED IN BRAIN, SIGNAL = 5.9; EXPRESSED IN HELA, SIGNAL = 5.5; EXPRESSED IN BONE MARROW, SIGNAL = 7.2; EXPRESSED IN ADULT LIVER, SIGNAL = 5.4; EXPRESSED IN PLACENTA, SIGNAL = 3.8
tcttcctcttgcctctccacagggtatctcacgggagctagtgcagccatgggcatggctcaggccccttggcctggtgtagtcctcacagctcctgttttctcatttgcttcctaatgtattccaccaccacccccactaacacgagctctgtctggttcccggatgagtccgtacctggctacgaggggaggaagggagcaaggtggatgatggctgggtggacaggtggacggacagatagatgggcggacgggcaggcaggtggacaggtggacgtgcagagagggagggaggaagggagcaggtggtggcgatgggcacaggcctgatcctgccctcccgcagctccctgctgaggaccgcattcctcctgctgctgctcatcagcgccacctggctgctggggctgctggctgtgaaccgcgatgcactgagctttcactacctcttcgccatcttcagcggcttacaggtaggtgacggccgagttgcccgcgggacccctgcctggccgccgtgacaccatcgctgtgatgcgaagcagtggag

SEQ ID NO: 9255 - DNA, 565 bp, Homo sapiens
  MAP TO AC006548.19; EXPRESSED IN ADULT LIVER, SIGNAL = 1.6; EXPRESSED IN PLACENTA, SIGNAL = 3.2; EXPRESSED IN BRAIN, SIGNAL = 2.5; EXPRESSED IN HELA, SIGNAL =   3; EXPRESSED IN BONE MARROW, SIGNAL = 2.1; EXPRESSED IN HEART, SIGNAL =   2; EXPRESSED IN LUNG, SIGNAL = 2.2; EXPRESSED IN FETAL LIVER, SIGNAL = 2.9
agtccttgggccagagaagggcctggctcttcctgcgaggtgggagatgagaagtgctggccagggctatggcatccagcaggaggagaggttagcctggagttgaggctttaaagcccaggccccccaggctgctgagagcaggaggcagaggttccttccccctgagaaagtttgagagagcccactccttggcctgcccttcctcaccaggaactcacagacactgccactcccacttccaccctctgtccctcagccatccataggctctgtcacgtccggcaagaaggtggactatgtccaggtggatctggagaagacccaggccctgcagaagaccatgcatgaacagatgtgcctgcggcagtcctcagagcctcccaggggcgccaagctgtgactcgggccaccaaaaccagagtggggccaggacagtgcctcagagctgctccgccacactctaaagctctgtaatatcagggaccgcatcccttacatagagagcagaggcctgatcaatatacatcctttgcctgcttggggcccacctgtgcctttggct

SEQ ID NO: 9256 - DNA, 547 bp, Homo sapiens
  MAP TO AL022238.1; EXPRESSED IN HEART, SIGNAL = 1.5; EXPRESSED IN LUNG, SIGNAL = 1.9; EXPRESSED IN BONE MARROW, SIGNAL = 2.2; EXPRESSED IN FETAL LIVER, SIGNAL = 1.6; EXPRESSED IN PLACENTA, SIGNAL = 1.4; EXPRESSED IN BRAIN, SIGNAL = 1.4; EXPRESSED IN HELA, SIGNAL = 1.5
caaaacagattttggcagagagaagcgatctcacaccaagggatggtgagaccctggagaagaggccaagccaaactaacagcatgtgactgtgctttttgagagtccctcagaccagtggcagctaccatggcacagctgtcgtacggtgttaaggctctggcttacccactgccaacagaaatgggagaagaaagaggcaggaaggaaatgggtagtgcagtagtgagtacacacagtgagaactggatctagatggaaaagcaattccaatctccacaccttccaaaatgtgcatcctgaccagctccgatctctccggccgggaacgaatcttccgtttgagatagtcctctgtctacagaaaaaacacaccaagaaactctcaaatccaggtcacaggcttatggcatggacaggatcacaacagcagccttggccatggtagctgctgaccacctctgcagttcccacaaccttaacttggtgactgcagggttcggaggcaagagtaggcctggggagagcacaccaaaatccaactgca

SEQ ID NO: 9257 - DNA, 563 bp, Homo sapiens
  MAP TO AC007253.2; EXPRESSED IN PLACENTA, SIGNAL = 1.9; EXPRESSED IN HEART, SIGNAL = 1.3
catccttgaaaagccctgtgattgttcatctcggcatgccacagcttacagtaggaattgcagtcactcaactacaacctttaaatgcaatgggagtaattcgatcctgaggtggcaggggccaagtggcagcactcaaccaacagaggcaatgtgggcataggtaccataatggacagcagaggtaaagcagcaatcagaagagcctgacttgtgcagagctctggcatttgctaattaatcacagtgttcctagaagtaaaattgatagaaagcgtactgtattcctacttaatttacataagcagaaaatttctaggtcgaatggacaaaagattagtttgaattataaaaacagaatcatagcccctcaatctatttctagacttgagccaacctgcagacccagaaccccttgaatgaaagggaggccaggttcccttgaggaaggaccacactataccactgacaatttatgctgttaatctttctcccatcctttcccaaggagaactctggcctttttaccagggtaactgtgcactggggaaagggaaatgata

SEQ ID NO: 9258 - DNA, 558 bp, Homo sapiens
  MAP TO AB016897.1; EXPRESSED IN LUNG, SIGNAL = 1.8; EXPRESSED IN HEART, SIGNAL = 1.6; EXPRESSED IN FETAL LIVER, SIGNAL = 1.3; EXPRESSED IN HELA, SIGNAL = 1.4; EXPRESSED IN PLACENTA, SIGNAL = 1.2
tcccttttctctcctcttcctccttctgactgcaggatgctgggcaaggctggcaggcccgggagagcctgtggccagcctgggtccaggaagtgggcagctgccacagaggggcctccgaggctagctgcctcctaacttcctcacggcacaccattctgccgtcctgagtcttctcaaggttggaaggtgcccagatccagggagatggtgctggctctttggtggctgtggagtgtccagacagatgagctggaatccttcagtttctctgcctctcctgtcaagttggggtagcactgcttggactcttgccccggctgcattgaccaagccttgatgttgccttgaccaagccttgatgttgccttctttgccaaaccactggccacgatgttgctggcacagcagcccaaaggcagctgcttgtccatctcagcctgacccagccttcatgcgggctccatctcagccattgtaaagcaagctcctagttctagttctcccccacaaattttattgctaaataaacaattaagctacccctttaaatagtaa

SEQ ID NO: 9259 - DNA, 560 bp, Homo sapiens
  MAP TO AP000350.1; EXPRESSED IN ADULT LIVER, SIGNAL = 2.1; EXPRESSED IN BRAIN, SIGNAL = 2.1; EXPRESSED IN PLACENTA, SIGNAL = 2.3; EXPRESSED IN HELA, SIGNAL = 2.3; EXPRESSED IN BONE MARROW, SIGNAL = 2.1; EXPRESSED IN LUNG, SIGNAL = 1.7; EXPRESSED IN HEART, SIGNAL = 1.7
acgtctgccaccagttcagcacagaggggagtagagagatggcacgcaagctttgatgtgcctttgctggcctcgcctggatcatctcattagttgggataatctcatgcgcccacccagctatgagtggaatgagggaagtgtttatggccatgaccacccccagggcatggagcaggaggtctgtgcaggatgagggctgggggcctgctagtcatgtgcttcctccttccactcccagtttccaggaaggccacccccagtgccctggttgtcctctcctgcatccggagatgtttggcttcaaagaagaaggggtgagggaggccggtccatgcccaagcatggtgcaatctcttggcatcccttccctctcctgatttcagagaagttgatgacgcctgagatgttttcagaaatcctctgtgacgatctggatttgaacccgctgacgtttgtgccagccatcgcctctgccatcagacagcagatcgagtcctaccccacggacagcatcctggaggaccagtcagaccagcgcgtcatcatcaaggtaggtg

SEQ ID NO: 9260 - DNA, 579 bp, Homo sapiens
  MAP TO AL035681.13; EXPRESSED IN BONE MARROW, SIGNAL = 2.7; EXPRESSED IN LUNG, SIGNAL = 2.7; EXPRESSED IN HEART, SIGNAL = 2.1; EXPRESSED IN FETAL LIVER, SIGNAL =   3; EXPRESSED IN ADULT LIVER, SIGNAL = 1.7; EXPRESSED IN PLACENTA, SIGNAL = 1.9; EXPRESSED IN HELA, SIGNAL = 2.6; EXPRESSED IN BRAIN, SIGNAL = 2.5
catgccaataatcctcctgcaccccaacaccctctcaaggtctgctgactacagggagagggtccctagccaatgctgtgtgccctggggaggccagaggaagaggagctgcttggggtacagccacacaggcaggggcctggaagagactggacacaggcaggggttgtggaagtgtgaacagaagcttgttcaaaccagcctgggcctactcgccccactctgctcaccttcaactccgacttcttctctaaggccttggcgatgaccctggctgcttccacgcccactgtgttgccttccagacgcagagcctccaagctgtcaaagtcttcaatctctttaatcacatctttagctgccagggaccaaagagcagaaccttaggcttttggaatcacaaacagctaagataggagagaggttggcaaccaccttgccactcaacagtctatggtgcacctaccatgcaatgagccttggcttacagagaatcagacaggctcatggtccagagtacagagctatgcagatgatttctctgtaatgagtgttaaaaccaggcatgtagagaggctt

SEQ ID NO: 9261 - DNA, 546 bp, Homo sapiens
  MAP TO AL049758.11; EXPRESSED IN PLACENTA, SIGNAL = 2.1; EXPRESSED IN HELA, SIGNAL = 1.3; EXPRESSED IN LUNG, SIGNAL = 1.7; EXPRESSED IN HEART, SIGNAL =   2; EXPRESSED IN BONE MARROW, SIGNAL = 1.8; EXPRESSED IN ADULT LIVER, SIGNAL = 1.8; EXPRESSED IN FETAL LIVER, SIGNAL = 1.6; EXPRESSED IN BRAIN, SIGNAL = 1.4
gaggacataaccgcgacttcaggagaggttcagaaggccttcggtaatgcctgcagccccccaggactctatgccagaacttggtctgtactatagctatgcctaaaggctgcctgataaacagggcaaacactaacatagagtctagaatgagaaagacatcatctagcaactctgtgggcccaggtcctcttccaggctgatgagctcatgggcacaccctcctcttacctcaaactgcggccagttcatggccatgcccggcccgtgattggctcggaaccacctcaggtcctccactgcatcagctgctctgatgctctgctccaggtcatggtaaatggctttgtagctaaatcagagagaaacgtggctcttttagaaggcaggggccagctaccctttgtcccagcccagtgccagccacagcaggtcccgtggtctctgccctctgtgagttggtttcacagacagagccagaacactcctcccttggctcaggtggaaggtcacgggccgccacgtgcacagatggctcctgacaaa

SEQ ID NO: 9262 - DNA, 569 bp, Homo sapiens
  MAP TO AP000111.1; EXPRESSED IN BRAIN, SIGNAL =   5; EXPRESSED IN HELA, SIGNAL = 4.2; EXPRESSED IN FETAL LIVER, SIGNAL = 2.4; EXPRESSED IN ADULT LIVER, SIGNAL = 3.5; EXPRESSED IN PLACENTA, SIGNAL =   3; EXPRESSED IN BONE MARROW, SIGNAL = 9.3; EXPRESSED IN HEART, SIGNAL = 4.1; EXPRESSED IN LUNG, SIGNAL = 4.6
ccctcatagctttctgccaccagacaaatccaaggctcctttgtctgtccccattttactcctgcccctccagaaatttctcctcacggctgttcaaagaaaatctagactcctcagcacagccaacctgtctctccctccctcacccacgtggcctttgaagacatggagccatagaggagaaccaagtgctggatgtgggctttttcatgggcatctgttttgaggagaaaagttgtaaatgtttttgtcttattttcatagcattgggaatggtaccacctcccgaaaatgtcagaatgaattctgttaatttcaagaacattctacagtgggagtcacctgcttttgccaaagggaacctgactttcacagctcagtacctaaggtgggtctggcctcactattggcaggaacgcaccggaggagccagccctgggctggtcactgggttgggccacaggaggaagggagtctgactacggtcaccgtgtgactgtgacaaccctcagggagcctccctgccagccttttgctgtctgggaaattctcgtggccaccttttctct

SEQ ID NO: 9263 - DNA, 573 bp, Homo sapiens
  MAP TO AL031587.3; EXPRESSED IN FETAL LIVER, SIGNAL = 4.4; EXPRESSED IN ADULT LIVER, SIGNAL = 3.6; EXPRESSED IN PLACENTA, SIGNAL = 4.3; EXPRESSED IN BRAIN, SIGNAL =   7; EXPRESSED IN HELA, SIGNAL = 5.1; EXPRESSED IN LUNG, SIGNAL = 5.3; EXPRESSED IN HEART, SIGNAL = 3.7; EXPRESSED IN BONE MARROW, SIGNAL = 8.9
aaatgaacaggccacaggtcagaagtggtgggaagcaggcccagtggatacctttagacacatgtcctagtagggatgctcgggctttgcttctctgcggacggggctgtgagtctcagaggctccatctgcattccggggcaggggctaggctgctgagtatgccttggggtactgcagggcagtgctatgccaccacctgacgtggcagaaggctggtaggatgggctggcctgaggatggccctgcctggcagaggagtggactccagtggtcgagcttgggctaccctgcccgtctctggagacagattaagtggtggcaagacccttcctaagttcctcactccttctgtggtcaatgtcttccatttcccggagtttctgcaaagggcatcagggaaagcaggtgtatcagggctaggaacctgaggagctgtcacagcagtgagctagagcctgacccctgaaccctgccacagcagaccctgtatttccattcgcacttggcgctgggcccttcccctccccactttcctggttgtttctcctacctgggagatttcagcaagga

SEQ ID NO: 9264 - DNA, 568 bp, Homo sapiens
  MAP TO AC006548.19; EXPRESSED IN HEART, SIGNAL = 2.3; EXPRESSED IN LUNG, SIGNAL = 2.1; EXPRESSED IN FETAL LIVER, SIGNAL = 2.6; EXPRESSED IN ADULT LIVER, SIGNAL = 2.5; EXPRESSED IN HELA, SIGNAL =   2; EXPRESSED IN PLACENTA, SIGNAL = 4.8; EXPRESSED IN BRAIN, SIGNAL = 2.2; EXPRESSED IN BONE MARROW, SIGNAL = 2.1
actacaacagcccaacccaggtaagacctaaatggtccagatccctccggggtcacaacctgctgaggtgcttgctaaaggcaaaggaaatacagaatgaataatggaagaaggtagtaatcaataccagctgtgaccatgtgaccagctgcagaaatgaggactggaactgtcatgagtatttctttcttcttttcttaaaaaacatctttgtgcatgtatacacttgtactaagaaaatatcttgatttcatttcctttttctttatcaggtgacataagagttattgacttcatatcagcatttaagcattgttcactttatgtaatagtatttgggttggcgattggtgcgtttccggttgtaggaaggatagttatgttaggtgtaattacgaccacattattgtctttattttaagattaggtatgatctcaggagatgtgtatgtgttcaaggtgacaaggggtgggcttgtgatggttaatactgagtgtcaacttgattggattgaggaggtaaagtattggtcctgggtgtgtttgtgagggtgttgccaaaggagat

SEQ ID NO: 9265 - DNA, 579 bp, Homo sapiens
  MAP TO AL022312.7; EXPRESSED IN BRAIN, SIGNAL =   4; EXPRESSED IN HELA, SIGNAL = 3.5; EXPRESSED IN ADULT LIVER, SIGNAL =   5; EXPRESSED IN FETAL LIVER, SIGNAL =   3; EXPRESSED IN PLACENTA, SIGNAL = 5.9; EXPRESSED IN BONE MARROW, SIGNAL = 5.4; EXPRESSED IN HEART, SIGNAL = 3.5; EXPRESSED IN LUNG, SIGNAL = 3.4
agaggtggctcaaacactcggggtccctatggctctgggtcaatctaggccaggctgcaccccatggacagggagtctcagggctcctgatcatgcccaggccctggcctggggcctccctccttggcagctttcccacccccacgcccctggcatcctcagttgctatgggatgcccctccagggcaccagctcagggctaagcgaaggaagataggagcagctcagagctgccaggctctgccttcctcacagacctggtggggcaggtcctgttcacagcagcaggagtgaaggcctggccatcggtggagagggcagctgtcagagggctgggggccagggcacaggattgaagagtttcacatatcatcacagcatacactgggaatttggtgggggcagaagaacccagggccactccctcaatatgaagggaaaccaagctgaatgtgaccaccggcacactgctgccatgtcccatgtccacctttctccccgggaataactggccctgagacccctagacccaaggaggcctgtccatgccaagcatccgggaagcatggctggccttat

SEQ ID NO: 9266 - DNA, 592 bp, Homo sapiens
  MAP TO AC004832.3; EXPRESSED IN LUNG, SIGNAL = 1.8; EXPRESSED IN BONE MARROW, SIGNAL = 2.2; EXPRESSED IN HEART, SIGNAL = 2.1; EXPRESSED IN FETAL LIVER, SIGNAL = 1.6; EXPRESSED IN HELA, SIGNAL = 1.5; EXPRESSED IN BRAIN, SIGNAL = 1.5
caagaccaagacagagcagctgagtgactcactccgcttgcagctaataactggcaaggccaactctcaaatccagctctcctaacctcaaatcgggatctctacccatgctacctccaggaatctctgagacccttcctggcccgtcttccctctcgggggcaggcacagcagcccacctggcagcccaccaggcagtgggccctcaacaccagttgggtgccctacaccttcggatgcaggaaccatcagatctgtgagaaggaccaccctcagctcaggatccaggctggaaaagaggccgcagagggctcactcacctccgagaatcaccaccttcctgcgtgtctcttcactcatgtaagacttgaccaggttgaaggctacggcgaatagcttgggggctgaaaccaggcacagaactgctccctcaggcggctggctggggtctcaggtgcccacccggtcaccgcacatcccctgtccccccaactcatgcatatcctgggctgctttactcacctctcacaacaattaaactcttcaagatctcagggtaatttgcttcaagtgctgagaaaaactgcggaac

SEQ ID NO: 9267 - DNA, 562 bp, Homo sapiens
  MAP TO AL020993.1; EXPRESSED IN BRAIN, SIGNAL = 1.6; EXPRESSED IN PLACENTA, SIGNAL = 1.3; EXPRESSED IN HELA, SIGNAL = 2.1; EXPRESSED IN BONE MARROW, SIGNAL = 1.8; EXPRESSED IN LUNG, SIGNAL = 1.9; EXPRESSED IN HEART, SIGNAL = 1.4
gcaacccaagtcccttctatctaccaatatccttctcccaggaagcaggggagaggatgtgaaccccgcctgggttttcccacacccagctggtgacccagctgacccgggacactgaggcacaaaagaaccgcatgactcctgcagaaactggagctaaaaataccctccagtgcccagcctggcctgcgagaggagccccctggcctgcctcccggcaacctgctgcttccttccccatctgggatggccctggggcaaatcatgcccctggagccacattctgacttcagatccccaaatcctggggtctttcctcctcttggtcccatgggctggccccaggggctccagctggagctaggaacacttacccaggtagatatctccgaaggacccgctcccgatcttccgtcccaggcggtacttgttccccacacgtagctccatggctcactcttgctgcagaggaagcaggaacatgagggtcagcgacgtggggagccgggaaaggggtccagtccaccaaggccaggcagagccaccaggaactcgaaaacct

SEQ ID NO: 9268 - DNA, 582 bp, Homo sapiens
  MAP TO AC006548.19; EXPRESSED IN PLACENTA, SIGNAL = 2.4; EXPRESSED IN HELA, SIGNAL = 3.2; EXPRESSED IN BRAIN, SIGNAL = 8.2; EXPRESSED IN LUNG, SIGNAL = 3.4; EXPRESSED IN BONE MARROW, SIGNAL = 7.7; EXPRESSED IN HEART, SIGNAL = 2.8; EXPRESSED IN FETAL LIVER, SIGNAL = 3.4; EXPRESSED IN ADULT LIVER, SIGNAL = 3.5
cgctatcacaagtagaaaaagcctataagttgctatgccaaaaacctgcctctagatggcaaacaaaccccacaatacacaaaagagagccaaattcttagaaaccctgggaaaggaagagggctactgtcccattaaccacttggagcccttaaggctagaatgaggtggaacatctggaacatctgggaggagacaccagggtgcggagtagtggggaacctgctctgtgctctgagactgaaagcccagccttgcctctcaccgctgcctggactgtgtccccatctgctgtgaagtgaatggtgtcttctaaattcatgctgagccctaattgctgaaaagtgtaagacatgcaatggggggattatgtgcatcttcccgacaccaacatgatgctcaggaaggagactacttgttttctcttaggattcttttactaaccaagattttgcctctactgcatatttccctttgctgattgtccctcccttttgacagaagatggcccaggggattcactactaagtctcaacctcttacccaaagccctcagtctagtgctgctctttccttcatgct

SEQ ID NO: 9269 - DNA, 574 bp, Homo sapiens
  MAP TO AC004909.2; EXPRESSED IN ADULT LIVER, SIGNAL = 3.9; EXPRESSED IN PLACENTA, SIGNAL = 3.2; EXPRESSED IN HELA, SIGNAL = 2.4; EXPRESSED IN BRAIN, SIGNAL = 2.2; EXPRESSED IN LUNG, SIGNAL = 3.5; EXPRESSED IN BONE MARROW, SIGNAL = 3.9; EXPRESSED IN HEART, SIGNAL = 2.3; EXPRESSED IN FETAL LIVER, SIGNAL = 5.4
atccacagtttcaggcatccactggaagctgtggagcatatcccctgtgtataacggggggactgttgtacaaccattggcaagactggggaagccacagcaagagacaggaaatcaggatattcagaaaacacagaaaccactgttaatagtctcagctacttgcagcactcagggaagtgattatcaggaggacatcttaaagccactggggaaaattccatacctgccatctccaatgcccatatagctgcctgcagctcccactgaagatcaatggcttcttcttcttgttcaccttccaagtctcacacacgagtttctcactggcaaaacctaaaccagtaactgctagtaagtgagtctaagaaaggtagattccaggctttctgtcactgcaatacagaggacaatttaagagtaaaatttctgagaatcaataagcaatatctagacacaaccaaacttcatacttttcagtctttctaactcaataaataatattacaatacattcagttcttcaaaccaattattttgagttcagggatacatgtgcaagatgtgctggtttg

SEQ ID NO: 9270 - DNA, 559 bp, Homo sapiens
  MAP TO AL034406.1; EXPRESSED IN ADULT LIVER, SIGNAL = 5.1; EXPRESSED IN FETAL LIVER, SIGNAL = 4.5; EXPRESSED IN PLACENTA, SIGNAL = 4.7; EXPRESSED IN HELA, SIGNAL = 4.8; EXPRESSED IN BRAIN, SIGNAL = 3.9; EXPRESSED IN LUNG, SIGNAL = 5.2; EXPRESSED IN HEART, SIGNAL = 3.6; EXPRESSED IN BONE MARROW, SIGNAL = 3.2
cccttggttacttgcacaggctggcattaaatgtctgccgcttttccaggtgcacaatgcaagtcgtcagtggatctactattctggggtctggaggatggtggccctcttctcacagctccactaagcagtgccccagtggtgactttgtatggtggcttcaaccccacattttttcccctcacactgccccagtagaggttctccatgaggattctgccactgtagtgggcttctgtctgcacatctgtgcatttccatacatcctctgaaatctaagtggaggcccccaagcctcaactcttgccctctgcacacccataggcttaacacaatgtcaaagctgccaaggccaacaactttcaccctctggagcagcagtctgagacatatctggggcccttttagccatggctggagctagagcagctaggatcagggagcagcgtcctgaggttgatcagggcattggggtcctgggtccagcctacaatatcattcttccctcctcagcccacaggcctgtgatgtgaggggctgctgccatgaatgtctctga

SEQ ID NO: 9271 - DNA, 974 bp, Homo sapiens
  MAP TO AC007092.4; EXPRESSED IN PLACENTA, SIGNAL = 1.2; EXPRESSED IN BRAIN, SIGNAL = 1.5; EXPRESSED IN BONE MARROW, SIGNAL = 1.5; EXPRESSED IN LUNG, SIGNAL = 1.4; EXPRESSED IN HEART, SIGNAL = 2.1; EXPRESSED IN FETAL LIVER, SIGNAL = 1.3; EXPRESSED IN HELA, SIGNAL = 1.4
aggaggttctggaagttgaggtcttgtgaatgccaataaaactacatgggaatgtgagataggcccaggatgttaagaacatccaggacagaatggaagtttgcagtcacaacaattagtaccagttgacaaggtcttttagaaacatgtcagcagaagaggccacatatggtatctcttttacacctttctaaagttgggagaagagtgagaggaggaggagaaatgctgaggggcctgatcattaagctgcgggtctggaggagcagcggcagcgggatcagctgcctgctgagcttggtcaaagggctgtggctgaactggtgcagccagctggagcaggggcggcaggaatagaggcagcaggtatagcagattgtaaaataacaggaaactgccatgcctcgggatccccatattcccttgcctgagaaatggccctcataagaggggtgtcattatcaggaaggtatgtaacctgttgcttatgggtagtaacagcagttgtgaccggaccagaagcagaaaggaaattggagttttgaatagaggagaaattgagagcctttaagccaggctgacgcgcggttgcctgctgtgcaggtctttcagaggcctgaactccaggctgctgcattgactgcagggcctgagttccaggctggtgcattgactgcagggcctgagttccaggctggtgcactgactgcaagtcagacttctgaggagcctgatgcatagaaagaaaggcagaattgagtgcagagatagcgttgagggcctcattatcgagccgaacagggatagggttgagagcctcataaccgggctgaacaggcggatggtggagagccctatagcaaggctgagatagtacaggaggtttgggccgcaacggctgctgatagtgcattttagagggatttttttggatctgggggaaggagatcctccacaaaatcctcataaggcga

SEQ ID NO: 9272 - DNA, 591 bp, Homo sapiens
  MAP TO AP000123.1; EXPRESSED IN LUNG, SIGNAL = 2.4; EXPRESSED IN ADULT LIVER, SIGNAL =   2; EXPRESSED IN FETAL LIVER, SIGNAL = 4.7; EXPRESSED IN PLACENTA, SIGNAL = 1.8; EXPRESSED IN HELA, SIGNAL = 2.4; EXPRESSED IN HEART, SIGNAL = 2.4
cctcaattttgctttgaattgctatgagttgacaaagttaaccacaagttagagaccccatgaccatatcagccactgcagagacctgaaggctgaccactgaaaaaactacaccctcctatatcacacacacacacatacacacacacacaatttattattacacacacatacacacatatttgttattgattataatcataaagtctaactatgagtttctgtttactcccaattaacttggaacaacttttctttgagcctcctcctgaatggaataagggaatggttgttcctgctcctacttggattcctgaagataggactggccaaggacagcctggaacaatcacagcctgctgctgtcatcgtgcaacaatttgttgcctgtattctagacgcagaaaaatctcacagcttatttcaagtaatctctattaatatccctccctggccctcaaaagatattaagaatccaaagggaaatcagaaactcaattgtgctagaaatagccaaactgtctcattcagaatgcattcaccaaacaacttcaaagcaaaatgatgatgaaaaataagccttccaacacc

SEQ ID NO: 9273 - DNA, 577 bp, Homo sapiens
  MAP TO AL078474.2; EXPRESSED IN LUNG, SIGNAL = 1.8; EXPRESSED IN HEART, SIGNAL = 1.4; EXPRESSED IN ADULT LIVER, SIGNAL = 1.8; EXPRESSED IN FETAL LIVER, SIGNAL =   2; EXPRESSED IN PLACENTA, SIGNAL = 2.1; EXPRESSED IN HELA, SIGNAL = 1.8
gccctgatgaaaagaacaagcagtggtattatactgactgaaaacagaacaaatatttcttataagaagttgaaggaaaaaaaaaactactataatcctgaaatattaactctaatacttcattctctggctataccctactaccttctcagctttcatactaaatgctataaaaacaatttatgtttaaaaccaaggaaattgcaattttcaacaatggaatatatatgggaagaacacataaatccatattcccattcccaagaggaataagctctatactaatttgtgctcagaatttaaatcccagagactataccctaaatagagatccaggaatagtgtcaaggcttctggtgggtaccatccctcagcatcttttggacacctgtgcaaaaataacaataataatgagggaacttaaccacactgaatattgtagttttatgcaaactgttttaagcactttacatgataatcttatttaatctttgtgtcaactctttgaggtaagaataattattattcaaattttaaagacaagaaagtaaggcagagaggagctagttatataaaa

SEQ ID NO: 9274 - DNA, 561 bp, Homo sapiens
  MAP TO AC009266.1; EXPRESSED IN FETAL LIVER, SIGNAL = 7.4; EXPRESSED IN HELA, SIGNAL = 5.2; EXPRESSED IN BRAIN, SIGNAL = 4.3; EXPRESSED IN PLACENTA, SIGNAL = 9.7; EXPRESSED IN LUNG, SIGNAL = 4.7; EXPRESSED IN BONE MARROW, SIGNAL = 3.9; EXPRESSED IN HEART, SIGNAL = 3.4; EXPRESSED IN ADULT LIVER, SIGNAL =  11
  unsure 73
  unsure 74
  unsure 81
  unsure 91
  unsure 103
  unsure 132
  unsure 138
  unsure 154
  unsure 160
  unsure 173
  unsure 178
  unsure 275
  unsure 509
atttgatccagcaatcccactactgggtatctacccagaggaaaagaaatcatttttcaaaaaaagacatttnngtgcacnacatttatangcagcataattncacaatttcaaaatcgtggaaccaacccnaaatgntccatcagtcaacgangtggantaaagaaactgtnggtgntatatatatatatatatatatatatatatatatatatatatatatatgatggaatactatgtagccattaaaatgaatgaattaacagcatttgcangtgacctggatgagattggagactattattctaagcgagtaactcaggaatggaaaaccaaacattgtatgttctcactgttatgtgggagctaagctatgaggatgcaaaggcataagaatgatacaatggactttggggatttgaggagaagagttggggggtgtaaaggataaaagactacaaatatggtgcagtgtatactgcttgggtgatgggtgcatcaaaatctcnatgaattgccactaaagaacttactcgtgtaaccaaatataacctgtactcc

SEQ ID NO: 9275 - DNA, 590 bp, Homo sapiens
  MAP TO AB016897.1; EXPRESSED IN BRAIN, SIGNAL = 2.8; EXPRESSED IN PLACENTA, SIGNAL = 1.7; EXPRESSED IN BONE MARROW, SIGNAL = 4.3; EXPRESSED IN HEART, SIGNAL = 2.2; EXPRESSED IN FETAL LIVER, SIGNAL =   3; EXPRESSED IN ADULT LIVER, SIGNAL = 2.9; EXPRESSED IN HELA, SIGNAL = 2.6; EXPRESSED IN LUNG, SIGNAL = 3.5
catcacatggcaggaggaccacacggccccaagagcagcctcttccattctacccagctcatcattctcctcacatttaaaaaatgtaaattagattctagttactgttctgctttcgaagcccctggtggcttcccaacccatatatcagtcttcaccctgacttgctcagcccctatgccctgagcctgcttcctctcagcgtgtctctgttgctcactcaggccacacgaggcttccatcctgtgcccgtgcctgcctctttcctcccattggaaggcctttcttgtgctagtgtttgtgcttttgtctttgcttttcacactctggccccttcttgtctcagacctcagcttaaagccacattcctgaagaggttgtccctgagcatcctgtcactgtcacagcacctgatgtaagttatttatgtggtctttattaccatccaatacctgctgtgtttgttgaccagctgtagaatgtgaactctgcaagtggggctcctgtttcatacgtcattgctgtatttctattgcacttttcttaaaaaatgcctgctgtgtagaagactcttgggaaccatctcatga

SEQ ID NO: 9276 - DNA, 978 bp, Homo sapiens
  MAP TO AC008166.1; EXPRESSED IN FETAL LIVER, SIGNAL = 3.2; EXPRESSED IN ADULT LIVER, SIGNAL = 3.3; EXPRESSED IN PLACENTA, SIGNAL = 4.9; EXPRESSED IN HELA, SIGNAL = 3.6; EXPRESSED IN BRAIN, SIGNAL =   2; EXPRESSED IN LUNG, SIGNAL = 2.9; EXPRESSED IN BONE MARROW, SIGNAL = 2.5; EXPRESSED IN HEART, SIGNAL = 2.7
catccttccccaaggagacttctggtgaaagagaaatgataggcatttcagggactactggacactggctctgagctgacattgattccagaggacacaaaacgtcattgtgggcctccatttaaagtagaaacttgtggagatcaggtaattaatggagttttagctcagatctgacttgcagtgggtccagtgggtccctgaattcatcctgtggtcatttccccagtgccagaatgcataattggcatggacatatttagcagctggcagaacccccacattggccccctaactggtagagtgagggatattatggtgggaaaggcaaaatggaagctattagagctgcctctacctagaaaaatggtaaataaaaaacaatattgcatctctggagggatggtggagattagtgccaccatcaaggacttaaaagatgcaggagtggtgattcccaccacatccccgttcaactctcctatttggcctgtgcagaagacagacggctcttggagaatgacagtggattatcataagctaagccaggtggtgactccaattgcagctgttgtaccagatgtggttttattgcttgagcaaattaacacatctcctggtacctggtatgtagacactgatttggcaaatgcattcttctccattcctgtccataaggcccaccagaagcaattggccttcagctggcaaggccagcaatgcacctttactgtcctacctcaggggtatatcaactctctggctttgtgtcataatcttattgagagagaccatgatcacttcacttctgcaagatatcacacttgtccattacattgatgacattatgctgattggatccagtgagcaagaagcagcaaacacactagacttattggtgagacatttgagtgccagaggatgggaaataaatccaactgaatttcagggaccttctacctcagtaatttctagggg

SEQ ID NO: 9277 - DNA, 584 bp, Homo sapiens
  MAP TO AC008151.1; EXPRESSED IN HEART, SIGNAL = 2.5; EXPRESSED IN FETAL LIVER, SIGNAL = 4.4; EXPRESSED IN ADULT LIVER, SIGNAL = 6.5; EXPRESSED IN HELA, SIGNAL = 2.9; EXPRESSED IN PLACENTA, SIGNAL = 4.7; EXPRESSED IN BRAIN, SIGNAL = 4.2; EXPRESSED IN LUNG, SIGNAL = 2.5; EXPRESSED IN BONE MARROW, SIGNAL = 6.5
atggtctggatctgtgtcccctctaaacctcatggtgaaacataatctccaatattggaggtggggccgggtgggaggtgatcggatcacagaggcagatccctcgtggcttagtgctgtcctcacaatagtgggagagttctcataagatctggttgttgtaaagtgtggcactccaccccctgcccagctctctctcttgctcccactctcaccaggggagacgcctgctctcccttctctagccatggttgaaagctccctgcggcctcacctgaagccaagcagatgccagcaccatgattcctgcacagatcacagacccatgggccaattaaacctcctttctttatcaattacccagcctcaggtatgtctttaaagcaatgcaagaatagcctaatacaggtagggtccagccaccaaggttaacctgacctctaggggattctgacacatgcacgcacacacccaaaagcttgagaagcgggtggcttctgtgagttgaggcttccccttgccacccctgcaggtggattttgaagacgtgatcgcagagcctgtgggcacctacagctttgacg

SEQ ID NO: 9278 - DNA, 997 bp, Homo sapiens
  MAP TO AL022318.2; EXPRESSED IN LUNG, SIGNAL = 4.6; EXPRESSED IN BONE MARROW, SIGNAL = 4.6; EXPRESSED IN HEART, SIGNAL = 3.6; EXPRESSED IN ADULT LIVER, SIGNAL = 3.7; EXPRESSED IN FETAL LIVER, SIGNAL = 3.4; EXPRESSED IN HELA, SIGNAL = 3.9; EXPRESSED IN PLACENTA, SIGNAL = 3.6; EXPRESSED IN BRAIN, SIGNAL = 4.1
tgcctccaaacagagatttttctaattctggttttgtcaggatgtctacagaggggccgggagaggccttcaaggtggggctggtgtttccagcccaggagtcctgagctgccccatctggcctgagaagcacgtttgggagacctcatggcatccaaagggacgtggaaaatgctatgaattatccaaaaagatgtccctggcaggctcctctccccaatgatccccctcaggagtgtccctgccccaatgctgggtgtggtaggagttaaccctgcaggcaggaggaagccccagcaggtccatctccagcaggggctgtgggtgagcagagccaggacaggggtgcatggtgaggccagggaaggagacccagctctaccccagggagaggggcagggtcctccccggagggcctgagcacactgagctgaccctggggagaccctgacaaggcctaaacaggccccggggctgtgttgacttcctgataatccaccagaaggggtcagagagagaggatcagtggcccccacaaagggagtggaagcgcctcctctgacaggtgcctcagtatatggggagcagggaaggagtggggggtgcaggagaggagcgagaggtagtcccaggaggagtcttagggcttttggtttcccctgtctttgtccacagatacctgatggatccagacacattcactttcaactttaataatgaccctttggtccttcgacggcgccagacctacttgtgctatgaggtggagcgcctggacaatggcacctgggtcctgatggaccagcacatgggctttctatgcaacgaggtgaccgacccagccacctgcatccaggcagggccctcccaatccagggacactcatagatagaaggttctgggtggtgcctgtggtttcctgcagtgtttgtcacttgtgcttcctgcagctgctgctgcttggccctggagttggggggagactttggcttcagtg

SEQ ID NO: 9279 - DNA, 555 bp, Homo sapiens
  MAP TO AC004032.7; EXPRESSED IN PLACENTA, SIGNAL = 1.2; EXPRESSED IN HEART, SIGNAL = 1.6; EXPRESSED IN BONE MARROW, SIGNAL = 1.6; EXPRESSED IN LUNG, SIGNAL = 1.2; EXPRESSED IN FETAL LIVER, SIGNAL = 2.1; EXPRESSED IN HELA, SIGNAL = 1.5; EXPRESSED IN BRAIN, SIGNAL = 1.5
cctggctcaaggaaaggagacataccctgtacacacccccagctccaacccactcttgggtcactacccaactcttgagtcatttccaggtcaccccttggaaatgagggtgctggactaagtagaggtgaccaccacggattcttgctttccttccagagtttttcttgggcagcagttgatcatgcatggactacatttcccaggttcctttgcatctaggtagggccatgtgactaactctgaccaaaagactgtgagaaaaagtgatgtgcatcacttcagggctgaaatgattaacaagcaggtatgtctcctcggtctctctttccccacctgcctgctgaatggaacagagttcaaagtaagtgttgaaaatggtagagccacaagatagaaggagcctgagtgcctgagtcaccgcatggaggcagattgcccaaccagaaatgccagcagtgggttgtaacattagtgagaaataaacttatactgtgttaaaccactgaagtgacaattgcatctgttacagcagctggcattgccttccttaac

SEQ ID NO: 9280 - DNA, 577 bp, Homo sapiens
  MAP TO AC006992.2; EXPRESSED IN HEART, SIGNAL = 2.2; EXPRESSED IN LUNG, SIGNAL = 1.8; EXPRESSED IN BONE MARROW, SIGNAL = 3.4; EXPRESSED IN FETAL LIVER, SIGNAL = 3.3; EXPRESSED IN ADULT LIVER, SIGNAL =   2; EXPRESSED IN PLACENTA, SIGNAL = 2.2; EXPRESSED IN BRAIN, SIGNAL = 2.9; EXPRESSED IN HELA, SIGNAL = 1.9
tcaacctgtaacccaagcacataatggagacagcaagacgtttaccttggtgtggcagagccacattcaatggttacgaataaggaattgaactacaaattacaccttgacctcaatgagaatttgactcttgctcaaaaggacaggtgtatatcgtgtctctcacacacacacacataaggacaatgaacaaatctttaaagatgtcctctttgttgaggaaaaataaacgaaaaaagtcagtagagtcaaaatattaagagctaacatttcctgagtctatactaagtgatttacgtgtactagcttatttaatctcaacactcctagaaattggttacgatcatcatctctaatttgcagctgaggacactatgccacagcatgccgtgtaacccagaggactccatcacccatactctcccagtgttagtctattgttttatagctaagcatttcttatacatatcttgcccaagtcagattatgcaaacaaaaatgttaatacaagccaaacaatggtctttatagatatcttgtggagaaaaatatactagtcatccacagcttcttcacc

SEQ ID NO: 9281 - DNA, 562 bp, Homo sapiens
  MAP TO AC007092.4; EXPRESSED IN BRAIN, SIGNAL =   4; EXPRESSED IN PLACENTA, SIGNAL = 3.6; EXPRESSED IN HELA, SIGNAL = 3.7; EXPRESSED IN BONE MARROW, SIGNAL = 6.3; EXPRESSED IN LUNG, SIGNAL = 2.9; EXPRESSED IN HEART, SIGNAL =   3; EXPRESSED IN ADULT LIVER, SIGNAL = 3.4; EXPRESSED IN FETAL LIVER, SIGNAL = 4.7
ctgcccttgaagttcttatgctttcatggaagaagcaagatgagacaaaatgaagagaacacctgccaatattcaaaatcataaacatctcagtacagtagcaaaataaatcgcacatatcatcatatgccagagctccaaagagaaagagctaaagcccacctcagctatgggcagacaggaacaggcctgagacatgttttgcaaagtagcttagggctggtcctgactttatcttcagaatggagactgtacctcatcctgggaagaaagcctccttcaatagaaacaaacaccagtctggggccattatttgtggccactttgatcattggtgtactcttttccagattggcccctttaaacttgaggttcccaggggaagccctggtacagggaaacaaaaatagctattgatgtttagtttaaagggatttctgtattttggctttccttgtctttttttccccatgtacctctttcctcccgccctgactgcagcctccctgaggtctccctggatttgatctactgacctggctgctgaggctggatttgaaat

SEQ ID NO: 9282 - DNA, 555 bp, Homo sapiens
  MAP TO AL022318.2; EXPRESSED IN HELA, SIGNAL = 1.6; EXPRESSED IN BRAIN, SIGNAL = 2.4; EXPRESSED IN LUNG, SIGNAL = 1.4; EXPRESSED IN BONE MARROW, SIGNAL = 3.5; EXPRESSED IN HEART, SIGNAL =   2; EXPRESSED IN FETAL LIVER, SIGNAL = 1.4
cccgtgtgaagatcatggactatgaaggtgagaggtgcaggggtcaggggagcatgacggggaggaacagcctcagagatggatggatctgcaatgccatggctgggggtgttccagggcagcctgcaggggtggggctggcactgattgcaactgacagccaggagaccaggcctgggagggcaggcccagggtcaggggagagcctgagtgcttcccacctcttcatctcagactttgcatactgctgggaaaactttgtgtgcaatgaaggtcagccattcatgccttggtacaaattcgatgacaattatgcatccctgcaccgcacgctaaaggagattctcaggtgagggtctccctctggcctcatcgtctctctcctctcgcctcctgctcatcctcctgaggactcccctggctgggccctcctgccctccgtcctgcccccctgcctgccctcatggttacaccccctcacccacactcctcatgctccctccaccttggtgcctcccccctgctttcctgggctcttcctgtgagtgagaggcc

SEQ ID NO: 9283 - DNA, 580 bp, Homo sapiens
  MAP TO AC005006.2; EXPRESSED IN ADULT LIVER, SIGNAL = 3.5; EXPRESSED IN PLACENTA, SIGNAL = 1.7; EXPRESSED IN HELA, SIGNAL = 3.3; EXPRESSED IN BRAIN, SIGNAL = 2.7; EXPRESSED IN LUNG, SIGNAL = 2.6; EXPRESSED IN BONE MARROW, SIGNAL = 3.4; EXPRESSED IN HEART, SIGNAL = 2.1; EXPRESSED IN FETAL LIVER, SIGNAL = 2.2
tctgcttggattgtgcttccgcgggctggctcaaacgtctcccttcagagacccctctgacaagcctgtaactacaaacctcgtaatcattatagtaatttgctagcttggtttttggtctgtgtccttgaaaaagttgcaagctctttgagcagggtcttggtcttattccctattgtatccctggtgctagggcagagaccagcagtaaatgaagaaacagcagtgtcctgaggaaagcccggctcaccgttccttgatgatgtggtcgagtttgtagttgggcttattgtcctttaaacgctctacagtgttccactcgctcttcccataagccttccggagcttccggacgaacacctggaagaaagaaagaaaacacctcaatgctgaggctcaggtctcctggacaacttcttccatggaagatggaaacgcagggcagaaggactctcatgcctcctgaagctggccacggctatgtgcctgtgtcactgacccctctgcccaggatgagcaaaagagccaactccaaggagcaccaagcctggtgtgttaaccagcagagctagaccaggca

SEQ ID NO: 9284 - DNA, 554 bp, Homo sapiens
  MAP TO AP000350.1; EXPRESSED IN PLACENTA, SIGNAL = 2.4; EXPRESSED IN HELA, SIGNAL = 1.3; EXPRESSED IN LUNG, SIGNAL = 1.6; EXPRESSED IN HEART, SIGNAL = 1.3; EXPRESSED IN ADULT LIVER, SIGNAL =   2; EXPRESSED IN FETAL LIVER, SIGNAL = 1.4
tgaactccagtagcaaatatgaatgagaggaggctacagtttggtgtcgcagtgctagatgacaaaccgtatgtggttggaggaagagatggactgaagactttgaatactgtagagtgctacaaccccaaaacaaaaacagggagtgtggtgccacctatgtccacacatagacatggccttggtgtggctgtactggaaggtcccatgtatgccgtaggagggcatgagggctggggccatctgaacacagcggaaatttgggaccctcaggctcgccagtggaattttgttgccactgtgtctactcctaggagcacagttggtgtggcagtgctaagtggaaaacttaatgcagttggtggtggtgatgcaagttcttgtctcaaatcagtagaatgttttgatcctcatactagtgagtggactgttggtagaagagctgaggcaggactggcttgtctgtcataatgtaaaagagtcttgaaagatgtccggggtccacggcctaaaacccctcatggcctttggtacaccaagctctgtgccatagg

SEQ ID NO: 9285 - DNA, 576 bp, Homo sapiens
  MAP TO AC006992.2; EXPRESSED IN FETAL LIVER, SIGNAL = 5.3; EXPRESSED IN ADULT LIVER, SIGNAL = 3.8; EXPRESSED IN PLACENTA, SIGNAL =   4; EXPRESSED IN HELA, SIGNAL = 4.1; EXPRESSED IN BRAIN, SIGNAL = 2.9; EXPRESSED IN LUNG, SIGNAL = 3.4; EXPRESSED IN BONE MARROW, SIGNAL = 5.5; EXPRESSED IN HEART, SIGNAL = 4.7
tcttaatcaaaacctggatgacctattcatatcctttagcagggcctgaatatcctgtgttcctcatgagctagaaatgtgaataactttgtgaaataggtagcgtagggtctttttttttgcaaaacagagtctatgaaaattgcgctttgccccaaattgttaattgcctttgcacaccttgtagcacctgtagctggggagtctctttatgactgagatctcagtctcggtctttccctcacaggaggtgctcatgacattttatctagtcagttctcacacaaaggacttgccttagatactgacaaaagcctgaaagaaaacagacgatctggcaaatgctgtgatagtgtgtttgttggcgattacctctctcaacactgtcaaagattcagattgtaaaaaatatccacacatacaactttttctgttatcattatgtggactcagaaaataaagcaaagaaatgaggcaattttctgaacaatcaggcaagaaaaatggcctcaattactcattttgtctctctgtctcacttgtctagacattgcttgggggcagggggtgaaaatt

SEQ ID NO: 9286 - DNA, 545 bp, Homo sapiens
  MAP TO AC005006.2; EXPRESSED IN LUNG, SIGNAL = 5.5; EXPRESSED IN BONE MARROW, SIGNAL = 7.1; EXPRESSED IN HEART, SIGNAL = 4.8; EXPRESSED IN FETAL LIVER, SIGNAL = 5.4; EXPRESSED IN ADULT LIVER, SIGNAL = 5.3; EXPRESSED IN HELA, SIGNAL = 3.9; EXPRESSED IN PLACENTA, SIGNAL = 2.5; EXPRESSED IN BRAIN, SIGNAL =   6
gatggaagccaggtggtggggaatgagggacaggggaggccgggatggaagccaggtttcagctgagcaggtggcggtggcattgatggagatgaggacatggggaaggacaaagtccaggtgtccttgagggaagacaagaagacaaataatccaggctctctgtcctcacaccagctgcccgcccctttcttcctggcacagtcatgttggaaccagctgctgagaccattcctcagacccaagagatcatcagtgtcacgctgcaggtgcttagtctcttgccgccgtacagacagtccatctctgttctggccgggtccaccgtggaagatgtcctgaagaaggcccatgagttaggaggattcacgtgagactcccacctcccagtcctcaccccacccaacctcacatgcctgataacagggtcacagaagagacggggaacagaggagagggttccctcgggagagacactggccctgcttctgcttctacctgctcagctcctttcttgcccacggtgttatggaaacagggagcca

SEQ ID NO: 9287 - DNA, 576 bp, Homo sapiens
  MAP TO AC007363.3; EXPRESSED IN PLACENTA, SIGNAL = 1.5; EXPRESSED IN BRAIN, SIGNAL = 1.5; EXPRESSED IN HELA, SIGNAL = 1.5; EXPRESSED IN LUNG, SIGNAL = 1.7; EXPRESSED IN HEART, SIGNAL = 2.2; EXPRESSED IN BONE MARROW, SIGNAL = 2.5; EXPRESSED IN FETAL LIVER, SIGNAL = 1.4
ctgcctaggaggggtcaggaaattaatcactgaccaacactaccaaactaccttctccttgttatttcacttaagacttctgggttgtgaagattgtgagtcttgaaaaaacactggtgaaaactgagagcttctaaaagagaggttagagggcactaaagggaacctacctgaaatgatttcacattcatatttgtaagacgcctttgtcttggtcctctctctagtccaccggttatcacattttacaagtcctcaaatcacctggagagctggttaaagcacagattgctgggcccacccctgtagtttttgactcaggatgtctgggctgggtgagacgaaaggtcccggatgatgctgatgctgccggtccaggagccacacattgagaaccactgacctagtccaatctcacattaaagctaaagtgatttgtttaaagccctgcttttatcatttcactttctgtttaaaactcttcagtagcatcctgtaagatatattttgaggtatcgacgctaacggttagatgatcaagctttttttatttagtgaagaggagagagccactgc

SEQ ID NO: 9288 - DNA, 561 bp, Homo sapiens
  MAP TO AL079295.1; EXPRESSED IN LUNG, SIGNAL = 1.4; EXPRESSED IN FETAL LIVER, SIGNAL = 1.6; EXPRESSED IN HELA, SIGNAL = 1.4; EXPRESSED IN HEART, SIGNAL = 1.3
agtcatttagcctgcaacagcaggattgatatttaaacctaaagccaaggagggtgtgtgcatatgtgtgtgtgtctgtgtctgttgggggggcaggggtgtctgtctgtctgtctgcagagaaattgccacaaaacagctttatatagaagctacagtttaaaaaaataaaagccaatgaacctagctgatcctcactctgccatataccttaggacatgcagaaagcagcacaatttctcttcatcacatgaagagctttcctgcccaaacatgcttgccaccaagcatcgggagaaggctgtagccaagcacgaagccactacaaacctgcaaatcttctttgaaggaaccaccaggcctcagcagagaggcaaatgcctgttttcatagttgctttcataaaatagttattcagaatttatgcaaacttagcaaatatggatgaaaacaattctgttttcttttattggagaaggacgaagatacatattacaaaacctcataactgagaacaaatatttgcaaattgtaaatctgacaaagaacttgtacccagaa

SEQ ID NO: 9289 - DNA, 568 bp, Homo sapiens
  MAP TO AC002472.3; EXPRESSED IN HELA, SIGNAL = 3.9; EXPRESSED IN PLACENTA, SIGNAL = 2.7; EXPRESSED IN BRAIN, SIGNAL = 2.7; EXPRESSED IN BONE MARROW, SIGNAL = 5.4; EXPRESSED IN LUNG, SIGNAL = 3.6; EXPRESSED IN HEART, SIGNAL = 3.6; EXPRESSED IN ADULT LIVER, SIGNAL = 4.2; EXPRESSED IN FETAL LIVER, SIGNAL = 4.9
attgcttgagctgggaaggccaaggctgcagtgggccatgatcacagcactgcactctaccctgggcaataaagcaagatgctgttttaaataaataaataaaattataaactccagtgataaggatgacagagctgctctgggattgtggctcaagccccatcacgggaatccccatcacgggtagactgtgtgcttcagcagcaagatcatggagcccatgattcctggggtgtccccccggggatcctcacctcatgttgagttcctccaacacgttgttggccttcagagcctcacccaccgcagaggctccaggatccccaaagccattgtatgagatgtctagaactttaaggaagatgtttgcctagaataccaaagagtgaagtcatgggaccccatctgacagtggagcaagccagggtgccacagcctcagagaccaggagccctgaggtgcaaagataagagataaagggcagaaggggagaggctccaaggaagggtcaggaaagtgccatgcagaccccctggtggctgcagcttggatgatggtggtcaacaga

SEQ ID NO: 9290 - DNA, 586 bp, Homo sapiens
  MAP TO AC009266.1; EXPRESSED IN HELA, SIGNAL = 1.5; EXPRESSED IN PLACENTA, SIGNAL = 3.1; EXPRESSED IN BRAIN, SIGNAL = 3.2; EXPRESSED IN BONE MARROW, SIGNAL = 3.7; EXPRESSED IN LUNG, SIGNAL =   2; EXPRESSED IN HEART, SIGNAL = 1.8; EXPRESSED IN ADULT LIVER, SIGNAL = 3.8; EXPRESSED IN FETAL LIVER, SIGNAL = 2.1
  unsure 33
  unsure 304
  unsure 440
  unsure 516
  unsure 523
tttagcagttgcaaccccacatttccactgggncattgctctagtgagggctgtctgcagtggctccgccccatgacgagtttctgtctgagctctcaggcttttgacaacatcatttgaaatctggttggaggcttccaagcttttatagctcttactttctgtaagcttgaagaatcagcaccacatggacaaattaaggtttctgacttgtactgtctggagctgctgcatgaaccacacttggggccactagggtcttggctagtgtggccccaaagtgctgtgcccagatgtagggaangagagtcccgaaggagtccttggtagcaagctcataaagagcactctgggcctgtcgcctgaaatcattctgcactcctaggcttctgtgcctgtaatggaaggaaaagcctcaaagatctctgaaatgctttcangggcctttttttccccactgtcttgaaagttagcacctggctcccttctattagtgctaatatctttagcaaaacntacaccntttgatttatacttctgagcacattttttgactctctgtgtggccaggctgagaattttccaa

SEQ ID NO: 9291 - DNA, 574 bp, Homo sapiens
  MAP TO AL035681.13; EXPRESSED IN HEART, SIGNAL = 4.2; EXPRESSED IN BONE MARROW, SIGNAL =   3; EXPRESSED IN LUNG, SIGNAL = 5.3; EXPRESSED IN ADULT LIVER, SIGNAL = 3.8; EXPRESSED IN FETAL LIVER, SIGNAL = 5.1; EXPRESSED IN BRAIN, SIGNAL = 5.1; EXPRESSED IN PLACENTA, SIGNAL = 3.4; EXPRESSED IN HELA, SIGNAL = 5.5
catccctcctcccgatagacctgcgtccattgggcttgcagatgtgactatctggacttcctagagcgggctatgggttctaactgtacatggctgtgtggatttgggaaaggcctcagtttctcagtggtgaaaaacagggagaagagcagccagctggctccacggcaggaccctgacggaggaaaaactcaggtggccaaagagcagttcccatgagagcgctggggctgacgagttacggcaaccacgaaggatacctggggcccacgagcatcaagggacagagggcacccaggtctcacccagcccacattacctactgcatcctgcactgccatcctcacagtagcttcgtccttgaacacagatgacacctttaggaaggcagagaccaccttctcggggtcagacgtgtcagtctgaggacaaaagagacaatggttggcctgtggcacgtggtggagaggtacctgggctctgacgctagctaggagaggcctgggcagtacaaaggcccctggcgggcaagaacaggtcctgccttaccccatgctgtcccttcagagtctgg

SEQ ID NO: 9292 - DNA, 558 bp, Homo sapiens
  MAP TO AP000053.1; EXPRESSED IN PLACENTA, SIGNAL = 3.5; EXPRESSED IN HELA, SIGNAL = 2.1; EXPRESSED IN HEART, SIGNAL =   2; EXPRESSED IN BONE MARROW, SIGNAL = 1.9; EXPRESSED IN LUNG, SIGNAL = 2.4; EXPRESSED IN ADULT LIVER, SIGNAL = 3.1; EXPRESSED IN FETAL LIVER, SIGNAL = 3.1; EXPRESSED IN BRAIN, SIGNAL = 1.6
gatgtgaagatggaggcagggattggagtgatgcagcctcaagccgcagaatgcctggagccaccagaggttgggagaggcaagaaaaggtcctcccctagagccttcacagggagtagcgtcctgccaacgctttgattttgagctggtctccagaactaagagagaatagatatctgtttttctaatccaccaagtttgtggttattttgatgcagggcaggcaagcccccaaattgggttgtagcctgagagggttcttgggttcattcaggaaggaattcaagggcaagctggtggtattagacagcaacttctgttgaagcagcagtggacagcagcagcagaggtcctgctctttgcagagcagggctaccccataggcagtgtgcccagagtagcagctcgaaggcagttctgtagtcctatttacacccacttttaattatatgcaaattaaggggcagattatgcagaaaattttagaaaaagagtgctaatttccaggttgtcgggttgttgccatggaaaggggccgcaacttccggtgaactccat

SEQ ID NO: 9293 - DNA, 544 bp, Homo sapiens
  MAP TO AL079300.11; EXPRESSED IN PLACENTA, SIGNAL = 2.2; EXPRESSED IN HELA, SIGNAL = 1.7; EXPRESSED IN LUNG, SIGNAL = 2.7; EXPRESSED IN HEART, SIGNAL = 2.6; EXPRESSED IN BONE MARROW, SIGNAL = 1.6; EXPRESSED IN ADULT LIVER, SIGNAL =   2; EXPRESSED IN FETAL LIVER, SIGNAL = 2.3; EXPRESSED IN BRAIN, SIGNAL = 2.1
agttccatctgagccacaccgacctggtcctgtgaggacagctagaaaaaaaaaaaaaagactcttactggtccccggatgaagtcagacaggatgtgtttgaagtgtccagtgctgggacaggaatggggatgatcatccagcctcactcagcagaacttgggatccttatcccaaagcctacaaaacggcatctgaattcagattaaattcttcagtctctatacagaaagaagtggatgcaaggaactttataccttgagaggtggtgcagacaggaagtagaaaaagcacttgcagagatgtaggtggatttctgcatgggaaagccaggaagaagcacttggccgtgcttcttgccctctcttccttgtctctcctcactcgacccctactgctcctctccagccccctaggagtctacactacgtggcttgtattcctgttttaagctcaccagctgaggtttcaaaggcaccagaccatttcagaaaggtaggactcagctcactccaatctcaagacattagaccccatgacagcc

SEQ ID NO: 9294 - DNA, 576 bp, Homo sapiens
  MAP TO AC007564.9; EXPRESSED IN PLACENTA, SIGNAL = 7.9; EXPRESSED IN HELA, SIGNAL = 5.4; EXPRESSED IN BONE MARROW, SIGNAL = 5.4; EXPRESSED IN LUNG, SIGNAL = 5.2; EXPRESSED IN HEART, SIGNAL =   3; EXPRESSED IN FETAL LIVER, SIGNAL = 6.4; EXPRESSED IN ADULT LIVER, SIGNAL = 5.7; EXPRESSED IN BRAIN, SIGNAL = 3.5
aaccactttttcctcctgggcctccgggcctgtgatggtaggccctgctgtgaaggtttctgacatggcctgaagacatcttcccaaagatcttggagattaacataagggtccttgctacttatgcaaatttctgcagctggcttgaatttctccccagaaaatgggttttccctttctattgcatagtcaggctgcaaattttccaaacttttatgctctgcttcccttataaaactgaatgcctttaacagagcccaagtcacttcttgaatgctttgctgcttagaaatttcttccaccagataccctaaatcatctttctcaagttcaaagttccacagatctctagggagggcaggggcaaaatgctgccagtctctatgctaaaacataaaaagagttacctttactccagttcccaaaaagttcctcatctccatctgagaccacctgagcctagactttattgtccatattgctatcagcattttaggcaaagccattcaacaagtctctagggagttccaaactttccacatttttctgtcttcttctgagccctccaaactgttc

SEQ ID NO: 9295 - DNA, 590 bp, Homo sapiens
  MAP TO AP000053.1; EXPRESSED IN BRAIN, SIGNAL = 1.8; EXPRESSED IN HELA, SIGNAL = 3.7; EXPRESSED IN ADULT LIVER, SIGNAL = 4.6; EXPRESSED IN FETAL LIVER, SIGNAL =  10; EXPRESSED IN PLACENTA, SIGNAL = 5.8; EXPRESSED IN BONE MARROW, SIGNAL = 1.5; EXPRESSED IN HEART, SIGNAL = 3.9; EXPRESSED IN LUNG, SIGNAL = 3.5
tcattatccccttttcgcagataaggaaactgaggcagagaggccctgcctaaggtcccccagctggtgggaggcagagacaggaaccagccctcatggtctcactgtgagactggacttttcacagctgtgcggtcgagtctgagccaagtaaagtaaagcgagtttttgtacttcgaagtctgggacataaaatcttcaagacgtcagcatcagtgacacgatggtgacagaggccagcattgcttgttgtatctttttccatcctgttcctatctacacttccattcttctgttcattctgcttgcatttcccacccagatggctttcacggacacacacacacacacacacaccgcacacacacacatcactcacagacgcaccctgtgcccaatgtcaaaagacaaaactgcaacacgtttagtcatagacctcattgtcttttattcttgattcatgaatggggcagcctcccttctataaaacagagcaagagctcccaccggacaattgcagaacagtgggctttgtaaggtggggacaaggaaacagaacaatagaaaagaagctgatgggttaacatcag

SEQ ID NO: 9296 - DNA, 573 bp, Homo sapiens
  MAP TO AC008151.1; EXPRESSED IN ADULT LIVER, SIGNAL = 4.5; EXPRESSED IN BRAIN, SIGNAL = 3.4; EXPRESSED IN PLACENTA, SIGNAL = 4.2; EXPRESSED IN BONE MARROW, SIGNAL = 5.8; EXPRESSED IN HEART, SIGNAL = 2.3; EXPRESSED IN LUNG, SIGNAL = 4.9; EXPRESSED IN FETAL LIVER, SIGNAL = 4.7; EXPRESSED IN HELA, SIGNAL = 3.4
acagccaatatgcccagttcctgttccagttcccagcatctggctctctagctagcacccgataggtgctctgtatttgtttacttgaaaccaccagagttttttacaccaagtgagatccaagtacccatctagcacacccaacaaacagtttaaggaaacatgaaatgtgtgcctagctaggtgggaggctgtgcactccatttgccttctagtttcaagcatgcgcagaaagaatctgcatccttgacatgttactgagcagcaccatgggtcacgtgggccacagtgagcatcccctgcagcgtttcccccagtcctcccactggaagagggccagagtcatccgacagcaaatgtcccagaaacatatagagcatgcaggaaaggggcccattccttagcactgacttcatctttaaaactaagtataaaccagttcctgttcactcctacttagtaagagctgtcctaacagtattcaggatgcccagatcctttgctttagaactcctctctcttcttgcacagccagatgcatgtgaagacagctctcttgcctccctgtctctg

SEQ ID NO: 9297 - DNA, 591 bp, Homo sapiens
  MAP TO AC007463.3; EXPRESSED IN PLACENTA, SIGNAL = 2.6; EXPRESSED IN BRAIN, SIGNAL = 4.8; EXPRESSED IN HELA, SIGNAL =   3; EXPRESSED IN BONE MARROW, SIGNAL = 4.2; EXPRESSED IN LUNG, SIGNAL = 3.4; EXPRESSED IN HEART, SIGNAL = 2.4; EXPRESSED IN FETAL LIVER, SIGNAL = 2.8; EXPRESSED IN ADULT LIVER, SIGNAL =   2
aaatcaggcttgcaaagtgcaaggtctatgtttgttttgtacatagtagttactatgcttatgataataaaatggaaaagtatttttctcagtgttttattaccaggaatatttttaccctccattttactcctttataaagtatgtttgtgaattatttaaaaatacattactactaacctagattttttgcttctagagcctaaagctataatatgtaattggtattcccggagcccctcatccaaaagagttgagtgaaggcccatgttgtagggtcatacaattagtgattttatcagtctcatcccagatttctgccacctctgggtccaagctattccctgagatattctttacttgcacatcaatgagtattaatggatccatatttatggtcactacctggagggaatgggtcccttgaattacagatatcagttcatagcccccaaagcaccttcaagaggcatctaaggctccatgagtatagtgaatggaaggagcgaggaggtacggttggtttttcctattctcttcatctttttaataataagtgtatattcaattaagtaggctctcattactcaa

SEQ ID NO: 9298 - DNA, 544 bp, Homo sapiens
  MAP TO AL023553.5; EXPRESSED IN BRAIN, SIGNAL = 3.2; EXPRESSED IN HELA, SIGNAL = 4.2; EXPRESSED IN BONE MARROW, SIGNAL = 2.3; EXPRESSED IN ADULT LIVER, SIGNAL = 2.8; EXPRESSED IN FETAL LIVER, SIGNAL =   4; EXPRESSED IN PLACENTA, SIGNAL = 3.8; EXPRESSED IN HEART, SIGNAL = 9.8; EXPRESSED IN LUNG, SIGNAL = 4.1
caaggctctggctcttcttggccaccctggagacggcctggattaaatggggctgctcctaccagttccatcctgggagagtggctggacgtggttgggaggccccgggtcagtggggccattttttggtattctcggctgagggcttctaaatataacatcttggattatttttcagattattctggaaaactatgcgtaccctggtgttcttctgattggcactgactcccacacccccaatggtggcggccttgggggcatctgcattggagttgggggtgccgatgctgtggatgtcatggctgggatcccctgggagctgaagtgccccaaggtgagggtggggagggactcattctgggctggctgtggggtggtggttggtggggatgaacgggagacggtgggacccaggagggaaaagggaacaagttagactcgaatcttctgggagggaggtagagaccaataagcagcaatgtgaatggcagcagggccatcctgacttcgtggctggcacaggcacacacggcctctcaca

SEQ ID NO: 9299 - DNA, 545 bp, Homo sapiens
  MAP TO AC007564.9; EXPRESSED IN FETAL LIVER, SIGNAL = 2.6; EXPRESSED IN ADULT LIVER, SIGNAL = 2.2; EXPRESSED IN PLACENTA, SIGNAL =   2; EXPRESSED IN HELA, SIGNAL = 2.4; EXPRESSED IN BRAIN, SIGNAL = 1.6; EXPRESSED IN LUNG, SIGNAL = 2.2; EXPRESSED IN HEART, SIGNAL = 1.9; EXPRESSED IN BONE MARROW, SIGNAL = 1.7
aagggccttttatcatttttgaaattaatagccaaagttactattttcacttcttcaatgattttcacttctactaattttacctaagtactcaaataaatttgagttctatgttcttgaagaatgtgctaattatatgcaagccaaaaacaaaaaaacaaaaaaaaaacaaaccaaccctccaacaatatataagcaacatttacctgctttttcttgaacagcaactgttcctttccccatagctgatgtcataggttgtggtagaactgtggcaatggacgtggcaggtgcttctctgacaattccggaattctgaactcctccactagcagcattcacattaacacttcgtttgttcactgttgtgggcttatttgaacagcctttatttaaacttgactgaaatgtaatggaatatttaaaagctcaggttactaatgtttcatactatacattaatattttataaattccctgttagattaaaaaatatatttttttccttgcaaatcttaagcttgctggcagacctgagtttccctc

SEQ ID NO: 9300 - DNA, 583 bp, Homo sapiens
  MAP TO AP000352.2; EXPRESSED IN HEART, SIGNAL =   4; EXPRESSED IN BONE MARROW, SIGNAL = 3.1; EXPRESSED IN LUNG, SIGNAL = 3.1; EXPRESSED IN ADULT LIVER, SIGNAL =   2; EXPRESSED IN FETAL LIVER, SIGNAL = 1.8; EXPRESSED IN BRAIN, SIGNAL = 3.7; EXPRESSED IN PLACENTA, SIGNAL = 1.8; EXPRESSED IN HELA, SIGNAL =   3
cccaaacctctgttcccacagggagaaggcctgcctggtggacgaggactcccactcttcagctgggacactgccgggccccggagcctccctcccctcctcctctggcccaggtctgacatccccaccttacacagccactccgattgaccacgattacgtcaaatgtaaaaaaccccaccagcaggcaacgccggacggtacagtccctgttctccctactgccagcccagggcggcacatcaatcacgggggggtgctcggacgactcattttgtcgcttcgttttggtgagggggggtgctgggtctggggtgacacgggcaatgttgcggctgctcattaacctcatggattcacagtgattcttgtgcttccgagacatgctcagggtcgccacctgccagcttgcccacctgggagccaggggagggggcaggccaggctatggcatctcacatctttgagccttctttttctcgcctgcaaaatggggacatgacatctactttgaaaggaagttagaagagtgtggcctcctggaggggctcctggtgcagtcagcttagtgatgcctgcattg

SEQ ID NO: 9301 - DNA, 576 bp, Homo sapiens
  MAP TO AL008723.8; EXPRESSED IN HEART, SIGNAL = 1.7; EXPRESSED IN ADULT LIVER, SIGNAL = 2.7; EXPRESSED IN HELA, SIGNAL = 2.6; EXPRESSED IN PLACENTA, SIGNAL = 2.6; EXPRESSED IN BONE MARROW, SIGNAL =   3; EXPRESSED IN LUNG, SIGNAL = 1.5; EXPRESSED IN FETAL LIVER, SIGNAL = 2.9; EXPRESSED IN BRAIN, SIGNAL = 1.9
aatatcagaagctcaaggccctgagtcttttatatatgtatttatattgtgtttcattatgtttcactagtaattgtgcatagtaggccctgatatctctatgtatataaggaggaaagatttccaaggagtgttgtccttcaactcatgacactctaatagcatgtacatttttccatagagagtggtcacggctgaacaatttcaagaagcgagtcgatgtctcatctccctatcttatcttgaaaaacccgtgtacctaagtcgtggatgtgtctgctgcatccgctgcatcagttcacttctgaaggaaccccatgaggaaggtgtaatgtgctcctttcgctctgtggctactcagaagaatgacatcaggcccgatttccagctgggaaagatggattctaaaatcaaggaactggagccccagctgacaattctatatcagaacccaaagacgctgaagttccaaggtaagaaatctgtaaaatttgctctcagcccatcaatggccctgagaaagtagccattcaaaatgttctccattaaatatgggcataggctgaattctggcac

SEQ ID NO: 9302 - DNA, 570 bp, Homo sapiens
  MAP TO AL022328.21; EXPRESSED IN BONE MARROW, SIGNAL = 2.4; EXPRESSED IN HEART, SIGNAL = 1.4; EXPRESSED IN FETAL LIVER, SIGNAL = 1.7; EXPRESSED IN HELA, SIGNAL = 1.6; EXPRESSED IN BRAIN, SIGNAL = 2.7; EXPRESSED IN PLACENTA, SIGNAL = 1.2
tgccctgaaaggtggtttagaatcttagagagtgcggagaaccttcccacctaacccatgctttggcagcagtgtgatgaggcagagtcgtggcccaggtctcagtgtgttgggggctggcatctgagcccatgcagctgagtccctgcacccgaatgtgtgtgttgaggttagactcctggtttccaccttgcggtgtggatgttgagccttggtctcttgtgtgtctttgatgaaggtacactttgccttgccggacagtcggattttagtctgtgcgccctccaacagtgctgctgacctcgtgtgtctgcggctgcacgagagcaaggtgctacagccggccaccatggtccgggtgaacgccacctgcaggttcgaggaggtgagcccttggtgcaagcagtggggggcaccagaacccctccctggaacataggaaatgccaagtggacaggggagggcaggggtaggagggtgggcacagaggcgccacagaaagctgtgtttgagaaatggctctgccatgggccctccctcaccgctaaatggtggagcttgattgctgac

SEQ ID NO: 9303 - DNA, 583 bp, Homo sapiens
  MAP TO AC006427.13; EXPRESSED IN HEART, SIGNAL = 1.8; EXPRESSED IN ADULT LIVER, SIGNAL = 2.1; EXPRESSED IN HELA, SIGNAL = 2.1; EXPRESSED IN BRAIN, SIGNAL = 2.3; EXPRESSED IN BONE MARROW, SIGNAL = 3.4; EXPRESSED IN LUNG, SIGNAL = 2.2; EXPRESSED IN FETAL LIVER, SIGNAL = 2.9; EXPRESSED IN PLACENTA, SIGNAL = 1.7
cagtggtctttgcctcttggtatttactcccttgtgtagtcagctcccatagtgtatttgtgaccaaagcacacacaagtgatattgtgtgattttcaaggatagatcataacagatattgttccttttgccttgctctctggcatcagctacttcaaggaagccagcttccacgtcatgacaacattcatgcagcactatggaaaggcaagaaactgaggcctctgtcagcagccagcaccaacttgcaagccatgggagggggcattcttggaagagaatcctcctgctcactcaagtcttcagatgactccagctctggctaacatcatgactatgatctcatgagagatgctgagtcagaaccaccaagcttagacacttcttcattcctgacccacatgatatgtgcaagataataaatttttattggtgtcttccatctctaagtttggggctagtttcatatccaacaatagataactaaaatagcagtagaaaatctggctccagagcctgttttgttaactgctatgtgtactatctctcaactgagagtttatcttgggtatatgaagaagga

SEQ ID NO: 9304 - DNA, 569 bp, Homo sapiens
  MAP TO AL031588.1; EXPRESSED IN BRAIN, SIGNAL = 6.8; EXPRESSED IN HEART, SIGNAL =   4; EXPRESSED IN ADULT LIVER, SIGNAL = 5.4; EXPRESSED IN HELA, SIGNAL = 4.8; EXPRESSED IN PLACENTA, SIGNAL = 7.4; EXPRESSED IN BONE MARROW, SIGNAL = 6.3; EXPRESSED IN LUNG, SIGNAL = 6.4; EXPRESSED IN FETAL LIVER, SIGNAL = 7.3
catgtgatgagacctgggtgcacatggtctcagagcagcactgacttccttctggttgttcattatctccaaccagagtgagcctggggctccctcctgacctcccttcagcgcacagagatgctgcccttaggttagcctcctctcctgccttggggtcggccacacgggaacactcaccctgttctcccaggatgaccccccctccccgctcctgcggtcaggaagtccctcccaaagcggcgtctgggctgcgtgtcctccgccatcagctgtgtgccgtggcggagccatgccttattgcctttgctccgttgggctctgggcttcttttgctgccgagtgtgtcctggacaccatcccgcatcaggggaagctgggctaaggtcagatggtgagaggtgagatggattttacggagtgcctgctccaagctctcgttccacacacgggaaactgaggcgtagaggctcttcactagggaccctatggttcttttcctgcccaggttcctgggacagccacaggcccttctctgtcactcctaaggacagcccatctagaaacag

SEQ ID NO: 9305 - DNA, 560 bp, Homo sapiens
  MAP TO Z83840.7; EXPRESSED IN LUNG, SIGNAL = 1.6; EXPRESSED IN HEART, SIGNAL = 2.3; EXPRESSED IN FETAL LIVER, SIGNAL = 6.9; EXPRESSED IN ADULT LIVER, SIGNAL = 1.9; EXPRESSED IN PLACENTA, SIGNAL = 4.3; EXPRESSED IN HELA, SIGNAL = 1.8
cacacttcacaggccatctctccatgcctatttgcataaagtatgcagccagtttttcttatgatatacttgatatcccgtgtaataatggaaaaacgaggacggtgagaaatctggcaggctggcagatatttccataattcagttctttttggatctgtgagcctaatccttgccctatcaccatcatagggcaagggagttaatggctcccgaaaggcctacagaaaaccctcagccatgtggttaacagactgccagagaaaactgaaggagagactgaggttgagtggggaaaccagccactggggaagcaacgggatcagcaggagaacaaatctgggaagggataacactccagaacagagctccctgaaaagatcattcattcatagccactgagcacctcctacatagctgacattgttctgggcactgaggaaagcatggtgagcaagataaccatggtaggcagagaacaattatctcagagttgtaagaaactaaaaggtcactctttgacccctcttattcactcatataacaactatggattgaga

SEQ ID NO: 9306 - DNA, 546 bp, Homo sapiens
  MAP TO AC007463.3; EXPRESSED IN HEART, SIGNAL = 3.3; EXPRESSED IN LUNG, SIGNAL = 7.5; EXPRESSED IN FETAL LIVER, SIGNAL =  15; EXPRESSED IN ADULT LIVER, SIGNAL =  16; EXPRESSED IN HELA, SIGNAL = 4.4; EXPRESSED IN PLACENTA, SIGNAL =  13
ggtgctcctcaatacccaagttcaacctgaagccagaggctccagaggcattccctaaggatgtgtcctggggcacgggctggacttggaaggaggcagaagggtctgaaaggcaaacagagggtggccagcatggccttgctgagcacctgccgctatttgatttccagtgctctgggggcatcagctctcccccaaccccctacccacctctttctagtcttgcctttagtgaaaaggtgtgaggggtgctcatttctctgatacagtccattcaggattcgatcaggacagatcagtgggtgtgggatttccctaagtgggcccttggccccatgatccctgcagaaggtgactaccagagccaggagcctcctctgcagggaacagctcctcatgggcatggaccacgagtgtgaggccactgctgctcaccagcttccaagatcaaagccgctggggtgccaggatttttaaataaaaaaagatggagagattgctttggaaatcagtgtcatccatggttccgttcattctttgacgctt

SEQ ID NO: 9307 - DNA, 591 bp, Homo sapiens
  MAP TO AL022319.2; EXPRESSED IN HELA, SIGNAL = 1.9; EXPRESSED IN PLACENTA, SIGNAL = 1.8; EXPRESSED IN BRAIN, SIGNAL = 1.7; EXPRESSED IN LUNG, SIGNAL =   2; EXPRESSED IN HEART, SIGNAL = 1.5; EXPRESSED IN BONE MARROW, SIGNAL = 1.5; EXPRESSED IN FETAL LIVER, SIGNAL = 1.4
gctcgcagagagaggtggcccagggcttccaaggggggtgcagggagagaaggagaggaggagagggtgggtgaactccctcagcccttctcctgcaggggaggcagcatggggggccttgccccataccccatcctggctggcagggagctctgtgacactgaggggcaggaggcgagggtgtgacatctgtgaagtggggcagagtgacctcaggcctggtcacagggtgcttgaatgacaggttagattgcagttgctcaagcctttagggtgaccactgctgctgaaatcttgggggcattacccagagaacagcttgctcatccaggttcctcatggcagcagatgctgtttcttgcagggcctggcctagaaggaggggatgggtgaggtagggtgtaggccaggcaggggcctgtgtgtgactcacgaagtggtgaaatggggctgaaattcccaccccctgggtagcccaggctgtgtgacgggcaggtgggacaggtcagctggggtggccaggcttctccagggaggcctgattccttcatcatcaccgccatcactgcatcacagctcttcctggtgtga

SEQ ID NO: 9308 - DNA, 555 bp, Homo sapiens
  MAP TO AL035681.13; EXPRESSED IN FETAL LIVER, SIGNAL = 1.7; EXPRESSED IN BRAIN, SIGNAL =   3; EXPRESSED IN PLACENTA, SIGNAL = 1.8; EXPRESSED IN HELA, SIGNAL = 3.3; EXPRESSED IN HEART, SIGNAL = 1.9; EXPRESSED IN LUNG, SIGNAL =   2; EXPRESSED IN BONE MARROW, SIGNAL = 3.3; EXPRESSED IN ADULT LIVER, SIGNAL = 1.7
gcagttacaaccacgactgcctggggcttggtttgagggaggtggtggtattacttcccattggagagaatctgagctcagggcacatagccaataagatgtgttgtcagagttggagtccaggctttctgtccccaaactggcacttttccctctgccacgctgcctgaccactgggtgagacctatcccataaagccttacctaaatacaaccctaatgctgggtttgaatccatttttattcaaagggaaaagaatcccgcccactaagacgcgacccctcagacaggggtccaagaagcccctgctggaggacgaccctcagggtgccaggaagatctcgtcggagcctgttcctggcgagagtaagagccaccgggctgggtcaaggcaggaccagcctgctccgtgctcagagacgacccttctccttccccacctgggcacagaagagtagagtcaggtttctttggcattttctgggcaccaagcagtcctgtaccactggacccagggtgtttcccagacacgcccccaactgtgaatggagctga

SEQ ID NO: 9309 - DNA, 576 bp, Homo sapiens
  MAP TO AC007556.2; EXPRESSED IN PLACENTA, SIGNAL = 3.9; EXPRESSED IN HEART, SIGNAL = 2.5; EXPRESSED IN LUNG, SIGNAL = 1.7; EXPRESSED IN FETAL LIVER, SIGNAL = 4.3; EXPRESSED IN ADULT LIVER, SIGNAL = 2.4; EXPRESSED IN HELA, SIGNAL = 1.9
gccttgacacccaatacacctgtgataatcaccagtgtatctcaaagaactgggtctgtgacacagacaatgattgtggggatggatctgatgaaaagaactgcagtaagttttgagctggtttcccttggttggtcagcctcgtaaatagacttcaacaaccaaatggccttgcattctttcctctaaggctcatgcaattttcattgtctctttagtacttctattccacttgtcaatctctgtgtcaataggttacaagaacaaaggcacgtgcctgcacatgggattcttagagtccacctacaaatattgagttctatggaagcaaagcaaggactgcctctgatgccaaacatttcaattcagataggaattgaaaaagtgaaaatccctcagctatctatttatatatttaaaacaatactaaaagtcatatagatatatccagacctttggctattgatgtttctttttcatttggtacaagcaaaaagacatcaaaataaagaggcacagaaaatttaaatttcctttgatcttatccacctgttttccatcttgccagttctgctt

SEQ ID NO: 9310 - DNA, 568 bp, Homo sapiens
  MAP TO AL022329.9; EXPRESSED IN FETAL LIVER, SIGNAL = 5.1; EXPRESSED IN HELA, SIGNAL = 6.2; EXPRESSED IN PLACENTA, SIGNAL = 4.6; EXPRESSED IN BRAIN, SIGNAL = 6.7; EXPRESSED IN LUNG, SIGNAL = 6.1; EXPRESSED IN HEART, SIGNAL = 3.6; EXPRESSED IN BONE MARROW, SIGNAL = 5.3; EXPRESSED IN ADULT LIVER, SIGNAL = 7.2
agaagactgggagaggagcccgtttggctggagtacagaggatgtggaagttaagggtttcatttagatgtgttaaatttgagatgctttctagatattcaactgaaaatgtcaaatagatagttagatatttagaatctggagctcaggagtcctagagatccagacttagtcatcagaatataattgatatttgaaactgtgggactacatagctttacctagggagaacttagctggtgaagaaggggtgcccccagcaccatgctctgaggcagttcaggatttggaagtcaagcagaggagaggaactaccaaaggagaccaagaaagagaagcctggagaggataggtcacagaagtcagagaagaatatttcaaagaaggcatcagtggacaactgatttgaatgctgctgagaagtcaataaggtgaaggacaaaagagagagccttggattgggccagacagagatgacttcactagaccatctcactacaatggtggtggaacaaagggtgggcgcagaagcagagactatgacacctgtggaccaaaagtgcttgct

SEQ ID NO: 9311 - DNA, 581 bp, Homo sapiens
  MAP TO AC007463.3; EXPRESSED IN PLACENTA, SIGNAL = 7.1; EXPRESSED IN HELA, SIGNAL = 5.3; EXPRESSED IN BRAIN, SIGNAL = 4.6; EXPRESSED IN BONE MARROW, SIGNAL = 5.5; EXPRESSED IN LUNG, SIGNAL = 6.7; EXPRESSED IN HEART, SIGNAL = 6.1; EXPRESSED IN FETAL LIVER, SIGNAL =  15; EXPRESSED IN ADULT LIVER, SIGNAL =   6
ctgagggaggagcacacaccgcagtcagcctcggggccaccagcccagctggggcctctgctcaagtagttttctctcttacagctttgggaccctcctctggaagaaaaacgagtgactgaaaatgagtgaaggctttccccagtgctgttcccaacagcatccaatgtgtagacccctacatgcaaagagaccccaatgccttctcagttccacatgctgtcgatgcctcagatcgtcctggttgctgtctatactcaccttgttgactacccaaagatatggacctgctgaattcttgacctccataaagtcaatggtcttcaccccatccgcattttggccatcttttccctggccacctctcagacctttgcaccatcccaaagcacactgccttctaaatgtgagatgtgccttgtttactttttacttctgatttgattcctaattttttgttttattgtgtggatactatgcatataaaagaatataaagaaagtgtacatgtatataaaaaatataagcatgtcacccagcatagtaaaaacacttttatccgagatttggaggccacatgt

SEQ ID NO: 9312 - DNA, 577 bp, Homo sapiens
  MAP TO AP000353.1; EXPRESSED IN HEART, SIGNAL = 2.2; EXPRESSED IN LUNG, SIGNAL = 2.4; EXPRESSED IN BONE MARROW, SIGNAL =   3; EXPRESSED IN ADULT LIVER, SIGNAL = 1.6; EXPRESSED IN FETAL LIVER, SIGNAL = 2.5; EXPRESSED IN BRAIN, SIGNAL = 2.3; EXPRESSED IN PLACENTA, SIGNAL = 2.5; EXPRESSED IN HELA, SIGNAL = 2.3
gatgtggatggtggccttagccgtcacacccaccacacaggtctctttctgtgaggcctggcccagtctttggtgcctgtggatggtggtcaaacttcctgttcttggtcactgctgcatagcactccactgtctggttgtcctggtggtctacctcccctcttcctagcggataggtggcttttggttttccactattagaaaaagaatgctgctatctctgatctcctttctcacctgtgccggggtctccaggacaaatgcctggaagttggaggccaggacacaggtccccacagccaagcgcttccacaccttgccaggtgttttggcagagccaggccagatgccctcccaccagcccttgccccaccccctcccaggactcagaaccacagatgactttcattttggcctatctgtggagtgtgccaaaaaaccccaggtggtttcagtgtgtgtctcccatgtgagtggggaggctgagcctcttcccacaccggtagccagtcccctttgtctacccagggtctgccatgttctctcctacttggcggctgccacaggtggttctgtt

SEQ ID NO: 9313 - DNA, 566 bp, Homo sapiens
  MAP TO AC004624.6; EXPRESSED IN HEART, SIGNAL = 1.4; EXPRESSED IN BRAIN, SIGNAL = 1.8; EXPRESSED IN HELA, SIGNAL = 1.2; EXPRESSED IN LUNG, SIGNAL = 1.4; EXPRESSED IN BONE MARROW, SIGNAL = 1.7
tttttgatgatgaggggcacacagctgagggagtgggcatctgggcacagtgaacatcagggccaccagaggtggctcatgtcacctcgggggcactgagctgacgtgagatcagggaagtcttccagagaaagcaacattcccaacaaataaagagaaagtagcaaggctttccaacagcctgagtgggggtgggcactagaagcttccagacacaggcaaggcttacaaggcagaagagcctggcacactcagggacctgcagctcagtgtgactaaggtggcatatgggggactgagcttgaaggagcagaacaccgggggccttgaatgccgtggataggaggttgaacttgatcctgaggccgtgggcagccatggtggggtgcttatggagggagatcctttgacagtcaccactgttgtccagagcaaggtgctgaagacctgcgtgtggctctcggtcctcctgggtcactcccagtcctttgaagatgcactggcagccttgggcagtcacacagcatgcgatgctctctggactctgcgacttcacagatgtgcag

SEQ ID NO: 9314 - DNA, 592 bp, Homo sapiens
  MAP TO Z83844.5; EXPRESSED IN BRAIN, SIGNAL =   4; EXPRESSED IN PLACENTA, SIGNAL = 3.9; EXPRESSED IN HELA, SIGNAL = 4.8; EXPRESSED IN LUNG, SIGNAL = 6.3; EXPRESSED IN HEART, SIGNAL = 4.1; EXPRESSED IN BONE MARROW, SIGNAL = 6.9; EXPRESSED IN ADULT LIVER, SIGNAL = 4.4; EXPRESSED IN FETAL LIVER, SIGNAL = 5.7
gaggggagggacagcagtagctgtcacagagggtttgtctgacatggggaccagctagagcatgaaggaaacgggatcattcacaacattcatccacagaccaggctctacagccagtgaccttgtggatgcgctccacgtccacagagtagagggggcactgcactccagggcgggagggaggctggagcctggtcactcgttcccgtgactgagaccaggtctgtgtccacccccacagaggaggcagatgagctggaccggttggtgacagcaaagacggagtcggtgcagtatgaccaccccaaccacacagtcaccgtgaccaccatcagtgacctggacctctcgggggcccggctgctcgggctgaccccacctgaggtgggtcccagtctcagccctgggaggaaggggcgtgggggcagaccagcttgtcagggttgctcagtgctggcccatgtcatgggtatcccactgccagccctgggaagaaggggcgtgggggcagactggcttgtcggggttgctcagtgctggcccatgttgtgggtaccccactgctggggctccttccctttggacccttcat

SEQ ID NO: 9315 - DNA, 597 bp, Homo sapiens
  MAP TO AL022328.21; EXPRESSED IN PLACENTA, SIGNAL = 1.7; EXPRESSED IN LUNG, SIGNAL = 1.8; EXPRESSED IN BONE MARROW, SIGNAL = 4.6; EXPRESSED IN HEART, SIGNAL = 1.6; EXPRESSED IN ADULT LIVER, SIGNAL = 1.4; EXPRESSED IN FETAL LIVER, SIGNAL = 1.9; EXPRESSED IN BRAIN, SIGNAL =   3; EXPRESSED IN HELA, SIGNAL = 1.6
gtgcactgaaccagacaaggcttgtgctgggctccagtgggacgctgggcctgcaaaaagtactccaaaaccacgagctcctcaccacctgtatctgtgcaatttggtggcacacggggagagagagtgctctgccgcaaacgcgaaagccaccagccctctcctagaagagcatgtaggtttgtgtgcagtctcagggggtttccagacccccaaagcccaggggaagagctgccatctgaagccgcagacatacctgaatgtgtttctcatcttctaagagaaaacgaagccgtgcactctccagtcggtgcctctggattctccacagtgccttctgctcccgacgagctgcctctgcagagagcttgctgtagtggtcgaccagtgcctgcctgaagccacacaccagagaggacacggccacaagagtcaccccaccccatctacctggcacccctcaggccaggatggttctccataacagaggccccagtgggcccccgcccccgtctccccctaccaggggctgatagctctgggccctcacagcacctacagggcagcaccaggcaggcccttctacctgccaggctg

SEQ ID NO: 9316 - DNA, 565 bp, Homo sapiens
  MAP TO AP000356.1; EXPRESSED IN PLACENTA, SIGNAL = 2.5; EXPRESSED IN LUNG, SIGNAL = 3.9; EXPRESSED IN BONE MARROW, SIGNAL = 3.5; EXPRESSED IN HEART, SIGNAL = 3.1; EXPRESSED IN FETAL LIVER, SIGNAL =   3; EXPRESSED IN ADULT LIVER, SIGNAL = 2.4; EXPRESSED IN BRAIN, SIGNAL = 4.4; EXPRESSED IN HELA, SIGNAL = 3.9
aggcaggtgctatggtatcctctccaaaatttatgttgaaacttaatctccattgtggtggtatgaagaaatgggtgcagaagatatccacaaccaaaaatataaataaataagaagtgtggccttttgtgaagtcaggagggctctgccctcatcagtgaactagtgccttataaaagggctggaggaaactagcataggccattttttttgcccttctgttcttctgtcatgtaaaagcagtgttcatgccctttctgttccttccaccatgtgaggacacgtaggtggcaccatctacaaggaacaggcctttaccagacacagaacctgccagcgccttgatcttggacctcagagtctccagaactgtgaagaattaaatttctagagctgggcacagtggcacacacctgtaatcccaactactcacgaggccaaggcaagaggagccaaggagtttcagaccagttcgagcaaaatagtgagacctccatctccaaaaaagaaaaaaagaaattaaatttctattgtttctaaattacccagtcccaggtattttgtt

SEQ ID NO: 9317 - DNA, 568 bp, Homo sapiens
  MAP TO AL031588.1; EXPRESSED IN HEART, SIGNAL = 2.3; EXPRESSED IN PLACENTA, SIGNAL = 1.4; EXPRESSED IN BONE MARROW, SIGNAL = 3.2; EXPRESSED IN LUNG, SIGNAL = 1.5; EXPRESSED IN ADULT LIVER, SIGNAL = 1.6; EXPRESSED IN FETAL LIVER, SIGNAL = 1.6; EXPRESSED IN BRAIN, SIGNAL = 2.4; EXPRESSED IN HELA, SIGNAL = 1.6
tggttttccactcattccaagagtgttcacctttacttcatgaagcatggttataactaggactgcagtgaattctgggataatttgaacgtttgagcatcttggggctgaaatcgtcttttctgtttgcattttcctggttgtgtgctgagtaactgcaagttgaatcctcactcgtcatgtggaatgttaggttagactctgggttgttaacaccctcgttgtaagtgtcatttcatgtgtttgtttcagcagcaggcaacctggtttaggttctgaccactggttctgtctctctttccacgagcagcaggtccaccaccaggtcagcccttggccttggctgtgctgttttgggtcgttgcctgcactcacaggtggggtgggcagggacgtgtgtcagcacatgtagagaatctgggggtctgcttctccagcactctccttgctggaatttgccttgcattttctcacttctggggtcccttttcttggtttctctgtccagaaagatgggtttctcccagagctctagccacctgcactgtctcacgcttccacccttaag

SEQ ID NO: 9318 - DNA, 582 bp, Homo sapiens
  MAP TO AP000353.1; EXPRESSED IN LUNG, SIGNAL = 3.4; EXPRESSED IN BONE MARROW, SIGNAL =   3; EXPRESSED IN HEART, SIGNAL = 2.4; EXPRESSED IN FETAL LIVER, SIGNAL = 2.9; EXPRESSED IN ADULT LIVER, SIGNAL = 2.5; EXPRESSED IN PLACENTA, SIGNAL = 2.4; EXPRESSED IN HELA, SIGNAL = 2.4; EXPRESSED IN BRAIN, SIGNAL = 3.5
aacagctgggtccaattctggcaccagtacctggtggtgtggcacctgagcaggcacccccacctgggagatggatgggcatctgcccctgctacccacgaagagctgggacgtaggggtctagatgcggacagcagtggggacggctggctattcagcagagtctggggtgttggggggcacccgagccacagggcatgccccctacctaggctggtctgtgctacatacacagacagggctgggggaggctaaccacaatggcctgcgccccctgacttccagcatctccctgttaaggtggatgaggaggctgcgctggagcaggctgtgaagttctgccaggtccatcttggggctgccgcccagagacaggtaagcccaatttagcctgtgccagcctcatcttgcggagcctgctccatatcaaggccctaggatgcaggctgagaagcagatccactcttgggactgttcttgtggtcagcttgggctgaggggagatgagcagggggcagctgagcctccagcacgtggccatagtgggcaggaacttgacggcccagaccccagttcagacat

SEQ ID NO: 9319 - DNA, 586 bp, Homo sapiens
  MAP TO AL035681.13; EXPRESSED IN BRAIN, SIGNAL =   2; EXPRESSED IN PLACENTA, SIGNAL = 2.5; EXPRESSED IN HELA, SIGNAL = 2.6; EXPRESSED IN HEART, SIGNAL = 1.8; EXPRESSED IN BONE MARROW, SIGNAL = 2.1; EXPRESSED IN LUNG, SIGNAL = 2.2; EXPRESSED IN ADULT LIVER, SIGNAL =   2; EXPRESSED IN FETAL LIVER, SIGNAL =   2
gggagagtcctctgcttgtgttaggtagaatgggagtcctctgtcttgttagaacagaatccacttgccccctggcttcctgccctccccatcccagaggcctgggggcagatccacgtgtggaatctgatgttctcagatgaagtcattgctggcctgaagaggcagctattttcagtccccactgctgaggggtccccactctgggtcggcgctagcgcccctgtcagtggaggtttgtcagtctgtgtaaccaggattctgctggtgcctccacagccatccatgccaagttcaccgactggaagggctacctcatgaaacggctggtgggctccaggacgcttcccgtggatttccacatcaaggtcggcagtgagcccttaactgatgtgcctccttccgctcttccatttttctgcatcctgcatgccactcactggagcatgttacctaagaccccttgcctgatgatcttcagcagctccacattttgcaaggctagagacaaatgctgctgctacgtggttgccatctgcctttctagcctggcgtcggccactgccccacccagactctgctccta

SEQ ID NO: 9320 - DNA, 583 bp, Homo sapiens
  MAP TO AL035682.16; EXPRESSED IN LUNG, SIGNAL = 1.4; EXPRESSED IN BONE MARROW, SIGNAL =   2; EXPRESSED IN FETAL LIVER, SIGNAL = 1.3; EXPRESSED IN BRAIN, SIGNAL = 2.1; EXPRESSED IN PLACENTA, SIGNAL = 1.4; EXPRESSED IN HELA, SIGNAL = 1.4; EXPRESSED IN HEART, SIGNAL = 1.5
aagaaagtgcctgaattggggtgggtggagaaacacggggctcaggggagtgcatgccttgggccctggaatattacttattttgcttttccaaagagacttcttgaaaacgtctcaagtactcggagtggagaaagcagaaggagcgccttggtgttccaagaacaaacggggccaagccagccggcgtctgtgtgcaggaatgcaggcgggaagggctgagataaagcacagatgccccatgagggagcggggtggaatgcccagacgcgacgctgggatcactggccaaggtgcaggaaacgataactcagagccgggggcttccctggaccccagggcaggggcgggatcagcttcaaagatggtttgtttgcacttgtgcgggggagggaggacctgtgtgtccactggtgactgcttccttttccagccacagaaccttccctcaaccctcaaaacgcataagcccagctcttacaaagtttccaaggaaagcccactttggcaaaatcccaagggaaataaatgacagaccagaaatgcccacgcacaggcagcacagcacgctggggtttagcac

SEQ ID NO: 9321 - DNA, 553 bp, Homo sapiens
  MAP TO AC007556.2; EXPRESSED IN LUNG, SIGNAL = 3.9; EXPRESSED IN HEART, SIGNAL = 1.8; EXPRESSED IN FETAL LIVER, SIGNAL = 6.4; EXPRESSED IN ADULT LIVER, SIGNAL = 5.4; EXPRESSED IN PLACENTA, SIGNAL = 2.9; EXPRESSED IN BRAIN, SIGNAL = 1.7; EXPRESSED IN HELA, SIGNAL =   2; EXPRESSED IN BONE MARROW, SIGNAL = 3.1
aagcttctgcacagcaaaggaaacagttgaaagagtgaagagaaaacatacagaatgggaaaaaatatttgcaaactttatatcttaggcacagttaatatccaaaatgtataagaaactcaacagcaagaaaagaaataacctgattaaaaatgggaagagaatctgaacagacttttctcaaaagaagatacaaatggccaacaggtatatgaaaaaaatgtttgtcaccactaatcatcagggaaatgcaaattaaaaccaaaatgagatatcacctcacatttgttagaatggctactatcaaaagacaaaagataacaagtattgacaagggcatggagaaaacctcttgtatactgtttgtgagaatgtaaattagtacagtcattatggaaaatggcatagagatttcccccccaaattcaaagtagagctatcatatgattctcacatacttttaaaccatacctgagctgtgtcttctcaagggaaagtctatgatgttagatctttctttcaacttcaagtcccactggccacaagttgttca

SEQ ID NO: 9322 - DNA, 558 bp, Homo sapiens
  MAP TO AL022329.9; EXPRESSED IN BONE MARROW, SIGNAL =   2; EXPRESSED IN LUNG, SIGNAL = 2.4; EXPRESSED IN HEART, SIGNAL = 2.8; EXPRESSED IN ADULT LIVER, SIGNAL = 2.3; EXPRESSED IN FETAL LIVER, SIGNAL = 2.3; EXPRESSED IN HELA, SIGNAL = 2.7; EXPRESSED IN PLACENTA, SIGNAL =   4; EXPRESSED IN BRAIN, SIGNAL =   3
acagtcagcaaatgacagcccacggccagatccaactctctgcctggttttaaaaataaagtcaaattgaaacagccatgcccattcatttacgtactaagtatggctgcttgtgagccgcaagggtggagctgagtcattgtaacagagaacctacaggcctcaaagctcagaagatttcctatctggcgctttacagaaaatatttgctgccgcctcctttaagggatgctgcagcactttgaggatagcaacagtgaagctgttacttttctgggcctgaactgtcagaggagggagctgctgccgcaacaggagaggggagagagtggagagaacagcctgaaggcgcctttgggagagggaggaaggcaaccatggtcatccaggagggagagtgagtgaagacacagatgccctctgatctcctactagtggatgattcccattagcttaacccacctggaagatggaaagtgagggagtccattggaagagtccacagggtcagcagccagacatagagcaaagtagaagagatggagggggaatctgaag

SEQ ID NO: 9323 - DNA, 578 bp, Homo sapiens
  MAP TO AL079300.11; EXPRESSED IN HELA, SIGNAL = 1.7; EXPRESSED IN HEART, SIGNAL = 1.6; EXPRESSED IN LUNG, SIGNAL = 2.1; EXPRESSED IN FETAL LIVER, SIGNAL = 2.9; EXPRESSED IN ADULT LIVER, SIGNAL = 2.2; EXPRESSED IN PLACENTA, SIGNAL = 3.7
cccctgtgacatgagtttacctatataacaaacctgcacatgtacccctgaacttaaaagttttttttcttactttctacacctagggaaacacgaactttcacttatattttcttccagtcctaacttagtgcatctaccaccccctctagaatgtaagttacttgaagacaatcactattcatctctatattgacagcatctgtcttcatgacactcaataaatgattcaggatggacgcaaggaaatattaatggatgcataatttccattcagttaaagctgcatcttcatggggaactgggtgcttttatgaatgagtctgagattttctgtcactattgccatttcaccatactctggtgagacaatgtctctgcatggaaagtgaagggatgcattaaattcacttaaatatgttgaatccaaattgaatctacaagccaagtagattttaattactctacaaatctagaattgtgttcttcaaaacattgtgaaaattgtagcagaaggtaaaagactcgagttgtagagccagtacttgcaccatctcatcagagtgtgacttgggaag

SEQ ID NO: 9324 - DNA, 574 bp, Homo sapiens
  MAP TO AC007463.3; EXPRESSED IN BONE MARROW, SIGNAL = 2.8; EXPRESSED IN LUNG, SIGNAL = 3.2; EXPRESSED IN HEART, SIGNAL = 2.1; EXPRESSED IN FETAL LIVER, SIGNAL = 3.1; EXPRESSED IN ADULT LIVER, SIGNAL = 3.2; EXPRESSED IN PLACENTA, SIGNAL = 4.1; EXPRESSED IN HELA, SIGNAL = 3.3; EXPRESSED IN BRAIN, SIGNAL = 2.9
atcaccactacatccagcccaaaggacccggttactttagtgggtggatgtcacaatccagagaggaacaaagggggtttctatctgctcgctgagtggcagggcagaggcaaggcaggtgcacagagatgaggtctaaaagacttcctaaaattgtgaggccacccacttgactttcgctgtggtagtcctaccagattgcaagaccaatgcaggttcctagtgctcttagggcaatgggacaccaggctacttcctgggctgagacagagaggcagttctcaagtacaaggcaccgaggatgctcacatttattcttgaagctctttctttccatggcttgtgccttggtacaaaagctctgtaaaagagcagatcagggacatttggtacgggtctgtgcagggactctgacaccaccaccagcagtggtcacaggtaagcagggctgcatcagggtatgaagcccagcccaaacggaggcagtgataggagccttgctggtttctgtgacttcaagaacagagctgcagttctttatatatgtgcagtcagaaacgaggctgagtctggt

SEQ ID NO: 9325 - DNA, 582 bp, Homo sapiens
  MAP TO AC007564.9; EXPRESSED IN PLACENTA, SIGNAL =  13; EXPRESSED IN HELA, SIGNAL = 6.6; EXPRESSED IN BRAIN, SIGNAL = 1.5; EXPRESSED IN BONE MARROW, SIGNAL =   4; EXPRESSED IN LUNG, SIGNAL = 7.5; EXPRESSED IN HEART, SIGNAL = 3.1; EXPRESSED IN FETAL LIVER, SIGNAL =  20; EXPRESSED IN ADULT LIVER, SIGNAL = 8.7
ttttacagtgcgtttcctgccagaacacaggtgtcgtgaaaaccactcctaaaggctaaaatgggaaaggaaaagactcatatcaacattgtcgtcattggacacatagatttggtcaagtccaccaccactgatcatctgatcaacaaatatggtagcatcaacaaaagaaccatcgaaaaatctgctgagaaggaagctgctgagatggaaaagggctcctccccatgcctgggtcttggataaactgaaagctgacactgaacgtggtatcactattgatacctccccatggaaatttgatgtctcaggacacagagattttatcataaacatgaatccaggcacatctcaggctgactttcctgtcctgattgttgctgctgacattggtgaatttgaaggcatctccaagaatgggcagaccgatgatcatggtgctcttgcttatacactgggtatgaagcaaccaattgttggtgtttacaaaatgaattccactgagccaccctatggccagaagaggaaattgcaaaaaacgatagcacttatattaagcaaattggctacaacccggacaca

SEQ ID NO: 9326 - DNA, 559 bp, Homo sapiens
  MAP TO AC004832.3; EXPRESSED IN LUNG, SIGNAL = 3.6; EXPRESSED IN BONE MARROW, SIGNAL = 5.9; EXPRESSED IN HEART, SIGNAL =   3; EXPRESSED IN ADULT LIVER, SIGNAL = 7.2; EXPRESSED IN FETAL LIVER, SIGNAL = 5.7; EXPRESSED IN HELA, SIGNAL = 3.8; EXPRESSED IN PLACENTA, SIGNAL = 5.3; EXPRESSED IN BRAIN, SIGNAL = 3.6
tcacactcatgcaacagcagctcacagactttgatgcgcttccggatcatatcctgcttggaggctgacagcaggagacccttggggtcgagggacccaatgatgttgaagtacacagggcagccttcgtagtcgtagccacaaagaccacccgagtcatacagctggatgacctggaagtgtgggtaaggtcccgactcaatccagctcaccaggctgggtccctactccatcaggtggctggacgtggtaggtgggagatgtcaggggtgaggggcctcagatggcctgggggatgctgctcgaggctcacctcagggggctgccatgtgacaatgttgtccaggtcttgttgcttccggaactccatgtgctgcaggaacacagcaggagctataggattttgcaggaacctggggacaccaggctaggtccctctgcccacagccaccaagatcccaccacagcatacccaggctctcagagcgtggggacaggaggtgggctggggggacttgggtctgatgcagaaagagatcgggggaggaagaaagaagaa

SEQ ID NO: 9327 - DNA, 582 bp, Homo sapiens
  MAP TO AL031588.1; EXPRESSED IN FETAL LIVER, SIGNAL = 8.1; EXPRESSED IN HELA, SIGNAL = 5.4; EXPRESSED IN BRAIN, SIGNAL = 9.3; EXPRESSED IN PLACENTA, SIGNAL =  12; EXPRESSED IN BONE MARROW, SIGNAL = 5.4; EXPRESSED IN LUNG, SIGNAL = 6.2; EXPRESSED IN HEART, SIGNAL =   5; EXPRESSED IN ADULT LIVER, SIGNAL = 7.5
gctccctggcttctcctcgcctcaaggcctttgcactgccgttccctcatctggactttcccagccctctctgggacaccggatcctctcctccttcaggtctcaggttccatgtgacttcttttgaggccgtttttggcatctccattccctactctcagaccccactggtgcttcccacccagggtcctacacctccctccgtagacattttctaggtttacactgattggcctcctgcctgtgtcccccactcgcgggcgggctccatggaggcgaagatggaactgtgtgcgcgtcaccaattcctcgcggcccagcagcacagcgcccgaacagatggcaccgaacgagtctgtgccgggcaagcgggtgacagggcacatgagtgtgcagacggcggcacagcacctgcccctccaggggtctcggggctgcatcacactgcctggcactcacctggcaggcaggccatcccaagagcaccccaccagctgctaaggctgtggggaaagctgcctaccacataggggcagaggagaggaaaaaagcaaggagtctcgtataggctgctcccgatgt

SEQ ID NO: 9328 - DNA, 589 bp, Homo sapiens
  MAP TO AC006548.19; EXPRESSED IN PLACENTA, SIGNAL = 4.1; EXPRESSED IN BRAIN, SIGNAL = 3.1; EXPRESSED IN BONE MARROW, SIGNAL = 3.3; EXPRESSED IN LUNG, SIGNAL =   3; EXPRESSED IN HEART, SIGNAL = 1.9; EXPRESSED IN ADULT LIVER, SIGNAL = 3.7; EXPRESSED IN FETAL LIVER, SIGNAL = 4.1; EXPRESSED IN HELA, SIGNAL = 2.3
atgtaggcacctccatcacctaggacaagcagagatcccaggaggcttccagtctgctgctctttggggcttcttcccaggctgctggaaccgcttccagtttccagggaagtttctggtttttgcttctccctctccatccatggagtgaaagctgaagatgctggagtgttttcctgccagcagcccttcagttggcttcttacagtgaaaagtccccaaccaaaaataccctttctggatggaagattctgccctgatgcaaagacacttgcttcctgcagaagccataatctgagagtgtgaagcgttcatattatagttgtctttgttctcagagtctgtgatttctggcctgttgatacaggggaagattgaagagttattacttcaagtttacacctgatctacaaagagggagaggcaaagggttgtgaagctaaggtgtttcctagacaggtgctttacctggattgatatattaatttttccattttcttgcagcatataagagcactccaaaacttaaaggagtgaaacaacaatttattatttgttgtgattctatgggttggttgggaggtttttc

SEQ ID NO: 9329 - DNA, 555 bp, Homo sapiens
  MAP TO Z82188.2; EXPRESSED IN PLACENTA, SIGNAL = 3.4; EXPRESSED IN BRAIN, SIGNAL = 6.6; EXPRESSED IN LUNG, SIGNAL = 5.7; EXPRESSED IN BONE MARROW, SIGNAL =   3; EXPRESSED IN HEART, SIGNAL = 4.2; EXPRESSED IN FETAL LIVER, SIGNAL = 4.3; EXPRESSED IN ADULT LIVER, SIGNAL = 4.6; EXPRESSED IN HELA, SIGNAL = 3.8
tatatcctgccaccatgacccatttcaagctagcatcgtgatgtctctgaacctgcgatcgggaagacatgcatgcagtcggctctggtgcaagctggctccagccaccattggctgtggggctgagggcacaagcctcctcatagactcctgtaaggagccctgccctgtcttgagaaccaccgaaagagctagagagtgtttcccatcctccagccatcctctgagaagtcatagctcaggtcctggatgagcctcccctctttcccaggaaccatcccttccttctggtgtggcccactggacaagatcgaatatcccaggtcctgcaaaacctggctccttccggcctctgggtctttctttcagttcctgggaggggctgagcagcctcctacctcctggccttgacccatattggcccctccaccagctgtgctatgtctctcatctttgggtctcagctgaaccacctcttcctcagagaggccttccctgaccacttctccctcccaaatttgcttctcccttgccagcacttaccccacgctgaag

SEQ ID NO: 9330 - DNA, 563 bp, Homo sapiens
  MAP TO AP000359.1; EXPRESSED IN FETAL LIVER, SIGNAL =  32; EXPRESSED IN BRAIN, SIGNAL =  17; EXPRESSED IN PLACENTA, SIGNAL =  18; EXPRESSED IN HELA, SIGNAL =  21; EXPRESSED IN LUNG, SIGNAL =  21; EXPRESSED IN HEART, SIGNAL =  15; EXPRESSED IN BONE MARROW, SIGNAL =  18; EXPRESSED IN ADULT LIVER, SIGNAL =  36
gcgtttacatttatgcaggggtgaaggaacctggacctgaggctgggttgcatacagcgcccttgcaggagagaaggattggtggagtttttcaagacctggtggtgaacaccaggcaagatatgaagcatgttaaagactcaaaaacaggtatgttggtctagaactcaatgtttatggagctgttcgtttttaactttttttttttttttttcattgagagacaaggtcctgctctgtcgcccaggctggagtacagtgatgctcactttagcctcaaactcctgggctcagctgatcctgagctgatcccagctcaagtagctgggactacaggtgggcaccaccatgcccgaatgtgtgtgtgtgtgtgtgtgtgtgtgtgtgtgtgtgtgtgtaatatatacatattttatatatgtgtgtgtgtgtgtgtgtgtgtatgtaaattttgtagagacacggtcttgctggtctagaactggcccaagccatccttacacctgggccttccaaactgctgagattacaggaatgagctaccacacctggcccattttaaa

SEQ ID NO: 9331 - DNA, 595 bp, Homo sapiens
  MAP TO AL031588.1; EXPRESSED IN ADULT LIVER, SIGNAL =   7; EXPRESSED IN BRAIN, SIGNAL = 7.8; EXPRESSED IN PLACENTA, SIGNAL = 5.3; EXPRESSED IN BONE MARROW, SIGNAL =   8; EXPRESSED IN LUNG, SIGNAL = 4.8; EXPRESSED IN HEART, SIGNAL = 3.8; EXPRESSED IN FETAL LIVER, SIGNAL = 4.7; EXPRESSED IN HELA, SIGNAL =   6
tcctgccctgaggtgtgtagctgagaagactcaacagccactctcaagggtcccacgatggccctgggaggatgaacaatcccagaactgaggacacccagggctgagtcaacatgaaccacctgccacttctcacctgtcccaccaccggtgaaggtttggccacatttttattcatgtctggagtgtttgtcatgaggtcgatcagaggcctgctttcagatcctacagccacgtgtgcttctggggtatcgcagaagtcgatgagaggaaggtcaatgaggggctggcttgcagcatctggagtgaccgcgagtggttccagtttgatatctacaagaagagcctgggtacaaaaccaaggttaagagcagagtccagcatctttctggcaaccatcttgggagaatgtgagctttgctcatgttccaggtgggctggcggtttggaaagccaaggaatcaggcggggccttggtggaaggaggctctgtatggggtgggccgtgcctctctgactgttgcccacctccctgtccatacccgctcaccagcagccaccagctcctgccaccctgcttcccgcttcctcagct

SEQ ID NO: 9332 - DNA, 593 bp, Homo sapiens
  MAP TO AL022329.9; EXPRESSED IN HELA, SIGNAL = 2.4; EXPRESSED IN PLACENTA, SIGNAL = 4.2; EXPRESSED IN HEART, SIGNAL = 1.6; EXPRESSED IN LUNG, SIGNAL = 2.2; EXPRESSED IN BONE MARROW, SIGNAL =   4; EXPRESSED IN ADULT LIVER, SIGNAL = 4.6; EXPRESSED IN FETAL LIVER, SIGNAL = 3.6; EXPRESSED IN BRAIN, SIGNAL = 1.7
gagtctatgcattccagccccttcatttgattgatgacgaaactaaggaacactggcagagaagtgagttggtagaaccatgcagcttgtcggtgtgcagcaggtcctggaatgcagggaacactgaccttgggcgggatgcggggatcagctccctcagcgtctgagggtatcagccagatcatagcgtttgctgtgcagtgggatcgtgaagagccaggacctgaaggagaccgagtagcgcttacataggttagttgtttaggggacatttctttgaggatgtgatcaggggatcatgtggagcagcgtcgtcatcagccagggcaagagggagtgcagtgtgtttcagaaactgccagaaggcccacgcaggcagctcctgatgagagaaaagaggggaggcagggaactgcgcaggagccagggttttgagtgtgatgggaagctctggtgggtcttgaccaggcccgatgtatgttttaagatcattctagcctctttatgaagaatgaattgctgggatcagagtgggagcatggaaacaggaagaagaatctggagacccctgtcgcatttaggaagtcgccaaa

SEQ ID NO: 9333 - DNA, 589 bp, Homo sapiens
  MAP TO AP000353.1; EXPRESSED IN HEART, SIGNAL = 1.6; EXPRESSED IN FETAL LIVER, SIGNAL = 1.3; EXPRESSED IN ADULT LIVER, SIGNAL = 1.8; EXPRESSED IN BONE MARROW, SIGNAL = 1.4
tgaaaaatggcatcaaccacagaccagagaccaaggtgctgagatcctcagcctgggagcagcatagacaataccctgctctctgtcttggaggccacagaactggcctggaggccactgacagcctcacccatcaaggtccccaactcctatggcccccaaagttgaagtgtacctggcctaagaatctcagtgactgagttcctcccaggtggctttgagcagcacggatttggggagtgggctctgccctaggcatccagctcggacctcagcctcacctggctgaagttgggctcgtactccacacagcccttgctgttgacatgcaggatgggggctgcaatggccgctctcaggtcaaagccaagccacagcttgctcatgatggcctgggggagagatgagggtttcagggagaaagggggcaccctgctaccctacatcagccctcacatccccactccagagacagtcagacagtatgctgcccagagaggagacactcgagccaggagccccagactcacctgggccacagcagagatgatgagctccccgccagccccgccaatcactagcttcgacc

SEQ ID NO: 9334 - DNA, 574 bp, Homo sapiens
  MAP TO AL035682.16; EXPRESSED IN BRAIN, SIGNAL = 2.1; EXPRESSED IN PLACENTA, SIGNAL = 1.9; EXPRESSED IN HELA, SIGNAL = 1.6; EXPRESSED IN HEART, SIGNAL = 1.3; EXPRESSED IN LUNG, SIGNAL = 1.9; EXPRESSED IN BONE MARROW, SIGNAL = 1.9; EXPRESSED IN ADULT LIVER, SIGNAL =   2; EXPRESSED IN FETAL LIVER, SIGNAL = 1.5
aaaaggattgagggtgggagataatctcattttctgtcaaaatgacctagaagagttaaaatgtagaatggcacattcatgcaatggcgaatggtatggccatcacaatccctgaagacacgctgagtaaaaagagcagggtataaaactgcacggtgggatctaccccccaaaaccaaagttgtatataataaagagatggtcacttttgcatgattctgggggacagagaaagagctcaaaaatccactgacctgtggtcttctcagtaaacacaactttggactcggatgtaaagttctgccccgtgaggatcatttgctggccgccatagaccaggcagctgtctgtgtcttgtctttcaaccatgggcagctcgtgagcagatcgctgggctgcaggcaaaagagagagaagtcactgtgataaggggagatgtctgttcaaaagaggaggtctgatttcatggtactgagatatgacatgctctgcccacctgtgtcacctgttgttatctaaaatgtggaaccatcacccctgacaatcaatgacgtacaaatgttatgccttgtga

SEQ ID NO: 9335 - DNA, 556 bp, Homo sapiens
  MAP TO AL022327.17; EXPRESSED IN PLACENTA, SIGNAL = 3.7; EXPRESSED IN BRAIN, SIGNAL = 4.9; EXPRESSED IN BONE MARROW, SIGNAL = 6.5; EXPRESSED IN LUNG, SIGNAL = 2.9; EXPRESSED IN HEART, SIGNAL =   3; EXPRESSED IN ADULT LIVER, SIGNAL = 5.9; EXPRESSED IN FETAL LIVER, SIGNAL = 4.9; EXPRESSED IN HELA, SIGNAL = 5.3
agggccttctgctctgagaccaaacgccattctgagcagcctcaccagacgtgggcagtgtggagctgggtatcattttgggcactgggggctttgctcagccaggtttgcaggtgggactcagagcagaacttcacgtgagccacagagcctggcaacccagctgttccacaggaggactgccaccctctttatagaaggcatggccaccgaggcgtgggacccacatgctgttggtgagacagtgcggctgctgctcagcggagcccacactgaacacagcaccctgctgaggcaggagagtaaggaatgagggtaactgggggtgaagggagaagcaaaagaacagcaggtgcagccagttccaggcaagattaggcagcacaggccacagcctccctcctgtgataatgagacttcacttcagcctctgattggttgcaggccgatcctccacagggtgtaacccactggaaacctccaaagggcagctaggagtgttaccaaattcttttagctttatgaaaaccctgcggagcactgcatttggggcctt

SEQ ID NO: 9336 - DNA, 578 bp, Homo sapiens
  MAP TO AL031587.3; EXPRESSED IN FETAL LIVER, SIGNAL = 1.4; EXPRESSED IN BRAIN, SIGNAL = 2.2; EXPRESSED IN HELA, SIGNAL = 1.5; EXPRESSED IN LUNG, SIGNAL = 1.2; EXPRESSED IN HEART, SIGNAL =   2; EXPRESSED IN BONE MARROW, SIGNAL = 3.1
tctactcccaccgtttcagccttgctgcctcaccaccaccatctgtcccccagctccttgggcctgtccacgctgctcctcatccccactagttgtcttttccgccttccagggctgcactgggctctcactgggcctcgggccacagcctcttcccttccatgcacccctgcgtcccaggcctggcagcttccccaggcctgtcacagaggagtggggtcagccactcctggcttcagaatctgctcggccacttcctggccacgtggcggcaggcaggtcccaacccttctctgggctccagcttcctcctccaagaagcgggggaggggataatgcaaaaccagcgacctcctgcaccagctctaaggagaccgaagtgcccagcatggggcggggtgcggaggcagccaagagctcaaaggagagccaggccacttggagttgaaatcccagcgctgacaccagccgtgcagccctggacccctctctgagcctcaatgtccccctctgtaaaatggggataataatagcagcttccccttgggacagaatgaactaatcccaggggagacctg

SEQ ID NO: 9337 - DNA, 572 bp, Homo sapiens
  MAP TO AC006548.19; EXPRESSED IN FETAL LIVER, SIGNAL = 2.9; EXPRESSED IN HELA, SIGNAL = 2.5; EXPRESSED IN BRAIN, SIGNAL = 2.5; EXPRESSED IN PLACENTA, SIGNAL = 2.6; EXPRESSED IN LUNG, SIGNAL = 2.1; EXPRESSED IN BONE MARROW, SIGNAL = 5.7; EXPRESSED IN HEART, SIGNAL = 2.3; EXPRESSED IN ADULT LIVER, SIGNAL = 2.4
ttttagtggtgcagaaggggaacagcctgattagagtgatttcacaaaacaggagaggaggaaatgaagattagcaatgaggaaactcttcagagttttaaggtaaagagggtagaaaaactgggccatagttggaagagaatgcaggctgaaaccaaatttctaattttttttttctaagatgggagaaatttgtgtcttgatgggaatgatcctagtagaggtggagaactgttgaagtgatgtccgtttgtgagcgagagggtgttcacaaatgcaagaaggttggccttagaatggatgaactctctgtgttccccagtgacaaggtccagggctataggcacaggcaggctggtgggtgtggaggcggatcaggtgcagattctcttttcattgcttatattttctcatggaataagaaacaaagaaataagggtgttggaggtttaaagggagagaagttgagaaattgttgcaaaacactaggagaaaaccatgaactaggtaaatatggtaggacattgggccacatgagggccccttgaagttacagtgagaccaggcagcat

SEQ ID NO: 9338 - DNA, 583 bp, Homo sapiens
  MAP TO AL031587.3; EXPRESSED IN BRAIN, SIGNAL = 3.2; EXPRESSED IN PLACENTA, SIGNAL = 6.7; EXPRESSED IN HELA, SIGNAL = 3.8; EXPRESSED IN HEART, SIGNAL = 2.1; EXPRESSED IN LUNG, SIGNAL = 3.1; EXPRESSED IN BONE MARROW, SIGNAL = 2.6; EXPRESSED IN ADULT LIVER, SIGNAL = 3.8; EXPRESSED IN FETAL LIVER, SIGNAL = 3.8
tccctggcctgttaggaaccgggccgcacagcaggaggtgagcggcaggctagcgagcctcaccgcctcctttcaggtcagtgacggccttagattctcataggagcgcgaaccctattgtgaactgcgcacgcgagggatctaggttgcacgctccttatgagaatctaactaatacctgatgatctgaggtggaacagtttcatcccgaaaccattccccacacctccgtcagtggaaaaattgtcttccacgaaaccggtccctggtgccaaaaaggctgggatcgctgctttaacggactgacctctgagcagctcgcaggtccccggggtgtaagtgatggtcttggggcggcgccggaacccagttcctttggtcactacctccatctgcttctgtgaagccatgggaggactctgaggagggaaagacgcaatgacacaccccctgtctcctgtccctaatctctgttccccgacgcccaacacccccagaagtctggaagcggggatcgagccagagaatgatgccgccagttaatattgcgacagtgcccaaacctcccatccagacacacaga

SEQ ID NO: 9339 - DNA, 548 bp, Homo sapiens
  MAP TO Z82201.1; EXPRESSED IN LUNG, SIGNAL = 1.7; EXPRESSED IN BONE MARROW, SIGNAL =   2; EXPRESSED IN HEART, SIGNAL = 2.3; EXPRESSED IN FETAL LIVER, SIGNAL = 2.7; EXPRESSED IN ADULT LIVER, SIGNAL = 1.6; EXPRESSED IN PLACENTA, SIGNAL = 1.2; EXPRESSED IN HELA, SIGNAL = 1.7; EXPRESSED IN BRAIN, SIGNAL = 2.7
tatcatgccggctgactccccaacttgtcccaaaaggaagaaaagaacatattcattttaaaaagccaccctactgcttattcattcaacagttgctgagcacattgggcaatgtggggaaaatgaataattttaagacaccattcccttcgctgtacgtgcagacatggcagttagctctgctctcaggtagacacacacatcctgcaataagaggacacagggtgatgagaggtgagagtgcagttcactgacggccggagggccacagctgcccgacctgaagacctgaggcttgaaggctggatatcagggttcgtggctttgcagaagatggtaagggaggtgtctgctgagaatctggccctatgacgggggcacgtgaaagtatgttggcagggatgtgacatttgcatagcagcatcatgggaagataaatctgacagcggctcaaagacagtgtggaagtgagactgtggggtggtggcagtggtgggagagcagcagtctggatggggggctcctggggtcatggaggccttaaccaa

SEQ ID NO: 9340 - DNA, 574 bp, Homo sapiens
  MAP TO AC007539.8; EXPRESSED IN PLACENTA, SIGNAL = 3.9; EXPRESSED IN BRAIN, SIGNAL = 3.1; EXPRESSED IN HEART, SIGNAL = 3.1; EXPRESSED IN BONE MARROW, SIGNAL = 1.7; EXPRESSED IN LUNG, SIGNAL = 1.7; EXPRESSED IN FETAL LIVER, SIGNAL = 1.7; EXPRESSED IN ADULT LIVER, SIGNAL = 2.4; EXPRESSED IN HELA, SIGNAL = 2.9
aagggccacaaagtgaactgaatgtcagaaggaagctgggtgtgagtttctcacaagctcttgctccaaaacctgttagtgaggagaaagggccctccgggagctctggggaaggttggtgcacacaggagtccctttggcggggtaggcagagccgccagccctcacatggtcactggattggttcgagtgggctctaaggcaactgccgtgtgccagtctgttgacatgatcaacattaatattcttgcggcgggggggggggtgttcattaaattaaggaatgacacagggagccaagagaatggcttatttgtttggattctgaatcacaatcgggaaatagtctttatctggtgcaaccataattccattttacttggagcaaattcgaaggaaggtgagatcattctgggggtcactttcatgcatggtgctccgtgccttcaggatgaagctgtgcaggaagctggcacactctgtggtggtgaggttgaccatggtgctcttgatgggaatgccatctttgttcaccatgatgatattctgcactcccctctggctctgaagtcac

SEQ ID NO: 9341 - DNA, 569 bp, Homo sapiens
  MAP TO AL022328.21; EXPRESSED IN FETAL LIVER, SIGNAL = 4.3; EXPRESSED IN PLACENTA, SIGNAL = 3.2; EXPRESSED IN HEART, SIGNAL = 2.2; EXPRESSED IN BRAIN, SIGNAL = 3.3; EXPRESSED IN HELA, SIGNAL = 4.2; EXPRESSED IN BONE MARROW, SIGNAL =   3; EXPRESSED IN LUNG, SIGNAL = 2.5; EXPRESSED IN ADULT LIVER, SIGNAL = 4.9
gcatgactgtgagccatttcatcatttaacatatgccatctgccctgctcacatgtaagttctgcacgagagcagggatttattctgtcatattcagtgtgtattcccagcaccgacttcagctcctggattgtagccttctggtgaatattcatgaagtaaagtaggttttctctcctcatcaacccagggcagcgaggcacgggagggaaaaagcccatcgtggttcaacccggccgaggccgtccaggtcctgcgctactgctgcctcctggcccacagcatctccagtcaggtgtctgccagcgacattggcgtcatcacgccctaccggaagcaggtacgccctgcccaggcacgcctggttctgtgaggtccctgcagccctgctccttggctcctgcagctccacagaggcaggaacaagctccttgtgagcagcagcaggtttttaaaggggcaggaccgcacttgaatgtcgttcaacatgagaggtcacccaactgccatccatgggccagttccgggcagctgccagcttttctacggccagagcctcgaacagtttt

SEQ ID NO: 9342 - DNA, 558 bp, Homo sapiens
  MAP TO AL035681.13; EXPRESSED IN ADULT LIVER, SIGNAL = 3.2; EXPRESSED IN FETAL LIVER, SIGNAL =   4; EXPRESSED IN BRAIN, SIGNAL = 3.3; EXPRESSED IN PLACENTA, SIGNAL =   2; EXPRESSED IN HELA, SIGNAL = 2.5; EXPRESSED IN HEART, SIGNAL = 2.3; EXPRESSED IN BONE MARROW, SIGNAL = 3.6; EXPRESSED IN LUNG, SIGNAL = 2.7
gtgtgccttccctctgtgtcctcctagggagagctgttgcctccctctgtgtcctcctagggagtcagggccaaggtgagcctggcagcgcaggcagtctcatctgccacctcccgactgactgagtgtgggggataacaccacaccttccctgtcctccactcaccagagcaggagggtgggtgggaagagccctgagccatagcaggcctgtgttctgacgtcgtttcagatggtggagagcatgaagtacccctttaggcagggcatgcggctggaagtggtggacaagtcccaggtgtcacgcactcgcatggctgtggtggacacagtaatcgggggtcgcctacggctcctctacgaggatggtgacagtgacgacgacttctggtgccacatgtggagccccctgatccacccagtgggttggtcacgacgtgtgggccacggcatcaagatgtcaggttagcagagccccaggccagagggactgcatgctgtgcttccccagggacggagtgggagcaccttcctactcgtcacagcaggtcagcaggt

SEQ ID NO: 9343 - DNA, 564 bp, Homo sapiens
  MAP TO AL023553.5; EXPRESSED IN FETAL LIVER, SIGNAL = 2.3; EXPRESSED IN ADULT LIVER, SIGNAL = 2.8; EXPRESSED IN HELA, SIGNAL = 2.9; EXPRESSED IN PLACENTA, SIGNAL = 2.1; EXPRESSED IN BRAIN, SIGNAL = 2.5; EXPRESSED IN LUNG, SIGNAL = 1.8; EXPRESSED IN HEART, SIGNAL = 1.8; EXPRESSED IN BONE MARROW, SIGNAL = 2.6
tggcacagtggcttccagtggatcctctgtgggatctcttcacattatgttccagcatctgccaagtgctttctgcactggatcatgtgctctgtggggacagggactgtggcttatttattcctctctagctctgggtttgggaccaggtcagtacagagcaggtccttaatgtatgtgtgtgttgtgtggatggatggctgaatttccaggtgtagttctaggcattagtccttcttcccagccctcacccccatctgtccagccacacccacagaccggggagctcactgtcacggccagcgtcatcgtgacatcttctgcagtcctcatgtctgcctgacctctccccctggatgtggaccacaagtgtctacaccgtgtggaccacaagtgtctacaccgtgtagaccaccccgaattctgtgtgcccagccttcgtggatccaacttttacaagcttgaggctctttagggatgcactagtcttaaatccttgtacgtggcagcattggccagttcttcgcagccaggtcttccctctgcatccccaagagatgagac

SEQ ID NO: 9344 - DNA, 587 bp, Homo sapiens
  MAP TO AP000233.1; EXPRESSED IN HELA, SIGNAL = 3.3; EXPRESSED IN PLACENTA, SIGNAL = 3.5; EXPRESSED IN HEART, SIGNAL = 2.9; EXPRESSED IN BONE MARROW, SIGNAL = 6.5; EXPRESSED IN LUNG, SIGNAL = 4.2; EXPRESSED IN ADULT LIVER, SIGNAL = 4.7; EXPRESSED IN FETAL LIVER, SIGNAL = 3.6; EXPRESSED IN BRAIN, SIGNAL = 6.4
tttttattctttaaatgtttggtggaattcatcaataaaatactctgtgtctggcattttcttcttttgaattgtattgaatattgatttctttaatagatacaattgatgaaagtagcaggcttccaagcagccactgccattgtgcgagctggagcaggagccgggggaagagggagggaagagggtgggacatgagcagtggcagtggaagtggctgcaagagcaacagtggcagtggtgggacccctttgcccagcgtcccctgtgccctgtgttcctgaggcagccgactctgctgccccaccctcgcacaactaggtaggacccattcccaggcctggagcctctgctgctctagatgtggcctcatgtcactgctctcacctgctgacagtgtgaggaggatgtggggaggaggtagacagtctctggagcccaaccctaggagccccctggagcctgccaccctaggggccaccacaatggggctggccaagtctcccactgaagggagagcagtgtggtcaggcatggaggagtgggcagagaggggcccagcgaggacctggaactccctcctcagg

SEQ ID NO: 9345 - DNA, 554 bp, Homo sapiens
  MAP TO AL079295.1; EXPRESSED IN LUNG, SIGNAL = 2.6; EXPRESSED IN ADULT LIVER, SIGNAL = 5.1; EXPRESSED IN FETAL LIVER, SIGNAL = 4.3; EXPRESSED IN PLACENTA, SIGNAL =   5; EXPRESSED IN HELA, SIGNAL = 2.6; EXPRESSED IN HEART, SIGNAL =   5
ggattctctaaagagaccacctggctgggtgctcaaaccacacgggctgacccaaaagacaccaaaaccaagagttgctcgggaggcactaaatgttgacggtcttggccagcttcacatcctcaatttcagcagacagccagcagtaagtgtgatgaagccgcagcacctcaatggccttgagttccagtggtgttgcctgaataccaaggtcttctaagctgggcaggtgagacaaggtcatgtctgtgatgtgaatacgctccactttatcccttgttgtccaggactcaaatgggcttatttcaaagtctcttgctacccactgataggcaaaaggtggcaaggggtacgggaggaagtacccctttgctgtgagccacagcaaagatgtacttcaccaggtcaaagaggagatatcgatttggcccaacgaaagcaaaggttttcccattggcatcaggatccttaactgcattaacaattcctttggatacatctacgacgtatactggttgtttaactgccttccagcccaaggaaacaaggggtat

SEQ ID NO: 9346 - DNA, 555 bp, Homo sapiens
  MAP TO AL031587.3; EXPRESSED IN LUNG, SIGNAL = 7.1; EXPRESSED IN BONE MARROW, SIGNAL = 8.4; EXPRESSED IN HELA, SIGNAL = 4.5; EXPRESSED IN PLACENTA, SIGNAL = 7.4; EXPRESSED IN HEART, SIGNAL = 3.9; EXPRESSED IN ADULT LIVER, SIGNAL = 5.9; EXPRESSED IN FETAL LIVER, SIGNAL = 7.5; EXPRESSED IN BRAIN, SIGNAL = 8.2
agggttctagagctgggtgggggccccccactcccaggcgggcagcaggtggggtgaggactgagagctgcaaagctggtggccggaggggaggccaaggggccctgtccaatggcctctcctctctgcaatagaggaggggtgtcaggagtgtagggcttcagggggtttactgtctctactgaaggtcccagaagaaggaagccttggggaccagaaagggtgggtggtgctgggtgagggcccacatgccactgctgggctgtgtggaaggtcccgtctgaaacagggttgttctttctcttctgagagctccgagtgctggccatgtgcccctggcctggggagcaaggggcctgtcctctgtgggtttatttacagcttttcagaggtgcccctgcctggtcctgggcaacttgtcatcagcgcacctggtgtggatactgaggagaactgagagaggctaggtagctcccggtgcttccccaggcccccagccccatccctcagctgaggactgcaccttcctctcccacccaggctgtacctgtcact

SEQ ID NO: 9347 - DNA, 558 bp, Homo sapiens
  MAP TO AL022319.2; EXPRESSED IN LUNG, SIGNAL =   7; EXPRESSED IN HEART, SIGNAL = 4.9; EXPRESSED IN BONE MARROW, SIGNAL =  13; EXPRESSED IN ADULT LIVER, SIGNAL =  13; EXPRESSED IN FETAL LIVER, SIGNAL =  15; EXPRESSED IN HELA, SIGNAL = 6.1; EXPRESSED IN PLACENTA, SIGNAL =  11; EXPRESSED IN BRAIN, SIGNAL =  11
aaaatggcggtggaaacacccatagaaaaattctagagggagctgggaagggaggagctggactgacctgcattctaacgtgacggatgctctcccagggtgacgccaatcgctcctactcggacgaggaccagagctcatccaacatagaagagtttgataagctccaggaaggcctggacagcagcggaggtaaacaggccctcgcttgtcacctagagagcccagagccttctccacagatccaggtgggcagagggtacagcgtctgactccacctcaagcccaggctcagggactgctacttatctatggtttgttgtttacgttcataattggaaaaaatgtgaaatctcaaaaagaggtcagtgacatccatggacccctgggattctaggcacaggggtagccgcagcccaccacatccctccacataccagggccccttggttagagccttggggccttaggtcaaggtgtaggttctggtcctgcctggcactactgggcatcttggaacaagcatcctccaaccctagcccagtgtctttctcggta

SEQ ID NO: 9348 - DNA, 562 bp, Homo sapiens
  MAP TO AC007719.1; EXPRESSED IN LUNG, SIGNAL = 2.8; EXPRESSED IN HEART, SIGNAL = 1.4; EXPRESSED IN FETAL LIVER, SIGNAL = 3.1; EXPRESSED IN ADULT LIVER, SIGNAL = 5.1; EXPRESSED IN HELA, SIGNAL = 7.5; EXPRESSED IN PLACENTA, SIGNAL = 5.5; EXPRESSED IN BRAIN, SIGNAL = 2.2; EXPRESSED IN BONE MARROW, SIGNAL = 3.2
  unsure 314
  unsure 327
ggggtgatattgtgggactgttagaagaaacatttgtcatttagaattattggtgatggcctggatacagttttatatgaattgaaaaactaaatggaataagagaaggagaaaaacaggtattaaaagtctaagaattgggaggacccaggacatctaattagagtgcctaaggagattcagcatagtcctgccagcaaagattatttgtttaagagttaagagtggcagtttggggatagcaccaggagatatcagctgtgatggcttggagaaacagtgtaaaccggcagtggaaacaagagcagggcatngtatgagtagttngagaacagtgaataggagtatgactaggcagaagatagtagggatgacaagttttttggggcacagtccgagttggtctggtgtctggaatgagactggggcctaataaaaaggagcgtctatacaggagctcaaatgggctgtaccttatagcattctgaggacaggcctgaattctgagaagggaaattgtctagtcctttttaagttggtggctgagcttggtgaggtgtgt

SEQ ID NO: 9349 - DNA, 570 bp, Homo sapiens
  MAP TO AL079295.1; EXPRESSED IN PLACENTA, SIGNAL = 1.7; EXPRESSED IN HEART, SIGNAL = 1.5; EXPRESSED IN LUNG, SIGNAL = 1.9; EXPRESSED IN FETAL LIVER, SIGNAL = 2.1; EXPRESSED IN BRAIN, SIGNAL = 2.8; EXPRESSED IN HELA, SIGNAL =   2; EXPRESSED IN BONE MARROW, SIGNAL = 2.7; EXPRESSED IN ADULT LIVER, SIGNAL = 2.4
ggttccaaataaaacactggcaaagtagtagagtgtcttctgaattacaaaatatttaattatgctttataaattttgttgggtattctgttgtagtctacctctttaaaatagaaaattcacatgatatacatatagtaacagagaaaaattttccctatccctttcccagaacaaaacacattttgtctacaaccatggttacatggtggcttatatattctttaatcatttaacaagtaaagtccctaagtcaaccagggactgaatcataaacgtcttcatcatagcttcctcaccaaatgaagtgatgatgagcatataggaagtgccctttagaaaatgcctggtaattgaattaaccaggtaattgaatacctgcttctgcagtataagtctataaaaaaaagataggaaccattctctcaatagctttaccaactctgccagggaccttaccacaatataaataatcattctattaagatacatataaggctatatgtgggagtccacattatgtactatgggaaattaaaagaaaaatgagccattgctctcacctaggct

SEQ ID NO: 9350 - DNA, 560 bp, Homo sapiens
  MAP TO AC007539.8; EXPRESSED IN HEART, SIGNAL = 1.4; EXPRESSED IN FETAL LIVER, SIGNAL = 1.6; EXPRESSED IN PLACENTA, SIGNAL = 2.2; EXPRESSED IN HELA, SIGNAL = 4.6
tgttttggcttgctcaacagcaatgttagatatctcagaagtggtttaatccttccagcaccaaatggtccaaattgacttagcatgctttgctgcagtggttgacatgtgctcttttgacagccactgtctggtggacttattatacttatacacatcaaagatggaaaaggcatgtgactcagctgcatgagctcagggacctgatcatgctgcatgagcttctgtatcagtcagagcagctccttctgatggggagcctaagagtggacagtcctttttagcatcaatcctggctactcagtgcttatggttctgtccctcaggcttttgtcattgcgatcacctccgactttatcccccgcctggtgtaccagtactcctacagtcacaatgggactctgcacggctttgtcaaccacaccctctcctttttcaacgtcagccagctgaaggaggggacgcagccagaaaactcacagtttgaccaggaggttcagttctgcaggtaaagtaatcttcaggagaagggcagcagaggaccagaagcaatagatcca

SEQ ID NO: 9351 - DNA, 573 bp, Homo sapiens
  MAP TO Z83844.5; EXPRESSED IN FETAL LIVER, SIGNAL = 2.9; EXPRESSED IN ADULT LIVER, SIGNAL = 2.3; EXPRESSED IN HELA, SIGNAL = 2.5; EXPRESSED IN PLACENTA, SIGNAL =   5; EXPRESSED IN BRAIN, SIGNAL = 3.7; EXPRESSED IN BONE MARROW, SIGNAL = 2.6; EXPRESSED IN LUNG, SIGNAL =   3; EXPRESSED IN HEART, SIGNAL = 2.2
agtccaggaggaagtctgagcctcagtttctcatttttacaacggggatggtctgcctgctttgtggggtggtggtgaggctcacacgggagtggggaagctgaacatggtccagatgggttcaggggaaggggaaacggtcccggccagtggagtgaggagcctggcgcggtctctgagagccgtctccgctccttctgtctccagacatcaacttcaacgtgtcaggcctcttctcagctgttaccctccaggacacagtcagtgacaggctggcctctgaggaacttccgtccactgccgtgcccaccccagccaccaccccggctccggctccggctccagctccagctccggccccagccttggcttcagcagctaccaaggaaaggtgaggactgaggggcttgaatggctcctgtggtactcccacaatcagcctgcctgaggcgccatgtctcagagctggaagctgaatttttggaaatgtaattattagtgttttcatcccaaagaccggatctcctagtttggagagggtggggcagagactcagaggcggaatttgtctca

SEQ ID NO: 9352 - DNA, 571 bp, Homo sapiens
  MAP TO AP000353.1; EXPRESSED IN HEART, SIGNAL = 1.3; EXPRESSED IN FETAL LIVER, SIGNAL = 1.8; EXPRESSED IN ADULT LIVER, SIGNAL = 1.9; EXPRESSED IN HELA, SIGNAL = 1.6; EXPRESSED IN PLACENTA, SIGNAL = 2.1; EXPRESSED IN LUNG, SIGNAL = 1.6
ttggtatgaaaccttgggttgacttttagtatttgaaatcagggtcattttaaataggctgtgccaaccctttcagacacacaagatctgaaaggagcagaaaatgggccttgggccttgagtcccttttggtggctctcatttgaagagataacacatccctggactccttcctgtggtgctgcccccttggtagtgggcgggaaccttggcaagcacctcccccacctgcttgcttcacaggccagttgggcatctcatctctgtgtacatagcccctgcctctccagctctgccacagcagcccaccccagcatcatgacctgcaggtggcacccaagactgtggtgagccccattagcagagccttcctcagggccacttaggtaccttgattaccccttaaacaagggtttgtctagaatcaccacaatgccccccagggccagtaccaatctctgctctctggttttttagatggttggcagttccagattctcacatctgtgtctgagaggctcaggaagggcctggcaaagtgtagtcagcagccttttgtccctgccaggtc

SEQ ID NO: 9353 - DNA, 568 bp, Homo sapiens
  MAP TO Z82188.2; EXPRESSED IN PLACENTA, SIGNAL = 5.2; EXPRESSED IN LUNG, SIGNAL =   6; EXPRESSED IN FETAL LIVER, SIGNAL = 9.3; EXPRESSED IN ADULT LIVER, SIGNAL = 8.8; EXPRESSED IN BRAIN, SIGNAL = 8.1; EXPRESSED IN HELA, SIGNAL = 5.3; EXPRESSED IN BONE MARROW, SIGNAL = 8.1; EXPRESSED IN HEART, SIGNAL = 3.9
gatgggtcacagccaaagtcggggccacagggcccaggccaggagagctgagtctctcaaagccttgggctgctcctctgtagaatgggaaggctggacaggaggcccccttccagctagaacatgctccagggtgagcctgtaggctggaccctaagatgtggctgctggcaggcatgacagattgacaaattggacctgtccttttattttgtgtttttttaagagacagcgtcttgctctgtcacccaggctgactgcagtggcaccattatagctcactgcagcctcaaactcccgggctcaggcgattctcccacctcagcctccccagtagctgggactgcaggcgcatatgccaccactcctggcttaaaaaaatttttttatagacataggttctcgctatgatgcttaggctggtctcaagctcctggcctcaagcaatcctcccatcttggcctctcaaaatgctaggactacaggcatgagccactgcacctggcctggacctgtcattttacagatgaggaaactgaggcccccaggggacaagacagcctgaagt

SEQ ID NO: 9354 - DNA, 588 bp, Homo sapiens
  MAP TO Z82201.1; EXPRESSED IN LUNG, SIGNAL = 1.6; EXPRESSED IN BONE MARROW, SIGNAL = 2.1; EXPRESSED IN HEART, SIGNAL = 1.6; EXPRESSED IN ADULT LIVER, SIGNAL = 1.6; EXPRESSED IN HELA, SIGNAL = 1.6; EXPRESSED IN PLACENTA, SIGNAL = 1.9; EXPRESSED IN BRAIN, SIGNAL = 1.9
gtagctgccaaaagctggacatggaaggagtggggaaagtggcagagggaggaggagaagaagtgaggtcacagggcaaaatgtcaacctgaaacctggagagacaggcacatgcagagaatcacagctggggcctgctttcctggagcaaaagcctttggaggcacaggctggcaggaatactcacatggtaatcttggcaaattcgtagaggctgagtgtggactagtgtaagagtaagaaattctgggggcccagtcttacgtacctccccacccccaccaccactttcatgggctttaacttcaggagtctcactagcttctcacagtgaagatctgagaaagatcccctcagggttctggcaggggaaggggaagagcaatcctggtgcaatatgtccccagccttctctataacaactttccaagggaaaagactttctgagagccttatcttagctttaggggaagggcaatcagccaactccagccccatctagcattcctgttttacctaagtggaaaaaaaacccaataaacatttctaaatgttgtagcccatggactcagcccactaaaagacaga

SEQ ID NO: 9355 - DNA, 546 bp, Homo sapiens
  MAP TO Z83840.7; EXPRESSED IN HELA, SIGNAL = 2.6; EXPRESSED IN PLACENTA, SIGNAL = 1.6; EXPRESSED IN LUNG, SIGNAL = 1.9; EXPRESSED IN BONE MARROW, SIGNAL = 1.3; EXPRESSED IN HEART, SIGNAL =   3; EXPRESSED IN FETAL LIVER, SIGNAL = 1.9; EXPRESSED IN ADULT LIVER, SIGNAL = 1.5
cacaactgctttcaaatggctcagcaaaaataaaattcacttatagagtgaaaaagaaggtaaatgtggcaaaatgttaacaattggtgggtctaaaaaaaattcttagcccatcagctttagcatctaatgccaaagtcctcccactggttgtagtcgagagcagctagccctcctcccaaactggaaatcagatcagaggccccagatggaaacaggtgcctttaacattcccccagagcatcctgtggctgccttaccctcattggctcctttccgaagctgcttatagttacatgactgctgaacgaggtccagtagcttcttggtgaggtgggcatcggcaaggggataggcctttggattcacatcagcctcagtctatgggggggacataaaaatatcagacaaattgagccagaagttttcctacctgagtcacaaaatactaatcaacaattgagacacagggggcagctgccctgctccctaaccctcaaacacacaaaacaccaggtagttaacaatggactttccactcctacc

SEQ ID NO: 9356 - DNA, 599 bp, Homo sapiens
  MAP TO Z95114.19; EXPRESSED IN PLACENTA, SIGNAL =   4; EXPRESSED IN BONE MARROW, SIGNAL =   3; EXPRESSED IN LUNG, SIGNAL = 3.7; EXPRESSED IN FETAL LIVER, SIGNAL = 5.5; EXPRESSED IN ADULT LIVER, SIGNAL = 5.8; EXPRESSED IN BRAIN, SIGNAL = 1.9; EXPRESSED IN HELA, SIGNAL = 2.8; EXPRESSED IN HEART, SIGNAL = 2.2
cagaaaacagggtttgagggtagagaaccggtctgaccacaaatttaccagggtggactttttccccaccctaataagcctgagggtactgcaggagaccagggcatatctcagtccttatctcaaccgcataagacagacatccccagagcggccgtttatagacctccccccagaaatgcattcctttcccagggtattaatattaatattccttgctgggaaaagaatttggcaatatcttccctacttgcccatctgtttataggctctctgcaagaagaaaagtatagctctttttgcccgaccctgcaggcagtcagaccttatggttgtcttcccttgttccctaaaatcgctgttattctgttctttttcaaggtggactgatttcatattgttcaaccacacatgttttacaatcaatttgtacagttcacataattatcactgtggtcctgaggtgacgtacatcctcagcttaggaagataacaggattaagagattaaagtaaagacaggcataagaaattataaaagtattatttgggaactgataaatgtccatgaaatcttcacaatttatgttcctctgctgc

SEQ ID NO: 9357 - DNA, 579 bp, Homo sapiens
  MAP TO AL022328.21; EXPRESSED IN ADULT LIVER, SIGNAL = 4.2; EXPRESSED IN FETAL LIVER, SIGNAL = 5.2; EXPRESSED IN BRAIN, SIGNAL = 2.4; EXPRESSED IN PLACENTA, SIGNAL = 4.1; EXPRESSED IN BONE MARROW, SIGNAL = 5.1; EXPRESSED IN HEART, SIGNAL = 2.8; EXPRESSED IN LUNG, SIGNAL =   4; EXPRESSED IN HELA, SIGNAL = 3.2
agggtctgggagacaccaggtgtccgcttcacctgtcccctcccgggggacactcgctgtgccctggtgtctaggtttctactggggttggtcacaggcacgtctgagctcagaccccagcccctccagaggtggagtgggtcccagtggaccaaggcctcgtgaatgtctcatcctaagttagcctgggctccccagggtggcctgggccccggggaaacacgggcactccatcaggcgggacattcccagggctcatggctcaggcccagaccgtccctgggcgcgtgcaggtgtgagcgattgcccggcgctgtgtggcccccggggctttgctgcccttctgtgggcatcatctccttcacacgtggacacccccgtggtgccagccggccggtgagacaggggcaataggcctcgggctgtagctgctgaagatgggggtggcctggtgtccgcaccagcagtgctgtgctgacctcagcaggcaggtgtgagtggtgaggccctttctccagcctgcctgcccagcacccagcgtctgtgccagctcaaggcggccccttcgcagaacgagac

SEQ ID NO: 9358 - DNA, 578 bp, Homo sapiens
  MAP TO AL031588.1; EXPRESSED IN PLACENTA, SIGNAL =   7; EXPRESSED IN HELA, SIGNAL = 5.2; EXPRESSED IN LUNG, SIGNAL = 8.3; EXPRESSED IN HEART, SIGNAL = 4.9; EXPRESSED IN BONE MARROW, SIGNAL =  11; EXPRESSED IN ADULT LIVER, SIGNAL = 9.6; EXPRESSED IN FETAL LIVER, SIGNAL =  11; EXPRESSED IN BRAIN, SIGNAL = 8.6
tcacagatgaggaaactgaagcacagagtagatgatgggagggccgggtttaggcggagccatggacccagcatctctcacccacccgtgtatccgctgctctgggacgtgccatccgagggctgtcgcgttttcctgccgtgaccatccccggcccccaccttctccctgtcttatccaggcgcttccatgctctgtcccccaattcagccctctccccaccttcaccttatcacacagatactgagcatgtcaccccttagtgggatgcaggccaggagggagggaggctggtcagaaaggtcatcagggcaagaagaggcagggggactaaggaagggggtcccgcgggcccagatcgaggacagagaggggactattaggtctttacaggagcaggccatgactttgtatgagcatgtgttagtgtgcaagactgtgtgcaaggtgagtgtgtacaggtgagtatattgtgcaagcatgagcacgagtatgggtgagcatgtgtgcacacaagtgtgtgctagtatatctgtgtgtgcacatgcaagtatgaatgatgtgagtgggtgtgtcca

SEQ ID NO: 9359 - DNA, 568 bp, Homo sapiens
  MAP TO AL031587.3; EXPRESSED IN BRAIN, SIGNAL = 4.1; EXPRESSED IN HELA, SIGNAL = 3.7; EXPRESSED IN PLACENTA, SIGNAL = 2.9; EXPRESSED IN BONE MARROW, SIGNAL = 2.9; EXPRESSED IN HEART, SIGNAL = 2.6; EXPRESSED IN LUNG, SIGNAL = 3.4; EXPRESSED IN ADULT LIVER, SIGNAL = 2.5; EXPRESSED IN FETAL LIVER, SIGNAL = 2.8
tccattaccaggtctgaggcttggtcaggttagctgactttccaagcctctgaaatgagaactgtaatccctgcctcataaggttattgtaaggattacatgagttgttaggaagcagttatgtggtcccctggcatgcagtaagcattaacggtggctgtagcgagaattgtgattgttgtcattatcactctccctgtaacccaaaagtgccacctgagtctttccctcttttttgtcttggtgtccaggaaggccaggagaatgtcgagatcctcccctctggggagcgaccgcaggccaaccagaagcgaatcaccacaccatacatgaccaagtacgagcgagcccgcgtgctgggcacccgagcgctccagattgcgtgagtgattgccccttcactgtcttctccatctgtcaggccacagtaagctcttgtaccgctgatctttcccagcctggcacctgaaaacagactctctgctctcacattccaaaagtggtgccgtccctgcgtaccaggcattgagctagtcccctgccctcagggagcttgtgatctaatagg

SEQ ID NO: 9360 - DNA, 555 bp, Homo sapiens
  MAP TO AL022328.21; EXPRESSED IN BRAIN, SIGNAL = 2.8; EXPRESSED IN PLACENTA, SIGNAL = 2.5; EXPRESSED IN HELA, SIGNAL = 2.2; EXPRESSED IN HEART, SIGNAL = 2.1; EXPRESSED IN LUNG, SIGNAL = 2.6; EXPRESSED IN BONE MARROW, SIGNAL = 5.2; EXPRESSED IN ADULT LIVER, SIGNAL = 1.9; EXPRESSED IN FETAL LIVER, SIGNAL = 2.1
cctggcacttcaggacggaaatggaaatgcggggaggaacattttctatcgctttgctgacagcaataaacatgttatttctctgcagttttttaaaaggacattaataaattaacactttttagaaccgaaatgggatgatgctggctgtcatcactggtggccctgggagctggccttccctgccactccccactccctgcactggggcttgttctgccccataaagggctgggcactgcgtggtggagggcaggccagccccacaccactgtggcggggagtgagcagttctcacctggcagagcgaaaacgtggcagacacgaccccaatcaagacgttcagcacgtctttcaccagctcgcactccttcaccagcacgggctgcggggcctgtaggacgcccccagcaagcagctggagctccccttggtggagcctgcagaacttgtcgaaagcgtcccttcccgcctccgtcaggtaaggctcctctctgtggccaggggggctgcgaggggtgcagaagagaggccatgagcagacgtggtgacctg

SEQ ID NO: 9361 - DNA, 585 bp, Homo sapiens
  MAP TO AP000356.1; EXPRESSED IN PLACENTA, SIGNAL = 3.6; EXPRESSED IN HELA, SIGNAL = 6.2; EXPRESSED IN LUNG, SIGNAL = 7.9; EXPRESSED IN HEART, SIGNAL = 4.7; EXPRESSED IN BONE MARROW, SIGNAL = 6.1; EXPRESSED IN FETAL LIVER, SIGNAL = 4.4; EXPRESSED IN ADULT LIVER, SIGNAL =   4; EXPRESSED IN BRAIN, SIGNAL =  10
tctctctgaggggacagagccactgcagtgtgtccctctgccctcctttttggctaaggccagctccttcatctactcgctggctcggggtgctgttcctacaatgctcctttctgcctctgatgatttacttctttatcacggcttattcccgaaagaaaggcagctgttgttgctctagaaacttctatctgctgcctccttctgtcctttgctcctcttagagcaaacatggctgggctatgtcctctctcccttcagggtatcccctcccctgctctatccccatgccaccagatcgccatgtccagcctcagtttccccatcaggccccactcagcagcatctcacacagctcaccacactctcctcgagttttcattttgcaaattttcgcacctacaaaaatgtaaaaaaaccccaaaactgcccaagcatcaatgctcccttttcctggagtctgcagtgtggatgtttctgtcggatttcctaactctctccgtctccacccacatctattgggattcgtgtttttctgagggattccacagtaggttactgatgtcgcacctcagggtgtgtctc

SEQ ID NO: 9362 - DNA, 575 bp, Homo sapiens
  MAP TO AL022329.9; EXPRESSED IN BRAIN, SIGNAL = 2.6; EXPRESSED IN PLACENTA, SIGNAL = 3.8; EXPRESSED IN HEART, SIGNAL = 2.4; EXPRESSED IN FETAL LIVER, SIGNAL = 3.6; EXPRESSED IN HELA, SIGNAL = 2.6; EXPRESSED IN BONE MARROW, SIGNAL = 3.4; EXPRESSED IN LUNG, SIGNAL = 2.5; EXPRESSED IN ADULT LIVER, SIGNAL = 3.1
acaccggatcaggagctggctgagctgtgctaactttgacagtagcgatgtgctgcgagcacagacatggcagaaccaattctaacctggaagtgtagggttgacatcatgtgggagatggtctgtcgggtaggctttgaagataggtaggatgacaatacaaagcctgggagcaggggaaataccagctttctatgtttcttaagagggaaggagtgctgagggagaagtctcagatggttgggtcagcactgggaggacctcggatgcagtgctgggaagtttgacctttatcctccaggccccgaggctgaaagcttttcagcggagcagtggcagggttgggtggcttttcagtaagatgattctggaagcagcctggagcaatggaggaaccgagacaggaggcaggcagaagaatgtgagcaaaaggcagtgagtttgcgcagcagccctggaacctgacaggagcaaatgacatggcggcattgcagagttagcttctgtaacgcttcagtgttttcgtggagtgtgttttgtttttgtttttttatagatggttggatatggaagga

SEQ ID NO: 9363 - DNA, 558 bp, Homo sapiens
  MAP TO AL079300.11; EXPRESSED IN PLACENTA, SIGNAL = 2.6; EXPRESSED IN HEART, SIGNAL = 1.6; EXPRESSED IN BONE MARROW, SIGNAL = 2.3; EXPRESSED IN LUNG, SIGNAL = 1.8; EXPRESSED IN ADULT LIVER, SIGNAL = 2.2; EXPRESSED IN FETAL LIVER, SIGNAL = 2.6; EXPRESSED IN BRAIN, SIGNAL = 2.2; EXPRESSED IN HELA, SIGNAL =   2
tcttggcagtgaaagtggagttttggtgagctcagttttaaatatgttaaacttcgtgtgtttggggacatccaaagagaattgtccagaagctttttaaactctgacctggagccctaaggagataccaagaaacctctgcgtaatgttaggattcttatgagtgtagatgacataaaacccatcaacctggccagagtaagaaggagcatttattgtttcctgtagctgggaaaccaaaaaggaaaatctagcttcaggcattactagatccaggaattcaaaaatgatcatggggatttggttccccaccaacctctctgctctgctgtcttctatgttggtttccttctggggcaacaagatggcggctaacagctccaaactcatgcctgcaccattctgagtccagtagtaaagagaatttctctcttcttcacagttttcacaaaaaatgcaagcctgagtgagcctgaaccagtcagaatggacaaggggactgaaggagcctcttacctttggcctaagtcagtcttctcacctggctcttggaaattc

SEQ ID NO: 9364 - DNA, 574 bp, Homo sapiens
  MAP TO AL031588.1; EXPRESSED IN ADULT LIVER, SIGNAL = 2.9; EXPRESSED IN PLACENTA, SIGNAL = 3.4; EXPRESSED IN HEART, SIGNAL = 3.7; EXPRESSED IN FETAL LIVER, SIGNAL = 2.4; EXPRESSED IN BRAIN, SIGNAL = 3.8; EXPRESSED IN HELA, SIGNAL = 3.1; EXPRESSED IN BONE MARROW, SIGNAL =   4; EXPRESSED IN LUNG, SIGNAL = 3.9
actgttcccatggtcctgcctccgcggcagtgaggctgctcttcttacagccaggtggctcttgtcttcggtgtagggggctggtgaggaacacggtggggagcagcctgcgagggcgctgggctttcagcactcacggcacctgctgtttggtttggccaggatggcctgggagcccccagggctgggcaaaggctgccctttacagactcatgggcagagggaaccgtcttacccctgccccttctctgtcctctccgcagcgttggtgggacgggagggtggtctgcccggggctgcgagctcctgtccaggaaccggacacatgtcgcctgccagtgcagccacacagccagctttgcggtgctcatggatatctccaggcgtgaggtgggcatcctcccgtggccactgtgccctctgggcctaccgccaaacctgcccctcccccccaaacctgcacctccccgccaaacctgcccgtcctcaaacctgctgagcctgcccccaaatctgtcccctcctcaaactaaatcttccattctaagtgcttggaacaaaacaaatcaaccga

SEQ ID NO: 9365 - DNA, 559 bp, Homo sapiens
  MAP TO AL022328.21; EXPRESSED IN HEART, SIGNAL = 1.5; EXPRESSED IN LUNG, SIGNAL = 1.2; EXPRESSED IN HELA, SIGNAL = 1.3; EXPRESSED IN BRAIN, SIGNAL =   2
agctcctgctctccactcagccccacagccttcccgtggcaagagctccgcagcttctcctgtgggggctgagccacgcaccgggcagtcgcatctgacgactcctttctgcaaaatccccaccccgtccatcagcaacgctgtggactctctgcccctgtacctcccttgtcacaccagggcacacagagaaggaagagccaaacaggcacccgccaggaggggctgctctgtagctgggaacctcactgagtttgcagcaggggccagaagtgtggcgagccattctagagaccccatttttttaatggtgcttcggactgggaagtggcatgaggcaggtttaccttctggaaagaggttgtggagaggcagggaggagaatcaagcctgtagcatcagtagaagaaggggaagtaagtgggtccatttttagggaaaggtaaaatctcatcttctcattttctaaagagaaaaacttctcatttcattgttttcaaacacttcaaagcaacaaaactctttccaaagcaagtttagtggagccctaataggcaag

SEQ ID NO: 9366 - DNA, 561 bp, Homo sapiens
  MAP TO AL079300.11; EXPRESSED IN HEART, SIGNAL = 1.3
aggagagccctcccacttagatgtcctcaaatgaaatgcggagtgcatgtctctgtttcagctttgaactgtgtctttcaggcatcctgggtttgaactgggtcgccaacatcctccctgggagcagctgcaggggtttctgaaaggatgacctctttttagcacagagattattcaaggtgcttagaaacagtgggatgagttcagaaatcagttcttgctacttctttacctagggaaaccaaggctgggagatggaaagcaattggtatggggttgctaagcagaacaacaacagagccaactgtcatctgcccacctttccacagcacctggagactgtcatggctatttctgtatatccactggtagacaaagcagttagattgcaatagatttgggataatcacacaaaaaatgacagagcgctcacttagtggttaagctccttcatgacacccttcatggctcacaacacaaaaattagaatacagaagataaatatgttagctaaggtttcttgaccactgactagataccaagagctctcctaaatgtttt

SEQ ID NO: 9367 - DNA, 545 bp, Homo sapiens
  MAP TO AL031588.1; EXPRESSED IN BRAIN, SIGNAL = 2.5; EXPRESSED IN LUNG, SIGNAL = 3.2; EXPRESSED IN HELA, SIGNAL = 2.6; EXPRESSED IN PLACENTA, SIGNAL = 1.8; EXPRESSED IN BONE MARROW, SIGNAL = 2.8; EXPRESSED IN HEART, SIGNAL =   2; EXPRESSED IN ADULT LIVER, SIGNAL = 2.1; EXPRESSED IN FETAL LIVER, SIGNAL = 2.5
aggaagtgaggatggtgtgggccctccccgccggccccctgggtccccagtgttcgctgtgtgtgcgtttgtcctctgctgccatctgccccggctgtgtgaattcaagacagggcagtgcagcactaggcaggtgtgaggagccctgctgaggtcactgtggggcacggttgccacacggctgtcatttttcacctggtcattctgtgaccaccaccccctcccctcaccgcctcccaggtggcccgggagctgcaggtggggatggctttgtcctttgctcctgctccccgtgggacctgggaccttaaagcgttgcaggttcctgatttggacagaggtgtggggccttccaggccgttacatacctcctgccaattctctaactctctgagactgcgaggatctccaggcagggttctcccctctggagtctgaccaattacttcattttgcttcaaatggccaattgtgcagagggacaaagccacagccacactcttcaacggttaccaaactgtttttggaaattcacaccaaggtcg

SEQ ID NO: 9368 - DNA, 574 bp, Homo sapiens
  MAP TO AC009266.1; EXPRESSED IN HEART, SIGNAL = 1.3; EXPRESSED IN LUNG, SIGNAL = 1.5; EXPRESSED IN BRAIN, SIGNAL = 1.3
  unsure 434
  unsure 456
  unsure 486
cgaggtatccagagagatggcatttgtgtttcatataataagctactggaaagaagaatggaagtgttgtcataatgtggaaagactctgctttccagatgctggctcacttatgaattctaataggttgactgtagatcattttggatattcttggtgcactcaaatgttttctgctaatagtgacagttttatttcttttttttgcaattcttaaaaaatttatttttatttttatttttattttttggctagtgtactgactaggatcaccaacataaggctgaaaaaaagtggagattgcagacatacattctcttatgaaaacaggcattcttgtcttatttccaatgctagaaacaacattattaatatttcatgattatgaatatttgttgttttagatatttctgatattagagaaattaccctgncatttcttgttttcaaagcacnttttattataaattagtgttgaattttaangagaagtttgttctgaatctatggagataagcctatgattattctttttcatgttatttatattaacttttcatccttgaaattcagg

SEQ ID NO: 9369 - DNA, 558 bp, Homo sapiens
  MAP TO AL022319.2; EXPRESSED IN LUNG, SIGNAL = 3.3; EXPRESSED IN BRAIN, SIGNAL =   3; EXPRESSED IN HELA, SIGNAL =   3; EXPRESSED IN PLACENTA, SIGNAL = 5.8; EXPRESSED IN BONE MARROW, SIGNAL = 3.3; EXPRESSED IN HEART, SIGNAL = 2.5; EXPRESSED IN ADULT LIVER, SIGNAL = 4.2; EXPRESSED IN FETAL LIVER, SIGNAL =   3
agtcctgttgcaaaccgttgaagggcacaaaggtggaggagggagaggctttgtagacagtggtttgggagtaatgaggaataatgggctgaaacagagccggatagcaggaaagctggcttggctgtgaagtctgcatgagctggaagccagcgctggcagcgagggatagggccgtgatcttgaatcatggggaacctgactggaccaggcgtgggaggcagaatgggatttggcccaagactattcgtctgcagccaccttgggctatgcggtcaccctgctgtccctggactgcctaactcaggtgggtcagaagttggcctatgttcccactctagtggggcacctgcaggctgcctgtgggtccggagtggccaggaggggttggggccccaaagagtgactggctggaggaggaaagctgcaggtgtggcctgggccctgggctccaggcaggctgagaccccattgcacagtggggcacctgaggccacagtgtgcagggcagggatgccaacgccacaagggccagttccagagcccagctttctgttt

SEQ ID NO: 9370 - DNA, 577 bp, Homo sapiens
  MAP TO AL035682.16; EXPRESSED IN BRAIN, SIGNAL = 2.6; EXPRESSED IN PLACENTA, SIGNAL = 1.6; EXPRESSED IN HELA, SIGNAL =   3; EXPRESSED IN HEART, SIGNAL = 3.2; EXPRESSED IN LUNG, SIGNAL = 3.7; EXPRESSED IN BONE MARROW, SIGNAL = 3.5; EXPRESSED IN FETAL LIVER, SIGNAL =  24; EXPRESSED IN ADULT LIVER, SIGNAL = 2.6
agatctcatgtgggtgggacccttgtagggtcactcaccacaaagattcatgcagatgcagatttcaagcccttccctgctttgctgtgccctcaagataccgtggaagcttcactgtggccctcaaggccctgcacaacctggctcctaccctcattcctgcctctccaggcactattcttacccctgagtcttatgagcgctcactacatgcctggcatcactctaagcacctcgtatacatgggcttgtctcatctgtacagcacccataggaggcaggtctcctcaccccatcctacaggggaggacaccaggcacagagaggcaagagcacaggccaaggtcacacagccagaccctgtggggaagccggattggaacccaggcagcctggcctcagagtcagcactccttatgcagtttcagatccctgtgccttgcagctcctccatctagttcctctcctctgagttccagccacagcaaccagcccttcctcgggacgccccaaagtgaggcggtgagccgccacatcccacagcctccccagagcctggtaagtgtgggtcacaggg

SEQ ID NO: 9371 - DNA, 575 bp, Homo sapiens
  MAP TO AC005006.2; EXPRESSED IN FETAL LIVER, SIGNAL =   5; EXPRESSED IN ADULT LIVER, SIGNAL = 7.2; EXPRESSED IN PLACENTA, SIGNAL = 3.3; EXPRESSED IN BRAIN, SIGNAL = 5.8; EXPRESSED IN HELA, SIGNAL = 6.1; EXPRESSED IN LUNG, SIGNAL = 6.3; EXPRESSED IN HEART, SIGNAL = 4.5; EXPRESSED IN BONE MARROW, SIGNAL = 6.4
cttaaatgtttagacttgggttccatctccaagatatctcattacatatatgcatatatttcaaaatctgaaaaatctgaaatccgaaacacttctggtcccaagcatttcggataagggatactcaacctgtaccagctgaccctccatcacagggtgctgtgcagatcctctgcattccacagggaaagcacccagcccgaggctggtgcagagcagacagtcactcagcagggcctgccatcattgttatcatcattatcatcattacgttcccagggtcccagccacaaccccatcaaagtgtgtgcccactggcccacgatggaggcttgcaggcagccaagtccagggatgatctcaatgtagccagagactcctagcctcagggtcagaagacaaagaggcagggaggctcagactcagagagggcaaggatacctttggggtaacacagcccagcagcagcagagacaggactagaacctgggtctcccacctcctccacccacagtagtgacaactgcaggcactcaggatggacggtccccccgtcaccagcccactccatctat

SEQ ID NO: 9372 - DNA, 559 bp, Homo sapiens
  MAP TO AC007539.8; EXPRESSED IN HEART, SIGNAL = 1.3
tgttcagtccgagctgtgtcacttggcacttttcagtgtgttgctttctaataaggtcatttcctgcatatgtgtttagtgtcccctgctagactgatagttctcaagggacaaggccatcccccccaccccaattccttgaaaatgtgtgtgtgcaccctaggataacattggcaccatttgtcagtcatgagagggacagccgtgagtaccttcctgtcctagctctctcaccctccatgggcagacctgaccagggtggagtagaagctggggaggaaaacccgcacgctcacatggcggtctggacctgcacagctgacaaaagccctttcacgtccacttttccatctcactgtgcccacctccaggaggcggagcaccttgcccatggccacacagctggcaggccactgaggcaggtttgatttcctgtcttctgaactgacatcaccatgctttcagatatcctgaggctgactgactcctgccttattgtcttgagttctagccagttctctggcccaggaccctaccctgtcagcagaagcaggactcc

SEQ ID NO: 9373 - DNA, 556 bp, Homo sapiens
  MAP TO AP000353.1; EXPRESSED IN HELA, SIGNAL = 1.5; EXPRESSED IN HEART, SIGNAL = 1.5
cagcccatggtaggctctgggcctgggggaggggagatgctcttatggcttttctttgccaacaccactgggggcagcgatgcaggggagggagaagggcaatggctccaggagaaggagtgatggtggagaggcaaggacactgagggagagcagtggggtgggctgcaggggagcagggagggaaggtcagactaatagcaggtggctgaggggaacatagggagtgaatgctcagattctttcctcaacgagaatagtgatggtgggcaacctggccacacacctgatgtctgcagataggcttcgacttagcatgcggagaactgggggccttggttgttgctgactcggccctgccccagcaggccccagctatctccaggctgctactacagtagggagagggctcagccatcgcataccacctcagagctggtgctgctggctgcttctctggcctcctccaggcaggctgtgcagggcgtgccgtgctcctgagtgcctaaggagccacagaccacaggaccccttgcctttatcccttgctccccag

SEQ ID NO: 9374 - DNA, 572 bp, Homo sapiens
  MAP TO AL021707.2; EXPRESSED IN HEART, SIGNAL = 1.3
ctaacctactccatgacaatggcattaatccattcatgagagcagagctcacatggcccagtcaccccttatactgttaaacaatggcaattcaatttcaacatgagttttggtggggacattcaaaccatagcaccaggatcgttagtagccacatgataaaatgtatgtcttcaagatttgaagacaatggcataaggtcagtgatccagctgcttgtacccctgactttttctgaccctaggagaagggagcactggctttgctttcatcaggccaaagatgcctttctttgggaatacgttcagtccgaagaagacacctcctcggaagtcggcatctctctccaacctgcattctgtgagtgtcggtactggggtcggccgggtgtgcagcatgagttgagtgctgagcgtgtctctgaatggaaagtgtggtcctccagaggcatcagtgcaggagggcatcctttccgtccatatcattgctattgcggaaaacatttttgaactcttgtttgggaatgatcgtcagagcttgtttatccaagaacctaagaagacaatctcatt

SEQ ID NO: 9375 - DNA, 559 bp, Homo sapiens
  MAP TO AL022328.21; EXPRESSED IN LUNG, SIGNAL =   3; EXPRESSED IN ADULT LIVER, SIGNAL = 3.3; EXPRESSED IN FETAL LIVER, SIGNAL = 3.7; EXPRESSED IN PLACENTA, SIGNAL = 2.5; EXPRESSED IN HEART, SIGNAL = 2.7; EXPRESSED IN BONE MARROW, SIGNAL = 5.4; EXPRESSED IN BRAIN, SIGNAL =   2; EXPRESSED IN HELA, SIGNAL = 2.2
gcctgtgcagctacacttacctgtttacaaatagtagagcacttgtgggaactgtttgaggaaaggatcccagagctaaaacgaaagcttcaaaccactgccttagaccagctattcatatatcagttcttctcaggaaatggatggactttggtcttcctaaaataggaaaggatgtttaggtaagaatgtctagtgatacctggtgataaagacttatttttaacttgtgaacttaattttttaaggaactcaagacgacaacttccaagttttcttccccaatatccaatcccagatagacttagaaaatgtgtggaacaaaaaattgacatcctgactttccagccattacttgcagaggtaggaagtgtctcatggcctgtggggtgttggcatcttctaatgctcttgttttctgacaaagccaggaggttccttctcaggttcagaccttcatctggcttgttttcttcacaggtagctgggataacgagggtcactgcctggccgtgagggatgaggcaccatagcactcacgctgccagacctgctgtac

SEQ ID NO: 9376 - DNA, 591 bp, Homo sapiens
  MAP TO AL031588.1; EXPRESSED IN ADULT LIVER, SIGNAL = 4.9; EXPRESSED IN FETAL LIVER, SIGNAL = 4.9; EXPRESSED IN BRAIN, SIGNAL = 4.2; EXPRESSED IN PLACENTA, SIGNAL = 2.7; EXPRESSED IN BONE MARROW, SIGNAL = 8.7; EXPRESSED IN HEART, SIGNAL = 2.4; EXPRESSED IN LUNG, SIGNAL = 4.3; EXPRESSED IN HELA, SIGNAL = 3.3
ctagaaaaagcgcaggatgcctctgagaagcgcggtgagttcagaagtctgggcgtcatgtcctctcatcctgtgctgcacggttcatgcctttcttccaggtgtggaaacattcactgcagaagttccttccacagcgtgcctgacagccagccacctaggggctccctaaaaagctttcgtgacagcttaatgctctccaaaggcaagccttcccttcctgaacagctgcctgcgcctccacctcagggaactctttctcctgccagtcctaactgtctgctggtgtcacacaaagaatgtcatcctaactcacacgcttgaccactgccactacgacccaaagtaatttcaacagttcagggaggacatatttccagataccctgaaaataaaaatcaattcacattctatcagtctatcactcttttcctgaataactaatacggtctaaccaggacggaccacaggggacgcatcaccccttcctagacattctatgatcatcaaggtgagctccgtctgtgctggctctgacaaaagacatcacactactggctcagtcagcctgggggcacctaaatcccccag

SEQ ID NO: 9377 - DNA, 580 bp, Homo sapiens
  MAP TO Z97055.1; EXPRESSED IN LUNG, SIGNAL = 1.4; EXPRESSED IN HEART, SIGNAL = 1.5; EXPRESSED IN PLACENTA, SIGNAL = 1.5; EXPRESSED IN HELA, SIGNAL = 1.5; EXPRESSED IN BRAIN, SIGNAL = 2.5; EXPRESSED IN BONE MARROW, SIGNAL = 1.7
cttcacagactccctgacgctgatgtgtcacccacgccctcatcgggttccaggtcactgccagctcaggcctgccagcttctcccctggctatctggggctatctgctctcccctaatccacagagcccccaggagcaactgtcaatcatcagggtgtaacggtagaaataccctaaagaggtgctgggacaggtgctgctggccctgggtaccttgatgatgtccaggcccggctgtgggtactccaggaccgggagctgctcgtcgatgttcatcaagccgatctcatcggggtcagcgccctggctcaccaagtagaccacctcctgcagcaagctggtgcctggaggggagaagccccagcgcggggtgctcagaggaggcccacgcgcccggccctgtgctcgggtcaacacctgctgcccaagaaggggctcaagagccccaggtggggcccagggcgactgagtctgggaagaggagcgcgccccgcacggtctcagcctgaatcccccgtgctgggtcatgggccagtcggctctgattctcagaggggccaggatgcttcacagggctgt

SEQ ID NO: 9378 - DNA, 580 bp, Homo sapiens
  MAP TO AL031588.1; EXPRESSED IN FETAL LIVER, SIGNAL = 3.2; EXPRESSED IN BRAIN, SIGNAL = 1.6; EXPRESSED IN PLACENTA, SIGNAL = 2.4; EXPRESSED IN HELA, SIGNAL =   3; EXPRESSED IN HEART, SIGNAL = 2.5; EXPRESSED IN LUNG, SIGNAL =   2; EXPRESSED IN BONE MARROW, SIGNAL = 3.9; EXPRESSED IN ADULT LIVER, SIGNAL = 3.1
gcctcactgactggagaaggcagtggctggagctcaggaggctgaggtggctgcaatctgagggccagaaactagagaggagggggctactccgacagaacgagctctaggaacccaagggaatctcgagtctctggctgagcaccaggcagtgcacaggtgcagggcaggagtcctcaaggtcaagagaagagcaactaccagggagcaacgagcggagctcacagggccgagaaaccgccgtcttaccagggagcaacgagcggagctcacagggccgagaaggtgtcatcttgcagcagcaggagtgcaggggtctcgcgggccttgcgggacacacgggtgtgcagcagaggccttgggaaggacgccggtggcgggaggcggaaaggctatgctagacccaccacttcaaagcataaaaagcctcggaaggatgatctgcaccttaactgcctgccaagcccaacccaactcctcagagaaagacaacaaaatccagacattcaaaagtgtacacctgacaatatccaacaaccaagaaaaacttgtgaaaaatgtagaggcaggaaaatgaggc

SEQ ID NO: 9379 - DNA, 556 bp, Homo sapiens
  MAP TO Z86090.10; EXPRESSED IN BRAIN, SIGNAL = 3.9; EXPRESSED IN PLACENTA, SIGNAL = 1.9; EXPRESSED IN HELA, SIGNAL = 3.2; EXPRESSED IN LUNG, SIGNAL = 3.2; EXPRESSED IN HEART, SIGNAL = 2.6; EXPRESSED IN BONE MARROW, SIGNAL = 6.6; EXPRESSED IN FETAL LIVER, SIGNAL = 1.7; EXPRESSED IN ADULT LIVER, SIGNAL = 3.9
tgtgctaaagtctgaggtttggagaactggcagaagagttaatggagtcccgaggcaagatggtaaaggtgtattgatgactctgatgcatgaaagcagggtgtctgacctcttcttcttgaaatagagaaatagcatttgtcagctcagtaactgcataccaggtgtgggagactgtgtttattttctcccgcaatgagaacatatctgaaacagcagctgcagttggcgttgtcacataattaagtttatggtaattcactgtcattctctcagagacccatctgccatcttcactggccaaactgaagaatgaaggggaaattgataaaatcaccaccccagaatttttcaaggccgtgatgatattattaatcgcttcagttgcccaggagtttcagcgttgcttttggtttatgtgttaggctgtttttgtgttgctgttaaggaataactgagactgggtaatttataaagaaaagaggtttaattggctcatggttctgcaggctgtagaggaagtatgttgctgatatctgcttggtttctgctgagg

SEQ ID NO: 9380 - DNA, 589 bp, Homo sapiens
  MAP TO AL035701.13; EXPRESSED IN BRAIN, SIGNAL = 7.3; EXPRESSED IN PLACENTA, SIGNAL = 4.3; EXPRESSED IN HELA, SIGNAL = 3.5; EXPRESSED IN LUNG, SIGNAL = 5.4; EXPRESSED IN HEART, SIGNAL = 2.8; EXPRESSED IN BONE MARROW, SIGNAL = 8.3; EXPRESSED IN FETAL LIVER, SIGNAL = 6.3; EXPRESSED IN ADULT LIVER, SIGNAL = 3.6
agccccaacgtccctatctgcgccgctcggggcgctccgagtgtgcgcagctgccaggcgagcgtctaaggcgccagctcagggctggctgggaccgggcagcagagtctgaaacacgtccttggattggatgctagaaccagcgttgaatgtaactttctttccgattggttagacaggtgcttggaggggttgtatcggacctaagagtagaggttgattccactctcccaccacgcacttttcgtatcatcctagatctggatgcccttcatggaacctaaaaaccagcgagtcccggaaaggcctcaggcaattgccaagccgatggccttctgccacttagttaatgtgcacctggcagcttaggtggccgcggagaaagcaactttggctgcaccaaggtccggcacaagtctggagaagcttcagccagttccagtgagttgggataaatgaaacgtggatctaccatagacgtctgtccgtcttactggataagcgagcacctttaccggggaagttaggtaatagtttacaagtaaggttaaaagcagcacagtgcctgcggcagggaaccagtaatgag

SEQ ID NO: 9381 - DNA, 570 bp, Homo sapiens
  MAP TO AC005300.10; EXPRESSED IN FETAL LIVER, SIGNAL = 5.3; EXPRESSED IN BRAIN, SIGNAL = 4.8; EXPRESSED IN HELA, SIGNAL = 4.3; EXPRESSED IN ADULT LIVER, SIGNAL = 4.7; EXPRESSED IN PLACENTA, SIGNAL = 5.2; EXPRESSED IN BONE MARROW, SIGNAL = 4.5; EXPRESSED IN HEART, SIGNAL = 3.6; EXPRESSED IN LUNG, SIGNAL = 5.7
taaggaagtcgctgggaatcccaccggctgtaccgcagggcgttagtacctagatggcttcggtgcccccaagcgatgggctcaagctacagggcgggctttgcacctggccttctcagctctgaggcaggcagtgggcagcttcgcctccaccctccgtccagcgcccttcccatggggccatccgcctctccctaaggcactaaaaaccagtggaggagtcaggccatgttggcaaaaagggctcgggcagcagccccagacctatagtcctaaatatccatgtacccagccctggggtcgcgagccatctcagggacgacccgattccagcggatggagaagttccctgaaaacacctgcctgggaggagagacgagggaacgagattgggcaagtggcatccgcccagcgggcttctcaaaggtttttaaagcagaatgggacgtaataggaagatgtgtctagcagagagtaaaataaaggggcatttagaggtgtgggcacctggatgaaaacaaaggctccaaagggatgatggtgagggttacagcccaccacagtagacag

SEQ ID NO: 9382 - DNA, 572 bp, Homo sapiens
  MAP TO AC007567.1; EXPRESSED IN LUNG, SIGNAL = 1.5; EXPRESSED IN HEART, SIGNAL = 1.6; EXPRESSED IN FETAL LIVER, SIGNAL = 1.5; EXPRESSED IN BRAIN, SIGNAL = 1.3
tgctgaacagagcctagcacagaatagttgctttataaaaatatttgattgaatgtggaattgaggggtgctacgatttgaatatgttccccaaagttcatgtgttggaacctaatccccaatgcaacactgctgacaagtgggaccttaaagagctaattatgtgactagattagtgatattatcttgggagtgggattctgataaagggatgagtttggcccccctcctctctcttgcccttctgccttctgccaggggataacacagaaagaaggcctttaccagatgcaggccccttgaccttggacttcctaggctccaaacctgtaagtctttgttctttataaattacccagtctcaggtattctattatagcaacacaaaatggtctaagaaaaggtgatagtatcacctctcttcaacagccacaacttactccccagagacatgggtcatggaggtcccttacagaacagactagcttcatcaccaaactctggagggccaggaggcaacactggtagatgcaagaagcaacagcactattggactgattggatcagggctc

SEQ ID NO: 9383 - DNA, 570 bp, Homo sapiens
  MAP TO AL023553.5; EXPRESSED IN PLACENTA, SIGNAL = 4.4; EXPRESSED IN LUNG, SIGNAL = 2.9; EXPRESSED IN BRAIN, SIGNAL = 3.5; EXPRESSED IN HELA, SIGNAL = 2.4; EXPRESSED IN BONE MARROW, SIGNAL = 2.8; EXPRESSED IN HEART, SIGNAL = 2.8; EXPRESSED IN ADULT LIVER, SIGNAL = 3.6; EXPRESSED IN FETAL LIVER, SIGNAL = 4.4
aggaaactgaggctgcaatgggcgacaggggagaagcctgttctctctgccttgtggaagctgcctgtctcctgcccctgcctgagctcttgccctgaggccaactcgctgcctcctcttggtcctgtctttgctgtggctcttctgcctcccttctgctctctggtctctctgccacctgagagcccatcatggggaggctgccctcgaccctggcccagaatcatcagtgggttcttcccccatccctgcagcccacttagcatgaggccctggagccgcacagtcacttgggtgggaggtctggctggccagagcaggccccagctcagccgcgtctccctggtaaccaccatgagctgcatctccccctctccatcctcctcttccctccctgcccctccatggcctcccagcactggctgtcactgccaagcacaataccaggcctgggaaaactgcagttgggaggccaggaccgccctgctccctagagagagggaggcagggcctctgtccccatcgcctgccaaccctcacccaggtggggcaggtggcactcaaggagtg

SEQ ID NO: 9384 - DNA, 585 bp, Homo sapiens
  MAP TO AC004624.6; EXPRESSED IN LUNG, SIGNAL = 1.6; EXPRESSED IN FETAL LIVER, SIGNAL = 1.5; EXPRESSED IN PLACENTA, SIGNAL = 1.9; EXPRESSED IN BRAIN, SIGNAL = 1.9; EXPRESSED IN HELA, SIGNAL = 1.6; EXPRESSED IN BONE MARROW, SIGNAL = 1.8; EXPRESSED IN HEART, SIGNAL = 1.4
aactccccatccaaaatatgcttatctgtttctaagaaaccacgcatcttgtctgagccttgtttgaggaagtgctggccaccgcggctggcacagggtgctgggtgctgccaccgtggctggcacagagcccgtactgggggccgagctcactgtggcgttagggaaggagttctgtggcaggagccgatcagttctagtcccctctgttcaggcagcacacaccccaccaacctgcacagccttgattctccttcattcgacagaagtttattaggcacctgcttgtgtcaagccctgtgccaggcaaggaagtccaacaggaggcaaatgtggtccccaccttcaaggggggcagcggggtgaggggtgaaacagacaacagcgctgtcaggtgagtgctacgacccggcattcacaagatgactgacatgggcaccatggaggttagctgaccccacggactcaagcagggtaggcttcctggaggaggtgacagctagctcagggcctgaagactgagtgatgctagcttgttaaaggcctggggctgaggctggggccaggagaggtagggacagcaca

SEQ ID NO: 9385 - DNA, 562 bp, Homo sapiens
  MAP TO Z95114.19; EXPRESSED IN BONE MARROW, SIGNAL = 1.7; EXPRESSED IN HEART, SIGNAL = 1.5; EXPRESSED IN FETAL LIVER, SIGNAL =   2; EXPRESSED IN ADULT LIVER, SIGNAL = 1.5; EXPRESSED IN HELA, SIGNAL = 1.3; EXPRESSED IN BRAIN, SIGNAL = 1.7; EXPRESSED IN PLACENTA, SIGNAL = 1.6
tgggagagttaagtgggctgtccatctgtgaaaagcgagccagagtacctagccacagggctattgcgaggtctttaggagataagagatcttgggaaagatctattcaaatgccagttgcagctaacccagtagtctggttacctacaagctggtggtgtaaaatctctttgcgttctttgagaacatgatcactttcctaattcctgttttttgtttctgtgttcctagcacctagcactgagcttgacataaaacttggctattccaagactcctgaagatattaaaaaacacaactgcagacctaagattttccctagaaaaacagataaagacccggagcagataatcttaaaatactgtcttaaccaggcagtcctctgaataaagacagggtctaagtccttccccaaaattgatcacctctctaatcagagcgaagagaggagatataaatagaagagaccattttctactccaaagctttcttttcaaaaaaaaaaaaaaaaattcagagaatacccttgataattcatgggccagaggaagtggaagcagct

SEQ ID NO: 9386 - DNA, 588 bp, Homo sapiens
  MAP TO AL008723.8; EXPRESSED IN FETAL LIVER, SIGNAL = 2.5; EXPRESSED IN HELA, SIGNAL = 1.7; EXPRESSED IN BRAIN, SIGNAL = 2.6; EXPRESSED IN PLACENTA, SIGNAL = 1.8; EXPRESSED IN HEART, SIGNAL = 1.5; EXPRESSED IN BONE MARROW, SIGNAL = 3.1; EXPRESSED IN LUNG, SIGNAL = 1.6
agaggctaacatgagggcagcgagccagcaggcactaccagctattggttctgaatagagattccaaaacacacaataatcacaccatacacagatgagagggaaagcataaaactgctcgtgaatcacacacagttcccagtgagaaacagtccttacaaacgcggtagttctgcaaagcagcctcgaatgcagattcctctgtggacatcttatcctcttgtgtttttttgtattattattattacaaattacatggtgatggacagaagctcacagcaaaaagtaagagtaggcagcttaaaaaatcaggttgagttgctaaaaaccggtaactctagaaatctatgcttgaacttgtcactaccctgcatcttgtttctcagggacactctactcattgaaggacctgccagccataaccacagcaggatggggacagtgtttatcacaatgacctggggacccacggggttttcaggagcccttgacaccactgggggattgaatacacacacacacctgctttccacaccgagtgttcacacccaagtgcacacttctcacccctcggctcctccatgagac

SEQ ID NO: 9387 - DNA, 569 bp, Homo sapiens
  MAP TO AC006427.13; EXPRESSED IN HELA, SIGNAL = 2.3; EXPRESSED IN PLACENTA, SIGNAL = 2.9; EXPRESSED IN BRAIN, SIGNAL =   4; EXPRESSED IN BONE MARROW, SIGNAL = 3.1; EXPRESSED IN HEART, SIGNAL = 1.5; EXPRESSED IN LUNG, SIGNAL = 2.8; EXPRESSED IN FETAL LIVER, SIGNAL = 3.9; EXPRESSED IN ADULT LIVER, SIGNAL = 2.3
tgacagaactcccacactggcatgcagagtaagagctatggcagtaggaaaggccaaggggaagtccctgaaactgctccctgctccaagatagtaaatcaaaaccaagatcccatcctggagtatatgacagatattaatgccaccttcaaatactcacgtaatgcaggagtaatagactctgtcatatcccatttattcagtagggcaaaaactggatgcattatgatagatgttaatggactatcacaaacttagccaagtgtagtctcatttgtagctgctgtgccagatatggtgtctttactaaaggagattaacacagcttgagatatatcatatgtggctatcgaactaatgaatgtgttcttttccatatctacatgagaggaagatcagaagcagtttacattctcgaggcacaaataatggtacaaattcagagttgctgcagaactttgttaatttttccattctctgtcatgctaaaatccaaaaggactgtgaatgtctggacatcctaaaaatggtagtgagcatataactgtggaatccatcagtcctgccat

SEQ ID NO: 9388 - DNA, 575 bp, Homo sapiens
  MAP TO Z83840.7; EXPRESSED IN FETAL LIVER, SIGNAL = 2.5; EXPRESSED IN PLACENTA, SIGNAL = 2.5; EXPRESSED IN BRAIN, SIGNAL = 1.4; EXPRESSED IN HELA, SIGNAL =   3; EXPRESSED IN HEART, SIGNAL = 2.6; EXPRESSED IN LUNG, SIGNAL = 2.2; EXPRESSED IN ADULT LIVER, SIGNAL = 1.6
atattccccagggataagggatctactgtatacaggaaggggcacccctcctcccttgcagtcttctggaaactgcagagggagtctgttaggcagatgataacaaaaaccagctggtggagttcaagaaatggggcctacggggccccagccccagcaccacaggacataaaaggaagaatttggagctgagaaacaagtgactgcaacacttgaagtcaaatcaaagaaaatttatctcctttcttcaggcttccagctggtctttttaccctttgctgatgataaaaggaagatgccctttactgaaaaaatcatggcaactccagagcaggtgggcaagatgaaggctatcgttgagaagcttcgcttcacatacaggtgagtcaatctcaggctttctggaactgcctcctgagttgaaaatcttattagaaacagcttgggcataggccaagagaatggcactactcttttcagcaaactgacagattactacttgttattaatagttttttgaaagccatatagagaatggaaccttttattatgttggagactctgggattttgtgg

SEQ ID NO: 9389 - DNA, 573 bp, Homo sapiens
  MAP TO AL022312.7; EXPRESSED IN LUNG, SIGNAL = 1.8; EXPRESSED IN BONE MARROW, SIGNAL = 1.7; EXPRESSED IN FETAL LIVER, SIGNAL = 1.6; EXPRESSED IN BRAIN, SIGNAL = 1.6; EXPRESSED IN PLACENTA, SIGNAL = 1.9; EXPRESSED IN HEART, SIGNAL = 1.7; EXPRESSED IN ADULT LIVER, SIGNAL = 2.4; EXPRESSED IN HELA, SIGNAL = 1.8
cctcagccttcttcttcttggtcttggccacaggccggtcacaggccttgcggccccggttctggcgcaaaatctggcgagggtgcgggaccgagggcccatcatttcaagagcagaggaggcccgcaaaggtcacaggggagttcggcgcagggcagggctggcccagcctcccaccctatgctcagggctgagaccgccatgggtccctaggggaacagcctcggctctcacctcccaggtcccttcctatagtaccctcgaccaacctgctggctcacagactcagccacggtgcttctcgtcctggtcagaaacttcaggtttactctgaggtggtctcgacactctcgcttccggtactcgtctgtgggtagcaggcagggagcaccatttcagattcactccccctggaaccattctcagtccctggcccatggccctgccaaagacctcatcgttcccttcccaggttattacagcggctgggctcttctccatcaaatgcattctccacacaggtcctgctgaaagccccaggctcttggcccccacccccattttccaacaatt

SEQ ID NO: 9390 - DNA, 576 bp, Homo sapiens
  MAP TO AC004624.6; EXPRESSED IN FETAL LIVER, SIGNAL = 1.3; EXPRESSED IN HELA, SIGNAL = 1.4; EXPRESSED IN BRAIN, SIGNAL = 1.5; EXPRESSED IN PLACENTA, SIGNAL = 1.2; EXPRESSED IN LUNG, SIGNAL = 1.7; EXPRESSED IN HEART, SIGNAL = 1.4
tttctgggcagaggaaacaggttgggcagaagccaagaagtatgggagaatacaggctgggaggggctcagcacagcgtgagtagcggagagagtgggtctaaagagctcagtttgccaagaagagccttcatggatgcaccagattaataaacatatctgaacaatgtgacagtgtgcagagagggaccctaggaaaatcaaaactctgtctgtgcacagcatccctttgcagttccacagttgccccatgactgacttcaccaagccaggctttgctgcaatgctaagggtctcagaactgggcagagatggctcacacacagctcgtggccgcatccatcccaagggtgttagtgaggaagccaacctactcagggcattgttcgtgtaggtgtctttagtctccttctcaaaatgtatttttatctatctgtaggtacacagcttcaaatccttttttgaggaaggaataagcaagacaaaaataaaccagatttaaatccttgaagcttataagaccattggtatccaaacttatatataaatcagaatcacttggagaactttacaagaa

SEQ ID NO: 9391 - DNA, 579 bp, Homo sapiens
  MAP TO AL031588.1; EXPRESSED IN FETAL LIVER, SIGNAL = 2.8; EXPRESSED IN ADULT LIVER, SIGNAL = 1.9; EXPRESSED IN BRAIN, SIGNAL = 2.9; EXPRESSED IN HELA, SIGNAL = 3.1; EXPRESSED IN PLACENTA, SIGNAL = 3.1; EXPRESSED IN BONE MARROW, SIGNAL = 2.4; EXPRESSED IN HEART, SIGNAL =   2; EXPRESSED IN LUNG, SIGNAL = 2.7
agatcttcatgcttcccagcaaggaggctcacgtcccagggtgcgcttctctggagcccacgtggctgactgtgagggctggatgcgtcacagaggggaggctcagacccaccttcgtgttaaagtgaaaaaggcccaggcctagcctgcaggcccatcccccgcccctgcagccaagtccgcggccgtgtgatttcgggagacacctgaggtccctgggcctgtgtccgcagccatgcctcacccccagctcttcagcggtgagagcgtcgtgtcctggagtgacctgaacatcatcatctctgtgccctggtacctggggctcatgttccggacccggaaggaggacagcgttctgatggaggccaccagtggtgggcccaccagctttcgcctccaggtgactggggccccgtgccaccaaggcacctgctaggtgggtgcccgagggagggacccaggcgctgggcttcctggtgcacactcgggcacctgctactcgcccttcctccggcgcccgcccctggggttctccgaagagggggaaggggaatatcagccctttctttcctctgggag

SEQ ID NO: 9392 - DNA, 563 bp, Homo sapiens
  MAP TO Z95114.19; EXPRESSED IN PLACENTA, SIGNAL = 2.5; EXPRESSED IN HELA, SIGNAL = 2.4; EXPRESSED IN LUNG, SIGNAL = 2.4; EXPRESSED IN BONE MARROW, SIGNAL = 2.7; EXPRESSED IN HEART, SIGNAL = 2.2; EXPRESSED IN FETAL LIVER, SIGNAL =   3; EXPRESSED IN ADULT LIVER, SIGNAL = 2.4; EXPRESSED IN BRAIN, SIGNAL = 3.2
cagcctctgtaagccaggagcagagccctccccagacatcaaccctgctggcaccttcaccttggaatttttgcctccagaactgtgagaaaatacatcagttgttggagccacccagcctgtggcgttttactaaggcatcctgagaagagtgattcaccagggaagtgccatggtgctttgtggaggaaccgatctatttcagctgagaatcaccagaaagtgagctttccaccatgctttctccccatgtacgggaaatattccagtgatcgcttccttctgccatgtgcctattgtcaaacgctttacaccagtgtcttcaaaatctgagtttcgacccatcagtgggttatgaaaatagttcattttgtcaagagcagcattttaaaaagaaaagagcattgaaaatatcagagtgtattgaacacagcaagagtgagtattcttttgtaagatatttgaaatatatataatatatatatacataagggtgtatatatatatacccttatgtaaattcctgggatatagatgtgtttaggatggcagcattttcaatc

SEQ ID NO: 9393 - DNA, 589 bp, Homo sapiens
  MAP TO AL049649.4; EXPRESSED IN ADULT LIVER, SIGNAL = 2.5; EXPRESSED IN FETAL LIVER, SIGNAL = 3.8; EXPRESSED IN BRAIN, SIGNAL = 4.7; EXPRESSED IN PLACENTA, SIGNAL = 3.7; EXPRESSED IN HELA, SIGNAL = 4.7; EXPRESSED IN HEART, SIGNAL = 3.7; EXPRESSED IN LUNG, SIGNAL = 4.1; EXPRESSED IN BONE MARROW, SIGNAL = 7.3
agctatgagaggaggagggggtttgaggtatttattcttcaagggttttagcctgaataattggaacgatgaagtcatcaatgagatgggaaaattaggagggagcaagtggggtagggatgatcaggtctatttttggacatgtgaaatgtgaaacgtctgttaaatctctgagtgaagtgtcaaggagagagaggtttcagctggaaatgaaaatgtgggtatttaaacacatgtgactgggtgagatgagcaagggagagaaggaagaggccaaggacagagtcctgggagactgtgacatcacaggtgggggaaacgatgccagagacagaggagtaaccagggaggtggaggagagctgaacatttgggcaagaggaaattaaacttggggaggatatgaggtgctggaggagatcctgcacatagcaggtgccacttgagtgtgttttgaggcaaaagtggaggttttacaaagggatttgcatgggcagagggaagcccagttaaaagacaagatggagccaagtgcagagatgtaaaaataaatgattggttcacaaatagtccgatgtaaattaagggca

SEQ ID NO: 9394 - DNA, 579 bp, Homo sapiens
  MAP TO AL023553.5; EXPRESSED IN LUNG, SIGNAL = 2.1; EXPRESSED IN HEART, SIGNAL = 3.7; EXPRESSED IN BONE MARROW, SIGNAL = 2.9; EXPRESSED IN ADULT LIVER, SIGNAL = 2.7; EXPRESSED IN FETAL LIVER, SIGNAL = 2.2; EXPRESSED IN BRAIN, SIGNAL = 3.3; EXPRESSED IN PLACENTA, SIGNAL = 3.9; EXPRESSED IN HELA, SIGNAL = 1.7
acagaactggggctccatctctgctcccctgtccttctctctgacactgctagtggagactgggccaacatccaagctctttggaattatttttagaaggtctctaagagagggcctgtctccagtgccagtatttcagagtcagaagggaggctgatggggtggggagggcttggtgagggtcacctggacacaaaccatgttgctaacgcccaattattgatttgtctcaataggacatcaaccaggaagtttataatttcctggcaactgcaggtgccaaatatggcgtgggcttctggaagcctggatctggaatcattcaccaggtaaagctgggctcagtctgccgtcccaagggcccaagccagagaagtatgttccaggcctatggggggagggggtttgaggcccaggggggctgaggggaactggatgacatatccatcagctcttatgctcttcctcctttgttttgaaactgattttcattatgtcattatacgtgctcattttctgggtgagaagttaaaataatacctcctaaccacccaggtaaccagcattttaagtgcgaca

SEQ ID NO: 9395 - DNA, 587 bp, Homo sapiens
  MAP TO AL022327.17; EXPRESSED IN HEART, SIGNAL = 2.6; EXPRESSED IN LUNG, SIGNAL = 2.4; EXPRESSED IN BONE MARROW, SIGNAL = 4.4; EXPRESSED IN ADULT LIVER, SIGNAL = 3.1; EXPRESSED IN FETAL LIVER, SIGNAL = 4.8; EXPRESSED IN BRAIN, SIGNAL = 2.8; EXPRESSED IN PLACENTA, SIGNAL = 3.9; EXPRESSED IN HELA, SIGNAL = 2.9
caaattaaaaccacacacccgagtgcctgaaatggcagcgaggacacccactgcgggtggggacgggggcgggggcaccggagctctcgatctggcccttaaacggttgggggaccttctaaagctaagtatgcgcctgccatgtaacccagtcatttgactcctagggagcatttacccacgcaacgaagacgagtctgaagagggcaagggcaggaaggaagagagaggcgagtgcagggcctccacgacccgccaggagagccctccacacccacacgtttaatttcccagtttcccaggaagctggccagtgggatcggggtacaggaggcaggagccagcgccccccaacacccctggggtcctccgcctggaccgtccaagagaaggcgcctggttctgcagctcagtgaagtgcctgcccccagagtccctgatttcctggcagcaggctgcagccagcactgcctctgagcccgggccactctgggcgagtggctggcacacaggcaatacacgatacccactattttcttctctcccgtctccatctgaagaagaagccaacgatagccccttcctct

SEQ ID NO: 9396 - DNA, 576 bp, Homo sapiens
  MAP TO AP000127.1; EXPRESSED IN HELA, SIGNAL =   2; EXPRESSED IN BRAIN, SIGNAL =   2; EXPRESSED IN PLACENTA, SIGNAL =   2; EXPRESSED IN BONE MARROW, SIGNAL =   2; EXPRESSED IN HEART, SIGNAL = 1.7; EXPRESSED IN LUNG, SIGNAL = 2.7; EXPRESSED IN ADULT LIVER, SIGNAL = 2.6; EXPRESSED IN FETAL LIVER, SIGNAL = 2.6
aacctttgagatggtttcattttagagtttttaaagtcctttgcttatctaaaaggccaaagacctgaagttcccaacctaggatgatgttgtttcccaggagacccttgacaatgtctgggcgggcaccttgggttgtcataacttggggggaggttgctactggcatctaatgagcagaggccagggatgatgttaaacaccctagtagattgtggttggcagcatccaagattccttcccctggtagccatgccttgcataaccctctcttcctgcatatggacaggacctatgaaaatgatgagatattgctcttatgtttatgttacttcctatggccaatggaacttggcagatgcaattaagatccctaatcagttgactttgaggtaagcaaaatgagactattctgtgtggacctcacctaatcaggtgaaccttaaaagagacaagaagcagtagtaaacaagctcctgctggccttgcagaagcaaataacccatgcgggggttcttgggaatttttaattcagggggcctcgtggcaggaactgcaggtggcctctaagagctg

SEQ ID NO: 9397 - DNA, 593 bp, Homo sapiens
  MAP TO AL020993.1; EXPRESSED IN FETAL LIVER, SIGNAL = 1.4; EXPRESSED IN PLACENTA, SIGNAL =   3; EXPRESSED IN HEART, SIGNAL = 1.7; EXPRESSED IN LUNG, SIGNAL = 2.9; EXPRESSED IN BONE MARROW, SIGNAL = 1.4; EXPRESSED IN ADULT LIVER, SIGNAL = 1.6; EXPRESSED IN BRAIN, SIGNAL = 2.2; EXPRESSED IN HELA, SIGNAL = 3.1
ttggcttacgaaggggaagacccgactgtgcaaggacacggaataagcacgagcttgggggcagacggggtggggactttctcactagaaaagagcctgggggcctccatcagggtagggggtgagagggctccagagagctgggccccagccagtggccccgggtgcacactgctccaggcctggctccctcaccaatgcccaggtgcgtgttgatggaagcgtagcgggccgtgccggtcaggttcttgttttcccggtagggaatgtgctggtgggtgcgggcgtcccggtacttcttggccaggccgaagtcgatgatgtagaccaggttgcccttcttccccagccccatgaggaagttgtcgggcttgacgtcccggtggatgaagttcttggagtggatatactcgatgcggctgatctggggaggaggggggccatttgttcaacagaggggcccttgcctagcactctgggccaggcaggggctggggccacagaggtggaaaggcagagggagaaaggcctgccttcgaccatgaaggataactaaggggcaggccagagaaggcctcctggaaaatgtgaca

SEQ ID NO: 9398 - DNA, 575 bp, Homo sapiens
  MAP TO AL008582.11; EXPRESSED IN HELA, SIGNAL = 1.7; EXPRESSED IN BRAIN, SIGNAL = 1.3; EXPRESSED IN PLACENTA, SIGNAL = 1.5; EXPRESSED IN HEART, SIGNAL = 2.4; EXPRESSED IN LUNG, SIGNAL = 1.8
gctgcatgagggaaagaaagcccatacacatcaatggccagggccatgatgatggtctgggcctagagggaatggtggggtggggccataggacagagatgaaaggagtttcactagacgaagtgctaatctccctgtagtcacagacatcagctccagggggagggtgtcaagtggccagccagcaactccctgtggcccagcctgaaagggagtggggactggggtcagacctattcaggtggcagggcccgagaaggcctgctgaggttggatggctttgagtgcgaggatagctgggtgacagaggcagtgacacgggccagcctctccctgttccagggagggtcaggctccagctgcagctctttcttccctatgagcttggacacatcaatcctaaactaggagtgtgaaggaggaagggaggagcagggagcagcagttcacatctggaccattcttagcacaggaagccactcattaaagatgttatatagaaaactacatgtaagaaaaaaaaaaaagaaaaagaaatataaaacccaaaccaaccaaataaatcacaggccggt

SEQ ID NO: 9399 - DNA, 593 bp, Homo sapiens
  MAP TO AC007363.3; EXPRESSED IN FETAL LIVER, SIGNAL = 3.3; EXPRESSED IN HELA, SIGNAL = 3.7; EXPRESSED IN PLACENTA, SIGNAL = 6.4; EXPRESSED IN BRAIN, SIGNAL = 4.4; EXPRESSED IN LUNG, SIGNAL = 3.2; EXPRESSED IN HEART, SIGNAL = 3.2; EXPRESSED IN BONE MARROW, SIGNAL = 3.3; EXPRESSED IN ADULT LIVER, SIGNAL = 3.5
taggatccaggaaggcaggagtttttatctgctttgatcagtgatgcattcctagccgttgaagccaacatataatagggcatacaataagtattaactaaaaaatgattgaaaatacattagaatggctgcctatgggaaaataggataggaatggagaattgggataaaatggaataaaaaacattaaggcaaaagtcctggggccttgcatggaccactagtgatggtgccaggagtggaatcaaccctccatcccagacgtctggcagcaacaaaaacacttacaacaaaatcaatcgaggtggtggccttggggaaatcttttctctttttaaagtaaaacaagatcacaacttcctggtgagtggccttgagcttgctacttggcataaactgaactatgttatttcaagttgagaacaagaattgtgatgttcactttttcctgctattactacttaaaattctgttttacttataaatcacctatggttgcttgaatgcatcagttctttcttaaataactgtttatcaccacgtaaacttagtatcccagtcttgtattgtatccagcacaaaaactcgaatct

SEQ ID NO: 9400 - DNA, 571 bp, Homo sapiens
  MAP TO Z83844.5; EXPRESSED IN HELA, SIGNAL = 1.4; EXPRESSED IN BRAIN, SIGNAL = 1.4; EXPRESSED IN PLACENTA, SIGNAL = 2.2; EXPRESSED IN LUNG, SIGNAL = 2.4; EXPRESSED IN BONE MARROW, SIGNAL = 1.5; EXPRESSED IN HEART, SIGNAL = 1.9; EXPRESSED IN ADULT LIVER, SIGNAL = 1.5
cacacactggctctttcattccatcctccttgcagcctccctccccctcgctcaccaccacctctacttcgcagtggaagaaacattggtttgtgctgacagattcaagtctcaaatattacagagactccactgctgaggaggtgaggccatgggtgtactgatgaacccccggaagggcctggggtggcctggctgggttcactggggtgggtcacaccagggcccacacggaccatagtgggccctcttgctccaggcagatgagctggatggtgagatcgacctgcgttcctgcacggatgtcactgagtacgcggtgcagcgcaactatggcttccagatccacgtgaggctgtgtgcagcttgggggctggtggtgggcagcatggctggaggtccctgggggaggttttggtgttgaacatggctcaccatggagactggatcccttcactcatttacccagaggccctatcttcagagccagagctgtgatgccaacacttagcatatctgggggagacgctggagccagcagggctcttcccaggccaatggaagggaggtt

SEQ ID NO: 9401 - DNA, 588 bp, Homo sapiens
  MAP TO AC006427.13; EXPRESSED IN ADULT LIVER, SIGNAL = 9.4; EXPRESSED IN HELA, SIGNAL = 5.5; EXPRESSED IN PLACENTA, SIGNAL =  11; EXPRESSED IN BONE MARROW, SIGNAL = 3.6; EXPRESSED IN FETAL LIVER, SIGNAL = 6.3; EXPRESSED IN BRAIN, SIGNAL = 5.1; EXPRESSED IN HEART, SIGNAL = 3.5; EXPRESSED IN LUNG, SIGNAL = 5.7
ggggtctgaaggatagtgaccctcttctcacagttccactaggcaaccccagatttcccctctgcactgccctagtagaggttcttcatgagggctcttcccctgcagcagacttctgccaggacatccaggcttttccatgcatcctctgaaatctaggtggaggttcccaaccttcacttcttgccttttgggcacctgaaggccccacagcatgtggaagtcaacaaggcttggggcttgcaccatctgaaccaatggcctgagctgtaccttggccctttttagccatggctggggctggaatggctggaacacaggatgtcatatccagaggctccacaaagcagcaggtccctgggcttggcccatgaaaccatttttcttctcctaggcttccaggcctgtgatggcaggggctgccagaaaggtctctgaaatgccctggagacattttccccattgtcttggttattaacatttggctactctttacttatgcaaatgtctgcagcaggttgaatttctccccagaaaatgagtttttcttttataccacatggctgggccgcaaattttccaaacttt

SEQ ID NO: 9402 - DNA, 577 bp, Homo sapiens
  MAP TO AL022329.9; EXPRESSED IN ADULT LIVER, SIGNAL = 2.6; EXPRESSED IN PLACENTA, SIGNAL = 3.6; EXPRESSED IN BONE MARROW, SIGNAL = 1.6; EXPRESSED IN FETAL LIVER, SIGNAL = 2.3; EXPRESSED IN BRAIN, SIGNAL = 1.9; EXPRESSED IN HELA, SIGNAL = 2.5; EXPRESSED IN HEART, SIGNAL = 2.1; EXPRESSED IN LUNG, SIGNAL = 2.5
gtatgagtgttgggggaagggcaatggaagttcatggctgaaggtttcaatttcatgccaccttccttgagctctgtctgagggaaggtgtcttatctggcaccccggatagcaggcatttctctgaatgaagaagattcacaggtcccagtggccccatagtggggcagaagggggctatgctttgacatggagctctctcccaggagaggagaagacctcaccagctacaggcctctgggctgctgccttcctgcagcttttccatggaggaggccaggagtggggaggcccggaatggggagcccagtcggctcccagtcggctccaagctgtccagtctggcctcaacccgcaagtgtggggatctgggcttctatcctgtagggcctggaatacgacgaggctgttactttcactttgtggctgtccaaaaagatgctgcctcattcagtgcaccagctcatggaggctgagtgtcccactagggcttctagactccaacaaggataatggtggccttgggtgctgtatccattgctgacctaagttgtattctcctatgcctgggtaccat

SEQ ID NO: 9403 - DNA, 587 bp, Homo sapiens
  MAP TO AL022328.21; EXPRESSED IN FETAL LIVER, SIGNAL = 1.6; EXPRESSED IN BRAIN, SIGNAL = 2.1; EXPRESSED IN ADULT LIVER, SIGNAL = 1.8; EXPRESSED IN HELA, SIGNAL = 1.5; EXPRESSED IN PLACENTA, SIGNAL = 1.3; EXPRESSED IN BONE MARROW, SIGNAL =   3; EXPRESSED IN HEART, SIGNAL = 1.3; EXPRESSED IN LUNG, SIGNAL = 1.7
gcagatggcaggacttcggggaggcagatggcaggacttcagggggaagcggggagagacggctccaagccctgtcggcattccctggtctcccagtccctcccgtcgtcccctgcagcaagagtgagcatggggccatcctgcgcacagccccattcccacctgagcccgtaggagtggcagcggcaccctccctgcatgagctgagacgggccctctgtgtgcagatcgtgctggcaggagaccccatgcagctcggcccagtcattaagtccagactcgccatggcctatgggctgaacgtgtcctttttggaacggctgatgtctcgacccgcgtaccagagggacgaaaatgctttcggtgcttgtggcgcacataatcccctgttggtgagtcacagactccagcgcgttcaggtccccagctaagcagacacaggctccagggcagtcgagcagctcactcttctgtccacctgagtcatctccatccgtgggcagagtgcaggggagcacccaccatagcacctcccccgtcagcagaaactgcagcctggtgctgatggctgagactctggggtcaga

SEQ ID NO: 9404 - DNA, 574 bp, Homo sapiens
  MAP TO AC007719.1; EXPRESSED IN PLACENTA, SIGNAL = 1.9; EXPRESSED IN HELA, SIGNAL = 1.5; EXPRESSED IN BRAIN, SIGNAL = 4.4; EXPRESSED IN HEART, SIGNAL = 2.2; EXPRESSED IN BONE MARROW, SIGNAL = 2.9; EXPRESSED IN LUNG, SIGNAL = 2.7; EXPRESSED IN FETAL LIVER, SIGNAL = 2.9; EXPRESSED IN ADULT LIVER, SIGNAL = 3.4
  unsure 316
  unsure 337
  unsure 345
  unsure 347
ggatttttcctatgctcactgctattttttgctttttgttttaatttatttttatgttccagttaggaaattttattaaaaaaatttttttttctaatttcctttacttccactcttttgctgtctgttaccctttttatgtgtttataaatgcagatagaacatgactttttgttatgtcaacaagattatatgcatatgaaccaaagacgcattctgacctagtatgatgctaaatggacatagctaaagtacccacttgaaatccgaatgtattgttctgagatccatgccgaggcacacctgggttttcacnaagaggtttgggtaggctctnaaaatganangattaaaaagatattagtcctttaaaatttacaatagatatagttctctcacagaaaacaattttaaataatctggggtttggtacaaaggatctaggaaataataaataatgtaaatgtaataacatctctccatggacagaagcctgttaatcttgaagcaagaaagtcaggtagactccatttgatatgaattatgaaattcttgaactttgaacccttccgat

SEQ ID NO: 9405 - DNA, 552 bp, Homo sapiens
  MAP TO AC007286.18; EXPRESSED IN PLACENTA, SIGNAL = 3.2; EXPRESSED IN HELA, SIGNAL = 2.2; EXPRESSED IN BRAIN, SIGNAL = 1.9; EXPRESSED IN BONE MARROW, SIGNAL = 2.2; EXPRESSED IN LUNG, SIGNAL = 3.1; EXPRESSED IN HEART, SIGNAL = 1.9; EXPRESSED IN FETAL LIVER, SIGNAL = 3.9; EXPRESSED IN ADULT LIVER, SIGNAL = 4.4
attgccttcctctcctctccgagcccctacgtagccatcctgcttatcaggtgcacacagttctggtcaggtagcctcagggagcccatctgattggctctgtgggtccccacacctccaagaactccatgcctttcatatgatgcttaaccatttgtttatcctcattcttacctgggcagcaggtagctatcagaccctctctcacctttcctttactcttcttccacctctacttgatctcctgtagcagccttgcccatgaagtcatgcctgtggctccactgagaaattcgattaagtattccaatactgctgtgaaacgaagtgatctgattccggtgagacaatttatcttgcaaggtatatcaatactcattttattcattatttacccatttccaaaaatgatgtgaagtgggaaaatgtcaatgttgaacaacaaaaatagtaaaatccctttggggggaagatcattataatttgtttaaatgctgacaaatattgatatcaatggtaaacgtagaagtggggcatgagggaaattaccag

SEQ ID NO: 9406 - DNA, 541 bp, Homo sapiens
  MAP TO AL034406.1; EXPRESSED IN LUNG, SIGNAL = 2.3; EXPRESSED IN HEART, SIGNAL = 1.7; EXPRESSED IN BONE MARROW, SIGNAL = 1.8; EXPRESSED IN ADULT LIVER, SIGNAL =   4; EXPRESSED IN FETAL LIVER, SIGNAL = 2.2; EXPRESSED IN BRAIN, SIGNAL = 1.9; EXPRESSED IN PLACENTA, SIGNAL = 3.1; EXPRESSED IN HELA, SIGNAL = 1.8
ttgtatggagatagtgcggcactgctgtaaacatacccaaacatgtggaagcaactttggaactgtctgggtaacagacagaggttggaacaccttggagggcttagaagaagacaggaagatgtgataacgtttggaactttctagagactcattgaatgggtttgaccaaaatgctgacagtgatatgcacaataaagtccaggctgaggtggtcttagatggagataaaaaacttgttgggaacgtgaataaaggtgactcttgctatgctttagcaaagagattggcagcattttgcccctgccctagagatctgtggaactttgaccttgagagagatgatttagggtatctggtgtaagaaatttctaagtagccaagcattcaagaggaagcagaccacaaaactttggaaattttgaagcctgatgatgcaatagaaaaatcccattttctggagaggaattgtagccagctgcataaacttgcatacgtaatgagaagccaaatgctaatcaccaagacaatggggaaaatg

SEQ ID NO: 9407 - DNA, 580 bp, Homo sapiens
  MAP TO AC007841.1; EXPRESSED IN LUNG, SIGNAL = 3.2; EXPRESSED IN FETAL LIVER, SIGNAL = 1.9; EXPRESSED IN ADULT LIVER, SIGNAL = 1.9; EXPRESSED IN HELA, SIGNAL = 1.8; EXPRESSED IN PLACENTA, SIGNAL = 1.8; EXPRESSED IN BRAIN, SIGNAL = 2.5; EXPRESSED IN HEART, SIGNAL = 1.9; EXPRESSED IN BONE MARROW, SIGNAL = 2.4
aaaagaatgcacaaccaggcgcaggtctacgcaaagctttgtgaaagcacaaatccttcagttgcgcctgggaggatcaggggagtttatatagagcagatgatcctaccttccttccttccttccttccttccttccttccttccttctttcctctttttctatgacaatggcagtagacattcatttactttggttcagtgcaatagtaatgactcggtatacactaaaagaatgttacaaactcctgtgggtcaagagacacgatcgtttatcacaggccaagatgtagtcacacatcacgtgatcacacaggctggtaactggcttcagtggtggttgggctgactcagcctgaagcaagaggaaagcaaatgtggttaattaagactgcagggaatgtttagactgtgtgcaaccgataccccagccaccgtctccatgttttcctgcagaggaaatttgcatacaactcaaatattactatacttcctaaaaccctttcagatattgtcagggaaggaattgagaggaaggacttagcacttttagaattatcccagtggcacgcttaaagagt

SEQ ID NO: 9408 - DNA, 560 bp, Homo sapiens
  MAP TO AL031588.1; EXPRESSED IN HELA, SIGNAL = 1.3; EXPRESSED IN BRAIN, SIGNAL = 1.6; EXPRESSED IN PLACENTA, SIGNAL = 2.4; EXPRESSED IN HEART, SIGNAL = 1.6; EXPRESSED IN LUNG, SIGNAL = 1.5; EXPRESSED IN BONE MARROW, SIGNAL = 1.4; EXPRESSED IN ADULT LIVER, SIGNAL = 1.6; EXPRESSED IN FETAL LIVER, SIGNAL = 1.4
ctcatggggccaatccaggagcagctcctgccacctgggccagtgagcctgagaccctacacggagagactgtgcttggaggggccctgggctggctccctggactccttgctccttcctctgagaagggagatgctgagtcccccatttcaccccaccctggctggtccttggcatggggtggccactgggcacgtggccctcacccttcccttcctccccgctgtgttcaggactggcggtcggcctggacccccagggctacgggaaccccgacttctgctggctgtcgcttcaagacaccctgatttggagctttgcggggcccatcggagctgttataatcgtgagtgtggggccttcacgggagtccgggtgccccaaacatgcatgagctggaagggctgttctgggttggctggggccaccaactcctctgagcagccgacggggggcaggaagggccaccttgtaacagtcagcaaagccgccagggccctcccggacctcaccctctgatcgtggattcaggtctcgcgtcgtgtccgcatgagaccatc

SEQ ID NO: 9409 - DNA, 543 bp, Homo sapiens
  MAP TO AL023553.5; EXPRESSED IN HELA, SIGNAL = 1.3; EXPRESSED IN PLACENTA, SIGNAL = 1.6; EXPRESSED IN BRAIN, SIGNAL = 1.5; EXPRESSED IN HEART, SIGNAL = 1.4; EXPRESSED IN LUNG, SIGNAL = 1.2
agtgaaccggaagtgaatggtgtcccccaggacaccacagctctaatggtgtgcagtgtacaacccagacagccaagcctgatggccccgacaaagacaggcatgtgggcatcacatgactccctgcatgggaggcacagacaggctggtgcctctggagcaaaagcacaggcgaggggcaggcacagaggccagtgacatcaggttacaggccccaaaggccaccctaaggagtggggaccttcctttggagaggcctgagctccctgtgacaaaccactttaacccttggaggatacaacttggctggctgctgcagtgactctggggggatgagaatgtcatcgaagaagcctagagagactggaaggaaggaagcaggtgacggcctgagatgggggtcccagtggacgccaaacactgcggggtcttatgcttgacaggcaagccctgcctggggctgcccacgaggcggatgtcgctgtggaaacctaggccccttccccacctaatgcctctgcgtacaccacccacatagcggag

SEQ ID NO: 9410 - DNA, 552 bp, Homo sapiens
  MAP TO AP000189.1; EXPRESSED IN ADULT LIVER, SIGNAL = 3.3; EXPRESSED IN BRAIN, SIGNAL = 3.9; EXPRESSED IN PLACENTA, SIGNAL = 2.4; EXPRESSED IN HELA, SIGNAL = 3.3; EXPRESSED IN LUNG, SIGNAL = 4.2; EXPRESSED IN HEART, SIGNAL = 2.7; EXPRESSED IN BONE MARROW, SIGNAL = 4.6; EXPRESSED IN FETAL LIVER, SIGNAL = 3.5
agggaagtcgggaagaagagactattcctgttggttcctccccagagatgggagatggtgaacaggcgtgtggagggcggaataatggtccccaaagatgtccacgccctcatcctcagagtccgtgaacctgggaatgtgctgcctgacgtacaaaagggactccgcagatgtgagtaagttaagagccctgatgtggggagattgtcttgcattgttgggccaagtggccttataccaccacagggtccccaaaagatggagcagaggcagaaggttcagtaccagggagacaagaaggatgcggccaaccttgctggaggaaggtgccctgagccaaagaatgggagtggcctctagaagctgggaaaggcaaggaaatggattctccctggaggctcgagaaggaccccagccctgctgataacttgactttagtcagtgagactgactttaaacttctgaccagcagaactataagaaaataaatttagatgtgattttttaaaatttatttatttttagagatggggggatctcgctatgttggcc

SEQ ID NO: 9411 - DNA, 561 bp, Homo sapiens
  MAP TO AL079295.1; EXPRESSED IN HELA, SIGNAL = 1.8; EXPRESSED IN PLACENTA, SIGNAL = 1.8; EXPRESSED IN HEART, SIGNAL = 1.6; EXPRESSED IN LUNG, SIGNAL = 1.3
attgggagagctcgaaaagccaagagactaagtatttctaggaggagggaggacaatgtatacaatgctgttgagagaaggtgtaaatgagaacaggtgtaaatgctaaattaattccgagagtcttctaattgtataattaaggcgacaatttctatatgattgccatgcatccttccatttttcacctcatggtccacgtaccgtaagagatccattttgtgtgctgggtgagttgctgctctgctccccgtgggcttgcgtacttccgtagagtgtcaggttatgctcaccggtctggccggcatagtcttgagtgtgtggcaccccatactctgtgggaattccattctgcggaggtggtggaaatgggatggtagtaaaaggctgaaccattgcgtcaggagttgttgtcggctcctggttaccctaaaacaaacaacaagagaaagaaaaagtgactttgaatccttgttacgtaactatttttaaagtgagtatatggaattctctgaatattctctcactgcataggtaaaatggaatgcttattgctccagg

SEQ ID NO: 9412 - DNA, 567 bp, Homo sapiens
  MAP TO AC006548.19; EXPRESSED IN BONE MARROW, SIGNAL = 6.8; EXPRESSED IN LUNG, SIGNAL = 3.1; EXPRESSED IN HEART, SIGNAL = 3.9; EXPRESSED IN FETAL LIVER, SIGNAL = 5.3; EXPRESSED IN ADULT LIVER, SIGNAL = 3.8; EXPRESSED IN PLACENTA, SIGNAL = 4.8; EXPRESSED IN BRAIN, SIGNAL = 6.5; EXPRESSED IN HELA, SIGNAL = 3.6
actattcctggaggtggcaggtgggtgaaagggatgggtggtgggtgctgtaggagttgaaggaaaaggtgtgtcctgagggcaggcatccaggagggacactgtgtgggtaacactggagctggacctggaagcccaggaggagttgtggtagggagcagggatgtgttagaggtaacgctttgtcatttggggttgagagtcgtgtcctctagagcatcagcgagaccctaagcagcactggggagggcgtgggaggcatcaacacatggatcagctgtgatgcatgtggatctccttcctctgtcgtagcttcctccggcaagtacacccagcatggtggagggaatgccagccggcctgctgagtccatgcatgagggagtctgttctttcctggtgagtatggcttaaccaggggtccccagactggctcagggaggtaaaggtcacactccatggaactaaaagcacatcccccaaagggtgacagcatctccctcctaggaggctgcctaggttcttgcctcagttcagaaccataggttcagtttttggataagtgaga

SEQ ID NO: 9413 - DNA, 552 bp, Homo sapiens
  MAP TO AL022318.2; EXPRESSED IN FETAL LIVER, SIGNAL = 4.4; EXPRESSED IN PLACENTA, SIGNAL = 4.7; EXPRESSED IN HEART, SIGNAL = 2.3; EXPRESSED IN LUNG, SIGNAL = 3.6; EXPRESSED IN BONE MARROW, SIGNAL = 2.3; EXPRESSED IN ADULT LIVER, SIGNAL = 4.5; EXPRESSED IN BRAIN, SIGNAL =   2; EXPRESSED IN HELA, SIGNAL = 2.4
tgtttagccaacctcttcagcataaagctcctgcccaaacccctcctgctcctaaatgtctgtctctggtgttaaccagaggctgctcttcccaggctgctggatggctaccttgcaggctgtcacccttaacaagaaataaagtgtcctttgcaaatgcatcccttgtgtaatttgtaggtcaccgcgccatgggaacacgctaccatgggaagggagctgtgagacgcgcagggaggctccagacaggctggcctgggacaccagccgctgcccttccataacatggggacaagagagggcaaaagttcagcccaacacggaggatcttcgggcaggagatggggaagaaggagaagcaggaaggaaagagctcagtgtgggggcgcgcatggcatcccggtgggacatctgaggcccacacccacctgctgtccctccctcccacggtggccaccgagggtgaaggcctggggggaggcagacgcctggccctttactctccctccctgtccccatggccgctgggtgggggccgtctctgggatgatc

SEQ ID NO: 9414 - DNA, 577 bp, Homo sapiens
  MAP TO AC004032.7; EXPRESSED IN HELA, SIGNAL = 1.5; EXPRESSED IN PLACENTA, SIGNAL = 1.3; EXPRESSED IN BRAIN, SIGNAL = 1.8; EXPRESSED IN HEART, SIGNAL = 1.6; EXPRESSED IN BONE MARROW, SIGNAL = 1.9; EXPRESSED IN LUNG, SIGNAL = 1.4; EXPRESSED IN FETAL LIVER, SIGNAL = 1.5
gtggctcctatctgggtggggcctgggtcatgctgcaggcagggccagggaaatggttaatggtcacagggaggctgcctggtgacccgtgggaaaggtataggaagagagccgttaaactctgggtttctccactccattcattcaaaacaggtctgttgagcacgggctagtctgtggcaggcaatgggcaggcctcgagcctaccatggccagtgccctgcactcctgggatctggccttaaggagctcccagcttggtgcccaggagggaggctggtcgagtcggaaggtccagggaggcttcttggagggcagggccctggggctgaggatgaaggatgaagaggagggaaaagggctccgggcctacaggacacactgtgggctttggtctcagagaacctggaagaaggctatcctggctgcagcctggtggtgaggggcaacagctaggcagagatggagagggtggctgggcctcttgggcccagagaggtttgtctgtgtcctgaaatcaaagatggaatgatatgctctctcttccttttggatagggatctttggctacaggagc

SEQ ID NO: 9415 - DNA, 577 bp, Homo sapiens
  MAP TO AC005300.10; EXPRESSED IN FETAL LIVER, SIGNAL = 9.8; EXPRESSED IN ADULT LIVER, SIGNAL =  16; EXPRESSED IN HELA, SIGNAL = 7.8; EXPRESSED IN PLACENTA, SIGNAL =  19; EXPRESSED IN BRAIN, SIGNAL =  11; EXPRESSED IN BONE MARROW, SIGNAL = 9.3; EXPRESSED IN HEART, SIGNAL = 5.4; EXPRESSED IN LUNG, SIGNAL =   8
gaactcctgggctcaaacagtcctcctgtttcagcctcccaaagcgttgggattacaggtgtaagccaccgcagccagcctctgggccattctcataaattcagggaacaaaacccttagccagatgtgcctccaaagaagcatggacaaatcacagctctgcaggagggcttgcaaggtcagcgacacagccaatgcagggcactggaggagtgaaggatgaagacacagcccaacccatgctccttattaccgtggtctttagccgccgctccaggtccaccatgtcaagcagaggaaaggccatccgcagctcatccacggtgacgacatttcggaagcccagtctggagcaagctcaggaagtaatgctggacagttcttggggaagatgcctttctgaatgcatcaaatcacaagtgaagggaacacaacccactcctgatcaagccaggcaggagggcaccaagcagagcccagcaaggatggcacaaatcctgcaggtgctggcaggcaggctgtaactgcacaggtagagtagagagggcagctcctgggtaacccaccagcagtcacc

SEQ ID NO: 9416 - DNA, 572 bp, Homo sapiens
  MAP TO AL022318.2; EXPRESSED IN LUNG, SIGNAL =  18; EXPRESSED IN FETAL LIVER, SIGNAL =  16; EXPRESSED IN BRAIN, SIGNAL =  23; EXPRESSED IN PLACENTA, SIGNAL =  16; EXPRESSED IN BONE MARROW, SIGNAL =  16; EXPRESSED IN HEART, SIGNAL = 7.4; EXPRESSED IN ADULT LIVER, SIGNAL =  15; EXPRESSED IN HELA, SIGNAL =  14
ggcaacagagagagaccctgtctcaaaaataaataaataaggaaatgccctggggctccaggcccactctctgctcccatcgccccactcccgcactcctcctgctcctagtctgagctccccctgccttcctcctcctccttcccaggtcaatcctgagacccatagtcatgcagaaaggtgcttcctctcttggttctgcgacaacacactgtctcctaacaaaaactaccaggtcacctggtacacatcttggagcccttgcccagagtgtgcaggggaggtggcaagttcctggccaggcacagcaacgtgaagctcaccatctttgccgcccgcctctactacttccagtgtccatattaccagcaggggctccacaggctgagtcaggaaggggcctccatggagttcgtgggctacaaaggtgagacgtggggggctgaggtgactgggtgcaggagggacagcatggggggcagatgggtctcctgatatggtgaacaccacccggactgcgtgtatgtcccaaattacaattctttctttgcgaatgacatgtgaaatttaga

SEQ ID NO: 9417 - DNA, 581 bp, Homo sapiens
  MAP TO AP000189.1; EXPRESSED IN HELA, SIGNAL = 1.6; EXPRESSED IN BRAIN, SIGNAL = 1.6; EXPRESSED IN PLACENTA, SIGNAL = 1.7; EXPRESSED IN HEART, SIGNAL = 1.4; EXPRESSED IN LUNG, SIGNAL = 1.9; EXPRESSED IN FETAL LIVER, SIGNAL = 1.4
gcgcctcttttctttttgtgctgcctgtaccagtagggccatctttgtagccaaaagtcgggggtgtggggccatgcccagggggacctggtaatgccatttctgcactttgacaaaaactgagttgtatgaatgacttagataatggacattgaaacatttttgtaattatttccctctctctcctcccttcctccctcttctttttctctgtccccctcaagaccctctttcccagctgcccgctcctcagcacccgaagattcgcctgtacaacgcagagcaggtcctgagttgggagccagtggccctgagcaatagcacgaggcctgttgtctaccaagtgcagtttaaatagtaagccggtatttctgttggatccttgctgggagctgtgggggcatcgtgcggaaccctggggccacatactagtccctgcctctgtgcagggtttgttatcaaacccgtgggaaacacatcgttcttggagcttgtaaaatctctgaggacagaggtttcacagcctcccactcatctgaaggcttaaactacactggcagtcaggactccgctgtctaacc

SEQ ID NO: 9418 - DNA, 591 bp, Homo sapiens
  MAP TO AC004624.6; EXPRESSED IN LUNG, SIGNAL = 2.2; EXPRESSED IN HEART, SIGNAL =   2; EXPRESSED IN ADULT LIVER, SIGNAL = 4.3; EXPRESSED IN HELA, SIGNAL = 2.2; EXPRESSED IN PLACENTA, SIGNAL =  13; EXPRESSED IN BONE MARROW, SIGNAL = 1.9; EXPRESSED IN FETAL LIVER, SIGNAL = 4.4; EXPRESSED IN BRAIN, SIGNAL = 2.5
ccagtgtggaccagtcaccctggaggcatgtttctgttaattagacggacagaatggagtcattgtgcttttgggaatgtgaacgaagtggagaagggatgccccacaaaccagccgtttctctttttggggtttaaaagtggacagggacaatgagggcacatcacggctgtcattttttatgacctttccatggtcagtttcatagaaagtgacctttctcactaaaagtttgttacttgaccatctgtttgcttccatgaatgtgaccatatttagtacttttccttaggattccaagtgggttgaagagaagcagctgctcatcagaacaaaccaagacttgctggaaaaggtgcgtgaccccacctcagggaagcacacagccgcagggcagttgggaccccgcgggcctgctcagactacacgggtcgtgcccagcgccatttgggcactccagtgaccagggcctcgggtcctgcacacctcccatgaggagagatgtcttcctcacatggaatcaaagccacatctgtggttctatcctctgggaccaggtctgcagagctggtttaggtcatcctccttggg

SEQ ID NO: 9419 - DNA, 567 bp, Homo sapiens
  MAP TO AC007313.3; EXPRESSED IN LUNG, SIGNAL = 2.8; EXPRESSED IN HEART, SIGNAL = 2.8; EXPRESSED IN FETAL LIVER, SIGNAL = 8.2; EXPRESSED IN ADULT LIVER, SIGNAL = 4.2; EXPRESSED IN HELA, SIGNAL = 3.1; EXPRESSED IN PLACENTA, SIGNAL = 8.7; EXPRESSED IN BRAIN, SIGNAL = 2.1; EXPRESSED IN BONE MARROW, SIGNAL = 2.5
gtggtaattgtgtgtgtgcgcactatttttaagcacttgagttgattttcaaaatggctctttaaaaactcaaacatttctaaaatccaattgatcctgtcattgtcacctttaggtataaactgaggaagagagaccaccgcccaaggccctgtactttagagggctttgctttggcttctttccagctcaacttgaatctgagcaggcaaggagacatgcctacccagacatacgctcaggtggcctagaccccagaattccttgcccagattgccctgatctgctccagggataggcagatatctttcctggattctgtcttccaagggtaggtctcactactagcatggccaccctggggcctaagagtaggccaagaaacagctgtttgggagtggagagagcagtcatcatgacagagcttggacatgtgggcttgtctgggatatcctcatgtgtttggaggaggccccctgctgtgtcagatgaagctggagggaggatgagctagggaggggctggaagggggtgttttccccacacagggatttgaaggactctgga

SEQ ID NO: 9420 - DNA, 569 bp, Homo sapiens
  MAP TO AL022327.17; EXPRESSED IN ADULT LIVER, SIGNAL = 1.5; EXPRESSED IN HELA, SIGNAL = 1.6; EXPRESSED IN BRAIN, SIGNAL = 1.7; EXPRESSED IN PLACENTA, SIGNAL = 1.2; EXPRESSED IN BONE MARROW, SIGNAL = 1.7; EXPRESSED IN LUNG, SIGNAL = 1.3; EXPRESSED IN HEART, SIGNAL = 1.3
aaggctttgtgggtggttctgggaagggggagagagccctggggctgcagtctttgccagggggtctttactatcttgccccaggccaactggagagcaagtcccctggcatgtggtgagcccccaccccgagacacactccaaaatgtctgtgggaccccaggagtgggcctgggtcaggggggcaggctgcacaccagtctgcatcagagcagtggaagctgctgccccacctggccagcaagggggcaggaagcccaccacgacttgctggcaagctctgtcgactctgctcaaagacgaacagcagaaaaggccaacacgggcttgctgggacacctgggaggcgaccccaaggttgctgcagcccaggcctctgtccacagggaagcggccgcatcctcacagggaggacttgcccccagggccttctgctctgagaccaaacgccattctgagcagcctcaccagacgtgggcagtgtggagctgggtatcattttgggcactgggggctttgctcagccaggtttgcaggtgggactcagagcagaacttcacgtgagccac

SEQ ID NO: 9421 - DNA, 548 bp, Homo sapiens
  MAP TO AL035681.13; EXPRESSED IN LUNG, SIGNAL = 6.2; EXPRESSED IN HEART, SIGNAL = 2.6; EXPRESSED IN BONE MARROW, SIGNAL = 6.5; EXPRESSED IN ADULT LIVER, SIGNAL = 4.8; EXPRESSED IN FETAL LIVER, SIGNAL =  10; EXPRESSED IN BRAIN, SIGNAL = 5.3; EXPRESSED IN PLACENTA, SIGNAL = 6.4; EXPRESSED IN HELA, SIGNAL = 6.9
caccagtgggagccagtcacacacctttccggaaagtcacacacctttccagaaatgcacgacaggaattctggctcattttcggatgggttaacaggcttggagagggcacgtgacgccccaggtctcttggttgagtgccagccctgggattagcatccagaactgtcagcctactatgccgagtgcacctcaaggctgcaggggcaggatggacagaaaccactcaccctaaaagcttctgccaaggcagtggcgccatcattctccagacggtttctgccagccacaaagaccttcagggccagaggcttgccttgggcactggatttccggtgacattcggtcagagctgcagccaggatctgtggggaaaggcaaggggccctggtcatgggcaggagccccttctcccagcggggtggccactgctgctgaactgctcttcaacatcccacgccacccatcggtgcaggtcaggggacgcaggactgctaacagctcaacagtcacaccttaaatatgtccagcacttcagttacacaagg

SEQ ID NO: 9422 - DNA, 563 bp, Homo sapiens
  MAP TO AC007313.3; EXPRESSED IN LUNG, SIGNAL =   2; EXPRESSED IN BONE MARROW, SIGNAL = 2.6; EXPRESSED IN FETAL LIVER, SIGNAL = 1.7; EXPRESSED IN ADULT LIVER, SIGNAL = 1.7; EXPRESSED IN BRAIN, SIGNAL = 2.1; EXPRESSED IN PLACENTA, SIGNAL =   2; EXPRESSED IN HELA, SIGNAL = 1.6; EXPRESSED IN HEART, SIGNAL = 1.3
tggagagacgatgcaaacagagacatgcagatcgatacagaaaatcaggtggagggtgtgtctgctcttctcccagctccctagcaacagctagatcatccttttataaatcttttcatggaaattctagcctttctgtgcaggtctcatctctgttttttgtctctcaatatctttctccctgcctgtctgtgtctatctatttctctttaccctttcctccctcccaccaacaccctgtctctgtctctctctgcatgtttctttctctctggtgtgatttcccacattaaccaccgtccatttctttgattccttcttggcaatgagagctagagcaccattatgcaacaagcagtcctgcctccctgctaccttaaaataatactgtttcatggtgacaaatggatatggttaacaatgaaagtaaaatgcttagcaggcaggggtgtgactgtgtcagatttctctgctagcaaaaacagacagtggcccgagaatctctaaagaaaggaatctgtatatggggatagttggtggtgtttgccaggtggactcctctg

SEQ ID NO: 9423 - DNA, 565 bp, Homo sapiens
  MAP TO AP000233.1; EXPRESSED IN HELA, SIGNAL = 2.6; EXPRESSED IN PLACENTA, SIGNAL =  27; EXPRESSED IN LUNG, SIGNAL = 3.4; EXPRESSED IN HEART, SIGNAL = 5.2; EXPRESSED IN BONE MARROW, SIGNAL =   2; EXPRESSED IN ADULT LIVER, SIGNAL =   2; EXPRESSED IN FETAL LIVER, SIGNAL = 5.1
ttctccacattggggctaacttaaattcacaatgccacctgctaccactgcttttctttctatgaattgtaatgactagatagagcattaatcagagcttgataaatcctagaaataagcaaaaagactgttgctaaatgttttggtgctatttgtttataattgagagcttgtttggaggttctagcaggggagtgcagctactcacgtaccctagaacaaagactggtcctcctctgtctgggatggtcgtcctcttcattagagtgcacagcttcgggacagacacacaaggagtggtgagggaggaaggggacaccagcctagccagccagatcagccgaatcaaccctggagatccatggggtggcagatgtcccagccagattggcctcacatccatattttttataattgtaaaaaaaaaaaacctttaagcttctatagtcatacaatctgaaaaatggtgtatatatgtatacatttatatgtggtatataaatacttataaatgtaaacacataaaaaacatatttattacatgaggacctgagaaccaaattct

SEQ ID NO: 9424 - DNA, 577 bp, Homo sapiens
  MAP TO AL022329.9; EXPRESSED IN PLACENTA, SIGNAL = 1.9; EXPRESSED IN HELA, SIGNAL = 1.5; EXPRESSED IN BRAIN, SIGNAL = 2.5; EXPRESSED IN HEART, SIGNAL = 1.4; EXPRESSED IN LUNG, SIGNAL = 2.1; EXPRESSED IN BONE MARROW, SIGNAL = 2.3; EXPRESSED IN ADULT LIVER, SIGNAL = 1.9; EXPRESSED IN FETAL LIVER, SIGNAL = 2.3
tgaaaagtccacgttgaaagcacaaatagcctttagaaagaaagtattccttattattgataggagtgtttctatgtgtaagaaacagtagtgttcttgcttctttttcattaaggtacaaattcaaaatgtaatttgttctgacctttcagttattatctcattcttggtccaagttaacttgtgccagtgacttgaagatgcaaggagtgcgtgtagatgtcaattcttagaaatggatgttccggtgaaatcagttttggacctagaatctgccaaagctgagcatcatgaaatgcttcgaatcgagagcctcatagatctctctgaggtacaggcagtcccagcttttacacgcaatggattcttagagacagcctcttacagtgttttccccagtacaccggactttgccaaacatctgtttggacaagggtggaaactatccgacgaaggtgtcaaggcttgaggaagggaagcacaggtctttttcagtcagtggctggccagcaaagcagtgaaatgcaaagtagtattaaatagctagcaggacgcctggcctccctagggtccctgg

SEQ ID NO: 9425 - DNA, 576 bp, Homo sapiens
  MAP TO AC007841.1; EXPRESSED IN PLACENTA, SIGNAL = 6.4; EXPRESSED IN BONE MARROW, SIGNAL =  18; EXPRESSED IN BRAIN, SIGNAL = 9.9; EXPRESSED IN HELA, SIGNAL = 9.4; EXPRESSED IN HEART, SIGNAL = 5.1; EXPRESSED IN LUNG, SIGNAL =   5; EXPRESSED IN ADULT LIVER, SIGNAL = 7.3; EXPRESSED IN FETAL LIVER, SIGNAL =  11
ccacccctccatggtatatggatacagttagagcagtctgaaagacttggaacattttcctatggcaaacgttcttttcctcccctacctggacattccccttccatcctcgctcttttgtgatcaacattccatacagcagccatgaagatctttaaaaaaacaaaaacaaaatcctatttctgcattgcctagaacttctgagggtttcttatcacaattagaatcacatcccaactccttactgtggtctatgaagctccaagtaatctggcccctgccacatcactgactttcctttgcctaacctggtggccacactggcttctccccagttcttcagacccagcagctccatcctgcctcaagacctttgtgcttgctgttccacctgccaggatgtactgaaccgagagcctgcactgctcatttctttctgtcatttagatctcactcagtgccgcctctgtgaggccttctctgaccacctgatttattgatttattgacccaagtttatttttgtagagatgaggtctcactatgttgcccaggctggtctcaaactcatgggctc

SEQ ID NO: 9426 - DNA, 572 bp, Homo sapiens
  MAP TO Z82188.2; EXPRESSED IN LUNG, SIGNAL = 3.2; EXPRESSED IN HEART, SIGNAL = 2.3; EXPRESSED IN BONE MARROW, SIGNAL = 2.8; EXPRESSED IN ADULT LIVER, SIGNAL =   3; EXPRESSED IN HELA, SIGNAL = 2.4; EXPRESSED IN PLACENTA, SIGNAL = 2.7; EXPRESSED IN FETAL LIVER, SIGNAL =   2; EXPRESSED IN BRAIN, SIGNAL = 4.4
acctggacagtgggctagaggatcctaacagtgctgccagctgctcatcactgagccctgactgtgccaggtgccaggctaagctggtgagctgcagtatcctatgatgtcctacgagggaggcactactgtcatccccactgcacagatggggagcaaacgtgaggtcacatgttctggtcacagctaggaaggggcaaatctggaaagatctgtagtgaccacctctacgcccattccacaggctggcaaactgaagccaggcctgggaaggcacccacctgagtgcccagctggcatccgctttcccagttgcccccagggctttgagctatgaggatcatggactcaaagcctaatggaccttagagatctaaaaatagaattttgaattcttagaacaggcagagaatcttacagccataggattttagactcagtatccttgaatcagagaatgttagaattccagaatgctagaatgagtccttcttagacctggaattgtgcaacctggaaccttagagtcctgcctccctggtaggggacccgcgtcaccatccaccttgctg

SEQ ID NO: 9427 - DNA, 581 bp, Homo sapiens
  MAP TO AC004624.6; EXPRESSED IN HELA, SIGNAL = 2.3; EXPRESSED IN PLACENTA, SIGNAL = 3.3; EXPRESSED IN BRAIN, SIGNAL = 2.2; EXPRESSED IN HEART, SIGNAL = 1.9; EXPRESSED IN BONE MARROW, SIGNAL = 2.2; EXPRESSED IN LUNG, SIGNAL = 2.4; EXPRESSED IN FETAL LIVER, SIGNAL = 3.7; EXPRESSED IN ADULT LIVER, SIGNAL = 2.3
atttttgctggctgaaatcgtccacccttccgcctcccagcattgtctcattgtatgaggtctctatcccgttcagggcagacaagggccagcagcccgctgggcagagttgccccaggggtacccaccttggtggggcccttgatggggcggaagccctgtgagcacatgaagatctggaaacgggggagttcaccagattccctcggtggagacgctgtgtgggatgggaaggaatgatcggtaaaccacccagggaattaattctgcaggtgcggtgccaaggagggtaactaagagtctgggtttgcccaggactgaggggtttcctgaggctcacaccaggaaagtcctgggcaaaccgggtctgtcggtcaccctggtaccacgtgctgagtggggttctaagagggcagggcggatgctggtgcagtggctcccaccagcattgacctcctctgcccttctccctccctccccccatcccccaggctgcagttaaacaaatcttagacaagtacgtgatgtggtgtcacatcccacccatgacctttattagctgctcagggtgcctacatgtt

SEQ ID NO: 9428 - DNA, 571 bp, Homo sapiens
  MAP TO Z95114.19; EXPRESSED IN LUNG, SIGNAL = 4.8; EXPRESSED IN HEART, SIGNAL =   4; EXPRESSED IN ADULT LIVER, SIGNAL = 6.1; EXPRESSED IN HELA, SIGNAL = 5.1; EXPRESSED IN PLACENTA, SIGNAL =   5; EXPRESSED IN BONE MARROW, SIGNAL = 8.2; EXPRESSED IN FETAL LIVER, SIGNAL = 6.8; EXPRESSED IN BRAIN, SIGNAL = 5.3
acccactggtagacttgccccccactttctgcaacacccaatccagagtgggctccatttcataggccctcctgccaatcacccagccagaacccagatattctaacaggttccttctcgcaccccttatggaggtgccgatggacctccacctgtgtccccctcactgagaagaatgaactcaactggttcaaccacctacaggagtgatctggcagccccagcctggaaacattgactctagagacttccatggtttctgtagtgaggaggcaacaacaagcccaggcagctgtgaggtggccctgtcaggcccctcaaaggtaggggttggctccaagcaggcccctatctctttcttctttactgtggcttcggctgcatctgtttcagctggctcccaggcacatccattccagccgctggtctttgctcccagactttatgttaacaacgcagtggttcccgggaccccctgatgcgttttcatcctcaaggtcatgtgtagaagcatcctcatcgaaagcctctcacctccctcttcctatttcctgcctctgtcttagggatc

SEQ ID NO: 9429 - DNA, 575 bp, Homo sapiens
  MAP TO AP000233.1; EXPRESSED IN PLACENTA, SIGNAL = 2.4; EXPRESSED IN HEART, SIGNAL = 1.3; EXPRESSED IN LUNG, SIGNAL = 1.7; EXPRESSED IN BONE MARROW, SIGNAL =   2; EXPRESSED IN BRAIN, SIGNAL = 1.7; EXPRESSED IN HELA, SIGNAL = 1.6; EXPRESSED IN ADULT LIVER, SIGNAL = 2.7; EXPRESSED IN FETAL LIVER, SIGNAL = 2.2
atggaggagtgggcagagaggggcccagcgaggacctggaactccctcctcaggccgtgaggaggtgcacctggggctgcacactccatggagatggcaagagctggagacaagcgggagccctgccccttctcagttgatggggcaggagctccctggggatttacatttgcaactaatctaagttaactttcaaatgacctactgttctttatgcttactacaggtaccttattacagaatatattcaatttcttactcacatctcctgtaacactggtgttattcatttaatttacacagatgtcatccaatgtgtttttacaattgttactttaacaaacagttatcttttaggtcattttagaatcagagaaataaagcattttatttcaactgtatttgttcctggtatgacccttttcccctttctttatgtagatccaaatttttgatctatatatttgtttctataacattttttattaagcttctgttaatacattatataaagcacacatgttggtagtatgtttttttcactttttgttgtttgagaaagtatttcttcttca

SEQ ID NO: 9430 - DNA, 580 bp, Homo sapiens
  MAP TO AC004624.6; EXPRESSED IN LUNG, SIGNAL = 2.8; EXPRESSED IN FETAL LIVER, SIGNAL = 3.1; EXPRESSED IN ADULT LIVER, SIGNAL = 3.3; EXPRESSED IN HELA, SIGNAL = 2.7; EXPRESSED IN PLACENTA, SIGNAL = 5.3; EXPRESSED IN BRAIN, SIGNAL = 2.2; EXPRESSED IN BONE MARROW, SIGNAL = 2.3; EXPRESSED IN HEART, SIGNAL = 2.5
atgggtaccgcaggatgactagactagtttctttttcccctgaaatgcccccatcactctctgtccatcacacatggaagtgttttaacactttgccaaaggctttgcttgacagagtactgtggtgaatgcattgaaagttccagaactttccagaaatctgacagccccatccctactctccagctcctgactttctgtcagaaagaccctagcaaacctccctggactccctgcaggagggtgcctccagtccactcccacaccccagcttgcagaagatgcagtcagggcagagccttgcagaagatgcagtcagggcaaagcagagggtgtccacctttgtcttcccggagcgtttgtgtccctgagggccatgactctgccttactgggcctatccaacagtccccttatgggatctcctccagggacaagattggtgctgattatctcatttcccagggagcctgctggttcagcgtgggctcacgttagccccaaaggagaggttggaggagaaggatcctgagtggttcctcggactgtgccctggggactggggtagggggcttgctcag

SEQ ID NO: 9431 - DNA, 555 bp, Homo sapiens
  MAP TO AC008283.3; EXPRESSED IN FETAL LIVER, SIGNAL = 2.4; EXPRESSED IN ADULT LIVER, SIGNAL = 4.6; EXPRESSED IN PLACENTA, SIGNAL = 2.6; EXPRESSED IN HELA, SIGNAL = 2.5; EXPRESSED IN BRAIN, SIGNAL = 1.8; EXPRESSED IN HEART, SIGNAL = 1.8; EXPRESSED IN BONE MARROW, SIGNAL = 3.9; EXPRESSED IN LUNG, SIGNAL = 2.6
aatgtcaaagattttatttaattgtggaaatatcaatgtaaattagtagccaaataatgtttaatataaaaattccagaataaattttctttacgaaaaaacttaaaatatttttgaccgtaaaaatcctttgatttggcaagatatatttaataatatgtataacaggtgaatggtattctataaattggtattatttaaaattatattgtattttatattctcaattatatattctatgatctttttggcacagggactggttttgttaaagacaatttttccacaaatggaggtgggacatggtttcaggatgactctgttccacctcagatcatcaggcattactagatatctcataaggagcatggaacctagatcacgcacatgtgccgttcacaacagggttcatgctcctatgagaatctaatgctgctgctcacctgacagaaggcagagctcaggaagtaatgctctcctgctgcgtggcccggttcctaacaggtcagggacccagaccggtccatggcccaggggctggggacctttgttcta

SEQ ID NO: 9432 - DNA, 551 bp, Homo sapiens
  MAP TO AC004032.7; EXPRESSED IN BONE MARROW, SIGNAL = 2.2; EXPRESSED IN LUNG, SIGNAL = 1.8; EXPRESSED IN HEART, SIGNAL = 2.1; EXPRESSED IN ADULT LIVER, SIGNAL = 2.9; EXPRESSED IN FETAL LIVER, SIGNAL = 2.4; EXPRESSED IN HELA, SIGNAL = 1.9; EXPRESSED IN PLACENTA, SIGNAL = 1.8; EXPRESSED IN BRAIN, SIGNAL = 2.3
gacatcaaccttgccctcacagagctcctgctctggaggaagaccaacattacctaggaatggctctaacaggagaaaaactgcacgtggtgtgtgctgctttagaagaaggtgctggagctctagggagagcacctgggggcttgacctggcctgcgtaggggaagggtcagaaagacactctttgtcttgcccttcctgatccttcacacacataccttggatctaatctggggtgcccctccagcagatacgttctcctggacaaacatttctccctggtatgtgcccagaaccagcctgaagctggggatctcagcccacgccagtacccatggcctggtcctttcctgctgtgtggccgtagctaggctggaatgggggaggactcaaccctgggagatgcaggggctgcaggttgtggggtagaaagtgagggtggggctccatgcttcctgaatcttgatccaagatgaagatatccagtccagggccctggtgaggaagtgtccagtggtctctgatttgtgtctccctgaacacaccgaaag

SEQ ID NO: 9433 - DNA, 586 bp, Homo sapiens
  MAP TO AL035701.13; EXPRESSED IN HELA, SIGNAL = 9.7; EXPRESSED IN PLACENTA, SIGNAL =  21; EXPRESSED IN LUNG, SIGNAL = 8.9; EXPRESSED IN FETAL LIVER, SIGNAL =  14; EXPRESSED IN BRAIN, SIGNAL = 7.4; EXPRESSED IN BONE MARROW, SIGNAL =  10; EXPRESSED IN HEART, SIGNAL = 6.6; EXPRESSED IN ADULT LIVER, SIGNAL =  14
tctaaatctcatttaagtcaaggtggttaataaaatcactcaagtcttctgtatctttattgtctttttttcttggtgtggttggtgtatcaacgacttagagaggagtgctaaattcttcaattatgtttacgaattctctttagttccatcagtttttgattaatgtgtttttaagctgtttttaggtatgaacacttttagaattgtcatgctttccttacatattggtccttgtacattaatgaaatctctctgttcctgaaaattattgtcttgaagactactttttctgatatcaatatgtatatatttattatggttagtttctgatatggttttgctgtgtctgcacccaaatctcatcttgaattgtagttcccacaattcccacatgttgtggaagggatctggtgggaggtaattgaatcatgggggcagttacctccatgctgttctcgtgatagtgagttctcatcagatctgatggttttataagggtttttcgctgctttgctctgcacttctccttactgccaccatgtgaagaggacatatttgcttccccttccgccatgattgtaag

SEQ ID NO: 9434 - DNA, 540 bp, Homo sapiens
  MAP TO AP000346.1; EXPRESSED IN LUNG, SIGNAL = 2.4; EXPRESSED IN BONE MARROW, SIGNAL = 3.1; EXPRESSED IN FETAL LIVER, SIGNAL = 2.3; EXPRESSED IN ADULT LIVER, SIGNAL = 1.9; EXPRESSED IN PLACENTA, SIGNAL = 3.1; EXPRESSED IN BRAIN, SIGNAL = 2.8; EXPRESSED IN HELA, SIGNAL = 2.2; EXPRESSED IN HEART, SIGNAL =   2
gggaaagttgtgagagccacgtacctaaaacagtgagctgggtcccactgccaaacacatgcttcactgaattatgcttggattgaaacccccagggccagcatctggcgccagtccaggagccacgctggagcaggaacctgctgggtgtgaggggcacagggctgcagtgtgtaggctgtgacccaggcacagggcaggggggtggccagtatcccagtagtgtcccccagtagtgtctctgtgcctgttctctatctgaggcaggtgccgcccacagccttggagtcaccccagcatatgtccccctctctgaagctgttggtgctgatggcaacgctgggcccagtaggtcccagcaactccctgagtgacacatcccctcaggcagctgtgccgtgtggctgaggagtcctcagctggctcggacctgtccacctcacttggcctcattttaagggcctctgaaatctgccacaagtgtctgcagtcaagccaagttgacttgctccctggaccaggacattgggtcattcctga

SEQ ID NO: 9435 - DNA, 597 bp, Homo sapiens
  MAP TO AC006548.19; EXPRESSED IN LUNG, SIGNAL = 2.4; EXPRESSED IN BONE MARROW, SIGNAL = 3.2; EXPRESSED IN HEART, SIGNAL = 1.6; EXPRESSED IN FETAL LIVER, SIGNAL = 3.2; EXPRESSED IN ADULT LIVER, SIGNAL = 1.7; EXPRESSED IN HELA, SIGNAL = 2.1; EXPRESSED IN PLACENTA, SIGNAL = 4.3; EXPRESSED IN BRAIN, SIGNAL = 2.9
gccttcaaatgaagtcccaggtcaaggacaagctgcaccatgccactgtcactgtcatcatatctggagtttggtggctacgcccagagcctcggacagggctgacacacactaggggcccaggaactcggacagggctgacagacactcagggccctgtggcatggcactcctccctgcctgctcaagtcctggctgctatgtcctgtcaatcagtacctgtgatcactgcccagtctgggcccaggtttggcagcctgtgcctgaggatgctttgcctgcccagctgatatggggatgagggctgcacagggcacaggccaggactacaggccaccccctcctccttcaccagcaccacggccaggctctctggctgcccattgtcttgaaacatgtatgtgcctggatctaggaactggtgggcaaacctgaggagcagagatcaggagtcagaatgtgaaggttcacctgcagtgggctactcacaccaagccaactctcaatgtctccccgcatatggaacaacgtggtccagggaagctgccatgacccctgctgggcaccaggaggccccgcctgccaagctcccctctg

SEQ ID NO: 9436 - DNA, 573 bp, Homo sapiens
  MAP TO AL021707.2; EXPRESSED IN PLACENTA, SIGNAL = 6.4; EXPRESSED IN HELA, SIGNAL =   4; EXPRESSED IN LUNG, SIGNAL = 2.4; EXPRESSED IN HEART, SIGNAL = 2.6; EXPRESSED IN BONE MARROW, SIGNAL = 1.4; EXPRESSED IN FETAL LIVER, SIGNAL = 7.9; EXPRESSED IN ADULT LIVER, SIGNAL = 7.9
gggtcgttgtgaggatcaagtgcacagcttcctataaacactaaaacactataacatcttgtgagccaggtactattattattcctcagtgcaaagaaagaagccgaagtccaagggggataaatgctggggtcccactgtgggtgagccgcagagtgatcattggaagccaggtgctcccccttcacttcctgtgtgcggagcacgctcgccctgggagtttcactagaaagaaggttgccatgggccagtgggacagcttgtatctcaagtgcacgcggatgccccagaatcccaggatctcagctgagctgtttgtggattattagatctgacttaaaaggtagctaatccagacccttcctcatctgtaatacatggatgacagctcccagctgtagtgttatgagaattagtgcggtcatgagtaaggtgcccagttaaagcccgagaagtaaagcagctgggccaaggtctagcaggcaactgaaggggagagccaggcccctaaacttgttgtgtccagcccatgtgctcaggcccagtgcagttagcatcagtggggacttgact

SEQ ID NO: 9437 - DNA, 575 bp, Homo sapiens
  MAP TO AP000129.1; EXPRESSED IN FETAL LIVER, SIGNAL =  13; EXPRESSED IN PLACENTA, SIGNAL =  19; EXPRESSED IN HEART, SIGNAL = 5.5; EXPRESSED IN LUNG, SIGNAL =   8; EXPRESSED IN BRAIN, SIGNAL = 7.2; EXPRESSED IN HELA, SIGNAL =   7; EXPRESSED IN BONE MARROW, SIGNAL = 8.3; EXPRESSED IN ADULT LIVER, SIGNAL = 8.5
ctatagcaccacagccccacccaggtgtggctgtgagggacaataggaagtgaaattctccctgcaggtagagatctacactgatttatgagaagtagcttaatatttgactgattgggcagagtctgccggggcgggggttggggggagaaacatgattagaaaaaatgacaaaatagttattgagaaggggaatataaatggagttctctgaatgcccaccatgtaaaaatgttcagattccatgtgactgttcactgaagagctatctcagcagaggaggatcttattaataacatggacaagatgacctagcatgtggatatccatttggctcttttccacatcatcccacttcttgcccaacaacctcattaatcaattggtcacagtggcagggctgaagggtatacatgggctcagtaaggtggatccaatccagccactgctgagtgctcaatctgccagcagcagaggccagccctgaatctctgatgtagcctcactacctgagagaatcctctagtcacctggaggcatcatggaaggggcagtggtttgttcccactggaaaa

SEQ ID NO: 9438 - DNA, 593 bp, Homo sapiens
  MAP TO Z83844.5; EXPRESSED IN HELA, SIGNAL = 1.5; EXPRESSED IN BRAIN, SIGNAL = 1.7; EXPRESSED IN PLACENTA, SIGNAL = 2.1; EXPRESSED IN HEART, SIGNAL = 1.9; EXPRESSED IN LUNG, SIGNAL = 1.7; EXPRESSED IN BONE MARROW, SIGNAL =   2
ctgaggctcaaagatgtttcctctgtcacctccatgatgtgtaaacatctgtgaccacagtttccttttcctatccctgtctagccttctctgggccaaggctctcccaggtcattgacctggccatccaggaaacagcccagcgtgtcccctggctacatctcactccagggctgcttgcccttctcaaaccctgaggcattcctaagccttccagggacgctgggcttgtatccgtgtggagctggaagcctgcgggctcctcactgccttccaccagccctgccccagcttccaggtcccactgaccacccttctccctcgtaggttcaggctcttcgggcccagctggaggcgtggcgtctccaaggggaggctcctcagagtgcactgagatcccaggaggatggccacatccccccgggctacatctcacaggtaaggccggggggctgtttttcagggggagggggcagatttctgcttgccgtgttatcaggaaacagctgagattttgggagcccttcctgtgtgtgctggaacctgtgtggggcatttgacatgcgtcatctcatttactctccccacagctg

SEQ ID NO: 9439 - DNA, 577 bp, Homo sapiens
  MAP TO AL022238.1; EXPRESSED IN PLACENTA, SIGNAL =   2; EXPRESSED IN BRAIN, SIGNAL =   2; EXPRESSED IN HELA, SIGNAL = 2.2; EXPRESSED IN HEART, SIGNAL = 1.6; EXPRESSED IN BONE MARROW, SIGNAL = 2.3; EXPRESSED IN FETAL LIVER, SIGNAL = 2.2
gcagggtagagagtggttggagggaggggccgagagtggaggcagagattccagttgagagatgtataataatcatgatggtgaaaagcgacggcagcctcaactagaaagtagcaacaggttgtaagagaaaggggaggtttcaaaaactttaggaaaggccgaatagttgaggggtgaagatggaaaggtgaagaatccattaaacatcatccccaagtcctgcctggagagagtgggtaggtaggtcgtaatggcaacgggaccactgaaggggaggaccaggttcatgaggaaaggtgatgagttaacttggagcgtggcaaattcgaagaatatggaggagctgcccaccagctggatgtgctggtctgaggttgagagagaaatgcatcttggagctagaaatcagttatctgcttgtagatgttaattgaagttgtgagagtcatccaggagttccaggagagtgcagagagctagaggagagtcgaaggcgcaacattaaggcatctgaagaacaggcatataggaggaggaactggaaaaggagactaagaaggagccagaaagccag

SEQ ID NO: 9440 - DNA, 545 bp, Homo sapiens
  MAP TO AC007262.4; EXPRESSED IN HELA, SIGNAL = 3.4; EXPRESSED IN PLACENTA, SIGNAL = 8.2; EXPRESSED IN LUNG, SIGNAL = 4.2; EXPRESSED IN HEART, SIGNAL =   3; EXPRESSED IN FETAL LIVER, SIGNAL = 7.8; EXPRESSED IN ADULT LIVER, SIGNAL = 7.9
tttccttcatcttccttgcctcctcctcaacaacatccctccaacacacacacacacacacacacacacacacacacacatgcatgtgcacttttctaaagcatgaacattgcacaggccaggaaagttctctcacggaactttcttccaagccatcattgattaaagtttttagtaattgggctgccaccctgtgccagagactatctgtgccccctgtgccacccagaatgggatcctcatcaccagcttgcaggaagtgatctgctcccaaaacctcattttacctcctgctttctcagaccaattccagtaccaactgtatcagttcagttattctgggaagcagatgctgagacagcgttaggagtgcaagtggttcattgaaagataacatctgtgaaagataaagggggagagccccagactgtgctacagagctgacaaaatcttggccaaaccaatggggagctctagagcaaagactgcctgttagagggacccacattaggcatagaagccaggctctagcaccactgccatgc

SEQ ID NO: 9441 - DNA, 561 bp, Homo sapiens
  MAP TO AC007363.3; EXPRESSED IN FETAL LIVER, SIGNAL =   2; EXPRESSED IN BRAIN, SIGNAL = 2.9; EXPRESSED IN PLACENTA, SIGNAL = 1.8; EXPRESSED IN ADULT LIVER, SIGNAL = 2.2; EXPRESSED IN HELA, SIGNAL = 1.7; EXPRESSED IN BONE MARROW, SIGNAL =   3; EXPRESSED IN HEART, SIGNAL = 1.6; EXPRESSED IN LUNG, SIGNAL = 3.1
tggtcttagttttggttgaggcctcaagacaataggtgccaaccacttccatgttccaaagtggtctctttgaagctcctctcactattgcctgaagtgggctgggtgtaggggggtgggggtaggggagccacctgctcctcttctgcatctaggtaggggaaagaggagggaaaatgcctataacttgtctttaagaagtttttgctctctgatctctgactccctctctcagcttctgcaacctcttgcatggagaggtcatcagccagagatcttggttctcaatcagctcctttgaaaagagagcttggatgcccagtaacccaatttgaagtggctgagtagttgtgtctctggggctgatgtctgcctccgtggacttggtgtctgtcccatgattaagtcctctacaggagaggggaagagcttgtggcaatcagaactctctgtgtgacagagtcagcctggggttgttttagctctggtctgagtcaggtgcatggagggctgaggagcctaggcagaaagcagccagacagagcttaccagttgcccaag

SEQ ID NO: 9442 - DNA, 563 bp, Homo sapiens
  MAP TO AC008151.1; EXPRESSED IN LUNG, SIGNAL =   5; EXPRESSED IN FETAL LIVER, SIGNAL =  13; EXPRESSED IN ADULT LIVER, SIGNAL =  10; EXPRESSED IN PLACENTA, SIGNAL = 8.1; EXPRESSED IN HELA, SIGNAL = 5.1; EXPRESSED IN HEART, SIGNAL = 3.7
ttttctgattattcattgcaagcatatagaaatataattgatttaatgtattgatcttatgttctgtaaccttgactaacttttttattctaatagatttttagtaaatttcttaggattttctatatcaaaataatgtcacattcaaatagagatagttttattttttttccagtcttatgcccttttttttttttactgcctaattgccctgactagaattcccagtacaatattgaatataagtggcaagagcagatatccttatcttgttcccaatcttaggaaagaaagcattcaatcattcaccattaatatgaggttagctgtggcttgtgtggtgtgtgtgtgtgtgtgcgcgcgcgtgtgtgtgtgttttatagatgcccataatcagattaagaaagctccctatattcctagtttgttgaatatttatcataaaaggattttgaatttgtcaaatgtcttgatagggttggtatgttataatgtttaattttctgatgttaaacaaaccttgcattcctggaataaatcccacttaacatggtatgtaatgc

SEQ ID NO: 9443 - DNA, 595 bp, Homo sapiens
  MAP TO AC004032.7; EXPRESSED IN PLACENTA, SIGNAL = 1.3; EXPRESSED IN HEART, SIGNAL = 1.5; EXPRESSED IN FETAL LIVER, SIGNAL =   2; EXPRESSED IN ADULT LIVER, SIGNAL = 1.8; EXPRESSED IN BRAIN, SIGNAL = 1.6; EXPRESSED IN HELA, SIGNAL =   2; EXPRESSED IN BONE MARROW, SIGNAL = 2.3; EXPRESSED IN LUNG, SIGNAL = 1.9
gtgcctcatccctcccaggggtggggttgcccaggctggactggggatggaatgggagaggtggaggagatacacgcagtcccctccttcttccctgggatgcccggccaggaacagctttcagaaaagggaaagggctgagaacagcctcctccaactccagcacccaaggcacgggcagcagccttgctccaaagactgcaggctgggagcacaccatcccccatgcagaccaaaggctgcttagcacagcgtgaaaatgcagggcctgggcatttgcgaggaggcccagaaaaggagagaaaacactgctgtcgaacattccaactccttcccacagagcagagctggacacgtcctcacgtccatcgcagagaggggcggcttccagcaggagaagagagaactcaagtggaagggaactgaaggctgagcactgtgtttgcaggaatgaaaatatattttcttagggaacagacaaaacaaaatcccaggcggaatacctaagaggggcattcattgtttggctcctgcctgactgatgacactggggtgtcaatatataacattgtgatgacaattggactttcacccg

SEQ ID NO: 9444 - DNA, 571 bp, Homo sapiens
  MAP TO AB016897.1; EXPRESSED IN PLACENTA, SIGNAL =   3; EXPRESSED IN HEART, SIGNAL = 1.6; EXPRESSED IN ADULT LIVER, SIGNAL = 2.7; EXPRESSED IN FETAL LIVER, SIGNAL = 2.7; EXPRESSED IN BRAIN, SIGNAL = 1.4; EXPRESSED IN HELA, SIGNAL = 2.6; EXPRESSED IN BONE MARROW, SIGNAL = 1.7; EXPRESSED IN LUNG, SIGNAL = 2.2
aacctcagagaaatatgtgaaccctttaagccccccagcatatgcataatgaaagcaaaaggagagaagagagataaaggggcagaaaaacattcagagaaataattgctgaaaacttcccaaatttgcttaaaaatgtgaatctctcaaagaagttcaatgaatcccaaaagtaggataaatacaaagagattcacactcacacatgtcatagtacaaatgtttgaagccaacatgaaaatcttgaaagcagaaagtgggaacgagttgccgtgtacaagagaacccaaaaggactgatggctgtcttctcctcagcaatgatggaagtcagagggcagttgatacggtttggctgtttccccacccaaatctcatcttggattcccactgttgcgggagggacctggtgggcggtaattgaatcatgggagcagatatctttcccatgctgttctcgtgatagtgaatgagtctcacgagatctgacggttttaaaaggaggagtttccctgcacaagctccttctgtctctctctgtcaccatgtgaggtgtgactttccccttctgc

SEQ ID NO: 9445 - DNA, 542 bp, Homo sapiens
  MAP TO AC004032.7; EXPRESSED IN LUNG, SIGNAL =  13; EXPRESSED IN BONE MARROW, SIGNAL =  10; EXPRESSED IN ADULT LIVER, SIGNAL =  29; EXPRESSED IN HELA, SIGNAL =  15; EXPRESSED IN PLACENTA, SIGNAL =  20; EXPRESSED IN HEART, SIGNAL =  30; EXPRESSED IN FETAL LIVER, SIGNAL =  33; EXPRESSED IN BRAIN, SIGNAL =  28
ggcatattcccaggagtggtattgctgggtcatacggcaaatctatgtttagctttttaaggaaccaccaaaaagcagctacaccaagagtctgaggcccactggttcaaagtccagactgtgtgaaggttcagggactgccgcttgacctagccctcatcacctcttgcctggacctttccagtagactcctggctaccccctgcctctgcctcagctcctccagtggctcctcacagccaggagatcatctgcagctcttcaaagccacctccctggataaaatcagcagacactgtgccctccgtgggcccctcctgtcccctgtgaggccccacagccatctccacccatgcaccccagcacttaccacgggtgccaagtcatctacagactccctctattggtgggctccttgaggctagagaccatgtctaatttatgtctcgtcatggtcttgaatagaaaaggtccttggtaaataagtgtgttgcatagatgaagaaaccggggctgagagaggaaattgacctgcctgagga

SEQ ID NO: 9446 - DNA, 554 bp, Homo sapiens
  MAP TO AC002472.3; EXPRESSED IN PLACENTA, SIGNAL = 1.2; EXPRESSED IN LUNG, SIGNAL = 1.2; EXPRESSED IN HEART, SIGNAL = 2.1
ccacactcgattggtcagcgcagccgcagactccgcccacatccccgggtcgcgctctaagtgaggcgccaagcggtctccgcctcagggtctgaggctgcgaaaggggcgtaacgatgagcggttcctgccagaggtctggggaggataaaaagcaggaggaagaggcgacggcggcctgtggacgtcttgcaggggtccccgaagccaagcagggtcccaaggccgattcagactccgacctagagacggaaggtgctcggggcaggggccaggcccgtctcctccccttgggggcttctcccgcaggggttgtgggaggtgggctggcgccgccgaggaggcaggagacctctgtccagcagggcacgtagccctctgcggggcgtctccagccccctgccctctcctcggcgctcctggcggcatcaggaactttaccatgagaaggcgcttctagaaggaggttaaaatggaaaatcccgccagacagtgcaccaaaggctgtcccgccctgaaatgcaatcagagctgggttttcccaatccacaggt

SEQ ID NO: 9447 - DNA, 570 bp, Homo sapiens
  MAP TO AP000346.1; EXPRESSED IN LUNG, SIGNAL = 2.2; EXPRESSED IN BONE MARROW, SIGNAL = 1.8; EXPRESSED IN ADULT LIVER, SIGNAL = 2.7; EXPRESSED IN FETAL LIVER, SIGNAL = 2.7; EXPRESSED IN BRAIN, SIGNAL = 1.8; EXPRESSED IN PLACENTA, SIGNAL = 4.3; EXPRESSED IN HEART, SIGNAL = 1.7; EXPRESSED IN HELA, SIGNAL = 2.7
cctgtattcgatgagcctgctttttgcaagtgagtaatataaaacagactgaaataccttaagcttctcaggctttgtaccttcctaaagtaaatccatgaggtccagtttttccttcctccttggctatgaaatagacaagaaaaaggcaagctagccatttacatctcactatagcagactctcctgtttgctttttgactgtatttgggaagcaggggcctgactgctttcctacttactaagcacaactcacttttcctaggaaatcctcaacgcaacctgcatggattaaaccagctcctcgctttgtttccaatattcttacaatcaaagtgtccagaatgggcaaggcaacctgaaaaaatgaggacgggtacattatcctatgagccaaactgccgcttacactggttagtcatgaaatcggcaaaattccagatgagctctccaaccacgtattttctgagtttttgatccagacccagatggtactgctctagcagacttttctggtagtcttcactgaacatcagaggtggatcctgggattcaaggcaaagagaattt

SEQ ID NO: 9448 - DNA, 543 bp, Homo sapiens
  MAP TO AP000352.2; EXPRESSED IN PLACENTA, SIGNAL = 2.9; EXPRESSED IN HEART, SIGNAL = 3.4; EXPRESSED IN LUNG, SIGNAL = 4.7; EXPRESSED IN BONE MARROW, SIGNAL = 3.4; EXPRESSED IN ADULT LIVER, SIGNAL = 5.3; EXPRESSED IN BRAIN, SIGNAL = 4.7; EXPRESSED IN HELA, SIGNAL = 4.8; EXPRESSED IN FETAL LIVER, SIGNAL = 5.5
cccacgtctcttcagtgctaccctggatcattctacaccggatcatctggcaggaggaagacaccttccattctctgtgccaccagcagcagctccaaaacccagcggaggaaggtgcacaggcagtgggtgcagtggggatgagctctgactcccatgtccttgcccctgtcctctgccctagggtcctggaccttatccagacgttgtgagtggggctcagtcctctcaatcccaggattttgcatgcgcttggacagaggcagaagtgtccttggtttctccctgagggagcttactgtgcagtgggcacgggaggcctggatgtgtgagcattgtatgtttggtgcagatggcagcatggagggagtgacaagaggtgactacttatgacaaatgctgacactgctccaggaggccttgtatccactagctcctttaatccccatgacacccgaagggatggtaagccgagggcagcatggagtgagcacaggttccacatcccaactgtcacttcttagatgtgtgaccttgggcaag

SEQ ID NO: 9449 - DNA, 568 bp, Homo sapiens
  MAP TO AC007262.4; EXPRESSED IN LUNG, SIGNAL = 8.1; EXPRESSED IN HELA, SIGNAL = 8.8; EXPRESSED IN BRAIN, SIGNAL = 8.6; EXPRESSED IN PLACENTA, SIGNAL =  11; EXPRESSED IN BONE MARROW, SIGNAL =   9; EXPRESSED IN HEART, SIGNAL =   5; EXPRESSED IN ADULT LIVER, SIGNAL =  14; EXPRESSED IN FETAL LIVER, SIGNAL =  12
aagaataagacaagaggccaggccaaagcggaaaagagtctgctatacaagctaaagctggagaagagagggaggctacgggtgtggttaggcctgtagccaatacctgggccaaagcaaaagacaagccagggtctctgacagatgcagtggcagagatgaaggcagtgtctaagaacaaggtcggtgctgagatgaaggaaggagcccctgtcagagcctaaggctctgggcaaagccactggagatttcagtcccgaggctgggaatgagtccaccagctccacatgtaaaaatggggctggtattgatgcctgggtctgggctgaggaagaggccactatcaattcctggttctgaaatggagaagaggctggtaatcattccggtgctaagaatgataaacctgaaattggtgcccaggtctgtgctgaggagttggagcctgtgactggggccagttgcaaacctaggtctggggctgaggaagaggaggaagagaatgtcattgggaactggttttgggaaggagatgatgctagttttgaccctaatcctcaatctgtga

SEQ ID NO: 9450 - DNA, 572 bp, Homo sapiens
  MAP TO AC007539.8; EXPRESSED IN PLACENTA, SIGNAL = 2.6; EXPRESSED IN BRAIN, SIGNAL = 1.6; EXPRESSED IN BONE MARROW, SIGNAL =   2; EXPRESSED IN LUNG, SIGNAL = 1.6; EXPRESSED IN HEART, SIGNAL = 1.5; EXPRESSED IN FETAL LIVER, SIGNAL = 2.5; EXPRESSED IN ADULT LIVER, SIGNAL = 1.7; EXPRESSED IN HELA, SIGNAL = 2.6
cctccactcagaactctgcctaaaaatttgttacccacccaaatattccagactaataatatctggaatcccttgttacccaacaaaagattccagattaataatatctgataacagcaaatggtactgttggcagagcaaatagtaggtgctcggtaattgccggctgatgtgtacttctctctgttttcccaaacagattgccctgacattctcaatcgtctttggggtgatagtgtatcgaataacaactgcagccgctctgtctctcaataaggctacacgctccaatgtccgggtgacagtgacagcaacagcagtcatcatcaacctcgtggtcatcctcatcctggacgagatctacggcgctgtggccaagtggctcaccaaaattggtactgtgtcaccgagacttctggctgtcctaggccctctttaagtcaatgcgtgcaaggcttttggtgataaaataaaaaaaatgggacagggacaggatgctttgtacagtgcattttaattagagaaatggggaagtgcaacgtgtgtgtatttgtagggctgtcaaagggctt

SEQ ID NO: 9451 - DNA, 563 bp, Homo sapiens
  MAP TO AP000189.1; EXPRESSED IN LUNG, SIGNAL = 1.9; EXPRESSED IN BONE MARROW, SIGNAL =   3; EXPRESSED IN ADULT LIVER, SIGNAL =   3; EXPRESSED IN FETAL LIVER, SIGNAL = 1.9; EXPRESSED IN BRAIN, SIGNAL = 2.4; EXPRESSED IN PLACENTA, SIGNAL =   3; EXPRESSED IN HEART, SIGNAL = 1.7; EXPRESSED IN HELA, SIGNAL = 1.9
caaacagcaagaaaaacccagcccatcaccggagacctaagggaattcatcctttcgctaacatgccaattcctctgaccttgatcctggaatttcttgaaacaagggggcaccaagtcacatatcagggccccacttggtaatgatcaaggcctactttgagctcggacctcttacagctctgttgaatccagggaagacactcacctacccactcacaggtgtcagcggccctgcctttggctatgtcaatccccacggacaccaacgatgacacaaaatggcagcaaacagtggaagatggtagtcagagaaggcaacagagttctcaggaaatggagtccagaagttgtagaatttggactgtgggtatggcaggagtgggggttgggggaggcgttgtagatgaaggcagggagaggcgcaaacaggtggggtgaacagcagaggaagaggcagacaagtagggcacatgtgaccttcacgaagtacaatttcaaagactcactgatggaatagccgggtcatggggagctgtggagcgcttgactgggcacagagct

SEQ ID NO: 9452 - DNA, 576 bp, Homo sapiens
  MAP TO AP000352.2; EXPRESSED IN PLACENTA, SIGNAL = 2.3; EXPRESSED IN BRAIN, SIGNAL = 2.3; EXPRESSED IN HELA, SIGNAL = 2.2; EXPRESSED IN HEART, SIGNAL =   2; EXPRESSED IN LUNG, SIGNAL =   2; EXPRESSED IN BONE MARROW, SIGNAL = 2.7; EXPRESSED IN FETAL LIVER, SIGNAL = 2.6; EXPRESSED IN ADULT LIVER, SIGNAL = 2.5
gtaagtaccagacgccggaccactggtatccatctgacctgcaggctcgtgcccgtgttcatgagtacctgggctggcatgccgactgcatccgtggcacctttggtatacccctgtgggtccaggtgaggagagccatctggagagtgattggccatcagagagtagttggcagtaggccggggccatagactgacccactgtctgcccccatcaggtgttggggccactcattggggtccaggtgcccgaggagaaggtggaacgcaacaggactgccatagaccaggccctgcaatggctggaggacaagttcctgggggacaggcccttcctcgctggccagcaggtgacactggctgatctcatggccctggaggagctgatgcaggtgtgagctcagcctgtgggcagtgtccctcttcgtgtcacacccatgaggcagacagaaacactgaggcctggagaaagccagaactttgcccagaatcatagagcaagtctctggatgatctggggccagaaccctgaacttctgcctcctgcctgggtgtggggtctcaccctggctgctct

SEQ ID NO: 9453 - DNA, 581 bp, Homo sapiens
  MAP TO AC008022.1; EXPRESSED IN BONE MARROW, SIGNAL = 2.2; EXPRESSED IN HEART, SIGNAL = 1.3; EXPRESSED IN FETAL LIVER, SIGNAL = 1.7; EXPRESSED IN PLACENTA, SIGNAL = 1.7; EXPRESSED IN HELA, SIGNAL = 2.7; EXPRESSED IN BRAIN, SIGNAL = 1.7
  unsure 158
  unsure 310
  unsure 312
  unsure 381
  unsure 412
caaagtgttcatggggaaccctactacctttgagtctggtttttgaagatctctgtcagagccagtcctgatctttcctggcacctggacaggtacagggatttcccagcaaccgaggtgtcatgtgggcagatgggtgaaactccctgagtggtgtntgtttgcactctttcgcgacagacacagccagcaggagtctgtgtctgtgagaggccagggaaggtgagaaggtcctgcccgttcccttggttgctgggccatctgggtccctgtcactggggcctctgttctgaaggtatctgctgacagnanagctgcagtgggtggcagaggaggaggaggtaatttggtcccatcttggtatgatgtcctctgcgtcancgagtcattgtcagacagttgctaattgtcnatattgtgtgtctgatgattctcctttattttattttattattttatttaaaaaaaataaagacctaccgtttctaaagagaactggcagtcaatcagaaaagtgtgagttaaaagcttgtggaaagggggatttggggctacttttagtgattacaggcaggggcatt

SEQ ID NO: 9454 - DNA, 544 bp, Homo sapiens
  MAP TO AP000233.1; EXPRESSED IN BRAIN, SIGNAL = 5.4; EXPRESSED IN PLACENTA, SIGNAL = 9.4; EXPRESSED IN HELA, SIGNAL = 4.6; EXPRESSED IN HEART, SIGNAL = 3.3; EXPRESSED IN LUNG, SIGNAL = 5.4; EXPRESSED IN BONE MARROW, SIGNAL = 5.3; EXPRESSED IN ADULT LIVER, SIGNAL = 7.5; EXPRESSED IN FETAL LIVER, SIGNAL = 6.5
ccttctattgcattgtcaggctgcaaattttctaaactttcgtgctctgtttttctttgaaaccaaatgcttttaacagcacccaagtcacctcttgaatgctttgctgcttagaaatgtcttctaccagatagcttaaatcatctctctcaagttcaaagttccacaaatctctagggcatgggcaaaatgtcgccagtctctttgctaaaacataacaaaagtcacctttgctctggttcccgacaagttcctcatctccatctgagacctccttagcctggatttcattgtctatatcattatcagcattttggtcaaagccattcaacaagtctctagggagtaccaaactttcccacattttcctgtcttcttttgagccttccaaactgttccaacctctggctattacccagttccaaagtcacttccacattttcaggtatcttttcagcaacaccccactcctggtaccaatttactgtattagtctgctttcacactgctgataaagacatacctgagactggacaatttacga

SEQ ID NO: 9455 - DNA, 571 bp, Homo sapiens
  MAP TO AL022329.9; EXPRESSED IN HEART, SIGNAL = 9.6
ttggagctttccttctgtggctctttattttcttacagtttctgttggatgcccttttccattctctgtgttcctttggtcactcttcagtgcttattgtctatgtgtccagaattttagttgttatctcaggaggattgttctgttaggaattaattggttctgaccagaagcagagcctgagtttgtgttatattttgaatataaagcaaacgtgatttgctgatgaattggatgtagggggtggtggtggcaggggcgtggcgaaagagtggaatcactatgattattcattttttggcttaagcaactgggaggatgattttactcatttttttgataaagaagactgggagaggagcccgtttggctggagtacagaggatgtggaagttaagggtttcatttagatgtgttaaatttgagatgctttctagatattcaactgaaaatgtcaaatagatagttagatatttagaatctggagctcaggagtcctagagatccagacttagtcatcagaatataattgatatttgaaactgtgggactacatagctttacctaggga

SEQ ID NO: 9456 - DNA, 594 bp, Homo sapiens
  MAP TO AC008022.1; EXPRESSED IN LUNG, SIGNAL = 2.1; EXPRESSED IN HEART, SIGNAL = 2.1; EXPRESSED IN PLACENTA, SIGNAL = 2.7; EXPRESSED IN BONE MARROW, SIGNAL = 3.7; EXPRESSED IN ADULT LIVER, SIGNAL = 1.9; EXPRESSED IN FETAL LIVER, SIGNAL = 3.1; EXPRESSED IN BRAIN, SIGNAL = 2.4; EXPRESSED IN HELA, SIGNAL = 2.7
  unsure 351
  unsure 518
  unsure 553
  unsure 566
agttgtctcctaggcctccctccagcattgatgctggtgacgccatcctttcttggatgctctttctcagggtctcctgtcactggggcctcatgatagtcttaccgattgtcctgcccttgccactggctcctatgctgtttcctcttcttccgattcttccattgggtccccagtgacctctgactcctatcattccttgcatatgggctgaacctagtgaactgctttcaatgaataaaagagagaaaaagagatgggatatcacttctgtgattgggctacaaaagactataatttctgtcttgccagcagcctctctgtctctgtctctgcctctctctttctctnttccattggtgaagccagttaccatgtcagagacgctcacatggcaaggaactgaatccctcagcccaacagcccacaaggaactgcatcctgccaacagcctatgagtgctgacaaccactgaatggtcttggaagcagatcctacctcaatcaaatcttgagatngactgcggctctagcaggtatcttgggtaaggccnttgtgagagtctncagggccaaggccttggttgcagccttg

SEQ ID NO: 9457 - DNA, 572 bp, Homo sapiens
  MAP TO AC009266.1; EXPRESSED IN BONE MARROW, SIGNAL = 4.2; EXPRESSED IN LUNG, SIGNAL = 2.9; EXPRESSED IN HEART, SIGNAL = 2.4; EXPRESSED IN FETAL LIVER, SIGNAL = 3.3; EXPRESSED IN ADULT LIVER, SIGNAL = 4.2; EXPRESSED IN PLACENTA, SIGNAL = 3.7; EXPRESSED IN HELA, SIGNAL = 2.6; EXPRESSED IN BRAIN, SIGNAL = 2.6
ttcctaaagagggttttctaaagtggagtcttcaagaaaataatgggcatttctgataatacagaaataatagttaaatcaaattatgtgaaaatgtaatcctccatgtctatattttaattcataccaaagaaaaacagaaaatagatggtctatgttacatttctttgcatgttttttagaagcaacttcctcaatgaaagccatttcctgctgaaaagaaccttctaacctttggccagagagaaatcttctttactggttactattcgatcatatgagaagtcagggcaataagtcattctaccatagatctcctgagacaaatcaaatttaacagagtcatggatgtaatatacgtatgaaattcttttggaagagaaaactattttcttatgttgaaaaattttcattagatcccagccatttatctttgtttttattgcatatgtttttgggttcgaggtcatgaaatccttgcctaaaccagtgtctagaagggttctatggaaaacagtgtggagattccataaagacctaaaagtagaaactacaatttgatccagcaatcc

SEQ ID NO: 9458 - DNA, 559 bp, Homo sapiens
  MAP TO AL022318.2; EXPRESSED IN PLACENTA, SIGNAL =   2; EXPRESSED IN BRAIN, SIGNAL = 2.9; EXPRESSED IN HEART, SIGNAL = 2.6; EXPRESSED IN BONE MARROW, SIGNAL = 6.2; EXPRESSED IN LUNG, SIGNAL = 3.4; EXPRESSED IN FETAL LIVER, SIGNAL = 3.9; EXPRESSED IN ADULT LIVER, SIGNAL = 2.7; EXPRESSED IN HELA, SIGNAL = 3.9
gtcgctgtggagatcatggactatgaaggtgagacgtggggggctgaggagagtgggtgcaggagggacagcatgaggggcagatggttctccaatgctgtggggcgggtcagtgtcccctgggtgtctgtggggaccgggccagcgcccactgcaactggcagcctggatacctgggctgggaggggagggcccagggccaggagagaggcctgctgggccctcactgttttctccttgttttttctcagattttaaatattgttgggaaaactttgtgtacaatgataatgagccattcaagccttggaagggattaaaaaccaactttcgacttctgaaaagaaggctacgggagagtctccagtgaggggtctccctgggcctcatggtctgtctcctctagcctcctgctcatgctgcacgggcctcccctccaccctggacccgctctgtttctgcctggtcatcctgagcccctcctggcctcagggccattccacagtgctcccctgcctcaccgcttcctcctcgctcttccagactcttcctgcagagg

SEQ ID NO: 9459 - DNA, 574 bp, Homo sapiens
  MAP TO AP000352.2; EXPRESSED IN ADULT LIVER, SIGNAL =  12; EXPRESSED IN FETAL LIVER, SIGNAL = 3.1; EXPRESSED IN PLACENTA, SIGNAL = 2.9; EXPRESSED IN HELA, SIGNAL = 3.9; EXPRESSED IN BRAIN, SIGNAL = 4.1; EXPRESSED IN HEART, SIGNAL = 3.3; EXPRESSED IN LUNG, SIGNAL =   3; EXPRESSED IN BONE MARROW, SIGNAL = 3.2
ggtccctgaaggtcacgcccgggtcatgactggggagggcgacaagggaaagacgtgcggagggggagccgcgggatcgtggagcacggaaagtcagagcttggcgtgaggaaaggagtggggagtggtccctggggaaaagattcggggtcactgtcggggaggcggagcagggacagggccggacccctggcccaccaacctcccctcgccccgtgctgcccggcccacgcttacgtccgcaggtttgcccaggatggaggcagcggcggcgcagagtcgtttctccagccccgcgggcactcggttggcgggcaaattcgtgtccagctccaggaacggcatggcgggcagaggaacggaaacagctctggcggaagaaaagctgggggtacccaaggctcgcggaccagggaggaggggcgaggcgccacagcaacctggcttctcattggctggacagagactcggcgctccccgattggctgcctagggtacctcccgcttctgcaaacaaaagtcacgtgtgccggctgatttccggaagtcccatcgtctccgccctacgtgtagc

SEQ ID NO: 9460 - DNA, 570 bp, Homo sapiens
  MAP TO AL021392.5; EXPRESSED IN PLACENTA, SIGNAL =  22; EXPRESSED IN BRAIN, SIGNAL = 4.1; EXPRESSED IN HELA, SIGNAL =  11; EXPRESSED IN BONE MARROW, SIGNAL = 3.7; EXPRESSED IN HEART, SIGNAL = 8.6; EXPRESSED IN LUNG, SIGNAL =  10; EXPRESSED IN ADULT LIVER, SIGNAL =  20; EXPRESSED IN FETAL LIVER, SIGNAL =  22
cattcgactaggatttaatgctccaaataagtaaatcactattgactataagatctatggttccagacagcaaagcaccggatagaaaacagaccaaacaaaaagatcagcccttgaattatctggaggttttattaaggaacaatgcggggaagcggtggtttcaaactcatccactgttttcaatggagtgttgttgcttccccaggatttacagccatgccctaaagcctttgatgcaatatgaccagcctggaggtgctgtatgcaacaggccagccatcgactacgtttagtgggagccattccaggaagggctgccagctttcagcagaggagcccaggagggaggagcgcatcggagggcagggcctgggaaggcccacgtggtgggggcagttcatttagcctggcgtggggttgaacactgtgactgtgactagatagttgttggtggttttatgtagcccaccaaggagaaaacattttttgaaaattttttgaagtcagaagatagtgaaattcaaatagctgccagttttgaatgacatccagcgatacaagatgttc

SEQ ID NO: 9461 - DNA, 542 bp, Homo sapiens
  MAP TO AL022318.2; EXPRESSED IN FETAL LIVER, SIGNAL = 4.2; EXPRESSED IN ADULT LIVER, SIGNAL =   4; EXPRESSED IN PLACENTA, SIGNAL = 4.6; EXPRESSED IN HELA, SIGNAL =   5; EXPRESSED IN BRAIN, SIGNAL = 3.4; EXPRESSED IN LUNG, SIGNAL = 3.2; EXPRESSED IN HEART, SIGNAL = 1.6; EXPRESSED IN BONE MARROW, SIGNAL = 2.7
agcaggagggtgtcttgttgagaagattcaaaggaggggctataaagtagaagatcatcaaaatattgaataatgtgagaagtagatggacggaaagaaagtaaatcatgagaaagaacctggctgaagtaatgagggctgtccctgaagtcttgtggcaggacagcccaggtaagctgctgggactgatggtgtcaaggtcagtccaggtaaaagcaaagagaggctggtatgaggggtgcaggggaacagtgaaaaaagcatctttaagatcaagaacggaatagtgagttgtggaggaaggtattgaggacaaagagtgtacgggttgggcaccaccgggtggataggcaaaacaatttggttgataaggcacagatcctgaactaacctgtaatacttgtccagtttttggacaggtaggacaggagagttgtaaggagagtttgtaggctttaaaaagccatattgtaacaggctggtgataagaggctttaacctttttaaagcctgctgtgggttgggatattggcattgagcag

SEQ ID NO: 9462 - DNA, 555 bp, Homo sapiens
  MAP TO AC007282.2; EXPRESSED IN HELA, SIGNAL = 2.1; EXPRESSED IN BRAIN, SIGNAL = 1.3; EXPRESSED IN PLACENTA, SIGNAL = 3.6; EXPRESSED IN HEART, SIGNAL = 2.8; EXPRESSED IN LUNG, SIGNAL = 1.6; EXPRESSED IN FETAL LIVER, SIGNAL = 1.6; EXPRESSED IN ADULT LIVER, SIGNAL = 1.6
acagttttaccatggggtgggggatggtttcaggatgaaactgttccatctcagatcaggcattagattctcataaggagcagcacgacctagatcacttgtgtgtgagttcacaatagggttggtgctcctatgagaatttaatgtggccgctgatctgacaggaggcagaactcaggcggtaatgctcacccaccctgctgctcatctgctgtgacgctgggttcccaacaggccactgacccgtatgggtccacagcggggtttggggactcctgtggtaaagtattgtttctgggtgtgtctatgagggtgttgccagaggagattgacgtttgagtcagtggactgggagaggaagacccaccctcaatgtaggtgggcaccatgcagtcagctgccaaacggctagatggcggccagaagagggataaccttgcttgctgagccttgtggatttcatctttcttccatgctggatgcttccttccactcctcctgcccttggacatcagactctaggttctttggccttcggactctgggagttgcaca

SEQ ID NO: 9463 - DNA, 557 bp, Homo sapiens
  MAP TO AL031587.3; EXPRESSED IN HEART, SIGNAL = 1.6; EXPRESSED IN BONE MARROW, SIGNAL = 1.5; EXPRESSED IN LUNG, SIGNAL = 1.7; EXPRESSED IN FETAL LIVER, SIGNAL = 1.5; EXPRESSED IN ADULT LIVER, SIGNAL = 1.7; EXPRESSED IN PLACENTA, SIGNAL = 1.3; EXPRESSED IN HELA, SIGNAL =   2; EXPRESSED IN BRAIN, SIGNAL = 1.8
ctgaaccccagacctgagtcgagggtgggataattgctccctgcgggggatgtttttcctagaggtgtgggctggtcccagggaacctgggactctgagggcccctgggcaggaaggaggccaaggtttccttctggccagagtgctcagctccagctctggggcagtggggaagaggttgctcaacgttggggtggggccctggcagggaagatggcgccgaactgggagagggaggaaagagatcagcttggtgactctggggcagggcaggagggggagccccttactgtgtgtcctctccctaggaggatgaagaagcccccaactcaaaggagggtggcgtcagaaagtcccagggaagagccctaggataggatgaggtcccgcagcagcagatttgtcccgcagttcttcatccctcactcttccaaagactctcatctgaattccgttttctttaaacctcccctgagttctccatctgactgcctcagtttccctgaatctccagccaaccctttggttctttccaagcgtttccctcgtatcctcct

SEQ ID NO: 9464 - DNA, 578 bp, Homo sapiens
  MAP TO AC007092.4; EXPRESSED IN HEART, SIGNAL = 1.6; EXPRESSED IN BONE MARROW, SIGNAL = 1.5; EXPRESSED IN LUNG, SIGNAL = 1.3; EXPRESSED IN FETAL LIVER, SIGNAL = 2.2; EXPRESSED IN PLACENTA, SIGNAL = 2.1; EXPRESSED IN HELA, SIGNAL = 1.7; EXPRESSED IN BRAIN, SIGNAL = 1.5
tgtcttaacacagtctccacctgtttaaaggtgcacttactcttgctgaggaaaaccagaagaagcttcagctcctgaacaatagctacagccaaggatactatcatcatttcttccttttcttggcctttattcttccttgtcagatctcatacaactcaaccaaaaggaagaagaataagaagaaggaagaggaagaggaggaggaggagaaggagaccatttttctattaacttaatcagatcagaaaatggacttacctacttgggtgaaggaagccaaagggaagcagtgtgttgacgatgctgggaaaagcactaagcacaccatagttgctgttatctgaagagagaaatagatgttcccaaggaagagggtgtgaggaggtgggtagagactgaatatgacagctttgcctctggtcttctccatcagagaaaattggggcatagagagatttgtcaaagttagccttggtgccaaagaaagcagctatggaaagagagtcctgacacaactgtatctcaagaaacagctgtccatgatgtgtcatgggggagctgcttggagcctagag

SEQ ID NO: 9465 - DNA, 577 bp, Homo sapiens
  MAP TO AC009290.1; EXPRESSED IN BRAIN, SIGNAL = 2.2; EXPRESSED IN PLACENTA, SIGNAL = 3.2; EXPRESSED IN HELA, SIGNAL = 1.7; EXPRESSED IN BONE MARROW, SIGNAL = 2.7; EXPRESSED IN LUNG, SIGNAL = 2.5; EXPRESSED IN HEART, SIGNAL = 1.3; EXPRESSED IN FETAL LIVER, SIGNAL = 2.8; EXPRESSED IN ADULT LIVER, SIGNAL = 2.4
  unsure 35
  unsure 111
  unsure 484
ttctcatgaatgattagtctcgttgtaggaatatnggtgtgatagagaaatcagaagtattccaattgcactgcatttgcatgcgatgttcgagactcattagccgatctnccaagccaaataacagactgtcttaaatcattaatttgattagctaatttttgataaattccctgttgagaattccacatttgggtggaattggcctggcaatcattaacaaaataagccatttgaacagattggtgtaatgccactccggcagtggtggccagtgccgtgactgtaattaggcccatgatcacagcaattaaagtaacaacaaatctcttagatcttttgagaatttgttttaacacttcattaattaaatgtactgagggggaagattcccaaggtctgggtaaagttactggtatccagattccttcttgagctcgaaccaacattatacttttcctgaagcaaaacaggagttaacacnaagtgtataaatggcaattaatgcattggacagtttgattattcgtccaaagtttgctatttcctactaacagcacaaaggaggcttaacaca

SEQ ID NO: 9466 - DNA, 546 bp, Homo sapiens
  MAP TO AL031587.3; EXPRESSED IN HELA, SIGNAL = 2.6; EXPRESSED IN PLACENTA, SIGNAL = 6.8; EXPRESSED IN BRAIN, SIGNAL = 4.1; EXPRESSED IN BONE MARROW, SIGNAL = 5.7; EXPRESSED IN HEART, SIGNAL = 2.2; EXPRESSED IN LUNG, SIGNAL = 3.1; EXPRESSED IN FETAL LIVER, SIGNAL = 3.9; EXPRESSED IN ADULT LIVER, SIGNAL = 2.8
ggtccctgcaggtcatgggctggaggccccggaggatctctgtgatggtcacacttggctcctccctccacaacccaactgaggccgggaggcccagggtgccctggtgcccaggtgcccaggggctgtgactgacccatggcctgtgccaggatgggcactgtgaagaggctccagggaccccctgggtgtgagccagtgggagaatgaaaagaggaaggaagaagtctgcaggcctgccccacccacctggaggggtcagagaaggagccgcactgtccaggagggtggggtggccagcaaagtggcctggagagacgaggaggagagggtttgggagagtgccttcccatgccatggcaccttctccagagcagggtcacaagcattcaggagggaaggaagtgcagacagctagtagacagttctttggggaagctgggctgggaagggagaaggagtagagcaatagctgttcttattttctgggctgagaggaaggaatgggtagaggggagaagagctgctgaccacacagaagagggc

SEQ ID NO: 9467 - DNA, 588 bp, Homo sapiens
  MAP TO AC008166.1; EXPRESSED IN ADULT LIVER, SIGNAL = 2.8; EXPRESSED IN PLACENTA, SIGNAL = 2.7; EXPRESSED IN BRAIN, SIGNAL = 2.1; EXPRESSED IN LUNG, SIGNAL = 1.8; EXPRESSED IN HEART, SIGNAL = 1.5; EXPRESSED IN BONE MARROW, SIGNAL = 2.6; EXPRESSED IN FETAL LIVER, SIGNAL = 1.8
ctctctttgcctgccagcatctgcataagatgtgacttgctcctccttgccttcctccatgattgtgaggcctccccagccatatggaaatgtaagtccaacaaacctctttcttttgtaagttgtccagtcttgggtatgtctttatcagcagcatgaaaatgaactaatacagtgtctatgtgacaatatacccaaattattaacatttcaatatataattcatgttaagttattgcctagctaatttacaatctttttttctactaaatgtatatattttatacttacagcacactttggcttggactagcaacatttcaattgctcagtaccctcgaataactagtggctactagttccacagttagagaacacaggtggaaaacacacagaaataaaaaactttttaagacaaagataatgcttctttaggtaaaagtatgtgaataccattactttagccactctcttaataagtacttttattacagtacagtggataaataagtacagttattttatccactcccttaataagtaatataaagtctttaccatgtttaaagcccagtatcaagggaacac

SEQ ID NO: 9468 - DNA, 576 bp, Homo sapiens
  MAP TO AL031587.3; EXPRESSED IN HEART, SIGNAL = 1.3; EXPRESSED IN HELA, SIGNAL = 1.5; EXPRESSED IN LUNG, SIGNAL = 1.3
cacgggaaaaggcagatgccagcgagggggccttcagcagacagctctgagcagtggggctgggcaggagccaggcactgtgcccacccagccctgtgcccctgagccctgtgcccgcccagccccttgtgtctctacacctgggaacgatgggtctcttcatccatctctgacgcttcctcccaacactgcccacctagaagcctgcttagggggcctggagagagacctcccagactccctcccaccaccctgacccccaactcaggtggcagccggagcctgggcggaggaatagaaccttctgtcgttcagctgagctttatcaccagtttcctgttgctccatagcagcttcactggcgatggggcagggcctggcggaacttggggcacagatgagggaggcagttcccagacacccaggggatcaactggagcccagacgtggaccccgggagtgaccaccccagaccagcctcccagcgtaccaggctctctgagacaagaagctgtgttcccaagtcactgggccaccccacccagagcaccctgagttatacagactcggcagcca

SEQ ID NO: 9469 - DNA, 570 bp, Homo sapiens
  MAP TO AC004624.6; EXPRESSED IN FETAL LIVER, SIGNAL = 1.4; EXPRESSED IN ADULT LIVER, SIGNAL = 1.9; EXPRESSED IN HELA, SIGNAL = 1.8; EXPRESSED IN BRAIN, SIGNAL = 2.2; EXPRESSED IN LUNG, SIGNAL = 1.8; EXPRESSED IN HEART, SIGNAL =   2; EXPRESSED IN BONE MARROW, SIGNAL = 2.6
tgaggatgaaatttgccttgagctaggctcactgtgagtccgcaggggctcctcccagacctggcaggctgcaggcagttctcagtggagcccctagaatagctgggagaggctgagcaggtctaagacacagaagagaaggacagagggagcatctcaaaggacagagggggtctgagcctttggagggtgacataccagcagcagagccccctcaggcagagggggcttgaaggccaggagtgctgcccctgcctggaggggccaccgcatccctgctccctggagctgccagtgggcagcacctcgtcctctgttgtctttgcctttgtctgcaatgtccttccatccagacaccaaggcactgtcccagctgcccacagagaaaagagcacttgccccagaaaggtacagacctagagacctggcttcaatcctgggtgtgaccttgagcaagttccttaacctgctggagcctcagccacctcacctgtcaaatggggcacctccgtgttctaagacattgccctgggcttcaagggaagggggcggtgaggagcgaggcatata

SEQ ID NO: 9470 - DNA, 579 bp, Homo sapiens
  MAP TO AP000353.1; EXPRESSED IN BRAIN, SIGNAL = 2.8; EXPRESSED IN PLACENTA, SIGNAL = 2.8; EXPRESSED IN HELA, SIGNAL = 1.6; EXPRESSED IN BONE MARROW, SIGNAL = 2.4; EXPRESSED IN HEART, SIGNAL = 1.8; EXPRESSED IN LUNG, SIGNAL = 2.1; EXPRESSED IN ADULT LIVER, SIGNAL =   2; EXPRESSED IN FETAL LIVER, SIGNAL = 1.5
tctccacaaaggtcctcacccagatatggtacccactgccacacgcaccccctttgcatgcactgcctacccacctcttgccctcctcattctcctgtctgtcctaggcccctgccatcctcaccttcctccagtggcccatccttcctccactcagtcctccaggctgtggctgggtcactgcccatccacaagagccctggtattggtgactaagatcccagttctgcctcctggtgatggagaactgtggggacagccatcttggggcatcttttccccttcagtagggcactggtagcaacaacagccctgtgcacaccaggtgccgcatgtgccgtccccgtggatgtgcacgtgatccaggcacagctgtccactgagatggaggcagccccagactgagggacagggatccttgagtcgatccctgctgtggctgacccaggaaggtcatttctgtcttcctcatctctgcgtcctcactcatggctcacacagagcatttggactcagtgacatctaaagttcagcacaggctggacaatttctgagtagcagaagctctagcctgcaaga

SEQ ID NO: 9471 - DNA, 563 bp, Homo sapiens
  MAP TO AC008009.4; EXPRESSED IN PLACENTA, SIGNAL =   2; EXPRESSED IN LUNG, SIGNAL = 1.3; EXPRESSED IN BONE MARROW, SIGNAL = 1.8; EXPRESSED IN HEART, SIGNAL = 1.3; EXPRESSED IN FETAL LIVER, SIGNAL = 1.4; EXPRESSED IN HELA, SIGNAL = 1.9; EXPRESSED IN BRAIN, SIGNAL = 1.5
aaacaccaaagctgctctccagaggtacacctcaagcatgtaaggaccgccaaggttcatgcttgtaagaacctataatctagtttaggcaaatcagattgatgtagctaagctgtgcttagtattttatgccacatgggggagggtccgttggttaagctgagcaaggtaattagaacttcatttaaacttcattatttttgttcagatgggatttttaaagtattttgatgtcttttagttttatgtcattgaatatgctgcttgtgacgctacttacaatgaaatagtcacatttgaacgacttcggcctgtcaatcaaaataaaactgtcaaaaaaaataccttctttaaatgcacagtggatgttcctgaggatttgagagaggcgtgagtaattttatatactattgaattgttctgtgaattaagaagatttttcagtcctacaaaacattttccctaatgcccaatcaaaccttctgatggaaaatcatcttaatgaacaaaggttttagtggggcttgtcaaaatgaaacactgactttgtattgtgactctcc

SEQ ID NO: 9472 - DNA, 570 bp, Homo sapiens
  MAP TO AC007281.3; EXPRESSED IN LUNG, SIGNAL = 1.9; EXPRESSED IN HEART, SIGNAL = 2.3; EXPRESSED IN ADULT LIVER, SIGNAL = 2.3; EXPRESSED IN FETAL LIVER, SIGNAL = 2.9; EXPRESSED IN BRAIN, SIGNAL = 1.4; EXPRESSED IN HELA, SIGNAL =   2; EXPRESSED IN PLACENTA, SIGNAL = 2.9
aagaagagtctagtgaatgcatggtttgatttgaaatacatttgccacgttgccaggaacattttgactacacagcttctagttcctttgtgaattctcagatagcccagtctgactccttttctttttctttcctgggtgagtcttcccttcaattatgtaccctcatctttcggttctaggatcttttggttctaggataggttaatggaaataaatgtagtgatgaatgatacaagttgttacgtagcaggacaagccgcagacaaaactcctcagacaccaagttaaagaaggaaggggtttattcggccgggggcatcggcaagactcctgtctcaagagccgagctcaccgagtgagcaattcctgtcccttttaagggctcacaactctaagggggtgcacgcgagagggtcgtgatcgattgagcaagcagcgggtacgtgactgggggctgcatgcactgttaattagatcagaacaaaacaggatagggattttcacagtgcttttctatacaatgtctgtaatctataggtaaaataaccgattaggtcaggggtcgat

SEQ ID NO: 9473 - DNA, 556 bp, Homo sapiens
  MAP TO AC008272.1; EXPRESSED IN HELA, SIGNAL = 2.1; EXPRESSED IN PLACENTA, SIGNAL = 1.3; EXPRESSED IN HEART, SIGNAL =   2; EXPRESSED IN ADULT LIVER, SIGNAL = 1.9; EXPRESSED IN FETAL LIVER, SIGNAL =   2; EXPRESSED IN BRAIN, SIGNAL = 3.6; EXPRESSED IN BONE MARROW, SIGNAL = 3.6; EXPRESSED IN LUNG, SIGNAL = 2.5
cagctccaaagaggccaggggtctggtgaggaatggagaagagcacgactgaaaacttagaagagagcagccagggactgatgccagatccgttgaccctgtcaaaagatctgaactctgccccacatttgtccttttgaccccatcgagttaaccaggagtttagccatccatgctccacacaactgtagcttttcttcttcttctgtgcacctataactctgtctcattagattgctctgaagtttgttattgattatctaggaaataaatacaaccaactttttgcctatttcccaattgttacggctggtagaaataatcagcataaaataaaactgacaacagatgataccacacatggcaacaatgctattgattaaaaatggaaagaaggctcgcatccttttgataaaatgcattcaaattttattttttgtttttgtttttattttttatttcgatagctttaggggtgcacgtggttttttgttacatggatgaattgtatagtggtgaagtctgaaattttagtgcacccatcacctgagtagtg

SEQ ID NO: 9474 - DNA, 573 bp, Homo sapiens
  MAP TO AP000354.1; EXPRESSED IN BRAIN, SIGNAL =   6; EXPRESSED IN LUNG, SIGNAL = 5.8; EXPRESSED IN BONE MARROW, SIGNAL =   8; EXPRESSED IN HELA, SIGNAL = 5.3; EXPRESSED IN PLACENTA, SIGNAL =  11; EXPRESSED IN HEART, SIGNAL = 3.9; EXPRESSED IN ADULT LIVER, SIGNAL =  11; EXPRESSED IN FETAL LIVER, SIGNAL = 9.1
aaggtccccaactcctatggcccccaaagttgaagtgtacctggcctaagaatctcagtgactgagttcctcccaggtggctttgagcagcacggatttggggagtgggctctgccctaggcatccagctcggacctcagcctcacctggctgaagttgggctcgtactccacacagcccttgctgttgacatgcaggatgggggctgcaatggccgctctcaggtcaaagccaagccacagcttgctcatgatggcctgggggagagatgagggtttcagggagaaagggggcaccctgctaccctacatcagccctcacatccccactccagagacagtcagacagtatgctgcccagagaggagacactcgagccaggagccccagactcacctgggccacagcagagatgatgagctccccgccagccccgccaatcactagcttcgacccctgggctttgttgatcaagatggagggcaccatggaggatggggaacgctcgcctggaactgggggccagcaccttccgggagctccacccaccctgtctccactcactgctgagcaa

SEQ ID NO: 9475 - DNA, 570 bp, Homo sapiens
  MAP TO AL031588.1; EXPRESSED IN LUNG, SIGNAL = 2.7; EXPRESSED IN BONE MARROW, SIGNAL = 2.6; EXPRESSED IN HEART, SIGNAL = 2.2; EXPRESSED IN FETAL LIVER, SIGNAL = 1.8; EXPRESSED IN ADULT LIVER, SIGNAL = 1.9; EXPRESSED IN HELA, SIGNAL = 2.6; EXPRESSED IN PLACENTA, SIGNAL = 2.8; EXPRESSED IN BRAIN, SIGNAL = 2.4
taagagacgtggggcttttcttcatttccttttctttctcaaagaggtttatttttaattttgactcctgtatgaatctttccacgccctggctccgagggtcttcaggcttggcagcttgggctgcctggttccggctgctgctctcaatgtgtaaagccagtaagtgagcttctttgtacacctccacgaacttctccccggccagagggctccaggcaaagggactctcagatgtgggcaacggaggctgttcgggaaccggattatttaattccaagctggcagcaatacatctttctttatgtccaaagggtccgaagaagacttcatcatcttcatttgcactatttgtttaaaaaaagaatgattaataactcataacactggcatttaaaggaaagactttactgaatgtggttatgcccaaggcaagggaagaaaactcatttgtttacctcgaagaagacaatgaaagatcgaagtcaaatttttcatcggccaaaagaagaatgtctagagggaaaaaatccactgttattttagtgccacagctgataaagagaaaaa

SEQ ID NO: 9476 - DNA, 597 bp, Homo sapiens
  MAP TO AL021707.2; EXPRESSED IN PLACENTA, SIGNAL = 1.8; EXPRESSED IN HELA, SIGNAL = 1.9; EXPRESSED IN BRAIN, SIGNAL = 1.4; EXPRESSED IN HEART, SIGNAL = 1.5; EXPRESSED IN BONE MARROW, SIGNAL = 1.5; EXPRESSED IN ADULT LIVER, SIGNAL = 2.4; EXPRESSED IN FETAL LIVER, SIGNAL = 3.6
taacactggcccagaagtcctgaggtctactctcaaccctgcctgtgacagctgtgcaaccagctcctaaagcctgggggagccgcagggcattgtgcaatggctgaagcacagggtgtgtggctgaggcatgggacgggaggggactgggtgacaggggaggctgtggggtgctccatgggatcagaggggcttgtagctcatgtcaaagagaatggaatttgttctgtagaaaaataacttaagcaaggcagagaaacaagcagatttgtatttacctggtacctctcatgaaatatccaccaaaagctatccagccagatggctcttggagaagaagaagagagaaacttctctaattctctacctgaacagaaatgcttggaaaaaaaaattcacagtattattattgttgttatctttttaaaaatccatctggagtcaatgtattttagaatgaacagaaaaaccacctaatctgttagtgaggccctacccaggtaattttacatactctcatttaacccctataatagtcttatgaggaatacatcattatctcatagatgaggaaaccgaggaccaaagtggcaagtg

SEQ ID NO: 9477 - DNA, 569 bp, Homo sapiens
  MAP TO AL022327.17; EXPRESSED IN HELA, SIGNAL =   2; EXPRESSED IN PLACENTA, SIGNAL = 1.4; EXPRESSED IN BRAIN, SIGNAL = 2.7; EXPRESSED IN LUNG, SIGNAL = 1.8; EXPRESSED IN HEART, SIGNAL = 1.9; EXPRESSED IN BONE MARROW, SIGNAL = 1.5; EXPRESSED IN FETAL LIVER, SIGNAL =   2
tctgagacccaggagagaggggtctcatgggaatgccctggagcagcccagatcggccctccgagggtgacgctgagacccacctcgctcaccctggggtgatgcctctgcaccccctgccctgcggggtcagaagctgcacccaccttctttttcttgcagtcctcctcgctggaccgtgcagcgatgatcaccgtggccgccatgagcagctccagcaggagcagcaggatgaggttgaagttgatctgccaaggggcacacacgcttcagcaccgggcccgcctttctcacgccaccgcgcttcagcgtccaccggaccacctcacgggcaggctgcgcaggactctcagccacggtccccacttttcccatccagggccagctgtgaggcactgtgggctgcacactctcctgcctcacatgggcctttggggtcttttagtttttaaaaccattcttagtgcaaaggctgtacaaacacaggccagggctggatttggccttgggctctggtctaccgaccccattctgaacgctccttgttcccacaaaagccttcacggaat

SEQ ID NO: 9478 - DNA, 595 bp, Homo sapiens
  MAP TO AL021707.2; EXPRESSED IN PLACENTA, SIGNAL = 1.7; EXPRESSED IN HEART, SIGNAL = 2.1; EXPRESSED IN FETAL LIVER, SIGNAL = 3.3; EXPRESSED IN BRAIN, SIGNAL = 2.2; EXPRESSED IN HELA, SIGNAL = 2.3; EXPRESSED IN BONE MARROW, SIGNAL =   2; EXPRESSED IN LUNG, SIGNAL = 2.8; EXPRESSED IN ADULT LIVER, SIGNAL = 1.5
gaggagaggacaggtgtcagagacagaactgagtgagagaagaaggcctcagagtagggctggccaggagcttgctaggtcagggcaaagaggtcaagcccttggaggcaggtgagggagaggtggagtcatgaatagtggcatctgctcctcgagccctgttgctgcccctggtctgtgtcagggcaggacctggtctcctgagtgcctctctccttttttccttcctcttctccctctgcttaggatgtgcccgatattccagatctccaacgttacaggcgagaacctagatctgctgaagatgttcctcaacctcctctccccccgcaccagctacagggaggaggagcctgctgagtttcagattgatgacacctactccgtcccggtaagtggctctgggcgggtagctgggtgggcacttcctacagtggcatcagggggtgggtctgtgctggggatgcacttatgaggccagggtcttctccttggcagggtgtggggacagtggtttcggggacaacactgagaggcctgatcaagctgaatgacacgctgctgctgggcccagaccccttgggtaacttcctgt

SEQ ID NO: 9479 - DNA, 566 bp, Homo sapiens
  MAP TO Z95114.19; EXPRESSED IN HEART, SIGNAL = 3.2; EXPRESSED IN BONE MARROW, SIGNAL = 2.9; EXPRESSED IN LUNG, SIGNAL = 5.5; EXPRESSED IN FETAL LIVER, SIGNAL = 3.8; EXPRESSED IN ADULT LIVER, SIGNAL = 6.4; EXPRESSED IN PLACENTA, SIGNAL = 4.6; EXPRESSED IN HELA, SIGNAL = 2.7; EXPRESSED IN BRAIN, SIGNAL = 3.4
ttctgtctctttgcctgctgtatatgagtaatgagactgtttttcttggtaggttctcgcatactctccaggatgtttgggtttttagagacacctggtcctcagctggggacaatggccatggctcattacctggccttcagggttcaagcaggggacatatacccctaaataacctaaaggggatccatcacactacaaccaccacctccaccgccatcatcaagaagccactggctgactgagatacacttccaggaggacaagacagagtggatgctggaaagacagggcaggggaccatcaccagggaaagacttcattcttggaaggacatcgaaccgggggcaggtcggtagtggagccgctgtttcttctgctgtatccaaaagttctaactcttcggctttctgcattttcagctctttcttttcctggccttctcattgctggttcctgcacacctcccctctattcctccccccaatatattcgttagtctaaaggaaatttcttcttcctattccccacactctccagtcccctctcctcccttattccaggct

SEQ ID NO: 9480 - DNA, 569 bp, Homo sapiens
  MAP TO AP000350.1; EXPRESSED IN HEART, SIGNAL = 1.4; EXPRESSED IN BONE MARROW, SIGNAL = 1.5; EXPRESSED IN LUNG, SIGNAL = 1.7; EXPRESSED IN ADULT LIVER, SIGNAL = 1.5; EXPRESSED IN HELA, SIGNAL = 1.3; EXPRESSED IN BRAIN, SIGNAL =   2
caggacttatgcctgctgagctccccaaatccttgtgaacacatggttcccggcaacttccaccaatcagaactgctaaaagaggtgaaactgctttatatcctgggaagtgttcaatatctatccagcagacaagagtacagagacctggcagggcaggtggccctggagtgcagcctcctcttccctcctcttcccaaccctggccagttgctgatcccaaagataacaggggaggaagtttcagctgagaagatggagcatgcagtggaagaggtgaagaacagcctgcagctcttcgaggagaagtttctgcaggataagatgttcatcaccgggaaccaaatctcactggctgacttggtggccgtggtggagatgatgcaggtgtggagtgggttggaggaggggtagaccctgggcagaggtaggactcctctgtgaccaatggggccatcacttgaggataggctggtgaggtgggaaaggcaagcagagctgtcatgggggctgcgggagcgaggtctggggccctggactcaatctgggggcaacaggaagcacagaat

SEQ ID NO: 9481 - DNA, 542 bp, Homo sapiens
  MAP TO Z82188.2; EXPRESSED IN PLACENTA, SIGNAL = 2.3; EXPRESSED IN BRAIN, SIGNAL = 1.8; EXPRESSED IN HEART, SIGNAL = 1.6; EXPRESSED IN BONE MARROW, SIGNAL =   2; EXPRESSED IN LUNG, SIGNAL = 1.9; EXPRESSED IN FETAL LIVER, SIGNAL = 1.9; EXPRESSED IN ADULT LIVER, SIGNAL = 1.8; EXPRESSED IN HELA, SIGNAL = 1.6
cttccttcaaatctggctgggccacctactagctgggtgaccttgagaagttactatatttctccagcccagtgatttggaggcaaagaggggtcgagctgagaaaccaaagggagtggggaaagggaggagagaaggtggtggaaggaaatgtgtcaccctttagatctaatgcagcgccacctcctccaggaagccttcccagaacacccaagtttgacttgccacttgtcctccaagcaaccacagcacccccactcaatctctgcttctgtctgctcaaagcacacctccttattttcagtatctattaatagatactactcatactactaggacgactactactaacacagagtgcttctcacacacaggtgctgccctggcagctccacctggaataagttactgaattcccccaaccaccccaggaggcaggagctatcactatcccatgcttttctgataaggaaacacaggcagagagaggctacgtgactcgcccaaggtcacacagcaagtgcacagcacagctgagttca

SEQ ID NO: 9482 - DNA, 568 bp, Homo sapiens
  MAP TO AL022319.2; EXPRESSED IN BONE MARROW, SIGNAL = 1.4; EXPRESSED IN LUNG, SIGNAL = 1.7; EXPRESSED IN FETAL LIVER, SIGNAL =   2; EXPRESSED IN PLACENTA, SIGNAL = 1.7; EXPRESSED IN BRAIN, SIGNAL = 1.4; EXPRESSED IN HEART, SIGNAL = 1.6
tgaagtggtatgaaaggaaaacctaaataaataatatcggggccagtgccaatgcccacatgcattccctcactatttccttaaacattatttaaaattctatgtgttttgagcacttcctccttttcaatagactctctttagctaatgttaacaatcaagtgtcaactagggatgaggaaagttctacaaaatttcaaaagacagccctgctggtggggaacctcgctggtgagcttagaggactcccagtgtgctggccatgctgctcttcttttaaaaagccatgatgaatcttctttgaagacacttctaaagtatatgcaaaaaatacaaaaagcactgagaggatggctgtattcaattgaggggcatttccaatgatacttattcagctaacagacatttactggggcatttactatgtactaagctctggattagaggcagaaactagaatgatgaacaagacacagcccttgctctcaaaaaactacagtggctttggtttgatggtgagggaaataacaggcaaggacaacccagcagaatcggcaccagatctgag

SEQ ID NO: 9483 - DNA, 568 bp, Homo sapiens
  MAP TO Z82188.2; EXPRESSED IN FETAL LIVER, SIGNAL = 4.3; EXPRESSED IN ADULT LIVER, SIGNAL = 2.8; EXPRESSED IN PLACENTA, SIGNAL = 2.5; EXPRESSED IN BONE MARROW, SIGNAL = 5.3; EXPRESSED IN LUNG, SIGNAL = 4.3; EXPRESSED IN BRAIN, SIGNAL = 3.1; EXPRESSED IN HELA, SIGNAL = 2.9; EXPRESSED IN HEART, SIGNAL = 4.3
agaaatggggacagagggacccagcgatcacgtgtaaccggagatcctgtgtgaatccatttggttggagctctacaattatactttcgggcaaaaaatgagactccgtggtagactgaagcggacacgggtttaactactgatttcaatcttttaaaggactcccacagacactgaaggagtgggctccgaaagagctagaactcacgtcccagaaagatgagtcagccttaaccatgaccactcagaagtcacaaccaaactctgggctggagccctggcctgccactgaggactccctgaacctcagtttcctggtctgtcaaatgggaaacagtcaccttcagatgacaggattgcaggttccagccttaccctccccgtggggagagggtcctccggactttcctcttagcctgccgtcctctcccgtgccctgctctcctcctcctcctctctactcagaaacacctcgggcctcttgcagcttgacttaagtcaagttgcttctttcccgaaaacaccctcttcaacccaccccctcgggctgcagcggatcccacctctc

SEQ ID NO: 9484 - DNA, 585 bp, Homo sapiens
  MAP TO AL031588.1; EXPRESSED IN ADULT LIVER, SIGNAL = 2.6; EXPRESSED IN HELA, SIGNAL = 1.7; EXPRESSED IN PLACENTA, SIGNAL = 2.9; EXPRESSED IN BRAIN, SIGNAL = 1.8; EXPRESSED IN LUNG, SIGNAL = 1.8; EXPRESSED IN HEART, SIGNAL = 1.8; EXPRESSED IN FETAL LIVER, SIGNAL = 2.7
cgtcaggatttcccacctgggcactgccgccccttggggacgatgacccttcattgtgaggcctgttctgggcagcattcctgacctctggtcactagactccagctgttcccctaacccggttttgacaaccaagaggtcttcatcattgtcaggcccctgaggtcatgccctggatgagaaccactgggctagtgagacgggagctcagctagcgggagtcctggtagcttcaggtggagatgcgagaccctgggccggagcttgaggcagcagcctctacgtgggcagcaggtggtctccaaggggcactcggcatccgtcacctggccggggacgatgctgtgctggtcgcgatcgccatgctggccacgggtggctagaccacacgcaatgaagccccatgcctgagctggctgctggagtccttgggactctgcctcggcaatttggcttcctctggttctggtgattctgagatggcgcggggctgtctttggcatgctgcggaaagtgcttttataaagacagcatgaggcccggttgcaacaaaccggaggaccggcctctgcttctgttgagcag

SEQ ID NO: 9485 - DNA, 568 bp, Homo sapiens
  MAP TO AL021707.2; EXPRESSED IN BRAIN, SIGNAL =   2; EXPRESSED IN HELA, SIGNAL = 2.2; EXPRESSED IN PLACENTA, SIGNAL = 3.2; EXPRESSED IN BONE MARROW, SIGNAL = 2.2; EXPRESSED IN HEART, SIGNAL = 2.1; EXPRESSED IN LUNG, SIGNAL = 2.2; EXPRESSED IN ADULT LIVER, SIGNAL =   2; EXPRESSED IN FETAL LIVER, SIGNAL = 3.3
ccaagaggaaacgagacaagaatgacaaaatcaccgaggcaggaacaggaaggctgtggggtcggaggattgaggaaaggcaaaaccctcatgctaaagcggcttcagcccaactccagacaagaacagtcccctttcctgggcctccattgcctgctctggaaagagaagagtctcctgctcttccaccctcctggagaccacggtgctggccattatcactcctaggtttagactgcaagctctttgaggacatggacaagctctccagagcctggtaccgagcctggctctggtctgagtgtctgctggatggagcaatgaaaggagaattcaaatcagacgtaggggcagcatccaggtaggggaagggcctctctgactcctcatctctgggatgcgcaactccagaattctgtcctaaccacttctatggagttgccacatcctacctcctccattgcacagcctgcttccccctctccgggggtcctggcagacaggggggtctggccttgctggggtcgggggggagtccaggtcccctcccaggatgtgctgagtggat

SEQ ID NO: 9486 - DNA, 578 bp, Homo sapiens
  MAP TO AC009313.2; EXPRESSED IN FETAL LIVER, SIGNAL = 2.5; EXPRESSED IN PLACENTA, SIGNAL = 3.2; EXPRESSED IN HELA, SIGNAL = 1.6; EXPRESSED IN BRAIN, SIGNAL = 2.3; EXPRESSED IN LUNG, SIGNAL = 1.6; EXPRESSED IN HEART, SIGNAL = 2.3; EXPRESSED IN BONE MARROW, SIGNAL = 1.5; EXPRESSED IN ADULT LIVER, SIGNAL = 2.4
ctatgaggccagcattaccctgataccaaagacactattagaaaagaaaactacagactagtatcacttatgaatatttgctatggtttgaatgtttgtcgcctccaaaactcatgttgaaatttaattgccagtataacaatattaagaagtgggacctttaagagatgattaggccatgaggtctctgccccccatgggcataattaatgctgctccaaaactgtcagtttggctgctgctgccctttctctttgctcttcagtcacatgataccttccactatatggaagatgctagtgtcttggttttggacttgccagatactggtgtcttagttttggatttcccagcatccagaactgtgaagaaataaatttctgttctttataatttatccaacctcaggtattctgctatagcagcacaaaacagactaagacaatattgatgcaaaaaatcctcaacaaaacactagcaaatcaaatccaacagcatattaaaagaattacatatcatgacaaagtgagacttattcctataatgcagtaatggttcagcatacaaaactagtcatg

SEQ ID NO: 9487 - DNA, 585 bp, Homo sapiens
  MAP TO AP000356.1; EXPRESSED IN HEART, SIGNAL = 1.8; EXPRESSED IN BONE MARROW, SIGNAL = 2.6; EXPRESSED IN LUNG, SIGNAL = 1.9; EXPRESSED IN FETAL LIVER, SIGNAL = 2.1; EXPRESSED IN ADULT LIVER, SIGNAL =   2; EXPRESSED IN PLACENTA, SIGNAL = 2.3; EXPRESSED IN HELA, SIGNAL =   2; EXPRESSED IN BRAIN, SIGNAL = 2.1
taccaggatgggctctgaagataagcagggaggatttgggagggcagagatgaggcccagagcttctggcagagggcatggcctgcgcaaaggtctgggggccggacagcctgcacgtattctgggaagcgggaaggagacacaggccttgtgtttctgaggcccgactttagactgtgccctgttggggaggggccagggaatgtctgaggctaggcctgaccctgcttcttaccccgtgggtgcagcagagccatgaagaagaagttagtggtgctgggcctgctggccgtggtcctggtgctggtcattgtcggcctctgtctctggctgccctcagcctccaaggaacctgacaaccatgtgtacaccagggctgccgtggccgcggatgccaagcagtgctcgaagattgggaggtgagcagggcagggcatgggacatgggccctgaaaactgggcaagtggacctgagcaataccttcacccccctgagactcagtttccccatgtgtaagcttcgcttggactctctcagtagcctttgggaaggggacagtgactccgagagcagggtgtgggtct

SEQ ID NO: 9488 - DNA, 569 bp, Homo sapiens
  MAP TO AL031588.1; EXPRESSED IN LUNG, SIGNAL = 2.3; EXPRESSED IN HEART, SIGNAL = 2.8; EXPRESSED IN ADULT LIVER, SIGNAL = 2.1; EXPRESSED IN FETAL LIVER, SIGNAL = 4.4; EXPRESSED IN HELA, SIGNAL = 2.3; EXPRESSED IN PLACENTA, SIGNAL = 2.8
tgtacaagatcttaaaataactcccggggagcctcagactgagctgcaggcactggtcactggctgctgcctcccccggccatccagggcttccctgactgtcctcagtggtcctggttaactggctcctccagagggcagtgggaagtgctggagggtgttaaacaggagggagctgggatctcttcaatatttaaataaggagagtggggaggagcatagcctaggccagggtggggcaaggggcacagaaagaccaggtctcacctgctggttgctcctgtcccaagtgtcaccttgatgctctgcatggacaggcggatctggtttgtcacactgtggctgggagtgacaactgtgcttcagagcatttcttcctctatctaaacaagcagctcgtatagcaggctcggtggtgaggcagtttcgggggtgtgtgtgtggtgtgcacgtgtgtatggtgtgtgcctctgtggtgtgtgtgtatatctgtgatgcgtgtctgcacacggtatgtgtgtctgcatgcatgtgtatagggtatgtacatgtgtatggcatgtgcacgt

SEQ ID NO: 9489 - DNA, 563 bp, Homo sapiens
  MAP TO AP000356.1; EXPRESSED IN FETAL LIVER, SIGNAL = 2.5; EXPRESSED IN ADULT LIVER, SIGNAL = 3.1; EXPRESSED IN HELA, SIGNAL = 2.1; EXPRESSED IN PLACENTA, SIGNAL = 3.8; EXPRESSED IN BRAIN, SIGNAL = 3.6; EXPRESSED IN BONE MARROW, SIGNAL = 2.9; EXPRESSED IN HEART, SIGNAL = 2.4; EXPRESSED IN LUNG, SIGNAL = 3.4
ctgtgtctctggggctctgcaggggtgagatggaggtgggctcaactggtgtacaagtcactcttcaatccttattttatttatttaatttttttaaaaaaaatttaaaccaatagagatggggtctcactatgttgatcaggctggtcttaactcctgacttcaagcagtccccccatctcagtctcccaaagtgctaggattacaggggtgagacactgcacccggcctcaatccttattttggcctgagaggaaaggccgtggccccatttgcaggggagaagactgaagctggaggggcaggccttgctctgggttgcacagcagcaacagaagtgggagctggccacgaggcttcctcgactcgacacactggtggggtacaccctggttctccaggtcccatggggctcagcccaggactacctcggggggtgagggacttaaatcctctccttcattctcatcgccccttcccccatcatttcctgaggaaggacattcagggacctgaaggagcggcctgcccctccacatctgtgggtgtttctcatcaggtgg

SEQ ID NO: 9490 - DNA, 586 bp, Homo sapiens
  MAP TO AC004032.7; EXPRESSED IN FETAL LIVER, SIGNAL = 1.4; EXPRESSED IN BRAIN, SIGNAL = 1.8; EXPRESSED IN HELA, SIGNAL = 1.6; EXPRESSED IN LUNG, SIGNAL = 2.8; EXPRESSED IN HEART, SIGNAL = 2.3; EXPRESSED IN ADULT LIVER, SIGNAL = 1.6
ttgtcctgtgaggctgtgtggtcacagcacccaggacttgagaggagtgaagttcttcctcaccccgcaaaggcttcatgagccctactgtgtgccaggccagccctgctcagtctggggcgataaacacagggcagattctgaaagcctgtgtgagggaagttctaggcctgcaggagctgagaggagaccctggagaggaagggagtcagggccagcttcctcgaggaggtgacaccccaatagagttgcaggagaagcagggaaggcattctaggcagtggaacagcatgccaacagggaagagccccagatggctcctggtttcctgtttggcaggctgggatgggagaactggtcctcactctagtttgcatggaagaaaaaggtcatacatgacctagatacactcactggccaagaggcaggaagatgcagagaagaggcaggtgtgggggatgggtgcaggttggagaagggcagcaaacccagtggagttggaggggaggcaggagcacacagccctgcatggccccaggcaacccagcacctgcattcacaacaccccctgaaggaaagaaccaga

SEQ ID NO: 9491 - DNA, 578 bp, Homo sapiens
  MAP TO AC008022.1; EXPRESSED IN LUNG, SIGNAL = 1.5; EXPRESSED IN HEART, SIGNAL = 1.9; EXPRESSED IN FETAL LIVER, SIGNAL = 1.3; EXPRESSED IN HELA, SIGNAL = 1.6
  unsure 170
gagctgattattgtgtggtgcaatgatatgtcaaaaaaagaaaagaaaatagagtgagtgacagtaatagggagagagaacaggacagtgaaataggaaaggcctgaagaaaaagtgtgcactttggcctttttgagtccagatcccattacttagctgagagcttgtgnggcaagtgactaagcctctttgaacctcagtttcctcttcagtaaatggggatgattttctcaaccttgtgagtactgatggtcttcgagccagcatgtggaatgtctcacaccgggccaggcatacagaaggcagaagcaacagattgctgctgttatgagaaggaggaggaggagagcagcgagaaccaagttgtgggtcagggtgaatgccagagggtggataacagtggttctcaaactttcatctgcctaagaatcatttggaggcttgggctgggtccctagaatttgtgatccaagagggtagaggtggggcctgagaatttgtgtttctaacaagttcctgggggctgctgatgttgctggtgcaggtgccctgtgctgagaacctcaggtgaaagcagg

SEQ ID NO: 9492 - DNA, 597 bp, Homo sapiens
  MAP TO AC005300.10; EXPRESSED IN HELA, SIGNAL = 1.8; EXPRESSED IN HEART, SIGNAL = 1.8; EXPRESSED IN LUNG, SIGNAL = 1.5; EXPRESSED IN BONE MARROW, SIGNAL = 1.4; EXPRESSED IN FETAL LIVER, SIGNAL = 1.9; EXPRESSED IN PLACENTA, SIGNAL = 1.2; EXPRESSED IN BRAIN, SIGNAL = 1.6
taaggctccagcgcagataccctgggatctgtattttaagctccccagaggattctgatgcaggggtatgagaactggcttttggaaaccaccagacatgaggactgaccacagtcgggagctgtcctccctcccctgagcccacaacatcgcctgtgtaccccagcacccagcactcctcactacagtccccactcagctaagggaggaaacacctcagccctgccccttcccttcagccagagttaagaccaaaaggatacccctgggcattttccatcacgggcccctgtccagacaccagcatccgcttctcatggtactcggagaagagcttcatggggctgtgagagaggataacttggtctgcatccacctgtagggacagccaagacaggggagggcagaggaagacagaactgttgagggaaataatgagacaggtggcaggtcctttagcctagggaaggaaaaaacccgctcagaaaaagaacggggaggaaagccctttctagcacccagcagcacttctgaaaggcacccaaacagatctgagaagaacctgtctcatttagttcttgccacacaagagaccag

SEQ ID NO: 9493 - DNA, 580 bp, Homo sapiens
  MAP TO AP000359.1; EXPRESSED IN BONE MARROW, SIGNAL = 2.6; EXPRESSED IN LUNG, SIGNAL = 2.8; EXPRESSED IN HEART, SIGNAL = 1.8; EXPRESSED IN FETAL LIVER, SIGNAL = 2.8; EXPRESSED IN ADULT LIVER, SIGNAL =   3; EXPRESSED IN PLACENTA, SIGNAL = 2.8; EXPRESSED IN HELA, SIGNAL = 2.1; EXPRESSED IN BRAIN, SIGNAL = 3.5
attagcacctgcctgagctggttgttagagtccggcctcctcagtttctcgtttcccttcttgccatgtggtctttgtccacatctctcccccacttttgctttttctaccaggagttgaagcagcatgagaccctcaccagatgggctgcccagtcttggactttccagccatcagaatgatgagccaaacacacctcttcctttataaattacccagcctcagatattctgttgtagcaaccctaaagagagtaagacaccaggcaactccacagagatgtctaatataactgtattcttcagggtcatcaccttcaggaccacaatgcctggtagggcaaggactcgcgcccgaggcagagcccgccgcagggagagctaccaacaagaggcacctgggggacccagagcacctggatcagctacagtgagccctgtaacgttgtttcctttctgcaagagatatgtgcctgtactgaaaagaacatagagttggttgttgagcgaagctagttcaggtatagtgctaagtgaggactaataaaagttcataagaaaagtcaggctgtatagatggc

SEQ ID NO: 9494 - DNA, 564 bp, Homo sapiens
  MAP TO AB016897.1; EXPRESSED IN PLACENTA, SIGNAL =  12; EXPRESSED IN BRAIN, SIGNAL = 3.8; EXPRESSED IN HELA, SIGNAL = 7.4; EXPRESSED IN HEART, SIGNAL = 4.2; EXPRESSED IN BONE MARROW, SIGNAL = 6.4; EXPRESSED IN LUNG, SIGNAL = 6.6; EXPRESSED IN FETAL LIVER, SIGNAL =  13; EXPRESSED IN ADULT LIVER, SIGNAL =  10
tttcttcacgtgtagcctcgtccaagagcctgtccagtacaggcaccaacggatgacaggagcgctccagctgcaatcagtccccagcttcgtctctctcctttaaagcagcaggcagtatttctttggcatgagttcatgcaggcgagcctggctctggactcaatcactcggggggcaggaaatcccaccccagccgcaccgaggttctgctccagcagctggtccaaaggcaccaattttggcatcccgcagagcgtcagagaatctttgttgccataggtgagaagtgcgtctcctgaaatgccaggtgttttctgctgacagctgcacacgctccttaccagggccgtgccatcctgctccatgacacactccatagagggatcgctgcactacaggtggtgacagcagggtggcgtgcgtcgcactgagagaaggtgtccacggagagtccgtctgctcctccttgccttcaatgtgtcctcctgaagcacgggagctctttgcggatgctcccatcataacgtccgcatcctcggatccaggctgaggtattccaca

SEQ ID NO: 9495 - DNA, 574 bp, Homo sapiens
  MAP TO AP000352.2; EXPRESSED IN FETAL LIVER, SIGNAL = 1.3; EXPRESSED IN PLACENTA, SIGNAL = 1.4; EXPRESSED IN HELA, SIGNAL = 1.2; EXPRESSED IN HEART, SIGNAL = 1.4; EXPRESSED IN BONE MARROW, SIGNAL = 1.4
aggtctgcccttttgatgtccaccttagatacggagattcagagaggctcaatcatagctgctgagggttggagccaggcattgaacccagtagcctgatctcagcaccacaacgtggtatcatgtccacctggatcagatggtagagggagggaacagtctttactgtcccaaagtaaataggagaccctggcatggaaggtactctttattcaagtcaggttgttcttgctccccgggcagaaaagcaggacgtgcatgagttcctgctggagaacctaaccaacgggggcatcctggagctgatgatgcgctacctgaaagccatgggccacaagttcttggtaaggtggcctccaggcttggcggaggtcgtgctcagcgtctaccacagctggaggaggcacagcaccagcctgcccaacccgctgctgagggactgcagcaacaagcacatcaaggttagggggagcctctcaagggctggtattgaactgggaccagggcatggggacagggatcttgcatgggtgtggggctgctgttgtgtttggctgcatctacttgtgggcct

SEQ ID NO: 9496 - DNA, 562 bp, Homo sapiens
  MAP TO AP000344.1; EXPRESSED IN FETAL LIVER, SIGNAL = 3.8; EXPRESSED IN ADULT LIVER, SIGNAL = 5.8; EXPRESSED IN HELA, SIGNAL = 4.6; EXPRESSED IN BRAIN, SIGNAL = 4.5; EXPRESSED IN PLACENTA, SIGNAL = 5.7; EXPRESSED IN BONE MARROW, SIGNAL = 7.5; EXPRESSED IN LUNG, SIGNAL = 5.6; EXPRESSED IN HEART, SIGNAL = 4.3
tctgctgatcagggatgctcaattaaactttactcaagtgagaaaaagatttttattgtgttaagccaccaaaatttggggatttatctgctacggcagcaaaaattacctaaggaactagggccagttttgttcaatgtcctggaaggctcactccttcttaggttgctgggcactgtctatggctactgcactgctgccccttggggatctgggatgtcgatcatttgaagagactcacgtgaagaagccaaatattcccagccggtactggacgatcacaaccagcatgtcctcataggcagccagggaggacccatcgaagatggaggctgagccagtctcgaaggcaccgcctgggaaccacaacaaaacctgaggaggagacaggaatgtcccatcagcccaccaggcaccacctcccctccccatgcagtttggggcacacgttcttcagatgaaatataaatgtcccacttgctaagcagggtgtgatgtttcatcttttgaaggcccagggtgaagcatgtaggctctggcacctgagtgcctgggtttgatt

SEQ ID NO: 9497 - DNA, 571 bp, Homo sapiens
  MAP TO AL022312.7; EXPRESSED IN HELA, SIGNAL = 1.5; EXPRESSED IN PLACENTA, SIGNAL = 1.5; EXPRESSED IN LUNG, SIGNAL = 1.3; EXPRESSED IN HEART, SIGNAL = 1.4; EXPRESSED IN BONE MARROW, SIGNAL = 1.6
gagagcccagcacaataaggggtacgggaagagggggcagagatgaagttgatgtctggccaccaccctgcatgtggcaacttgtggcccctgccaggccttggccagcccagcctaggctgaccaggtcagaggtggagctgggctttacccagtgaccaggggcccggggctgggggataggaagggacctcacaggcgggagcagacagcactcagcattttctcctgctttgtgtctgggacaaggctgtaggttgtggagagcagagaacgaccttcatcttttctacaactagtcctgagtgggtgcctgctctgcactacactgtctgggtgctggctacagcagtgagccaaatagataaacatccctgccctcatggagctttgcttctggtaaaggagacaggtggaccctaaaaagaagaaagaggtgacgtgtcacattcagatgtgacacagcagctgggtagggcttggacatgctgggcatgctccttaagactggtgcttagggagttgcaggggtcagcccggcaggggactgggctgggattggcaaggagag

SEQ ID NO: 9498 - DNA, 572 bp, Homo sapiens
  MAP TO AL022312.7; EXPRESSED IN FETAL LIVER, SIGNAL = 1.9; EXPRESSED IN PLACENTA, SIGNAL = 3.5; EXPRESSED IN BRAIN, SIGNAL = 2.4; EXPRESSED IN HELA, SIGNAL =   2; EXPRESSED IN BONE MARROW, SIGNAL = 1.5; EXPRESSED IN HEART, SIGNAL = 1.6; EXPRESSED IN LUNG, SIGNAL = 1.9; EXPRESSED IN ADULT LIVER, SIGNAL = 1.6
tgctgtcttgtggactgtgcactcagtccttgcaaggccaagagtccagttgtaggtgtggccttgagggggaagtggggaggagaagactgacatgagtcctctgcacggatccgtctctccctccccatcaccccttccttctgacacccagtcccagctgtccactgtcccaggtgcagtcactgttgtgcccttccttggggcaggctggctgggggccagaaaggggccatgaggctgtcttgggcccaaaaagggacaataaggccagttgtatgcttcctgttcctcatagcttgccttggtggggatgtctttgttggagttgattctgagctgctgtgattaggagaccctgaaatacagtggtttaagcaagatggaagcttgtttctaattagtctagattgagatggcccagagctggtagggcagctctgcgtttcttcatacgcaccttccaattctgggtacacagcggctgctccagcgcccaccctcctgtgtgcatccaagcctgggggaagcagaaatagacaagagggcacacccactttttgctaaaggca

SEQ ID NO: 9499 - DNA, 570 bp, Homo sapiens
  MAP TO AC007556.2; EXPRESSED IN FETAL LIVER, SIGNAL = 2.5; EXPRESSED IN BRAIN, SIGNAL = 3.1; EXPRESSED IN PLACENTA, SIGNAL = 2.4; EXPRESSED IN HELA, SIGNAL = 2.3; EXPRESSED IN BONE MARROW, SIGNAL = 2.6; EXPRESSED IN LUNG, SIGNAL = 2.4; EXPRESSED IN HEART, SIGNAL = 2.6; EXPRESSED IN ADULT LIVER, SIGNAL = 2.1
ggactgtgggcttaatcgtccatacctcttaaagtcttttggcaagactaaacgaggaaaatatttgaaaagcatgtgaaacagtatctgaaacttagtgtttcacaaatgtttgtatcattgcttattttcatctgtacccttctcggtcctcattgctggtgaatatgggtttaaacagaagcaagatctctaaggaatggatgggaacagatgttgcgtatttggttttattttgcctacagatatcaatgaatgtgaacaatttgggacttgtccccagcactgcagaaataccaaaggaagttatgagtgtgtctgtgctgatggcttcacgtctatgagtgaccgccctggaaaacgatgtgcagctgagggtatgatgggttcatgttgggattaattgacttttggggaaataaatactgctaagtacactatacgatgaaagaaacttcagcttctcatagtttttcttttctttctttttttttaaactcgccagctgcttctcttccaacacctctttagtcgctccttctctctcctcccctgccagcttaaaacaat

SEQ ID NO: 9500 - DNA, 541 bp, Homo sapiens
  MAP TO AL022312.7; EXPRESSED IN BRAIN, SIGNAL = 2.2; EXPRESSED IN PLACENTA, SIGNAL = 2.1; EXPRESSED IN ADULT LIVER, SIGNAL = 1.5; EXPRESSED IN FETAL LIVER, SIGNAL = 1.8; EXPRESSED IN HELA, SIGNAL = 1.7; EXPRESSED IN BONE MARROW, SIGNAL = 1.9; EXPRESSED IN HEART, SIGNAL = 1.6; EXPRESSED IN LUNG, SIGNAL = 1.7
gttgctgaccgagaacccactcaataggctgcggagctgggagggctagctgttcatttttgtgacaggtctgaggtgaatgactacaagatgtgggcaggcccagctgaccagaccagagcaagttttgtgacgggtcatgcaattgggggcaccgcacttcagcctttcctctttaggctgaggatctctggcttggctcagcttctctgaagaagatctgaggggatcagtggaccacatgccccacaggtgctgcagtaggactgggttgccagctgggccctgatgctcccagtccgcatcaagaaaggccagaatcaggcaggtaacctgtctgttgtgctctgggtggcttggtgcatatccagtcctgcccatgcagaggaaagggcacagacttgagtgtgactgcggagggggtcccagggaggcatatgatgtggaaattgtcacccaaggaatggttgagggagctggtgacaagaggcctggggcagatgaggctcaggggtgggcgggctgtcgtcatgcatctgca

SEQ ID NO: 9501 - DNA, 541 bp, Homo sapiens
  MAP TO AB016897.1; EXPRESSED IN PLACENTA, SIGNAL = 1.9; EXPRESSED IN BONE MARROW, SIGNAL = 1.7; EXPRESSED IN LUNG, SIGNAL = 3.2; EXPRESSED IN FETAL LIVER, SIGNAL = 1.4; EXPRESSED IN ADULT LIVER, SIGNAL =   2; EXPRESSED IN BRAIN, SIGNAL = 1.6; EXPRESSED IN HELA, SIGNAL =   2; EXPRESSED IN HEART, SIGNAL = 3.3
ttgtggcaaccgtttttaggtaatttattttaaaattgtagagctaaaaaattgtaaaaagttttattttccaacagtgattttaacctggtattttatatttaactttctgtgtgtgtgtgtttgtgtatatgtgtgtctacttgtcttaatgtgtgcattttatgtcttgtgctggtggagtttgtggagggagattaatgtcagcctgttgttagttgcaggacgaggagcggaggcggcagcagcagttagaagagatgcgcaagcgggaagcggaagaccgagcgaggcaagaggaagagcgccggcggcaggaggaggagcgaacaaaacgagacgctgaagaaaaggttatggtcctttaagggcagctagaattttaccaagttagcctgaacgtaatcgattggctggggcagagcgggctggaagttctgtgtttcttaagaagcacgaggcagagcagggcctggctccccccagctttgtgattggacctgcaactttaccccatctggcccacctacctctcttctgg

SEQ ID NO: 9502 - DNA, 567 bp, Homo sapiens
  MAP TO AC007556.2; EXPRESSED IN LUNG, SIGNAL = 4.5; EXPRESSED IN BRAIN, SIGNAL =   3; EXPRESSED IN HELA, SIGNAL = 5.9; EXPRESSED IN HEART, SIGNAL =   3; EXPRESSED IN BONE MARROW, SIGNAL = 1.9; EXPRESSED IN ADULT LIVER, SIGNAL = 4.5; EXPRESSED IN FETAL LIVER, SIGNAL = 5.4; EXPRESSED IN PLACENTA, SIGNAL = 4.3
aggaaacctcttgcatggtggtgcaggatatggaaggcatatatagagtcagtataaatactgacatgtagtccctttgcaagagtgagggtttgacttaaggcaatgagttcggcttgctgagaggtagtggagcggggcagagcggtagcctcaatgatagatgtggaagatactatagcatagcctgcctttgctggtgagtggcgattaggcctggtggaactgctatcagtaaaccaagtgtgttcagggtgaggaacaggaaaaaaggaaatatggggaaatggggtgaatgtcaggtggatcagagagatacagtcatgggggtcaggtgtggtatccgtagtaatgtgggaggctggattgaagtctgggccagaaacaatggtaattgtgggagactcaacaaagagtgagtacagctgaaggagctggggaacagacagtatatgcgtcaggtgggagaaagaaaatagattttggaagttatgagaactgtagagagtgagttgagcatagtttgtgatttttagggcctctaaaagtattaaagcagtggcagcc

SEQ ID NO: 9503 - DNA, 552 bp, Homo sapiens
  MAP TO AC002472.3; EXPRESSED IN PLACENTA, SIGNAL = 1.2; EXPRESSED IN BRAIN, SIGNAL = 1.5; EXPRESSED IN HEART, SIGNAL = 1.4; EXPRESSED IN BONE MARROW, SIGNAL = 1.4; EXPRESSED IN LUNG, SIGNAL = 1.2; EXPRESSED IN FETAL LIVER, SIGNAL = 1.3; EXPRESSED IN ADULT LIVER, SIGNAL = 1.9
ctgcaacaaaaacaacaggcacatgcattgtgcaaccttccaagcagcggtgcagagcccactgccccagggtgcccactggagctgccattgcagccaccaggttgggtctcttgttccctccactcacaccccaggaaccctggacagatcaacaggtaaaaggtggagatgacaccgttcagaggaatcacacggcaaacacacctaaagcgtccctgtcctggtggacaccagctgccgctcctctgagctctgcaagtgctcccacatattctgccccagctgacacctcatgcctatcaccattacaacgcctgttccagaaaatcacctagcttatgttcaaggcctctcctcctcctgccgttcccaaactccagtcctcagcaccgccctggaccactttgtctccggagtcagtcccgcttctctctgacttctcagaccccagctctggctgcacctccgtattcagcctccgcggctgcctccagtcttagctcctcccatggggaggaaagctgggcaggattgagtggggccttcttg

SEQ ID NO: 9504 - DNA, 584 bp, Homo sapiens
  MAP TO AC009313.2; EXPRESSED IN ADULT LIVER, SIGNAL = 4.6; EXPRESSED IN FETAL LIVER, SIGNAL =   5; EXPRESSED IN PLACENTA, SIGNAL =   6; EXPRESSED IN BRAIN, SIGNAL = 3.9; EXPRESSED IN HELA, SIGNAL = 3.5; EXPRESSED IN BONE MARROW, SIGNAL = 5.6; EXPRESSED IN HEART, SIGNAL = 2.4; EXPRESSED IN LUNG, SIGNAL = 3.5
gcaacaaaatcacctgaggcgctttgctaactagaatgtagattctgaggtcccatttcaggccaactgatttgcagtcacaggtacctgaattgctgccctcttgtctattgtgcacatccagtcggccaccaaatcctgttgattctactcttgaaatgcctcttgaatccactcatctttatttcccctgctctagttcaagccctcatcttttacctagaatacagcattagttgcctgtggtatagcctcactttgtctccctcgctagtttgtagtccatgctgttatctgttctgtctaaaatatgtccatcatctccttgaaaatctctcattactccttgtgtcaacatgttaaagtctaaatttcttagagtgacattcgaggtctactatagtctagccataactgagtctgctgcatgtggtttatgcagccagtgtactctacagctctataggatgccattccaatcatggtctttatgtatggtcttccctagaatttttgtagtacagcacagtcatacatgctgaccctgaccatagcttatcatggcaccctcacctcgctatcat

SEQ ID NO: 9505 - DNA, 567 bp, Homo sapiens
  MAP TO AL022238.1; EXPRESSED IN LUNG, SIGNAL = 5.7; EXPRESSED IN HEART, SIGNAL = 3.9; EXPRESSED IN BONE MARROW, SIGNAL = 7.9; EXPRESSED IN ADULT LIVER, SIGNAL =  13; EXPRESSED IN FETAL LIVER, SIGNAL = 8.9; EXPRESSED IN PLACENTA, SIGNAL =  11; EXPRESSED IN HELA, SIGNAL = 6.4; EXPRESSED IN BRAIN, SIGNAL = 3.9
ttgatgcaaaataagttaatcagagtgaataagtttgttcatccaactcataggttaggaaaattgtccctaatcgctgaagatcttaagtggtgaaagtctaactggggtgaggggtacagcctttggtcaaaatgcctgatgtcagcacaggacatagagaagtaggcagaaatagtctcaccttgagatgggcaaagtaggggtaagacagtgttagaataggctatgaaccaggtcagccatcagcattttaaataatcagatgtttagtagtgcttttcttgtctgtgtctttctctttacagaggaatacatgagcagtgatgctaagaatgttaacttacattcttacatggataccatctcatttttgtccttttttgactctacaagttaacactcccacctgtttatctcttaaaacagaccataggctgaatcatatgcttttgttttgagctgcatttatggaaactatttgcaaaatgggcacactaggtctcagccagtgctttgaatatcttaaaatgtaccttttccaccccacctccagtctttatctca

SEQ ID NO: 9506 - DNA, 577 bp, Homo sapiens
  MAP TO AL022238.1; EXPRESSED IN HELA, SIGNAL = 2.8; EXPRESSED IN PLACENTA, SIGNAL =   4; EXPRESSED IN BRAIN, SIGNAL = 4.9; EXPRESSED IN HEART, SIGNAL = 2.1; EXPRESSED IN LUNG, SIGNAL = 3.5; EXPRESSED IN BONE MARROW, SIGNAL = 5.6; EXPRESSED IN ADULT LIVER, SIGNAL = 4.9; EXPRESSED IN FETAL LIVER, SIGNAL = 4.8
agctttgatttgcttcccacatctttgccactttctatgttcaaagggtgctagtccacacttctttgcaaactatggagtgtgcttaagggttgtcagctcaactggaggaaaatgtaaccaagagaccgggaatttggtgttacttccctcctggatacttttgattgtgtgacctgtacttcagtgcacagaccctttaggtgtcctcagtaaatcaatctcaggaaactttggttttctgtctttcccccttgttttgtaggcatgtcagcttctcttgcagcagcagcaacagcagcagttgttacagaaccagagaaagatttctcaagctgtacgccaacagcaagagcagcaggtacgtgggtaggcagggtccctccagtgctgtgttggaggagtacatcccggcttagcctctgatggcaaagaaccgggcacagtcttttcctgggaagttcggggccgtgcttatcacgtgtctgtctctcttggccctcagctggctcgaatggtgagtgcactgcagcagcagcagcagcagcagcagaggcagccaggcatgaagcactcg

SEQ ID NO: 9507 - DNA, 568 bp, Homo sapiens
  MAP TO AC008151.1; EXPRESSED IN FETAL LIVER, SIGNAL = 7.5; EXPRESSED IN HELA, SIGNAL =   4; EXPRESSED IN BRAIN, SIGNAL =   2; EXPRESSED IN PLACENTA, SIGNAL =  11; EXPRESSED IN BONE MARROW, SIGNAL = 1.7; EXPRESSED IN LUNG, SIGNAL = 4.1; EXPRESSED IN HEART, SIGNAL = 3.4; EXPRESSED IN ADULT LIVER, SIGNAL =   9
gaatgtctgtgcaaaatggcacacgatccagatggattgttatacaatcattaaatagtattgttaatgcactgtggaatctttctgtgacaaatgaaagcactgtgtgtgtgtatgtgtatgtgtgtgtgtgtgagtgtgtgtgtgtgtgtttgtgtgtttatggaggtgatcctggataggtgatatgaaattctgacttgtccagcttctcttgatactattgggaagttggcagacacacaggcacttactagcataagctgacttccataactttattctaatattttgtattttggaatcaaaggagtcagaagatgcatgcatcagtttctgggtgtccatttgtgctgccagaagaaaataccacagtctgggtaacttatagacaatagaaatttatttctcacaggtatggaggctggtaagtccaagatcaaggcactggcagattccgtgtctggtgaggactgctctctgcttccaagatggtgtgttgttgctgagtcctccagagggaacgaagactgtgtcctcatgtggcggaagggatggaaggaaacaa

SEQ ID NO: 9508 - DNA, 550 bp, Homo sapiens
  MAP TO AP000347.1; EXPRESSED IN HELA, SIGNAL = 2.7; EXPRESSED IN PLACENTA, SIGNAL = 1.9; EXPRESSED IN BRAIN, SIGNAL = 2.8; EXPRESSED IN BONE MARROW, SIGNAL = 4.3; EXPRESSED IN LUNG, SIGNAL = 3.5; EXPRESSED IN HEART, SIGNAL = 2.5; EXPRESSED IN FETAL LIVER, SIGNAL = 3.8; EXPRESSED IN ADULT LIVER, SIGNAL = 3.8
tattacttccctggggagccaggaccactgctgagctctgactgccccctgggctccccaaggttgggacagcatggagttggggggtggaggggctagaggcacctggtcattccagctccatcccatgtgcgccttccctgcggtttcaccaatgatcacagaatgatggtgctaatgctcaaagtggccccgcgcaaggtggagaggggaggccaggaaggcagtggggctgcagggttcgtaccttcaggtggcacttgttggctgtgtggatgtcctcatcattggggttgagtttgaaggtgccctgggcccactcctcaaccacctatagcacgtagcagcaataccaggggtcaggtgagcaggcatcagcagccgagagcccctgccctgatcccaccttattcctgatgactgactgtccctgtccaggagctgagtcctggaagtgcaccctgggagggggcatctcgagcccagcacacctttacccataagccatgtgggccacagggatcattaaaggagagaagaggtcaaggca

SEQ ID NO: 9509 - DNA, 575 bp, Homo sapiens
  MAP TO Z83840.7; EXPRESSED IN FETAL LIVER, SIGNAL =   4; EXPRESSED IN ADULT LIVER, SIGNAL = 2.1; EXPRESSED IN HELA, SIGNAL =   6; EXPRESSED IN PLACENTA, SIGNAL = 2.4; EXPRESSED IN BRAIN, SIGNAL =   3; EXPRESSED IN BONE MARROW, SIGNAL = 1.4; EXPRESSED IN LUNG, SIGNAL =   3; EXPRESSED IN HEART, SIGNAL = 2.9
aaaggaagggggatagcaaccctgtaaaacagaacaaaaacaacacaaaaatccagaaaccagatttagtactacattttataacaatagagagtagctgaaaatactacatgctaacacagataatatgatacacaacctcaggggggaagctggcagggagcacgtggcagaggccacaggtttagactaagagcctttcaatggactgctgaatggattggatctgctgtttcagctgcgagccttctttgatggtgacagaacaggcgatgacaggcctggagaccccacaggctctccccagggcctgcttggagcgcacaaacacgtagggcacattcttgtcttcacacagcagcggcaggtgcagaatgatctccagtggctcggcgtctgcagccatcacgatgaactcagagatgcccctgttgagggttttggtggctgcggagagaaggacgtgaagctaataggtgatgtgggcttgggcagggcagccacaacaaactgggaagaatgcctaggcacacacaattatgtgtcctagaccggccctgggatatgataaagga

SEQ ID NO: 9510 - DNA, 569 bp, Homo sapiens
  MAP TO AL022312.7; EXPRESSED IN FETAL LIVER, SIGNAL = 4.7; EXPRESSED IN PLACENTA, SIGNAL = 3.4; EXPRESSED IN BONE MARROW, SIGNAL = 6.8; EXPRESSED IN BRAIN, SIGNAL = 4.5; EXPRESSED IN HELA, SIGNAL = 3.2; EXPRESSED IN HEART, SIGNAL = 2.3; EXPRESSED IN LUNG, SIGNAL = 3.3; EXPRESSED IN ADULT LIVER, SIGNAL = 5.4
ccgtctctcaggcttggcgccctgggatgctcccttgctccagctctgtgactgtccccatgagggtcctccctcagtgcagccccatctctccagcggtgctggcacgatggacccggttgactccctgcctcctgccctctccgttcagtctaaactgcacagtctaacgtaggaaccactagagcatgcagctattaaaattcaaattaaattaagctgggtatggtggtgtgagacttgtcccaactactcacgaggctgagatgggaggattgcttgagtccaggaattcacatacagcctgggtaacataggtctcgtctctaaaaaacaaaaacaaaaacattatggaatgagcctctggggatgaggagctgatgtcctgaatggaccagtgaccagtgcaggaggggtggagtcctagcaggggtagatcccagctttgggaaccaactttcccaggcacttgccggccactccgtgggaaagtcctcaggcagcctgcagggagctgggatcagctgatggggatgggtttggaggggagagagtggtgcacagggact

SEQ ID NO: 9511 - DNA, 544 bp, Homo sapiens
  MAP TO Z83844.5; EXPRESSED IN PLACENTA, SIGNAL = 1.3; EXPRESSED IN LUNG, SIGNAL = 1.4; EXPRESSED IN HEART, SIGNAL = 1.6; EXPRESSED IN ADULT LIVER, SIGNAL =   2; EXPRESSED IN HELA, SIGNAL = 1.5; EXPRESSED IN BRAIN, SIGNAL = 1.9
ggagaccgctgagttcctgggtgaggacctgctgcaggtacgtgcctgggccgggcaggtgggaaggcaggcctgtgcaggctgtctcggagcagagggccggggcggggacgccaggtaggggcctgggttgagtcattcctcaagctgttggccatggggtccccaggggacaggagaaagtttcctgctcagggggagacagcctctcttgatccttaacctccatacctccttcccaggtagaacagcggctggagccggccaagcgggcagcccacaacatccacaagcggctgcaggcctgtctgcagggccagagcggggcagacatggacaagcgggtggtgagtggggggtcccgggaaggaggggcctgagcaggagacttccatccaatggggaagcaaggtcggggctggggtttccttgccagtctgagtgtctggcaccaagggcatggagactgctctgttccaaggcccctctggcactgcactcaagaggccctataccttccccatcacctttaccccacttccct

SEQ ID NO: 9512 - DNA, 555 bp, Homo sapiens
  MAP TO AP000233.1; EXPRESSED IN ADULT LIVER, SIGNAL =  12; EXPRESSED IN HELA, SIGNAL = 5.7; EXPRESSED IN PLACENTA, SIGNAL = 6.3; EXPRESSED IN BRAIN, SIGNAL = 3.4; EXPRESSED IN BONE MARROW, SIGNAL = 6.3; EXPRESSED IN LUNG, SIGNAL = 7.5; EXPRESSED IN HEART, SIGNAL = 5.3; EXPRESSED IN FETAL LIVER, SIGNAL = 6.5
gaagcaattttggaactgggtaacaggcagagattggaacagtttggagaattcagaagacaggaaaatgtgggaaagtttggaacttccttgagatccctttgttgaatggctttgattaaagaagtgctgatagtgatatgaacaataaggttcaggctgaggtggtctcagatggagttgaggaacttgttgggaactggagcaaaggtaatccttgttatgtttttgtaaggaggccagtggcattttgctcctgctctagagatttgtggaactttgaacttgagaaagatgattttgagtatctggcagaagaaatttctaagcagcaaagcattcaaaatgtgactggggttttgttaaaaagcattcaagtttaaaagggaaacagagcataaaagttcagaaaatttgcagcctgacgatgcagtagaaaaaaaaaaagcctgtgtttttttaggagaaattcaagccagctgctgaaatttgcataagtagcaaggaacctaacgttaattcccaagaccatggggaaaatgtctccaggccatg

SEQ ID NO: 9513 - DNA, 561 bp, Homo sapiens
  MAP TO AL022318.2; EXPRESSED IN LUNG, SIGNAL = 2.5; EXPRESSED IN BONE MARROW, SIGNAL = 2.5; EXPRESSED IN HEART, SIGNAL = 1.5; EXPRESSED IN ADULT LIVER, SIGNAL =   2; EXPRESSED IN FETAL LIVER, SIGNAL = 3.1; EXPRESSED IN BRAIN, SIGNAL = 2.3; EXPRESSED IN PLACENTA, SIGNAL = 2.7; EXPRESSED IN HELA, SIGNAL = 2.1
ccagtgaactcagggtcagcacttaaactcattgcttattagtgatgagacttcacagaagtaggggtgagaagtgggggtgagggtaagaggaataatggagccacttctgctgctgcacatgagtggcaccttcttgcttaagcctcacggcagccatgtgggcaaggggttcttctggtgcgggggagggagttaaggttaggtggcttgcctagatctatattcgggacatctcagagcctcagcctccccgtccatgtaatagcaattgatcgactccctctgaatagggtgaacctctgtcccttttgccctggatggggatgctctaggcctgctgtccctgccatgggtgacagcacccctgtcactcttgaaaaggtccaggttcagatgaaaagtgccacagtgaccctacttccaaggcaaggtatgaggctagaaatgaccaattgccagaaagagcttgccagggcaaaggcatcacctggcaacatagtcagggaagacagggcctgggagggaagcgctggggctgcccagagaggcatctatcca

SEQ ID NO: 9514 - DNA, 591 bp, Homo sapiens
  MAP TO AP000127.1; EXPRESSED IN HEART, SIGNAL = 1.5; EXPRESSED IN FETAL LIVER, SIGNAL = 1.5; EXPRESSED IN ADULT LIVER, SIGNAL = 1.5; EXPRESSED IN PLACENTA, SIGNAL = 1.8; EXPRESSED IN HELA, SIGNAL = 1.3; EXPRESSED IN LUNG, SIGNAL = 1.4; EXPRESSED IN BONE MARROW, SIGNAL = 1.5
agaaaacagtccatgcacgcaccctgtctagctgtactggatacctccgaatgattactccttggctgagttgagtgacacatatggacgaaactttgggaaactgagaaaattataaattaacttccctaagaacagggataataagacatgttgtagaagaaagaatccagaggagaaggaggcaggctagagaaattatgactgaagaagggagccaggaggaagcagaggaataagacgcagagcaagaaatgaagaggtgaaaacactggccatgagaagaaaccaagtggcaattccatggggagcgaactttggagagggaaagacagatgaaaagaataatttcaggaactttagttgcaaggtatgcatgtcatctccttccctttattctctatcaaatgccttgatgttgaagtttgtggcactttttaagatgtggcaattcgcaagactagctttaagggtagcacatggtaagaacagaactcatacaagggagtcagtttacaatgtatcacaattaattccagaataacactacatttatatttgcatattattttggggtcctggtacacacgc

SEQ ID NO: 9515 - DNA, 589 bp, Homo sapiens
  MAP TO AC006548.19; EXPRESSED IN HEART, SIGNAL = 1.8; EXPRESSED IN BONE MARROW, SIGNAL =  23; EXPRESSED IN LUNG, SIGNAL =  11; EXPRESSED IN FETAL LIVER, SIGNAL = 1.6; EXPRESSED IN ADULT LIVER, SIGNAL = 2.7
cccagtcaggacacagcacggatgcaaggtcccccactcagctcctggggctcctggtgctctggttgccaggtaaggaaggagaacactaggattatactcggtcagtgtgctcagtactgtctggaacctcagggaagtcctctgataacatgattaattgcaagaatatttgtttttatgtttccaactgcaggtgccagatgtgacatccagatgacccagtctccatcctccctgtctgcatctgtaggagacagagtcaccatcacttgccgggcgagtcagggcattagcaataatttaaattggtatcagcagaaaccagggaaaactcctaagctcctgatctatgctgcatccagtctgcaaagtgggattccctctcagttcagtgacagtggatctgggacagattagactctcaccatcagcagcctgcagcctgaagattttacaacttattactgtcaacagagttacagtacccctcccacagtgttgcaagtcataacataaaccccaaggaagcagatgtgtgaggctgggctgccccaatgctccttctggtgcctctatctgctgaggg

SEQ ID NO: 9516 - DNA, 587 bp, Homo sapiens
  MAP TO AB016897.1; EXPRESSED IN PLACENTA, SIGNAL = 2.2; EXPRESSED IN LUNG, SIGNAL = 2.5; EXPRESSED IN HEART, SIGNAL = 1.9; EXPRESSED IN FETAL LIVER, SIGNAL =   2; EXPRESSED IN ADULT LIVER, SIGNAL = 2.3
ttttgagagttgactatgactgggaaaagttaatgttgtagccaagagaacatgttgccctttttttctagatgggtttaaatacagcccctgtgatttcgattataagaaaggttatagcacaatttaacaaagaatgagtgaaaattttaatcgcccattttgcaaacgtgtgtaattgttgacaggttgtttctagtttgtccagtaatctttgatattgccctcttctgcagccaagatgcagattcacctggaagttctggggcccctgaaaacttgacattcaaggaacgccagcgtcttttttcacaaggtcaagatgtatccaataaagtgaaagcttctcgtaaattaacagaactggagaatgaactgaacacaaagtgaaagaaaatgaggagaacactttgtatttaccccaaaatcttttcagttgtgggtttgtaggtgcgagtttgaagaggaaaagaggaagggggttatatttctaagtgatttacaatttctgtttctaaaattgttgggatttagaaatgtttcaattccaagaaattttattttactttaccatgagattgccattt

SEQ ID NO: 9517 - DNA, 564 bp, Homo sapiens
  MAP TO AL021392.5; EXPRESSED IN ADULT LIVER, SIGNAL = 5.4; EXPRESSED IN FETAL LIVER, SIGNAL =   6; EXPRESSED IN PLACENTA, SIGNAL = 7.4; EXPRESSED IN BONE MARROW, SIGNAL = 1.5; EXPRESSED IN BRAIN, SIGNAL =   2; EXPRESSED IN HELA, SIGNAL = 3.1; EXPRESSED IN HEART, SIGNAL = 2.2; EXPRESSED IN LUNG, SIGNAL = 3.7
ggatccagggatggataaatgaatggatgaatggatggatggatggatggatggatggatagatgcatgcgtggatggatggatggatggatgaatggatccctggatggataaatagatggatggatggatagatagataagagaggcagacagacaaatgcggtaaaatattaacctttggggaataactggatgaaaaatacacaagaattctttgtattatttttgtgactttcctgtaagtctgaaatcatgtcaaaatttaaaagaaaaaaagccatctctagaaatctaaggtgaaaagaaacaaatgcacccaactctgtactgacttgataacacagcctcaaaggaagaaaaaagtcttgccagtgactgtcaaacaccataatctgtacctttctagtgggacaagccctaaggacaaaagaacaagaaacaaatagagactgcattgagtaatcttgtgatattttattttgagattgtgtgtattatcaagggatcaaacaaatgtgtaatgccgatgatgttcactgagaaccaagatttcagcaaaaca

SEQ ID NO: 9518 - DNA, 569 bp, Homo sapiens
  MAP TO Z82201.1; EXPRESSED IN BRAIN, SIGNAL = 7.1; EXPRESSED IN PLACENTA, SIGNAL = 4.5; EXPRESSED IN HELA, SIGNAL = 6.2; EXPRESSED IN BONE MARROW, SIGNAL =  11; EXPRESSED IN LUNG, SIGNAL = 6.1; EXPRESSED IN HEART, SIGNAL = 4.6; EXPRESSED IN FETAL LIVER, SIGNAL = 6.4; EXPRESSED IN ADULT LIVER, SIGNAL =   5
aagctctccagctacccaggggatataaatgatcctctttgaatgcaaagagttcagggaaaggaacaggccacttttcttttccttccacactctcggtttgtggagcttgtacttctagtccaggaaggaagggaaggagaaagtactggaggtttctgctcgcaattttttatatcactttcataatgtctggctgcttctgtctacagccaaacaaatactgcactgaatctcacaccaaggagccacctgaaggccaggcctctgtttcgatgaccgtgatagagatcagccgtgtctgggatccacaagcctgccacaactgaaggacttccactcagcccatcgtgctggttggagggcacagggattcctattttgcagatgaggaaacagaggctcagggttcccagggaatccgtgactagagaccctgatgtgtgatggagcgtgcactctgcaggcaggtggctcagtggcaaaccccagctctgccacttactagcaacgtgaccatgggtgagataaccttgtgatgcttctgttttctcatctgtaaaatgggg

SEQ ID NO: 9519 - DNA, 580 bp, Homo sapiens
  MAP TO AL022318.2; EXPRESSED IN BRAIN, SIGNAL = 5.1; EXPRESSED IN PLACENTA, SIGNAL = 3.8; EXPRESSED IN HELA, SIGNAL = 6.5; EXPRESSED IN LUNG, SIGNAL = 4.7; EXPRESSED IN HEART, SIGNAL = 6.2; EXPRESSED IN BONE MARROW, SIGNAL = 3.7; EXPRESSED IN ADULT LIVER, SIGNAL = 3.9; EXPRESSED IN FETAL LIVER, SIGNAL =   6
gcggattgggtaataaaatgcatattgagaatatgacggccttctggcccctctgggtctagggcggtaaagcatctaagggttgttgccaaacgggccatggactgagcggggttttcatatttgatgaaaaagagcctaaacactaactgatttgggagaggttgggtaaagaaaaaggagcattaaccttggctatgccttcagctccagccacctctctaagaggaaactgttgggcaggtgggggagggctagacgcagaacaaaactgtaagccagacccggtgtgaggaggggaagtgatagaaggattatagggtgggggagcagaggctggcgaagagttgggacctggctcagcctggcgaggagcagcctgaggagaagaggagaggtcagatgagtctgtggaaaaggaggattcaaaggactcagagcttggggtggagactgaaggaacagacaggagagaaagaagaaagttttgggatgagtctcatcaggagcagagattaggaagggactgaagtgtaaaagaatgcctggacatcagatacctcagaccatttgtccattt

SEQ ID NO: 9520 - DNA, 569 bp, Homo sapiens
  MAP TO AC005006.2; EXPRESSED IN PLACENTA, SIGNAL = 2.1; EXPRESSED IN BRAIN, SIGNAL = 2.8; EXPRESSED IN HELA, SIGNAL = 1.9; EXPRESSED IN HEART, SIGNAL = 1.9; EXPRESSED IN BONE MARROW, SIGNAL = 2.8; EXPRESSED IN LUNG, SIGNAL =   2; EXPRESSED IN FETAL LIVER, SIGNAL = 1.6
cagtttgggcttagctggacctcagcatttaacacatcctattgtgattgattatatgtttgactcctcaccagacaagatctccgttaattcagtcattcgttcacacattcattcagcgcatactgagccttttctgtgtcaggcccagtgttagcctttggggaacgtgcaaagcatgagacaagtctaatccctgccatcctagagcttatgttctagggaagggggacagacaaaagaaatggttaggtgctcccacctgaaatctcagcattttggaaggctgaggcgggaggggaggatcgcttgagctcaacagttcaaggtcagcctgggcaacatagggagaccccatctctacaaaaaataaaaaaaattaaaaaatagctgggcatggggaagactttctgaagaccaagaggacacatgggagctgaaactcgaaggaagaaaaggagctggcaggaaaggagtgggggacacacattctaggcagcaggaagtgagccttcggaggtcctgcctgctccagctctgtgccccaaggggtctcttggagcacagtc

SEQ ID NO: 9521 - DNA, 567 bp, Homo sapiens
  MAP TO AL021707.2; EXPRESSED IN HEART, SIGNAL = 3.9; EXPRESSED IN ADULT LIVER, SIGNAL = 9.6; EXPRESSED IN FETAL LIVER, SIGNAL = 7.5; EXPRESSED IN BRAIN, SIGNAL =  10; EXPRESSED IN PLACENTA, SIGNAL = 6.9; EXPRESSED IN BONE MARROW, SIGNAL =  14; EXPRESSED IN LUNG, SIGNAL = 6.2; EXPRESSED IN HELA, SIGNAL = 8.8
ctaaggctccgagagcttccaaagggagaaacacttagtgaatagtggtggctagtttcatccaacaaggtttttctgggaatgattgggtgaagaaaaccttgtagtttcacatttattgagctgtggactagatgctttacatgttattatatttgctctttacagtggccttaggatgcaggtagtattagctccgttttatagattgaaaaactgaaactcagagtggttaaattctttgtccaaggtcacacaggagtggttagagaatggggtctgattgccaaatggcttacccaagtaaatggttgacacttcaatgttattggcagacatttgcaaaatgacggtgctaatactcctcgtagtggtaatggtgatggtgctttgttgatgaagatgagtcttgcaggcagttttcattcccaaatattcaatatagctaagacaagatagaacagaattcttttgttatcctggaagccactggcctgtgggtggagggcatggaggtatatgaggtatatgtcttgtgggcttccagatgccaactgcaggtagaag

SEQ ID NO: 9522 - DNA, 562 bp, Homo sapiens
  MAP TO AC007539.8; EXPRESSED IN BRAIN, SIGNAL = 2.1; EXPRESSED IN PLACENTA, SIGNAL = 1.9; EXPRESSED IN HELA, SIGNAL = 1.5; EXPRESSED IN BONE MARROW, SIGNAL = 1.9; EXPRESSED IN HEART, SIGNAL = 1.6; EXPRESSED IN LUNG, SIGNAL = 1.6; EXPRESSED IN FETAL LIVER, SIGNAL = 1.5; EXPRESSED IN ADULT LIVER, SIGNAL = 1.4
agctttcttggcctttcctgccactcaccagcccaggagtggacaggactcgtgcctcatacctgagccaaggtgggcataggatgttgctgggtcacatgagtctctgctgtgtctggaacaaaaggaactctgacttcttgagaacctactatgtgcctaggaactagaccatttacctacattaggtcattacagtaggttaatgacatacattgcatagaggaaaaacagcagctcaccaaaacaggtcatgtgcttgagtctcccaggctaataagcagtagagccagaatttgcacccaggacccctgactccagcacctgcgctgtgaaccactgttttagcaccagcttctctctgggatctctatagggaagatgaaaacaagtaaacaatgtgggctgcattctcaagggagtcgtgatcagaatgggagtcaatatagcacataggaaagaggcaccagcaacatctgcagaggggtgtggcatgccgtgtcccatatgctcagaggtttagagtggaatatggctagttggggtgggtttcctaggtgaa

SEQ ID NO: 9523 - DNA, 576 bp, Homo sapiens
  MAP TO AP000354.1; EXPRESSED IN PLACENTA, SIGNAL = 1.9; EXPRESSED IN BRAIN, SIGNAL = 2.1; EXPRESSED IN HELA, SIGNAL = 1.8; EXPRESSED IN BONE MARROW, SIGNAL = 2.3; EXPRESSED IN LUNG, SIGNAL = 1.9; EXPRESSED IN HEART, SIGNAL = 1.5; EXPRESSED IN FETAL LIVER, SIGNAL = 1.6; EXPRESSED IN ADULT LIVER, SIGNAL = 2.9
tcttcccactttcaaatgactgacttgttttcatctaacttcctcagctctgggaaaggaaaagggatgtggttttttcaaacagttaattgtaatatgtccagaagctcaaatttttatctagaaattctttaaactttattaacaggctactagaatctgtattctgtgattatacacaaatgagttttcattgactttaaaagcagagcaaaagtcacatgtatactcctacacactgttggtgtagacattctggaggactgttaggcaacaccttccagtttaaaatgccgtattcatagactctgaagttgttatacttagtactggcacaagtattatgcataaagatggtattatacatagtaccatctttatatgtattatgtataatataagatagtgttatgtataatactatctttacagactctgaagttgttatacttagtactggcacaagtattatgtataaagatagtattatgtatgaaaaactcttatgtgtatgtatacatatgtatacatatacagagttttcagtatagcattgtttggaaaaatggaacacct

SEQ ID NO: 9524 - DNA, 565 bp, Homo sapiens
  MAP TO AL022319.2; EXPRESSED IN BRAIN, SIGNAL = 2.7; EXPRESSED IN PLACENTA, SIGNAL = 2.6; EXPRESSED IN HELA, SIGNAL = 2.4; EXPRESSED IN LUNG, SIGNAL = 2.4; EXPRESSED IN BONE MARROW, SIGNAL = 3.1; EXPRESSED IN HEART, SIGNAL = 1.3; EXPRESSED IN ADULT LIVER, SIGNAL = 2.9; EXPRESSED IN FETAL LIVER, SIGNAL = 2.6
tggtgagggaaataacaggcaaggacaacccagcagaatcggcaccagatctgaggcaggcacagggtgtcttcagagcccagaggaggagaacaatagcccctgccttccaaatgccagtgaaggctttctgggaaaagtgacatcttagctaaatcccaagaatgagcaagattcagacaaatgaataggaatggaggacggaggcaaggggagggttttccctgctgagaagtatgcaaagcatgagagaatatggtgtttgggggaagcagttcagtgtaccaagctggaacatcagaggctgggggaagaaaggaggttaaaggtgaggctgcaggggtgagcacaggccaatgtgggaaggagcttacctgccacactaagttgttagaactttatcctaagggagcttctcagaattgtgactgatcagagcttcattttaggaatgtcctaagtctctaattctgttttgacccctgattgcttccctaacttgctcacctccagtcctttctttacaatgcattcacagtcatcttcctacagcaaggatctggct

SEQ ID NO: 9525 - DNA, 572 bp, Homo sapiens
  MAP TO AL008723.8; EXPRESSED IN HELA, SIGNAL = 1.6; EXPRESSED IN HEART, SIGNAL = 2.9; EXPRESSED IN LUNG, SIGNAL = 1.4; EXPRESSED IN BONE MARROW, SIGNAL = 1.3
ctagtggccagcatgacaaggtgagactctaatgctaccactctctgcatcctgttctaggcttatctgactttgcctgcccagttgctccgtgccaggaggaggagccacttattccatgctggaggctggagctgggggcaccgcagctcaccttgctgtggttggtggtggcgatggagactacagagcaccagagcggtaggagagcagcaatggagactgcagagtgccagagcagtaggagggcggctggctgctgcctgggcaagggcaggcctgctgtggtatccaggtggtaggagccttgtagggtggaccagtggactgagggcaacaggaacagtggttgtattggcatcagtgctagtggtggcagcagcagcaagtctggaggttgggaaggcgggtaggagcgctccagggctgacccgcccggctgggcctggcctggggtgggtaggaagctgtgggcctctggggcagcggtggaggcgcagcctggggaaggaggagtctcctccgcttctcctgcagaatctggagggcgccctcctcctggtaggtcctga

SEQ ID NO: 9526 - DNA, 555 bp, Homo sapiens
  MAP TO AL008723.8; EXPRESSED IN FETAL LIVER, SIGNAL = 2.4; EXPRESSED IN BRAIN, SIGNAL =   2; EXPRESSED IN PLACENTA, SIGNAL = 1.6; EXPRESSED IN HELA, SIGNAL = 1.8; EXPRESSED IN LUNG, SIGNAL = 1.7; EXPRESSED IN HEART, SIGNAL = 1.5; EXPRESSED IN BONE MARROW, SIGNAL = 2.4; EXPRESSED IN ADULT LIVER, SIGNAL = 2.2
tccaacagcttcctgctacctccgttccagatcctgacttccagttctttccatggccctaagtatgtttcataaattttattgaaatataacaaacagttcagtgaattttcccaaagtgaacacactcatgtaaccagcatcaggaaccagaacgttaccagcacctgaaagtcatgttgttggccagtcactaaccttccccgggatgaccaccatgctgaccgctaacactgtagattttggttctgcctcttctcaggcttgatataaatggaatccctgtctgtcctctttgtgtctggcttctttcactcaacattgtgaaattcacccatattgttgtatatgactgtagatattttattctcattgccatatggttgccttaacctttaaaaaatctgacgtcatcacgaagatctgaatgtatggttttctttccacccacccccaacctggctcgttgtggtctcacttgtatctattcctgcctctattcttacacttctccatgctattcttcatttaccctgccaaactgacctttccaaa

SEQ ID NO: 9527 - DNA, 585 bp, Homo sapiens
  MAP TO AC007841.1; EXPRESSED IN LUNG, SIGNAL = 3.6; EXPRESSED IN HEART, SIGNAL = 2.8; EXPRESSED IN FETAL LIVER, SIGNAL = 4.4; EXPRESSED IN ADULT LIVER, SIGNAL = 3.7; EXPRESSED IN PLACENTA, SIGNAL = 3.7; EXPRESSED IN BRAIN, SIGNAL = 2.2; EXPRESSED IN HELA, SIGNAL = 3.1; EXPRESSED IN BONE MARROW, SIGNAL = 2.5
agccatgctcgacttctctcatgtcataatctttgcaaaggcagtttcagtgcctcattgatactttgatggtccatctccaaatcacctgctcaccatctcacttacaggcatttattttatctgtagtgggcatttgtggtgatatatgctagtagcactacatgtattcacatctctaaggaggagcttccaatttcctacaagaccccagtcactgtcaaggctgcataattcaggggtggttacttcacttaagtgtatccattcacaatgtttgaacaggaaaagagtctctgtaacagctgcctcaggaaacgtgacaatgaggagccaaagtcagtgaatgaggaagaagccacacaaaggtataagggatggaaatgcctcgttagtttcaaatctgtggctccaacagtttttgcagcaaagctgctgagctgtgcttccagagtgtattaaataagacacaggcttggctatcataacatagaagtcctagagctctgaccaactagtggattggttccccttcaaataagtgttcttcctggtccaatcagctgtggcaggagcatctggtat

SEQ ID NO: 9528 - DNA, 565 bp, Homo sapiens
  MAP TO AL022312.7; EXPRESSED IN ADULT LIVER, SIGNAL =  13; EXPRESSED IN FETAL LIVER, SIGNAL =  30; EXPRESSED IN PLACENTA, SIGNAL =  20; EXPRESSED IN BRAIN, SIGNAL =   6; EXPRESSED IN HELA, SIGNAL = 7.4; EXPRESSED IN BONE MARROW, SIGNAL = 5.8; EXPRESSED IN HEART, SIGNAL = 6.3; EXPRESSED IN LUNG, SIGNAL = 6.6
ctgtccttcgtctcctcctgtcccttccttcctgccgcagcctcttccctcaatcctactgaactccttcctgggagaggttagggcgggaatcgccaccttccagggcacggagaggcgaagcggaattcagcaccacggacagcagcccggcgcgcagttggcgtgcggttggctcaggaagttattctgtaggttttgtaggtttatgacccgctgttgggtagcaaaaggccttgaacgctgactcaggaggtcggggtgcagggagctggatcgggggtgctgatgatgtcggaggagctccttgtggatctggagataattttcctataaaattccctctctcctttgtttccaagacccttgaccacacttgcaccttcccctaccacctctccctccacagttaataataacatacatgtgtctgtgtgtactcgacagggaatgcgaacgtatttgcgtgaatctgtaccttggtgtaatagtgtatttaatacaagtagtatctgggtgtacgtgtgaggatgtttgtgggatttgtgggtctgtgtgaacgtgt

SEQ ID NO: 9529 - DNA, 571 bp, Homo sapiens
  MAP TO Z83840.7; EXPRESSED IN PLACENTA, SIGNAL = 1.3; EXPRESSED IN HELA, SIGNAL = 1.8; EXPRESSED IN BRAIN, SIGNAL = 1.7; EXPRESSED IN HEART, SIGNAL = 1.6; EXPRESSED IN LUNG, SIGNAL = 1.4; EXPRESSED IN ADULT LIVER, SIGNAL = 2.1
aagagaaggattgggtggtgatccaggcactatggtggggaaaccggagacaagtagcaagtgaaatttatagagaatttgagatactatgttgggagaatcagaactggattggaggtgaacatagagcagaaattcaggcatcagagaagagagaccaaagaaaggatggatgtgaggatggcacaaatatcctggcacccgaggctgagatccaggaacaattaaaaggtgaaactgatgtggagactcagagcaatgagccacttagagaagaggatggtacagacattcagtcactagggaggagagaggttaaaggtgaggatgataaagacacccaggaacttgggaggaaaaatcagggtcagttaggaaatgaatttagtggaaagattcacataccaaaggggaagaatcaggaacatattagaggcgaagatggtgcacatacccagatatctgagtcagggaactggggcaaattaacaagtcaaattgatggagaaatgcattcagcagaatggaagaaagatcagcagattggaggtgagaatggggcagaaattca

SEQ ID NO: 9530 - DNA, 550 bp, Homo sapiens
  MAP TO Z83844.5; EXPRESSED IN FETAL LIVER, SIGNAL = 1.5; EXPRESSED IN ADULT LIVER, SIGNAL = 1.9; EXPRESSED IN PLACENTA, SIGNAL = 1.7; EXPRESSED IN BRAIN, SIGNAL = 3.4; EXPRESSED IN HELA, SIGNAL = 1.9; EXPRESSED IN BONE MARROW, SIGNAL = 2.8; EXPRESSED IN LUNG, SIGNAL = 1.9; EXPRESSED IN HEART, SIGNAL = 2.2
aagctctcccctctctgtccccaaggacgagtacttggctgacctgtaccactttgttaccaaggaggactcctatgccaactacttcattcgtgtgagtccaagaccgggccccagccatccagagttcaggggctgaatgccagagccaggggccactggggctctaagatggtggagggggcgtctgctctcaaggaccctatagaaggctcagcttcccccacttccgctcagggtgtcccttcatccccacagctcctggagattcaggccgattaccatcgcaggtcactgagctcgctggacacagccctggctgagctgagggagaaccacggccaagcaggtggggacataggcccggcgataccacacccctgaccctgccctgctcggggcttattgagaagctcgcacttcatcctgaaaggtagcaggaagctgtggatgggttctgagagctaggctcaatctgtgatggagaggcagctctggctactgtgtggagggtggagtgaagcgggcaggactagagccaggcctgtga

SEQ ID NO: 9531 - DNA, 587 bp, Homo sapiens
  MAP TO AP000352.2; EXPRESSED IN HEART, SIGNAL = 4.1; EXPRESSED IN BRAIN, SIGNAL =  10; EXPRESSED IN PLACENTA, SIGNAL = 6.6; EXPRESSED IN BONE MARROW, SIGNAL =  12; EXPRESSED IN LUNG, SIGNAL = 6.7; EXPRESSED IN ADULT LIVER, SIGNAL = 3.8; EXPRESSED IN FETAL LIVER, SIGNAL =   7; EXPRESSED IN HELA, SIGNAL = 6.8
tcctgttggcctccaagtagctccctaaagaaatcagctctcagctcctgagtctcaaggctagatacctggactgtggacagtccctggaggttccatccagggtgcctgtttccctggaaggctctctccacccagccccataggaagtttaggctaagtctggctctcctacatcaaagaggctttccatctgtctcttgctctgcctcagaaccagggggcccagaaccccctcctcacccaaaagcccctccacagaaaaacagcttgactctgacttcttccatctggccttgctctattaggcgaggcaggagaacaaaatgcctctgccaccaggcttggcagcttttgtctatagagcacaggcagacccagccggtcctctgagggctcagcacaggccattagcacacaaagttgcatgtcagcccatttgaacctagggccacaggatcccaaagatcctgtggaggaggtaggactggagccaggcctgtaggctgttcctgaggccagaattccctctccacacatactcaaagactccccagttcacttgggcagcatgagagtggtgcatt

SEQ ID NO: 9532 - DNA, 561 bp, Homo sapiens
  MAP TO AC008166.1; EXPRESSED IN LUNG, SIGNAL = 1.7; EXPRESSED IN HEART, SIGNAL = 1.6; EXPRESSED IN FETAL LIVER, SIGNAL = 2.1; EXPRESSED IN PLACENTA, SIGNAL = 1.3; EXPRESSED IN HELA, SIGNAL = 1.2
cttaattctccactttgtaagataaccttattaagtccttgacccttcagttccctcctacccatattctaatttgttactgggtcattttactttttattttttcaaaaagttaataacatttatattctgttctgtaatttcagccagaaaggttatatgctgcaagtaccccttatagggtacttgcagggactccaagtcttgttccctgtaagttaaagaagttacaatcattttcagtgccttgtccacccaaattttctgttccaggatggtagtcacatccataaggggaaaaaacttactttaactattgaaaacacaatcattatgaatgtacctaatgccactgaattgtacacataaaatgaccaaaatagtaaattttatgttgtatatactttaccacaataaaaaagtcaccaagcaaaaacaaaacaaaacaaaacaaaaaacaacaaagaaaaagaaaataaaagatttaaagcatgtgaggtacaattaaacctgctggtaacttattctgatggcattccttctctctcaccccatctcacc

SEQ ID NO: 9533 - DNA, 577 bp, Homo sapiens
  MAP TO AP000353.1; EXPRESSED IN BRAIN, SIGNAL = 6.3; EXPRESSED IN PLACENTA, SIGNAL = 2.8; EXPRESSED IN HELA, SIGNAL = 4.2; EXPRESSED IN LUNG, SIGNAL = 4.6; EXPRESSED IN HEART, SIGNAL = 3.2; EXPRESSED IN BONE MARROW, SIGNAL = 6.5; EXPRESSED IN FETAL LIVER, SIGNAL = 3.5; EXPRESSED IN ADULT LIVER, SIGNAL = 3.8
tgcaaagacaccttttgtgctgagacctgtattgtaggggacagcattggtctggaaggaagggagagcacccagacagagcaagcagcccaggaaggtggccattctgggctggcattggtgtaggcgagggccagagagggccaggtatgctgggcaagcaggggtgacctttagggcctagctgtgaggactcagtcaggtcctcctcctagaggtctcctgctggctccccccagcatcctcagtggaatgtttgaagaaccagaatggacagttggccaagagatgggccctggcttggcactggctatgtgcaggaagtggcacttcacagaattctgtttgggggactagatacaggggtccaagaaggtaagtgctgtgtccccacagtgaccggtatgctcatgtgacttggttgatttcctcagggcacagcaggtgacacaggtctgggagggagggagtctcatcatctggggctttggtctgtagttcaaggtgcagtgcatgctagcaaacgatggccagctccggcttccctggctgttggtgccacactggagcctggctt

SEQ ID NO: 9534 - DNA, 564 bp, Homo sapiens
  MAP TO Z97055.1; EXPRESSED IN PLACENTA, SIGNAL = 9.4; EXPRESSED IN HELA, SIGNAL = 8.6; EXPRESSED IN BRAIN, SIGNAL =  14; EXPRESSED IN BONE MARROW, SIGNAL =  16; EXPRESSED IN HEART, SIGNAL = 8.4; EXPRESSED IN LUNG, SIGNAL =  11; EXPRESSED IN ADULT LIVER, SIGNAL = 9.5; EXPRESSED IN FETAL LIVER, SIGNAL =  10
ggtgacagactgagaccctgtctctaaataaattttttttaaaaagaaagaaacaaaagaaaatgaaagaaagatatatgtcagaaactcagatctatattaaaaaaaggaagagcatttgagaaagggcaagtgaaggaaaaataaacatatatgcacctaacaagagccccaatatacgtgaagcaaaaactaactaaattggaaaatagatacttcaacaattatagttagaaacctcaatatccacatttaataatgggtagaataactagacagaagatcaacagagacatagaagatctgaacaccaccacaaaccaactagacctcacagacaactaaagaacacatccaaccaacaatagtagaatatcattcttctcagcacacatggatcattctccagtataaaccatatcttggaccataaaacaagcctcaatacatttaaaaggattgaaattatcagagtataatctccaaccatacagaatgaaaacagaaattgaataattcacaaatacgtggaaattaaacaacacactcctaaataaccaatga

SEQ ID NO: 9535 - DNA, 565 bp, Homo sapiens
  MAP TO AP000346.1; EXPRESSED IN FETAL LIVER, SIGNAL = 1.9; EXPRESSED IN HELA, SIGNAL = 2.4; EXPRESSED IN BRAIN, SIGNAL = 2.7; EXPRESSED IN BONE MARROW, SIGNAL = 1.9; EXPRESSED IN LUNG, SIGNAL = 2.1; EXPRESSED IN HEART, SIGNAL =   2; EXPRESSED IN ADULT LIVER, SIGNAL = 1.6
acccccagctctacactgactgtttatctgtggagtctggggcaagttgattaactgctcagtgcctcagtttcactagctctaaagtggggcgagtaattgtgcctatcataaatgggtatgattttggcagtgccgggggcatcatactgaaaataagtgccttgtacattgtgggtacccaggaagccagtttacagcccctcagaggagacccatcagcaggcatctgagggagcctggagccctgcatcctgcaggtgcctggggtcttgtgcccaggagaagctgctccctcactccacagcagtctacagagcaccccctgaccaggggtacacctgtttgtgcaggtgtcagcagggagccctgggcctctctgggctctgactttccctggcaggactgtagagggcccagaaccctgccttctcccagccaggcccttccctcccttccccaaactcacggcctcctcaccgctctctgcctcagattcaggactaatctcactatgtccttcatccctgtttgcatcaggggctgcaagaagctcagctcacct

SEQ ID NO: 9536 - DNA, 578 bp, Homo sapiens
  MAP TO AP000346.1; EXPRESSED IN LUNG, SIGNAL = 1.6; EXPRESSED IN HEART, SIGNAL = 1.8; EXPRESSED IN FETAL LIVER, SIGNAL = 1.7; EXPRESSED IN BRAIN, SIGNAL = 1.8; EXPRESSED IN HELA, SIGNAL = 1.9; EXPRESSED IN BONE MARROW, SIGNAL = 1.7
acattgaggtaccgtgacccccaaacctgacacatccagttctggccccgaccccagtgcaaaccaggagaaagaccgccaagacaacatcctgttgcacaagagggccccggcccacacagggtggggaggctcagcccccagccctgctcccttttctattgaaagcatcaggacttgaacccagggctgacttcacagccacagctggagactgtcccacccccaggctggctatcaatgagcaggtcagcatctgccctctgtccacgtctagaaagggccaggtggagctggtgttctcaggccacaagccccagctgccccagaggtcattcattcattcactcactcactcattcacctgacagctgttggtgaatacctcaatgtcccaggcaccctaccccctgctgaggatgcagcagagaatgagacaagatcccgtccctcaaggagctgacattctgctggggggagcctgaggattaataaacaagtataaaatcagtagaggtacaagtaccatgaggaggaagggggtggagacaggagaaagaccggctttgctgttagag

SEQ ID NO: 9537 - DNA, 572 bp, Homo sapiens
  MAP TO Z97055.1; EXPRESSED IN PLACENTA, SIGNAL = 1.4; EXPRESSED IN HELA, SIGNAL =   2; EXPRESSED IN BRAIN, SIGNAL = 2.2; EXPRESSED IN HEART, SIGNAL = 1.8; EXPRESSED IN BONE MARROW, SIGNAL = 3.5; EXPRESSED IN LUNG, SIGNAL = 2.1; EXPRESSED IN ADULT LIVER, SIGNAL = 1.9; EXPRESSED IN FETAL LIVER, SIGNAL = 2.7
ccataaatccctctggctcctaggacattatggagacaaagaagctgaagaccagcaaactcaacagccagtccaggagatgctcaggcaaaggcacagaggagccacatgaaagcagagggtcaaggttgtggccaaaacgaaaagcaagggccaggagagtgatagcaagtgaggaatgcgccaggacttagcgtggctgttgagtggaacctgagtgcagattaaaccagagccaggaccaggtggatcccgaagaggacacgctgagaaccaccctgggcttacagagactcctcctcaaaacagagagcgcctcttcccatgaagccatgggacacagtcaccaaggatggagagatgagacccagaggtcatccaatctggccttctcccttgacttatagagacaatgaggctcagagagcccaagggttcgactggataagagcatgaacatgagcgtcggttggagggtctgagggcctgtgaagaagagagaggctgacaaatcagccatcagaccaagctcattgcagaagaaaacaattaggaaataggagtgctggggt

SEQ ID NO: 9538 - DNA, 575 bp, Homo sapiens
  MAP TO Z82188.2; EXPRESSED IN FETAL LIVER, SIGNAL = 1.6; EXPRESSED IN HELA, SIGNAL = 1.3; EXPRESSED IN HEART, SIGNAL = 1.4
tccagaatcatagctgcaagggatccgggaggaagggtggctttagcttgctagcctctgcagtataggagggtgaggcggggtagaatggaaggtgagtgagtcgacctgggccctagcccactcctaccctgcctctctgcatcacttggctagggccactccctccccttttcaatatttttccagttgtctccttgcactggtttgggctcctctgtctcactccatgtgtcagcacactcatactccactgcagacaagcagcagggcttgctcgggcagggctttgttgatctcactcagcagggtgtcaggaggcagcctgggactggagctgcagcccagcagtgccatcagaaacctgggcccttctgtgttttggtcccatcaccctcagcacttgctctgcccctcatgcttaccgttgagagctgcaagttggctgcacctgccagcctcacacccactttccaagcagcagggaagggggccaaacactgccttctcctcatgagaatttccttttattcaggaagggccaccctctccagggaccctggttggccagaaag

SEQ ID NO: 9539 - DNA, 567 bp, Homo sapiens
  MAP TO Z97055.1; EXPRESSED IN BRAIN, SIGNAL = 3.5; EXPRESSED IN PLACENTA, SIGNAL = 2.3; EXPRESSED IN HELA, SIGNAL = 1.7; EXPRESSED IN LUNG, SIGNAL = 1.2; EXPRESSED IN HEART, SIGNAL =   2; EXPRESSED IN BONE MARROW, SIGNAL = 1.5; EXPRESSED IN FETAL LIVER, SIGNAL = 2.9; EXPRESSED IN ADULT LIVER, SIGNAL =   2
cacccgtttcaaatacagcaccaagaacggagaccccttccacagcagcgaccctcctgaccaccactttgggtgctttccagccacataaatgacagacaaccccggtccccacggggttggctggctactggcccccgactctccatcgcttcagcgaatgtgggtgagaaaattaggcagtgaagcaataaagacctcacctttactccctcagatacacggagggatgaggtggacagacacgcaggcggccgtgccaacctgatccgagtgaaacagggctacactcgcaaaatggtcctcccacggctgagcgcctcaggtgcacagaacaaactgaatgataaagacccggggattttagaaatttactattaagcatctgcttgccagcattagtaggctatcacttcaggaaacaaagtaaggctgtggaattcagctcaaattccgagcgcaactcggtcctttggtggccgactctccacccactgcatgcaaatgctcctgactgcattagactcccacctgccagcctcaccaggcagacttccctcagcacat

SEQ ID NO: 9540 - DNA, 555 bp, Homo sapiens
  MAP TO AC008009.4; EXPRESSED IN ADULT LIVER, SIGNAL = 1.6; EXPRESSED IN HELA, SIGNAL = 1.6; EXPRESSED IN PLACENTA, SIGNAL = 2.3; EXPRESSED IN LUNG, SIGNAL = 1.2; EXPRESSED IN HEART, SIGNAL = 1.7; EXPRESSED IN FETAL LIVER, SIGNAL = 1.5
gatgatgctgaaggtgatggtatgtgaaaaagtgaaacttgggtctagtggggtactagaattgtcaaaaccccatccaactctgtcacatataacatctgatgtttcagggtagcaccatcacaaagttcagaacttctatactctccttgcaggaagcaggagaatgggtccaaagcaatcacttagaacttcatggatatttggaaatttacccttccctaagtgtggctctaggtttcaaatagaagcagcaaagaattaacaaagtcttacagattttggtaggctttgaaaaacttgttttacttgaggctccatatgcttcatggcttgcaaaacgtaacggcctaaaaccaaaagcaacagaataagtaaactaaatctccaatctccccgacttcacttccatccccaaaccataaacaaacctgcaaatcctgcagcagcaatggtcagtccaactgctaccactgtactggcctggtaagggggagaagagtaaatatttacttctctaattcccaccctttctcattttgcccattcttccat

SEQ ID NO: 9541 - DNA, 558 bp, Homo sapiens
  MAP TO AC004032.7; EXPRESSED IN PLACENTA, SIGNAL = 3.6; EXPRESSED IN BRAIN, SIGNAL = 2.5; EXPRESSED IN HELA, SIGNAL = 2.6; EXPRESSED IN HEART, SIGNAL =   2; EXPRESSED IN LUNG, SIGNAL = 3.5; EXPRESSED IN BONE MARROW, SIGNAL = 3.5; EXPRESSED IN ADULT LIVER, SIGNAL = 3.6; EXPRESSED IN FETAL LIVER, SIGNAL = 3.6
caactccacaggtgatggggagccggtaggtgggaggccccagttctgtgctcttgttcctgcttccaggggctggtgatgtctcatgctgaggagcagtcagacccagtgggcagaaagaatgggggatacatcaggctttgccatatgtcggctgtgctctcaggcaggtcccttctttctctgtacctcgccctcctcatctataaaatgggtccacagcggtagctgcttcacagcggctggagggtgctgtgggtgacatggcacatgctccaccctccaacctggccccccgccctttcgatggctacagaatgatggaaggaatccaaacactgtatgtgagtcaggcttcttctctgaccagactccagagggtgggagtggccaggggttcttggtacgcaggaatcgagggttcagaactgggaaagatgggcctcgcgtccactccaacctattagcagctggggaactcagcacatcaccaccccttcgaggcctcgttttccccatctgtaaatggggctatctcctgggatgctgacgaggtta

SEQ ID NO: 9542 - DNA, 563 bp, Homo sapiens
  MAP TO AC002472.3; EXPRESSED IN LUNG, SIGNAL =  12; EXPRESSED IN ADULT LIVER, SIGNAL =  10; EXPRESSED IN FETAL LIVER, SIGNAL =  14; EXPRESSED IN PLACENTA, SIGNAL = 6.7; EXPRESSED IN HELA, SIGNAL =  11; EXPRESSED IN BRAIN, SIGNAL =  13; EXPRESSED IN HEART, SIGNAL = 6.7; EXPRESSED IN BONE MARROW, SIGNAL =  18
caaggccgattcagactccgacctagagacggaaggtgctcggggcaggggccaggcccgtctcctccccttgggggcttctcccgcaggggttgtgggaggtgggctggcgccgccgaggaggcaggagacctctgtccagcagggcacgtagccctctgcggggcgtctccagccccctgccctctcctcggcgctcctggcggcatcaggaactttaccatgagaaggcgcttctagaaggaggttaaaatggaaaatcccgccagacagtgcaccaaaggctgtcccgccctgaaatgcaatcagagctgggttttcccaatccacaggtaaaactaatataatggatgtatagaatttagaactacttccggttttttccctggggaaaatattcacaaaacatttgtggtctgcaatcaggttaaaagacatagtgtgccatttgtcatcagacaggtagaggcctgactctggcaggattagctaccactagctgtgagactttatgtattcatttattagagccagggtcttgctctgtcacccagctttcagtg

SEQ ID NO: 9543 - DNA, 558 bp, Homo sapiens
  MAP TO AC007253.2; EXPRESSED IN HELA, SIGNAL = 1.3; EXPRESSED IN PLACENTA, SIGNAL = 2.6; EXPRESSED IN LUNG, SIGNAL = 1.7; EXPRESSED IN HEART, SIGNAL = 1.4; EXPRESSED IN FETAL LIVER, SIGNAL = 1.6; EXPRESSED IN ADULT LIVER, SIGNAL = 1.7
ggaagttaaaattgccacctggccactttgggctcctcctacctctaagtcaataggctaagggagttagtgttggctgggtggacccagactatcaagatgaaatcagtctactactccacaacagagataaggaagagtatgcacggaatacaggagatcccttagagtgtctcttaaactgccatgccctgtgattaaggtcaatgggaaactacaactgcccaattccaggcaggactacaaatggcccagatccttcaggaatgaaggtttgggtcactccaccaggtaaaacaccatgatctgctgaggtgcttgctgaaggcaaagggaatacagaatgggtagaagaagaaggtagtcaacaatatcagcttcaaccacatgaccagttgcagaaactaggactgtaattgtcatgagtatcccctccttattttgttaagaacacttttgtgcatgtatacacttatactaagaaagtaacttcattttatttcctttttcctttaacatgtggcataagattgacttcatatcagcattcaagtgttg

SEQ ID NO: 9544 - DNA, 568 bp, Homo sapiens
  MAP TO AC008272.1; EXPRESSED IN LUNG, SIGNAL = 2.1; EXPRESSED IN FETAL LIVER, SIGNAL = 1.8; EXPRESSED IN ADULT LIVER, SIGNAL = 1.5; EXPRESSED IN PLACENTA, SIGNAL =   2; EXPRESSED IN BRAIN, SIGNAL = 2.7; EXPRESSED IN HELA, SIGNAL = 2.1; EXPRESSED IN BONE MARROW, SIGNAL = 3.2; EXPRESSED IN HEART, SIGNAL = 2.7
gaaaagaaagcctgccagcttctaggaataaagggaggctctttgggggcatgctcaggggcaaacctcaccaaccttccagtgtcccctgcctcagagtaggcagcagtctctaaggctgattgctctgactactatgagaagggggatttttcaacttccagatctcttaagtaacaatgcccagacagaaaaattagtcaaagcaccttcaggcccttaatgttcaattttaatgagatgccattcctgttgcaccgtgaggaagcaaattgaagctctggctcactgcaaagaaagttatctgtccattaaagacattactggctggatctgtaagtataaagcttaccagagttgcctaagatgccacaatcgggaaaatgacagtggaaagtggtataaaggtgagggaaaagaaagaagggccagaaatgaagagagaaaacagacagtagtgcaattgcaaggctacaagactcagtagtacagggaaaatgaaattaaaaagagaggaatttatttgcatcgtgttaaaggattttggatttgacctggaagaaacatc

SEQ ID NO: 9545 - DNA, 584 bp, Homo sapiens
  MAP TO AC006427.13; EXPRESSED IN FETAL LIVER, SIGNAL = 1.5; EXPRESSED IN ADULT LIVER, SIGNAL = 1.7; EXPRESSED IN HELA, SIGNAL = 1.4; EXPRESSED IN LUNG, SIGNAL = 1.5; EXPRESSED IN HEART, SIGNAL = 1.3
aagcacagaaccacaatgggcagggtccttgtgttgagctttcagctgcctttcacttatctcactttttattttatcccttaacactagtatttcatcctgcattgagacactctgggtttccatccccttttcttctgaaaacagtcataaaatagtcatattaaagaatagcatatatctatatagatacatgtattggtattgttaccgtaggtaactagtcagacatgagcaaggcaggcgagggctccccactaccaggaatgtcaggcaaccattagaagatggtcaggcagctgtcaactgtctctcgaaaataataattggtcacagccagcgccacggaaaggcaatctccctatagatagaaaaaacctaaaactggtgatcagcagcttcccagtacaatctcaggagttgagtgagtgggctcgagcatgcaaactaagaggcaaaatggtggagtttaactgatatatgaccttccaggaacattccaccagtaagggaagaacacctcaagcgagcatgcgtacaactacagtaaacacactgcatgctcccctcccaagtactagcag

SEQ ID NO: 9546 - DNA, 556 bp, Homo sapiens
  MAP TO AL035682.16; EXPRESSED IN FETAL LIVER, SIGNAL = 1.3; EXPRESSED IN BRAIN, SIGNAL = 1.7; EXPRESSED IN LUNG, SIGNAL = 1.6; EXPRESSED IN HEART, SIGNAL = 1.7
aagagcaaacggagaaagccaaggtcctgagacagaaatgggcttggggtgtttgaggacagagggaagccaggtgttgctatggccaagtggcagggagagagtcaaaaaagctgaggtcagagccagatcacacaggctcttgaaagtcacaaaaataatcaaaaatagtaatacaaataatataataatcattattattattgctgctataaataagatgccattttccaaaacaccaagcttttctaacttaagaaacaccacgctgcccctctcctactgtttttccactgctctccaatttgtcatcttgctggagtggaaactgccaattccattttagtcgacagctataaaaagaacattggagctggtggtgccgatgaccaaactcggggctaagattagcccaggaggctgtcacctttccttaatgtgagaaacagctgggattccccttccttggaaaacttcaactgttccgccccgccccgcagagcccttgctggccaaatgtccatggagatgggaacggggatgagttttggaaaaa

SEQ ID NO: 9547 - DNA, 583 bp, Homo sapiens
  MAP TO AB016897.1; EXPRESSED IN BONE MARROW, SIGNAL = 3.1; EXPRESSED IN LUNG, SIGNAL = 9.6; EXPRESSED IN ADULT LIVER, SIGNAL =  12; EXPRESSED IN FETAL LIVER, SIGNAL =  15; EXPRESSED IN PLACENTA, SIGNAL =  10; EXPRESSED IN HELA, SIGNAL = 6.8; EXPRESSED IN BRAIN, SIGNAL =   5; EXPRESSED IN HEART, SIGNAL = 4.5
gaagtcagtcctcccaacccctgccactgctttatcaactaagtttatataatatttgaaatcctttgttttcatttcaacagtgttcacagcatcttcaccaggagttgattccataagaaactactttctttgcttattcacaagaggcaactccttgtttgttcagcttttatcatgagattgcagcatttcagtcacatcttcagaccccatttataatcttagttctcttcctgtttcacctcatcttcatgtacttccttcactaaagtcttgaacagctccaaatcatccatagggtttgaatcagtttcttccaaactcctttcactattgatatttttccttatcccgtgaatcatgaatattctaatggcatctagaatggtgaatactttccaggttttcaccccagatttatcagagaatcactatctatggcagctatagcctcattaaatgtgtttcttaaataataagacttgaaagtcaaaatcactccttgttccatgggctgcagagtgggtgttgctttagtaagcatgaaaacaatgttaatcttgtacctctccaccagagc

SEQ ID NO: 9548 - DNA, 589 bp, Homo sapiens
  MAP TO AC008166.1; EXPRESSED IN FETAL LIVER, SIGNAL = 6.6; EXPRESSED IN ADULT LIVER, SIGNAL =   4; EXPRESSED IN PLACENTA, SIGNAL = 5.9; EXPRESSED IN HELA, SIGNAL = 2.7; EXPRESSED IN HEART, SIGNAL = 2.5; EXPRESSED IN LUNG, SIGNAL = 3.6
tcttacgtataggaaatgaccaccaaaaatattgttagaaataatatgtaaatactgtaaagctacaggatacaaattcaacaggcaaaaatcagtagcatttatagacactaagaacaaactatctaaaaaagaaatcaagaaataattaaggagaggaaaaatcagtatactaaaacttaaaatactttgatgaaagacattgatgacacaaatatatgaaaacatattccatgttcatgaattggaagagttaatattattaaaatgcacatactacccaaagtgatctaaacacttaatgcgatctctatcaaaattctaatatcatatttcacataaatacaattaagcctaatttacataggaaaccaataaaaccctcaaataaccaaggtaatcatgagttaaaaaaagaaagctgaagttattgtactacataattacaaacttctgtataccacagagctatgataattaaaacaccagaaatgaacccacacacgtatgatctattgcctttcaataaacatgccaagaatactcaatggaaagaaactgtttcttcaataaatagtgttggaaaagc

SEQ ID NO: 9549 - DNA, 590 bp, Homo sapiens
  MAP TO AC008022.1; EXPRESSED IN BRAIN, SIGNAL = 1.6; EXPRESSED IN PLACENTA, SIGNAL = 1.8; EXPRESSED IN LUNG, SIGNAL = 1.4; EXPRESSED IN HEART, SIGNAL = 4.5; EXPRESSED IN FETAL LIVER, SIGNAL = 1.7; EXPRESSED IN ADULT LIVER, SIGNAL = 1.6
  unsure 562
atccagctctcttccagcctaagaatctcttcttaagaggctgctctatgccagctcttgccttgactgccccatttctttgaagacactagttttctctctgtcccctcaccttgcatgccctctgtcctgcacgcataatctggtttccacatccctccactgaattccctccagtgacatcagtgacattttcaatgaccttctctgcagttgtctcctaggcctccctccagcattgatgctggtgacgccatcctttcttggatgctctttctcagggtctcctgtcactggggcctcatgatagtcttaccgattgtcctgcccttgccactggctcctatgctgtttcctcttcttccgattcttccattgggtccccagtgacctctgactcctatcattccttgcatatgggctgaacctagtgaactgctttcaatgaataaaagagagaaaaagagatgggatatcacttctgtgattgggctacaaaagactataatttctgtcttgccagcagcctctctgtctctgtctctgcctctctctttctctnttccattggtgaagccagttaccatgtc
